United States Patent Application Publication US 2026/0103690 A1 - sequence listing, part 75

SEQ ID NO: 368217 - protein, 358 aa, unidentified
MRAEHYIAMDTHSYTTDICVKTRANAPGRKWHVATTIPAIRAVIESIRRPRHLTFEEGPLAGWLYRNLKDDADRTMVCDPRKNAWVAKGGDKSDPIDANKLADLLAGGFLKPVHQTEDLSREVFKQLVGRYHERVGRRVSEGNKIVGWLRRWGVVVTAEAFEEKAARPELLKRLPPEAELAPVRLGLELMMGSYDQAVRQEARLRRELIRRSKTEEFIVRLEALPGISWIRAATFFVYVDTPWRFASKQALWKYLGIGLTRGSSGIGPQALRVDRAVNRRLKSMILGAAKTILERNAPDGDPFAAQYRRWKEAGLSPRNARRNVARSLAAVAWGMWKTGGAYEPARVGVTAAVTGSSE

SEQ ID NO: 368218 - protein, 359 aa, unidentified
MKKVSKGKGSVKAKPFVTVGLDLGDRSSHYCFLEDGEVIEEGKAQNTEESLRRHFGDGARYRIALESGTHSPWISRLLESFGHEVIVANSRKIAAITSSESKNDRNDAEWLARFASADPKLLSPIHHRSVERQQDLNLLRSRDALVRARTMLVNAVRGLVKSAGFRLPSCSPASLATQALASVPMELKEAATPLLKQVGLLSEQIKEMDRKVEALREKYPEIDVLRTVPGVGPVVAAAYVLTLDSPHRASHRSAGAFLGLRPAQSQSGDSDPERRISKTGNVYLRSLLVQSAQYILGHFGPDSALKRWGLKLAAGGGKRARKRAIVAVARKLAVMLHSMWHSGKPFQPFPQPINATQVA

SEQ ID NO: 368219 - protein, 461 aa, unidentified
MQKHYDVQPQVGSSKEIAGLPVIRPEVAGIDLGSEQHWVCAPTVDRTAREVATFGATTPELLRMAEWLKERNIESIAMESTGVYWIAPHEILEAAGFEILLVDTRQLSRVPGRDKKTDAKDCEWIQRLHSCGLLTGSFRPAEAICMLRTLVRDKAILVAESGDWLRRMQKSLDQMNVRVHRAVSDIDGVTGMKILRAIAEGERDPINLAKLRDWRCRKSEAEIADQLTGHWRQDHLFSLQQSLQIYDAIQQRVADYDREILRKLTELQRDEYRQQPPPNVNNPNKARAIKKRGEEPMREALYRVSGVDLTSIDAIGVETVLVVMSEYGPTLSDFPTEKQFVSHTTLAPHRPISGGKPVKKKRRSTTSTRVAAALRMAALSLRNSPTALGAYYRKIARTRGGDVAVFASARKLATLIYRLLRWGQPYVDQGAEAYEKRYREIRIKSLKAKAKELGYELVAGT

SEQ ID NO: 368220 - protein, 430 aa, unidentified
MNNPEQQAGSWLEQRGFGGLDWATEHHSVVVVDPQGRVLEDFEIEHSALGWKKFRERMQPYGSIPFGIETSQGAAVEQLLEAGMQVYPLNPKSAQSYRQRKAPSGVKDDRLDAWSFADACRVDGQGWKALRPEDPLIKELRLLCRDEVVLIEQRTAFINQLRHALAEYYPTALEAFEDWGALSAWMFVQRFPTPQALKEAGKRQWEKFLHSRHLWRTESGPRRLELFAHATDLCGSVPMAHAKSQLALSLVSILFALEKQLGIYRQRIEELFGRHPDHDLFGSLPGAGPKIGPRLLSEIGDDRGRFGEEPQPLQCLAGTAPVTRRTGKARTNPPRWPCHQRWACDKHLRHAMHLFAEQTLTRCTWAEIYYHHHRQKGHSHADSLRRLGQRWLKIIFRMWMDRKPYDAMLHNQNQLKHGSWVLQLNPVQDA

SEQ ID NO: 368221 - protein, 343 aa, unidentified
MRHYAGLDVSVKETSVCIIDESGKVCRETKVPSHPEDLARALHDRAWCLERVGREAGPLSQWLFSGLAATGLPVVCIETRHTKAFLQAQVNKSDRNDARGIAQMMRVNLFRPVHVKTLTSQKRRALLTARKLLQEKALAVDNDIRGLLRNFGLKVGPIGASRFETRTRELVDGMPELAEIIDPLLEARRKLRELFAVLHRKLLVIVRDDTVCRRLMTVPGIGPVVSMAFTATIDVPARFKSSKAVGAALGLTPILNQSGESKRLGRVSLCGDGMTRTLLYEAAQVMLTRTTKWSWLKAWAMKVAARRGIQKAIVALARRLAVILHRIWVSGTDFRWTREVQST

SEQ ID NO: 368222 - protein, 396 aa, unidentified
MSSTATPGPNRVVIGMDPHKRSATIEVMAPDEGIEGGGRFGTDRDGYAAMLTYARRWPDRVWAIEGCAGIGKHIANRLLTDGEEVVDVPPKLSARARVFATGQGRKTDATDAHSVALVGTRMTGLRPVVNDEQLAVLRILVDRRRSLGEEHTRLVSQLHQLLLELIPGGAKRDLSARQAKALLAKVRPRDAAGKVRRRVAAELIADLERIYARKKAANKELTELVAATGTGLLDLPGIGPSGAARLLVEVGDITRFPNKAHFASWNGTAPIDASSGDQVRHRLSRTGNRQINRVLHIMARVQMRNPSKGRDYYDRKRADGKGPMEAMRCVKRRLSDIVYQQMLNDAITHAVTGPGGQQGNDSDSSATGSHPHTGSSDKPLPGPANNKPKTPLRKAG

SEQ ID NO: 368223 - protein, 409 aa, unidentified
MEILIERCAGLDLHKQTVVACAITPGPTGAPYKQTRTFGTLTDDLLALGDWLAALGVTHVAMESTGVLWKPVYNLLEERFTLLLVNARHVKQVPGRKTDVRDSEWLADLLRHGLLKPSFVPDRAQRELRELTRYRTSLVQERSAEVNRLQKTLDGANIKLAAVATDLLGVSARQMLDGLVAGSTDAAALAELARGRLREKLPHLERALTGQVGPHQRFLVARQLAHIDFLDEQIAQVSAEIAERLRPFEDVVDRLDAIPGIARRTAEVLLAEVGTDVARFPSAGHLASWAGLCPGHHASAGKEASGRTRQGNPWLRSALIEAAHAASRARGTYLQAQYRRLAGRRGVRKAAVAVAHSILVSVWHLLAHACAYVELGATYFQQRDHTRIERRLIRRLEQLGHTVHLAPAA

SEQ ID NO: 368224 - protein, 369 aa, unidentified
MKHSIIFVGLDVHKDSIDIALADDGRNGEIRFYGAIGGDLDSLDKAIRKFRRSGAELRFVYEAGPCGYEIYRHLTAQGFHCDVIAPSMTPKKSGDRIKTDRRDALSLARLYRAGELTSVYVPREDDEAMRDLVRGRGDAVNATRKARQRLSAFVLRHGFRYSGRNAWSVAHLRWLAGIKMPHPAQQITLQEYINSIEESSERVDRLTGQISNLIPAWRMAPVVAAFQALRGVAAIVATTMVVEIGDLRRFENPRQLMAYLGLVPSENSSGQTTKRGGITKTGNSHARRALIEAAQTYSFPAKVSKELRKRQEGLPREIKEISWKAQVRLCGRFRKLMTKGKNRNRTVTAIARELSGFMWAIAKEVPMPA

SEQ ID NO: 368225 - protein, 405 aa, unidentified
MEVIIERVCGMDVHKDNITACIMTPEGKEIQTFSTKTVFLIQLMDWIKSHGCTHVAMESTGVFWKPIVNLIEAEEMEFLVVNAQHMKAVPGRKTDVKDAEWIAQLLRHGLLKASFIPDRNQRELRELVRYRRSIIEERARQHNRIQKVLEGANIKLGSVVSDIMGVSSKDMLHAIANGEDDSEKLANLARRSMKKKKDDLILALNGYVNPHQRMMLKTILTHIEFLTEQIENLDQEVAQRVSVYQENIERLDSIPGIATRMAEQILAEIGTDVEKQFESAARLCSWAALVPGHNESAGKRKSTRGKKGNKYLKSALTEAAHSVGASKNYLGALYRRTAARKGRKRAGIVVAHAMLRISYYLLTRKEMYVDLGEDYFDKQKQASIVRNSVRRLENLGYTVNISEAS

SEQ ID NO: 368226 - protein, 346 aa, unidentified
MMIIGCDFHPSWQQVSVLDTETGECEERKLVHASGEAKLFYQQLGAAALIGMEATGNSQWFIELVEDLGHEIWIGDAAQIRASYVRKQKTDKRDAAHILKLMVEGRFPRLWTPDREQRDLRQLVLHRHKLVEIRSRVKNELQHLSLNKGMQKKRTLWSQAGQQMLRELPLKPWAACRREDLLGLLEMLDQQISKLDVAVQQAAEEHPQAKLLMTQPGVGPNTALAYVLTIGDVSRFRRGKQVASYLGLIPREESSGGRQQLGAITKQGNRMLRSLLVEAAQIAVRFDPGFRKQYLHRCHQKPKGVAKVAAARKLAVRLYWMLRRQVGYPEIVRIESSPRVPLVGAS

SEQ ID NO: 368227 - protein, 381 aa, unidentified
MRNVCGLDVHKDNVFVCIDKEKGEKIQFKTGILTKDLDALRDTLVANDVTEIAMESTSVYWMPIWRVLESDFKLYLVNPYAIKQLPGRKSDIKDAEWIATCLRKELIRGSYVPDSTIQQLRQYNRRIFDINKQSVYIQNKIDAALQRCNIRIGNYISNVRAKSYCQIVDMLSEGKTSPELLIVKVHKRTVNKWGRETILAALEGVVNKTDCRILKQLKEELDMLRRHKAECLVMLREICMENYKEQLLDIQTIPGIGEQGAMQIIAETGVDMKAFMTAAMLVGWAGLKPRNDESNGKFKSRSTTHGNKYLRKILIECAWGASRTQGCFFNKFSYHQTMVRKKNRQKVQVAIARKILVVIWNILEKGVVYNDVLEKNKTKDK

SEQ ID NO: 368228 - protein, 386 aa, unidentified
MDQATPSTASANTLHCALELSKKSWLLAIQFPDREQPSLYPIAGGDAERLMAKLTAARDRWAKTSGALPMITLCYEVGYDAFWLARFLKARGIECLVIDPGSLQVSRRGRRVKTDRVDVKTLLRTLIAWCRGERHVWSLVRIPSIDEEDLRRSHRERSRLVRERTAHINRIKGLLFAQGIRDINVKSRYKTLAVDKLVTADGHGLPPRLAGEIAREIRRLAMVQEQIAEIERERDAAPTTCEATERKRDLLSQLKSVGPTISAFLSREVYYRQFANQRQVGSFLGLTPSPYDSGEEERCQGISRAGSGHARAVMIEAAWLWIKHQPKSALTRWFVGRTAGQSKRVRKIMIVAVARKLAIALWRYVELGLVPQGAIINPPMTRKARS

SEQ ID NO: 368229 - protein, 397 aa, unidentified
MYIVGIDIAKRKHEAAVIDGEGSVIIKPFSFTNNCSGYNRLLAMLAKVKLPLDEVSFAMEATGHYWLALFTRLQKEGFRVQVINPVQTNSIRSFYIRQAKTDPRDALLIAEVIRFGHFSESTLHPENIYELRELCRGRHAIVSMQADVKRKVVALLDQVFPEYETAFTNLFSDTSMAILQTCPTPKELSEMPLEELCHLIEVSSHKRFRMAKARELQELARNSFGFAMAGDVFSTMIRLYAKHLDFLKQQVREMDRKIAEIMETLDTPITTITGIGPTLGAYILSEIGDISRFSSAAKLAAYAGIDPTMRQSGEYNGVRNRMSKRGSPYLRHAIWLAASSAVLHDPALKLYFQKKRDEGKPYMASVGHACRKMVSIIYAVMRDNKAYTPYIPNEISA

SEQ ID NO: 368230 - protein, 425 aa, unidentified
MPTETSEFQGFAFIDWASKKHQLCLFAADGRIRGERTFEHSGAGLAELCQWLRDKSGAAPARIAVGLEVSDGPVVETLLEQGFAAFHLNPKQLDRFRDRYSPAGAKDDRRDARVGAHALLTDRAAFRRLAPPDPLTIQLRAASRLVQQLTAERNALTNRLRDQLWRYYKQALDLCDELAADWFLAFWLLAPTPAEAAKLRVGTLARFFKRHGVRRCTPEEAQAILRRPALTVAPGTAEAAVDSCRSLVTRLQLLNRELKRVRRQRDAFVAQLAKAAAPPAAAQAAAAEPTLDDVTIIDSAPAAGDGLLAALLAEAPEAVARHDRHALRTLSGVAPVTRQSGKLTLVHRRLACNPHLRLAVFHWARVAAQIDDRWRQRYAALRARGKSHGCALRIIADALFRILCAMLKNRTLYDPARFAPKSATA

SEQ ID NO: 368231 - protein, 412 aa, unidentified
MERYYLGLDWADEAHAVWVVNERGEKVWAGEVMQTAEGLAEFGRRLYEWGRSGVAIWAALEKPEGRIVDFLLDHGAVVYPVNPKAVDRARDRFRVSGSKSDPFDARVLADFLRTDHGHLRPLVPNSAQAQELKLLTTDYQRLLQQQTRLLNQLTATLKEYYPRVLEMFSDVNTPVALDFMARCPAPLALAELTPEAWQDFVREHRLRKGRTAELWERAKAPQVAIPEHVVRAKARLVRVLVAELRIVRTAVADYYAEIERFFASMPAAEIARSLPAGKSGVVIPMVWAEIGDVPSRWESFQHLQAQAGSVPVTERSGKCQLVQFRFACNKRLRHALDLFAFISLRYSAWASAYYRQQRARGHRHHQALRALAAKWLKIIFAVWSRHVPYNEERHLATINRQTKFQPIPISGS

SEQ ID NO: 368232 - protein, 399 aa, unidentified
MSITRYVGLDIGAEAHLLAAVDPEGAVVQRPARLTEDAAGYAQLDALLARLGPPETTLVVCEATGHYWQNVVAHLWAGGWRVAVVNALRTSRYAAEDLVRTKTDPADALLLAQYGREKRPAPTPVGDEATRELTELVRLRARLAQDFADRVRQLHRAVDLTFPEFTRHVRTLDSELAAGVLARHPTARALAQAAPGKLARLVYDGRHKVGDELARALVAAAKASVGAHHGEAYARQVRYACEDLTTLRARLRELEGELRGLVERHAVGQHLVTIPGVGPITAACVLAEVGDFARSPDAATLASYAGLVPALRHSGKRTPLRAGLYPVGNARLRRGLYMATLRAVRCNPWLRAFYHGLVQRGKPKLLALTAAMRKLLAAMHSVARRGQPFTLPPAPEPAT

SEQ ID NO: 368233 - protein, 353 aa, unidentified
MKTYYVGMDVHRASIVIVVMNGAGKIVMQSVIETGAERVRGYLKQLRGKVYVTFEEGTQANWLHEVVRPLVTEVVVCDPRHNKLMQSGNKSDRVDAQKLAELLRLGSLKAVYHGDNGVRALKELVRSYDCLVSDTTRVMNRLKAIYRGRAIGCAGHEIYCQDRRQQWLEKLRERGAKQRASCLYQQLAALKPLRHEAKRLMVKEARRQPAYPWLLSVPQFGSVSVAQLLAIVGTPHRFRSKRQFWTYIGLAVVTRTTADHEVVNGVLRRSQRPVSTRGLNRNHNHLLKRVFKNAANGACHGGPFKAAYELRVTQGMVPSLARLTIARQLAAITLAVWKRGEQFNPERMKQQAA

SEQ ID NO: 368234 - protein, 270 aa, unidentified
MRMVALDLGGKKTSYCEVSKGTVIQRITVSELESLRPLLGPEQPPARVAIEACREAWHVHDRLVEWGNQPVLVDTTRRQRVGIGEHGRKNDRIDAEKLARALEEGRLPQAHVLSPHRRELRDILGVRSALVETRARMTTTIRGLVRERGGKIPSCETENFARRVRSRKLAPEIAELIEPLLALVESTDPKITATDEQLAGLCAQEPIVAALTTTPGVGTVVAACFVSVIDDAKRFHRAHQVESYVGLVPKENSSGRGKRRSLRPATRAGP

SEQ ID NO: 368235 - protein, 496 aa, unidentified
MGWLFDPVEEISKPFVTGPNPILIFYSGGRDADREDVNRKEKKEWTRRLQSEDPGLEVVHPHAAGIDVGNSAHYVAVRPDRDPESVRRFQCFTADLYRLADWLKSCGVNTVALQSTGVYWIPLYDILEERGFEVYLVNARHTKNLPGRKSDVQESQWLLKLHTYGLLNNSFYPPSAIRTLRTYWRQRAEHVEGAATCILRMQKALTQMNLQLANVISDLSGVTGQKIVRAIVAGERDPRKLAELRDARIQASQEEIAKSLEGNWRPELVFVLKQEVDMYDTYQQRIAECDQQLQKHLATFANNTTPGQPSSPKGESKKKKKKPTQNAPAFNLSHELERISGVDLTRIDGIEVMVAQTILSEVGLDMGRWKTEAHFSSWLGLCPDNRLSGDRVLRRGTRRVINRAATALRMAATTLIRSRSYLGAQYRRLRTKLGAPKAITAMAHRLARLVYRMLKYGQQYVDKGMEYHDQRYRNQQIQSLQKKAAKLGLQLVPALA

SEQ ID NO: 368236 - protein, 346 aa, unidentified
MTIVEDVCVITGGVDTHTDTHVAAALDSLGGLLGVQEFPATAAGYAGLLGWLEKFGDLALAGVEGTGSYGAGLARYLAAHGVRVVEVDRADRQDRHRNGKSDPLDAVSAARAAQSGRAAGAPKGRDGAVEAIRSLMVAKRSARHERTQAINQARALILTGPDELRARFAGKRAAGLAEAVAALRPRPGDAADYAVRIALRELGRRVEFLDAQIERLDDLIVPLVTARAAGLLGLYGVGPDTAALLLIAAGDHPERLRSEAAWAHMCAVAPIPASSGKTRRHRLNRGGNREANHALWRIVITRMSSHPATRAYVDRRSKEGLSKKEIIRCLKRYAAREVYRHLRDGG

SEQ ID NO: 368237 - protein, 326 aa, unidentified
MIKHKNVFGVDISKDYFDVVDSEGQHDQFTNNDAGFALFSTALPKRALVVMESTGYYHHRLAEFLVANKIKTSIMNPLPIKRFRQMKFSKIKNDRVDALMICEYAKQNKVPLYKAKNKITLQCRQLHRLSELYQKQSNGLKTKLKGEISMGSPSPSVIRSLKRQLVVLANEILTIEKELEVLINKRYPGQMKLLEGIPGLGPKTSSYLITATEGFMKFDTAGQLCSFSGTTPTVRESGTSVRGKSRITKMGNPRIRSLLFLCSFSACKYNAACRELFNRIVEKGKSKKLALLAVCNKLLRQAFAIVKNETPYSQSHHSKPAMPMMK

SEQ ID NO: 368238 - protein, 307 aa, unidentified
MTAAGIDVCKASLDLAVDGQPGVAGFANNRAGITKLVKRLQALKTTRIVVEATGGYEEPLLEACCDAGLWIARVNPRQARAFANATGELAKTDDIDARILALMARLFADRLRPYVAPPPWQRELRDWLRRRGQVVVLLQAQKQQAAMAPASVRKLVARTIAALVRELATIEKTMKALINEHATPALRSSKGLGPVFQATVLALLPELGHLDRRQIAKLTGVAPMNRDSGQGQGKRRIRGGRAPVRVALYMATLSAVRWDPVMKAHYQQLRARGKLGKVALVACMRKLLGIINARRRDELRDEALALA

SEQ ID NO: 368239 - protein, 387 aa, unidentified
MPQPNDLSRSLVAVDQNSTIIAVVELSHSSWLVAGMLPGIERQPRKKLEPSPERLLALLHRWRDEAVRAGRTITRIALAFEAGRDGFWLARWLEARGVEAHVIHASSLAVSREHRRAKTDRLDTELLKRGFLGWLRGERGHCSMARVATIAEEDAKRPNRERDCLVGERTRIVNRIKSTLARLGIRNFKPTLRKAAERLATVHTPEGMPLPPNTLAELQRDMARLSLVVSQIKEIEDARQKRLEQQHETGSHTMVRLLARIVGIGVETADMLVHEVLSRPMRDRRAVARYAGLTGSPDESGAQRREQGLARAGNARVRRGMIQLAWRFLMFQKQSALALWYRARTADSRSGTRKTMIVALARKLIIALWRFVTTGEPLEGVVLRPAS

SEQ ID NO: 368240 - protein, 367 aa, unidentified
MKKISTVTTKKVEKNASQKLTIGLDLGDRFSWYCVLDEAGEVVLEQKVATTPKAMKEVFGGMPRSRMALETGTHSPWVSRLLSELGHEVIVAHARNVRLIGESRKKDDRLDARTLARLVRIDPQLLAPVKHRSAQAQADLMAIRARAGLVRARTSLINTARGVTKSYGERLRGCNPRNMNAEKAQELSPELQAALGPLLGEIESLSERIREYSERIEEIAKRSYPEVGRLKQVKGVGTLIALTYVLTLEDAHRFGKSRDVGCYVGLQPGRRNSGQSEPQLHISKEGDPYLRTLLVQGAHHILGPFGADSDLRRWGLKLAERGGKNGKKRAVIAVARKLAVLLHRLWVSGEAYEPLRNQREVALPAAA

SEQ ID NO: 368241 - protein, 322 aa, unidentified
MSLPKPLCVGIDVSKATLDIAASSVIEQFSVGNDADGFDSIIAELRTREVALVLMEATGGLEAAVASTLQVEGFEIAVVNPRQARDFARAMGYLAKTDRIDARALAQMAEVINRHPERNRFIRALPDAERQVLNAMVVRRRQLIAMLVAERNRLSPAHPQSRKSINIIMKTLDNELARIDEGMNNHIRNHFKELSERLSSIKGVGTMTVAALLAEAPELGRLSRRGISALVGVAPVNRDSGTMRGRRTIFGGRAGVRTALYMAALVATRFNPVIKAFYMRLVSVGKPKKVALVACMRKLLTILNAMLRKNEEWNESYHHVAP

SEQ ID NO: 368242 - protein, 388 aa, unidentified
MNKIIYIGMDVHSTNFTLCSFEPGYGFEADKIFGQTQIKEDIFNSTVKYINKLKSMRPDVDVVCGYEAGCLGYNLHRKLNAKEIESVILAPTTMAVARNSSKKKNDYRDAITIAKCLASSAYKAVYIPDEKDEDVRDFIRMRDDHKTALKQIKQQLNAFCLRHGHHYDKTKWTGLHLNWLRKLELSKFQRETVEEYLATYETLTSKIAALDVRIEDIASEERYAEKVNKLKCIKGIKTHTALSFVCEIGDFNRFKSADKFAGFIGLVPGECSSGNTERMLGITKAGNRHLRRLVVEISNTYRRGTVGRKSAALKERQKDMPKDVVAYADKAINRCQRKYQRMMFKGKNSNQAVAAVARELCCFIWGMMTGHHSRTAQAEASVYRSELD

SEQ ID NO: 368243 - protein, 368 aa, unidentified
MNEVTTRHLGLDVHKATINVALADSGAAPVLYGTIANEPGAVRKLVGQLKRGCKLVAAYEAGPTGYGLHRQLTELGVECVVIAPALIPRRAGDRVKTDNRDAITLARLLRSGDLTPVWVPGQEDEALRDLVRARFDAKDDLRRAQHRLSKFLLRQSIQGPAGTTNWSARYQSWLNTLQLERPGSQLVLEDYRTTERAARDRIRRLEADLKSCAEKSPRLDLVLALQVLRGIAFLSAVTIVAEVGDFRRFADAPRFMSFTGLTASEYSSGQSRRQGGITHAGNRYLRHILVQAAHNARYTPALDGTVKHRLKGAPADLVELSLRAQTRLHRRYRHLDRRIGRAKAVTAVARELAGFVWAVGQRMEASAA

SEQ ID NO: 368244 - protein, 407 aa, unidentified
MIFVGVDWAEAHHDVCVLDAEGKVLGRKRILDSLAGVGELHALVADHLDDENNVNEVVVGIEKDRGLIVTALVAAGYQVFAINPLAAARYRERHHVSGAKSDPGDAKVLADLVRTDRHNHRAVSGDTSLAEAVKLLARAHQNAIWSRQRQVNALRSSLKDYYPGALEAFGTDLADRDAVAVLSIAPTPAIGRTLSRAKLISAMKRAGRQRNLEERAEKIQSALRQEQLAQPPILENAYGITTKTTVAVIAQLNATTAELEAALSEHFEQHPSAKIIHSLPGMGTVLGARVLGEFGDDPNRYADAKSRKNYAGTSPVTKASGKSKVVLARHSRNKRLAGALDQWAFCSTNFSPGARAYYNELKARDKHHRKAIRQLANKWVGILHACLENGCLYDEKIPWPTTEKLAA

SEQ ID NO: 368245 - protein, 403 aa, unidentified
MARFAGIDWASAEHAVCVIDERAKVLHRAMVAHTREGLVDLVRALRRFGAPADLPVTIERPSGLLVDTLVEAGFQVVPIHPNAVKASRPRYAAAQSKTDLGDAFLLADLLRTDGHRFPALHPLSDETRALRALVRTRDDLVAERVGLANQLRALLERFWPGAVAIFADVDSPIALAFLRRYPTPQSAERLGAKRLRGFLARNAYCGRRPVPELLARLRSAPAGLASEREAEASGELVLALAAVLEPLVAQIQRLTAAVERALEAHPDGSLIASFPRAGRVNAAQILAELGDDRARFVSEEHLAAEAGVAPVTKASGKSRSVGFRWACNRRLRLAVTCFADNSRHASAWAAGVYQRARARGCDHPHATRILARAWLRVLWRCWSDHRPYDPLRHSAAALLLATP

SEQ ID NO: 368246 - protein, 477 aa, unidentified
MLDLRRAVGTEVVHRLGANKPAYKLDPEFLEHPRLSPRVVIGPGARFLEFLFTGLHADDATQEKVMELLHRRCCGLDVHKETVVACLRLVSNGKVTTEVRTFQTTTADLLRLSEWLAANDCTHVAMEATGVYWKPVWHILDDGEFELVLANAAHVKNVPGRKTDVNDATWLAELLVHGLIRASFVPDTQTQEMRNLLRTRKQLVREQSSHVLRVQKTLEDANIKLDSVLSDLMGKSGRAMIEALIVGETNPAKLASLADRRVKASPEELREALRGRVTKHHRFLLRLHLNQIDALDAAMATLDAQVAANLGPFRTAVDLIMSVPGIKNLGAQAIVSEIGIEMSRFPSDAHLISWAGICPRNDESAGKRRSNRLRKGAPWLKTTLVQCAWAAVKKKNSYLQAQFYRIKARRGPNKAIMAVAASILTAIYHMLKDGTMYQDLGRDHFDRRSTDQQKKSLVKRLADLGYAVEIKPLVASA

SEQ ID NO: 368247 - protein, 348 aa, unidentified
MLADQLDYIVGVDPHRDSHALAVVHVVTGAVVFESTVIADSDGYGQALRLVDQHAPGRRAFAVEGTGSFGAGLTRFLTVRGERVLEVGRLRRERRPGGKTDALDAVRAARSVLTQQRPATPRAGGERQALQALVAAREGAVNAKRAGLCQLRDLLITTPEPLRSELRPLTRARLLQRLAATRPHSRHDAELRGSMLALRSIARRVLQLTAEERELAAEIETITRKLAPQLLEQPGVGPHAAAQLVLSWSHQGRISSEAAFARLAGAAPIPASSGQTIRYRLDRSGDRKLNRALHMILVTRKRSHPATIAYIQRRIQEGKTRREANRCLKRYLARSLYRLLEHGAPLAT

SEQ ID NO: 368248 - protein, 320 aa, unidentified
MDAVLGIDIAKAKFVAALLTADGRIRHKSCPNTPAGFTELATWLRRQGIGRVHAGLEATGTYGEALARWLYDAGHTVSVINPAIIHAYAEVQLARSKTDQIDGELIARYTATQHPPAWTPPPPEIRHLQALVRRLEALQGMRTQEANRLAAGALVAAVRASIEAVLAHLEAQIADVQQQIRTHLDQHPGLRAQRDLLVTIPGIGAATAAILIAELFDKRYANARQAAAFAGLVPRVIESGTLRGRSRLSKIGPGRLRKALYFPAVTALRWNPTIRQVRARLASKGKPKMVIIGAVMRKLIHLAFGVLKSGRAYQPTCAQP

SEQ ID NO: 368249 - protein, 361 aa, unidentified
MTGSGLTSAAARAMAAAPAAVQVKVGVEAAGHYHRPVLDFRWPDGWEVLELNPAQVAEQRRVQGRRRIKTDVIDLEAITELVLAGYGRPVTDRDVVIGQISAWAVHRSRRVATRSATKNQLLGQLDRAFPGLTLALPDVLATKIGRLVAAEFADPARLAGLGVNRLIRFAATRDLQLRRPVAERLVAAARDALPTRDAVISRRILAADLVLLGDLDDQITVAETALASLLPRSPYATLTSVPGWAVVRVSNYAAALGDPKRWPGPRQIYRASGLSPMQYESAHKRRDGAISREGSVALRRALIDLGIGLWLNEPAAKNYAHGLKDRGKPGGIVACALAHRANRIAHALVRDHATYEPTRWA

SEQ ID NO: 368250 - protein, 419 aa, unidentified
MTRKNNSKVIKIVHPICCGLDVHKESISACVIFPDDRGEEQYEIKEFGTFTDDLTRLREWLLVYACPVVAMESTGVYWRPVHNVLEDSVQVVLVNARDMKNVSGRKTDIGDSRWLAGLLRHGLLRSSFIPPQTVRQWRDLTRLRKKYVQSVGDYRKRTHKLFESANIKIDSVVSDLFGVTGRNLMQLLVADRKLTLADIQSCVRGKLRGKEKELFRSIQGFFTEHHRFILKTILETISMLEAQIETLDHQIRLAMRGYKPLLDRMKEAPGISDVSSCDILAEIGPTLDSFPTDTALVSWSGLCPGNNESAGKRKSGKSPVRKHHLKAIMLEVAWAAVKKKGSYFKDKYYRLKARRGAKKAIVAIAHRILLGIYHVIKDGATFRDLGEDYLMHRNKQQKVFHLRKQALALGFDLVPQAAQ

SEQ ID NO: 368251 - protein, 456 aa, unidentified
MNQYFLGIDASKGYSDFVMLNAKKQTIIENFQLDDTFDGHARLYEVLHSFNKENPEATIYAAVESTGGYENNWFQSLLTFQASLPIKTAHLNPLGVSHNSKADLKRNNTDKISARNVAEYMIAHPEKVSYQHQDSLASLRKQWGFITMLTKQSTQLLNQLESLVYNANPEILTYCKDGSPQWVLKLLTSYPTALRLSRAKVKVLARIPYISVDRAKQLIATAKKSVASANDKVTEQLIVATVKQIVHLKKTIKTQSEILAKECQIPEVALLKTFNGIGDYSAIGLMLQIQSVSRFLTSKKISSFFGIHPEYKKSGDGIYKYRMSKKGRKEGRQILFIVAMSAIQTNPLIRDVYQQAVERGMEKMSAMGLCMHKILRIVYGMLKHNKAFDPQIDLKNRQKTSSRKNNVVQDEDRRYQDFDFNAPISRRQKMKRKERKQSQKVSNVEYGISEASVPVS

SEQ ID NO: 368252 - protein, 526 aa, unidentified
MASSNKHSKLRACDEGRYTSDGLKNVTLDDGTRVITSPSNDIKRPVCGAVDVHKSVLMAAACVTDGESLSAVFYVRQFTASNSDIRLMAEWFASYGVQDVCMESTGKYWIPVYDILEHNGIKPILTHPKYVKQAKGKKTDFRDAIHIANLFRMDLVVASFIPPADIRDLRELCRYRLKLTYIRTSEKNRFQNSMTISKVRLDSVFTDPFGKSASDIMSYLIHTDPDEVSDEKILSFVRHGVKASPEEILDSIHGYEFIGAQRDKLEVIQTHMDDLNKCIGMIDEKLSYYRLKYSKVIRHLVTMIGISEGSALYILGEIGADMSVWRDSDSLASWAGLSPANNSSAGKKKTTKIGKGGHYLKPLMVQCALAAIKSTKKHPYFYYKYLTLKKRRGHKKAIIAIARKMLVAIYHMIRDDKDFAPIDYEQVVTRKQSQKELNLTNIIEFLGEHGVDPETIRTVETQCSQAGQAGEGTKTSKPKKSPQKKQPKSKTAATPTEQKPAKRRGRPPKSPQTKSQSSTQPAAVTA

SEQ ID NO: 368253 - protein, 410 aa, unidentified
MEVILGCCAGLDVHKDSVEACVRRTSAGGKVGHEVRHWGTTTRELEEMSDWLSSLGVSHVAMESTGVYWKPIFNILEERFEILLANAHHLKNVPGRKTDIRDCQWIAQLLQHGLLRGSFIPPRPQRELRDLTRQRTQLVDEVSRVSNRIQKVLEDANVKLGSVASNVVGASGRLMLEAIVAGQDDPVQLADLAQRRLREKIPQLEQALYGKLTEHHRWMLRLLLDQLKATEQFIARLDERIAELARPLQPVLEKLDAIPGVDRRVAEVLMAEIGPDMTPFPSDAHLASWAGISPGNNESAGKKRSGKTTKGSRWLRQALVQAAWAASHKKDSYFQAHARNLMHRRGRKRGLVAVAHSLLIVIYHMLKEATAYRDLGTQFLDQLRAKHLIQFHVRKLQSLGLQVDLAPKTA

SEQ ID NO: 368254 - protein, 344 aa, unidentified
MGEVSTIGLDIAKSVFQVHGVDVAGAVVIRKRVSRVKVLGYFGELPPCLVGIEACPSAHHWGRELQALGHTVRLIPPSYVKAYLKRSKNDANDAAAICEAVTRPSMRFVPIKTKEQQTALMLHRTRQLLVRQRTMLSNALRGHLAELGIVSAKGRNGTAELLGIIADGADSRISAAVRGILDVLARQYSAIGTEIASIDKSIMALHRTCEASRRLAEIPGIGPVGATALVAEIGDWKSFSSGRSLAAWIGLVPKQHSTGGKDRLGSITKQGNRYLRWLLVVGAMAVIRYARKHGTERRPWLGRLMERRPTKVAAIALANKIARMAWAIMVRSERYKEPKLMLAA

SEQ ID NO: 368255 - protein, 322 aa, unidentified
MNKYKETFGVDISKDVFDVHGSTTGHHQYKNDEQGFKKFLKRLPDDCLVAMEATGYYHYRLAQFLYKNEVVVSVINPLIIKRFIQMKLAKIKTDKSDAKMICEFALINQVPLYTALTDVQSECLQLFRVLDNFIKHRTATKNKMHGEEVLGIPSKFTYRSLRRNKKHYDSEIKAIEEKILSLVKEDQQQQLTLLISVPGIGHKTALFLIIVTDGFSKFETASQLCSYVGITPTTRESGSSVKGRPRISKVGNKKLRNLLFLCSFNACKHNKACRELYERIVNKGKSKKLALIAVANKLLKQCFAIAKSGRPYDESYVSVLPK

SEQ ID NO: 368256 - protein, 344 aa, unidentified
MKALKSHVAGIDVHKEMLAITVLIGELDGEPKEYQFESSTFTDDLMALGLKLKEMGFTDVAMESSGIYWKPVFNVFNPLGLKVVVANAAHIKNVPGRKTDMNDSRWIAELHRFGLIRASFIPDGEFQRMRLLSRHRTNLTEDLARVKNRIQKVLEDGNIKLSIVVSDIFGVSGLKVLKHIAGGYTHPNILITEVTTKIKRMEEMKKALTNCLTTEHCFVINVLMKQYEELKNRIEEVENELCKKVEPYAHLVEELDKIPGIDAILAMGIIAEASANMSSFKDERAFAAWSGVASGNNESAGKKKRAKCRKGNPALRKMLIQAAQKATTARNPFIDLNTTNSAFA

SEQ ID NO: 368257 - protein, 345 aa, unidentified
MKITTVGIDLAKNLFQVHAVDERGRAVLRKQLRRDQMAGFFANLGPCLIGMEACASAHHWARTLQKFGHTVRLMAPQFVKPYVKTNKNDVADAEAICEAVGRPNMRFVPIKSVEQQAVLSLHRVRQGFVRARTAQGNQIRGLLGEAGLIIPKGIVNVAKRIPALLEDAGDEVPASFRQLIQRLTEHLKELDRQVDELEAQIKAWHRGSELSCKLEKIPGIGPLGASALVASIADANSFDNGRQLSAWLGLVPRQDSSGGKPKLLGISKRGDVYLRTLLIHGARSAILAAQRKAVNTNVWLASLLNRRHPNIAAVALANKNARTVWALLAHGREFRADYAPAVSAA

SEQ ID NO: 368258 - protein, 361 aa, unidentified
MKDTTIAVDLAKSVFQVAVSHKPGRVDAERRLSRDRFLEYLATQPPATVLLEACGSAHHWARQLQPFGHTVRLLPAHDVHRSVRRNKTDRTDAKALLEADRNEEIHAVPVKPIEPQSIAALHRMRSTWLATRTARINTVRGLLREFGIVIPVGAPHVVPHGRELVATSSHVPDLMRTSLSSACDEIETLEQHMGAVERQLAALARSRDDVKLLQTIPGVGLLTATALVALVGDVRRFHSSREFASFLGLTPKEDSSALRRRLGAISKQGDAYLRMLLIHGARSVLLRAHGAGDATAFQIWARTTQQRRGHNVAAVAVANKLARIVWAVWRHQRPFAADYRSTITTQTATISTHQEDCTELT

SEQ ID NO: 368259 - protein, 342 aa, unidentified
MEYYAGIDVSLECSSVCVVDASGKIVREARVASEPEALIAWFGALGFSLERIGLEAGPLSQWLFAGMKGTGLAVELLETRHVRKAFEAMPVKSDRNDARGIAQLMRLGWFRPVHCKSMSAQETRSLLTARKLVQSKLQDVENSLRGILRGFGLKVGKVTKREFGGRIEELVAGHPHLQTIAEALLAVRAVLRTEFAAFEKLTRRMARSDLQARLLTSVPAVGPIVALTYASAIDDSARFKSSKQAGAHFGLTPKKYQSGETDYTGRISKIGDASVRTALYEAANVMLTKPVKGCPRLKSWAMRIKQRAGTSKAKVALARRLAVIMHRMLADGTPFNDAVAAA

SEQ ID NO: 368260 - protein, 332 aa, unidentified
MYLGIDVHKRYAQVAVMDEAGEIVEEVRVENVNLDDLAQRYAGAEAAIEATSNYHHIHDTLSEHLDVTVAHPKELNQIADTDKKTDRVDAKELARMVRLNSVPESYVPTDEVREARALVRGRQTLVENRTKYANKIHGLLSDHGIIEDVKPLTIEGREFLRELSIPSPWDSLLESYIELIETLTEEIQNLEETIEERAGSLKETQLLMTIPGVSYYTALSIYAELGEISRFDGDKSVVSYVGLNPVTRESGDSRIEGSISKRGSGRVRWLLVQAANTAVHTCSDEYLSRFYERLASRKNSQKAIVACARKMLVSIYHMLDRGKVYDPPNVSA

SEQ ID NO: 368261 - protein, 321 aa, unidentified
MSAPCAVTVGIDVAKAHVDVSVLGANLDIRRFNNDAEGHSALAVALQPLNVQLVVMEATGGYETELACALQGAGLPVAVVNPRQARDFARSMGRLAKTDAIDARMLAELASVLLRRDDLSRLLRPVPDERQQWLAALVIRRRQLLTMLLSERQRLQITPAGLHPSLLAIIAAIQAQLDDIDAQMVAHVRQHFGELDRLLQSTHGIGPVTSACLIAELPELGRLNRRQIAALVGVAPIACDSGLRNGRRRVQGGRFAIRRVLYMATLTATRYNPAIRAFYQRLEAAGKLSKVALVACMRKLLTMLNAMVKANTPWDDSLHRA

SEQ ID NO: 368262 - protein, 338 aa, unidentified
MATMTLLGIDIGKNTFHLHGQDARGHQVLRKKLNRNQLLPYLAQIPTCKIAMESCGGSQCLARKIKEQGHQVQLIAPQHVKAYVTGNQNDFIDAEAICEAASRPRTRSVQVKTVEQQVLCTEHRLRTSLVSRRTAVINQVHGFLLEFGVIFPAGYAALDRVSGLMQSRELPIRLINAIERMLEDIRQLTGEIKKLDVEIKQNLVQSDAGQRLQSIPGIGPLIASALVADVGDASVFKSSRDFAASLGLVPRQYSTGGETVLLGISKRGDKYLRSLLVQGAHAVLCRVDHRTDALGMWAKNLLARKPLNKVACALANKMARIIWVLLTKGGTYNSQLLA

SEQ ID NO: 368263 - protein, 347 aa, unidentified
MKVTTVGIDLAKNVFQLHGVNEAGRPVIKKQLRRDQVAAFFINLPLCLIGMEACGSAHYWARKLEGFGHTVKLISTQFVKPYVKTNKNDAADAEAICEAVARPNMRFVPIKNIEQQSVLSLHRVRQGFVKARTAQANQIRGLLSEFGLIIPQGIGHIANRVPELIEDASNELPGSFRLLVQRLLNHLKELDTQVDELESQIVRWHRQSAASNKLAQVPGIGPITASALVASLGDAKNFDSGRQVAAWLGLVPKQHSSGGKQNLLGMSKRGDSYLRTLLIHGARSAIYHAGQKTDQNQTCKWINAIVIRRNKNVAAVALANKNARIVWALLTHDREFRPDYTRHTVGV

SEQ ID NO: 368264 - protein, 426 aa, unidentified
MKQYTQNDKIEQVTEKTLVVGVDIGSTKQYARAFDYRGRELDRVYAFMDCRSGYELFLDWMQGLQSANGMDKIIVGAEPTGHYWFGLRRFLDEAGIQLVLVNPLHVSKAKELDDNNQTKSDRKDPKVIARLVTEGRYSIPYIPRGVYAELRNMWFLRQRVVDAEVTLRNRIARWFKIYFPEYTQAYNSFAAKSSIALLKAACLPEDILHLGADGIVGLWRAMKLRAVGKKKAESLVAIAARSTGQKEGAGAARMEMEMLLEDWEVLRKRHEKIDEKLGELCEQIPESKNLFAIKGIGLTTVAGFLAEVGDIKRFDSPKQIVKLAGLALRENSSGKHKGKTTISKRGRARLRRLLFAGVIPLLATNDAFRSLHVYYTTRKQNPLKKKQSVIAICCKLVRVFYALLTKGVPFDSSKMLGDIHRPPLAA

SEQ ID NO: 368265 - protein, 391 aa, unidentified
MFLLGIDIAKLNHVASCIDSSTNEVIFSNFKFKNDFKGFSALLDKIKSLDVKNLIIGLESTSHYGENLINFLFKQHFKVALINPLQTSHLRKANIRDAKNDRLDSLNIARSLIFGKLNFVSEKNIDCFSLKKLTRFRSNLIKQRSKAKIQLTSLLDLLFPELQYLFKSKIHSKTIYTLLKKYPSADEIAALKDDEISNLLYASSKGHFKREKSIELKSLAKTTVGIKDTSVSLHVIQLIELIELFDRQIKDIVTKITDTVNKLDTKLLSVPGINIIACAIILGETNNFDNFSNATKLLAFAGLDPKIRQSGNFSATSCRMSKKGSPYLRYALIFTAWNAVRHSEKFNKYYCLKRSQSKSHYNSLGHVAHKLVRVIFTLIKKDISYQEEKLE

SEQ ID NO: 368266 - protein, 364 aa, unidentified
MVKKATRISRFVAAVEDQPVVVGLDVHKKTYSVALFSKEDGLVESYTCPAGEAALAHQLAELGINIEHIVYESGPTGFALSRVLADAGCNVSVVAASRIPRGYAAAAKNDRLDAVKLATYYARGLLRPIAIPTVEQEGYRALVRRRKRIAESRGKIKQKIKGFLLASGIDEPHSIQKWSLAASADLTALDVPPQHHMALASMVREYLFLLSEDKMLRAEIRTVTKRMHAQTFERLTSIVGVGETAASNFLAELFSPERFNRPEEVTSYLGLAPVVSQSGGGAARARIRPVGQKRLRGILIEAAWQWTWRDPEAKELYNRHFAKHGIGQKAIVAVARKLAIKLWRLAVDTPPTPMGDAARGVRSA

SEQ ID NO: 368267 - protein, 340 aa, unidentified
MNSMVRYVGLDVHKREVEVCIIDSSGQVVLRTRGACLRPALEEFIRTHLQPTDHVALEATTNCWCVAKVFKPHVARVVVSNPLATKAIATAKVKTDKVDALVLAQLLRCDYLPEVWQPDDETQQLRRLTGRRSGLVAQATLLKNRLHSVLAQRLIAPEKERLFGPAGRAWLREMPLDEEGRLLIDSDLRLLEAVERELSVLDELLARKAYARQQVKLLMTLPGVDVAEAQAVLAALGDVGRFQDPDRAASYLGLTPWTRQSGDHCYHGPISKAGNSQARWMLVQAAHHVARHPGPLGMVHRLRCVTIGSSWYVVGSVQFDAIAASYCGNWLCRRISPLAD

SEQ ID NO: 368268 - protein, 341 aa, unidentified
MEKVSTVGLDLAKHVFQAHGATASGAVVFRKKLRRDQVLTFFAGQPRCQVAMEACASAHFWGRAIGELGHEVRLIPPAYVKPFVKRQKNDMADAEAICEAAQRPTMRFVAVKSEAKQAASVIFRARDLLVIQRTQIINALRGHLGEYGLIAPQGPSHVERLIAQIEDPASGIPGAARSCLARLVKILRGLQSEISELDRDIAARAKADDIARRLMTVPGIGPLIATAIEALAPPPETFRSGRDFAAWVGLTPVQRSTGGKERLGRTSRMGERTLRRLLIIAASGVVRWAKRKGVLPGSWLARMLARKPPMLVIVALANKNARVAWALLAKGGTYRAPAVTA

SEQ ID NO: 368269 - protein, 345 aa, unidentified
MQTMYYIGLDVHKRTISYCVKDGSGTIHAQGTIPATRFDLDRWMKTLPQPWTAAMEATVFTGWIYDHLQPHAAALKVAHPLMLRAIAAAKKKNDRIDANKICDCLRCDFLPECYMASTAIRERRRTLRYRNLLVRQMVQMKNKIGMLLMEAGVSYNKQRLHKAGYFRELLASNPDIDEGLCSLLRLCRETVVRLGKTESALVRSLERDSLLMERVERLMTIPAVGPITALTWALEVGDAKRFSSIKKAISYCGLCGAEKSSANTVQRTPLSKQRNKHLQTTLIEAAKMAPRNSPALAMLYDKEKQKGNANRATLAVARKLVAYLMAIDRGQRNFQVVEVSDCAAA

SEQ ID NO: 368270 - protein, 406 aa, unidentified
MQVYLGIDCSQHSYEASFVNQAGAVLARLAIPSSPEGFLHLDAARDKLGIPPSDCLVALESAHNLLVDFLWDHGYSQVYVIAPHVIKSCRDRYRHSGARTDPSDAYVLADVLRTDRHRFYPWYPDQPSTRQIRAMNSLIGHLGRTIVRHSNRLRAVLARYYPGLLQAFRDIHGPVALHFIQAYPTPQATAQLTWEQFQLFARQHRYTHRARVSRCFSRLQTPQPEAAPPIVEAYQQEAVLLAGLLLSLVEKRRALIRQMDLLFERHPDHTIFASLPGAGPQLAPALLAKFGDDRSRFPTPATIQALAGSCPVTDSSGKRRTVKFRRACDREFRHIAQQWARCSLQRSLWAQAYWSQVRPRCSSDSHALRCLANRWLAVAWSLWQKHQPYDEAYHLHQRALNTRLPT

SEQ ID NO: 368271 - protein, 338 aa, unidentified
MNLYVALDVSLEFTAVCVMDEEGELVLERKVASDPAAIAGLLFELPERPCCVGLEAGPLSEWLARGLAQAGLDAVLMETRHVRAALSAMVAKTDRNDARGMAQLLRMGWFRPVHRKTMNAREQRALLAARSTLGRRLRDVENSVRGILRGFGIRVPRLLRGRWSNGVRGALQGNTVLLGVVEPLLAATQALRDQLAVVDKRARDAARQDAVCRRLMTMPGVEAIVALTYRAGVDQAERFKSSRQLGPCFGLTPRRYQRGGTDRSGAISRAGDASVRVALFEAAHLMLTRSTHWSKLKAWAVAVAKRRGAKRAKVALARKIAVILHRMWIDGTKFRFVA

SEQ ID NO: 368272 - protein, 378 aa, unidentified
MFKETKLPLNRDGFRKLEEALQSFNNPEVVFEATGVYSRRLQRFLDDLGQDYTCLNPLVAKKQLDGLRPYKTDRNDARHLAETQFIMNRAVTYKISPVYRKLMDFSRFYQEVSKDVATHKNRLHRSLQLVFPEIEHVLSNTNNELYWSVVSQFSQASQVTEEYSFNEVVDLILKGTQKKISHARAEQIAHSLYSAARLSYSAVDDDSPVYLQVKHLVNQIQEETKLKASIIEQMTALAKELPEYNKLLSIPGLGVRTVVSLIGELGDIRLFRNSNVLNAFIGIDLRHYESGDYVANDHISKRGNTVARKILFKAIQNIASAAHYHPNHINNYYQRRKLENGQQGTKKIAIAAIHRLIRTIYHLVINNQFYDYILATKG

SEQ ID NO: 368273 - protein, 413 aa, unidentified
MDVLHPRCCGLDVHKSSISACILLREAGRVQKHQRRFGAMTQELQELAEWLRQFGVTQVAMESSGVYWKPVWNILEGQFTIVLANAQHIKNVPGRKTDQKDAEWIAHLLQYGLLRARYIPCEIIRDLRDLTRMRTSLSQEASRISSRIQKVLEDANGKLASVATNVLGKSGRAMLEDIITGEDDPEHLASLALGHLRVKIPQLRLALEGKIRSHHRFLLRRLLDQIQFVEHEIALLDERLDDIGRQRPDLAQAVARWDTIPGIDRVAAWALLAEIGDNMAQFPTAEHLASWAALCPGNHESAGKRLRGTTRQGSPWLCRMACQCAWAAARTKNTYLSSQFRRLAARRGKKRAIIAVAHTLIVIGYHLQKNQSNYEDLGGNYFDRIHSDGLKRYLVKWLQQLGHKVILEPMEAA

SEQ ID NO: 368274 - protein, 424 aa, unidentified
MKYSQNEKIAQVTEKTLIVGVDIASMTHFARAFDFRGIELGKIIRISNDAQGFRLFKLWVNELKGKYNRDTVMVGMEPTGHYWFNFAQFLKDSGIRIVLVNPFHVKRSKELDDNNPTKNDRKDPKTIAMLVKDGRYQVPYVPEGLYSELRTAMETRWHIVQGLNAIGNRVKRWLSIYFPEFSKVFSAWEGKGALIVLKEFPTPEKVLQKGVDGIAARWRKDKLRPLGLKRAMRLVEAAKNSVGVREGLRAAETSLRMLLAEYEMKKQQLEEIMVLVEELIYQIPGIKEVLKIKGIGLVTAAGLMAEVGDLSRFDHPKQIQKLAGLNIRENSSGKHKGKTTISKRGRRRLRALLFQGIMPVVAKNPEFRRLHQYYTTRAQNPLKKKQSLILLCCKLIRIIFALMKKQVAYDPQKMMNDIQRPVAA

SEQ ID NO: 368275 - protein, 437 aa, unidentified
MSNIIFNPDEFYLSVGMDVGADFTWMSIALPNNTIHGKPFKILHSSVDSLQAAVSRIKEAEELFSMKSRIFLESTGIYHYPLFYFLCDKGFNCSVINPIITKNSTNIIIRKVHNDRNDSKKVALIGLKPDLKVSLIPSDLVLNFRNLTREYYYLTDCRRAFVNKLTAELRMIFPQYLGIFSKLTTMTSLHLLKEYTTPDAFLEATDEEIITSIRGIARFGIKYATSKCIEIKKAAQKAKIFGHAVNSNYIRILLFIDSIELYDRQIALVLSELNELADANENTQFVKQIRIIESFHGAGFLSAVSLMAEIGDFSAFTKPKQLFAYFGLDPAVKQSGKFVGTKVKMSKRGSPIARRVLHTMALNNIGTYRDGTAKNPVLRDYYLEKCNSKPKRAAVGAVMHKVCNIIFAILRDEKNFQIITPEEHRKNFLSARCDIAA

SEQ ID NO: 368276 - protein, 355 aa, unidentified
MSIVGGVDIHRKQLTFDYVERETGRWERGRVAPADREHLAKWLVRFDGVQDVQFAMEGCTGWRYVAEEMRAAGVVPHLAEPADTAALRGRKRRAKTDRADSRHLRQLLADGRLPECYIPPPAVLEWRALLELYHDLRAQHSGWAQRIQATCFHQGTTAPGQAGVIRGDRQLLATVVDEQLSPVGRLQVNTALAVMDAVAEHVDRLRRRLLATARHVHGARVLMHEIYGVGGMTSLALCAWLGGADRFSSSRKAVRFVGLDITVHSSDGKRSPGRLSKQGPEVLRWLLFEAAKTSARGCAPGYGYYTTVRERIDANRACLSQARRIVRQAVHLLADLGDDAFTIVAQPAAPSSIAR

SEQ ID NO: 368277 - protein, 321 aa, unidentified
MAYFRDVVGIDVSKENLDLYALSHQQRRAVANTADGHAELVSWLKSLGVRVAVMEASGGYERAVAGALRRAGLDVRIVDPKRVRHFAKAAGRLAKNDRIDAQIIAEFGAVFAVVERCDIPLDAKREHLASLVAARQALVDHQTALQNQIAACPKGAAQRALAAALKPIPASIKQLDRLIAEAIAVHPPFAALAARLDTVPGLGPVTIAALIAWLPELGRLNRRSLAALVGVAPFDDDSGKRTGQRYIKGGRSKLRNIVYMAVLGAATRHNPILKAYYDSLLNRGKLKKVALIACLRKLLTILNTMVAKQQDWNPALTASAA

SEQ ID NO: 368278 - protein, 341 aa, unidentified
MKPELSVVGIDLAKNLFHLVGLDERGKIILRKRLARGEVLPFMAKLPRVLVGMEACGGAHYWARQLRAQGHEVKLMAPQYVKPYVKTNKNGLRDAEAIAEAVTRPSMRFVPIKHVAQQDLQALHRVRERLMGARTALVNEMRGLLAEYGIVLPTGVNAFRNALAEKLEAEHAKLTPLSQELFGKLCAEFRKVEAEVAYYDEKLQALATTHPESQRLLTIPGIGPITATALIAAVGDVGGFTNGRQFAAWLGLVPKQHSTGGQTRLLGISKRGDRYLRKLLIHGARATLRWARTKTDSRSQWIRGLLERRGWNRTAVAVANKNARIVWAVLSRGGVYGESTH

SEQ ID NO: 368279 - protein, 355 aa, unidentified
MQQNLAAPHSGSVEYLGEIANDAAAISKLCDRLRRSGKPLAFCYEAGPCGYGVHRQLTRLGHRCDVVAPSLIPRKPGDRLKTNRRDATMLARLNRAGELTPVWVPDADHEAMRDLVRLRSVVRQVVTQARQHLQGFLLRHGRKHERGTAWRMAYRRWLSTLAFEHPAQQIAFQDYVDAVMDAERRLQQVEEQILSLLPEWNQRPVVDALQAMRGIALINAVVLVAEVGDFTRFSNPRQLMAYFGLVPGEQSSGETVWRGGITKTGNSHARRALVEGAWAYRMRARIGRHKVDRIEALPKVVRDIGWKAQVRLCTRYRRLSARGKNANVVNVAIAREMVGFIWSIACTVQSAPKAA

SEQ ID NO: 368280 - protein, 366 aa, unidentified
MKKVSTVRVNGNMIFKGHKLTIGGDLGDRWSCYCVLDEAGEILLEQKVATTPEAMKQIFEKIPRSLIAMETGTHSPWVSRLLTELGHNVIVAHAQKVQLITKSNRKDDRHDARTLARLARIDPELLGPVRHRSAKAQIHLTVIRARAELVSARTALVNAARGLVKSYGQRLPKCGTQQVNRELAAGLKAELREVLEPLLQEIESLNERIQEYEVRMEKIAKESYPQVELLKQVKGVGTQIALTYILTLEDPHRFPKSREVGCFLGLRPGRRDSGESQPEMHISKEGDPYLRTMLVQGAHYILGPFGADSDLRRWGLKLAARGGKSAKKRAVVAVARKLAILLHRLWVSGEVYEPLRNSDKALRAVA

SEQ ID NO: 368281 - protein, 377 aa, unidentified
MKRIRFVGLDVHAETIAVAVAEQDGEVRSIGVIPNRFESIRKLVKKLGPVEELYFCYEAGPTGYVLYWQLTALGAKCEVVAPTLVPVRAGDRVKTDRRDALKLSRSYRAGELTAVWVPDAAHEALRDLVRAREAAKRDQLRARNRLTKFLLRHGERPPAGVNPWTLNYMNWVRKEVHFELLAQQATLLDYLHEVEHMAARVTRLEQAIEEAIQLAPQQIREVIEALQALRGIAKVSAVTIVAELGELSRFGQARQLMAYSGTVAREHSSGESCKRGGITKTGNVHLRRIVVEAAWAYRHAPAVTACLRKRQERVSEEVKEIAWKAQHRLHGRYRKLTARGKNTGKVITAVGRELLGFIWAIGVKVEAEQRKALGQAA

SEQ ID NO: 368282 - protein, 365 aa, unidentified
MASVAHLAPIHLGLDVHRDTISVGILAPGREVPVVERIAHDEASIRRLVGRLGDPRRLRACYEAGPTGYELARLLDRMGIGCEVIAPSLIPTAPGDRIKTDTRDCRRLARLHRAGELVAIRIPTPAEEAVRDLCRTRADMVEDLTRARNRLGKFLLRHGRVWRGGSAWTHKHEAWLGGQRFDEPALGTTYAHYRAVVATRHAQLDAVEVDLATWLDRPPFVDQVARLAAYRGVTRLGGLTLAAEVGDWRRFARAAQFMGFCGLVPSEYSSGHSVHRGRLTKAGNAHLRAQLVESAWTYRHRPYVGRAIAGRQLGLDPEVVARAWAAQLRLSARFRALAARKNTKSIVAAAIARELAGFLWAEMVA

SEQ ID NO: 368283 - protein, 377 aa, unidentified
MGDHSEAFIGLDTSKLRNAVAIADGGRGGEVRFLGEIDNTPAATAKLVRKLSGKYERLTFCYEAGPTGYGLHRQIKDLGFECVVVAPSLIPKRPGDKVKTNRRDALNLAKLLRADELTPVWVPDGGHEAMRDLTRARETAMLDLRTKRQHVSAFLLRLGKPYPESKKTWTKVHVSWIVSQKLEHPQQRLVLEEMMLAIRQAQERLQRLEQAIAAAVPEWSLAEVVTALMAMRGIDLISATTLLAEIGDLSRFQTPTELMAYLGLVPSENSTGDTVKRGPITKAGNRRARRMLVECSWSYQHPPRVGQAKQPKVDAAPPAVREIAWKAQCRLYRRYRTLVRKGKLKTVAIVAIARELAGFIWAVARAVTTARVAAVSA

SEQ ID NO: 368284 - protein, 346 aa, unidentified
MENIALDVHKHYTWARVENREGQQLYGSRLAHSRGNIKNFIERWTPGSSVAVETVGNWYWVVDEIEGGGGKPQLVNARLAKLMIGNVNKSDKLDAKGLNMLQRTGTLPTVWIPPSGVRDARELPRTRMVFSRQRTQLKNRVHATLSKYGYVVDEVSDAFGKRGRQIIEELSRKLPPHTKQALDHVLDQLDEVMGNLKAIETDMINAFVPCSQTTWLESAPGIGKILAVVVWTEIGSIERFGRAEQLASYSGLVAREHSSGGKFHYGPIRRDVNVYLKWAFVEAAGSAIQNRDRCGYQHIGRLYQRIKVRRGHNRAKVAVARHLAEASFCMLKKGGPYREPVLSTQR

SEQ ID NO: 368285 - protein, 308 aa, unidentified
MEAPLIFVGIDVSKAQLDVAIRPSAQSLSVTNDRAGIKSLIKHLKKLRPQLVVLEATGGLERQVLSALIAGEIPVVMANPRHIRDFAKSIGQLAKTDRIDASVIAHYAEAVRPKPRPLPDEASLELRALSARRRQVVDMIVAEKNRLATASKVVKKRITAHIAYLEQELNDADQDLDRFIEKNAAWKENQQILCSTPSIGPVSSRTLLVELPELGALDRKKISALVGVAPFPRDSATLKGRRTIWGGRASVRSALFMATVVATRFNPVIRDFYKRLKAKGKPSKVCLVACMHKLLTILNAMIKQNSLV

SEQ ID NO: 368286 - protein, 366 aa, unidentified
MLQKAELSWQADSENNLGGSSETMYYIGLDVHKKTISYCVKDAAGHVHSEGKIGSTRRELDAWVRTLPQPRMMAMEATIFTGWIYDHLLPHAEKVKVAHPLMLRAIAAAKRKNDKIDAGKIADCLRCDFLPECHMAPTAIRDRRRVLRYRNLVIKQSVQMKNRVSGLLMETGVSYNKQRLHKVGYFSDLLSHNEEVSDSIRPLLKICREQIERSRKLDYALVSKLERDPLLKDRLERLRTVPGVGSITALTWALEIGDFTRFASIKEAISYCGLCGEENSSADKVMRMPLSRQRNKHIQSVLIESAKLATRYSHELAMVYDKERLRGNPNRATLAVARKLVAYMLAVERRKQNFVPAEEFRATAAA

SEQ ID NO: 368287 - protein, 338 aa, unidentified
MYYTGIDLHKFTSYLITVDSSGKIVKQQNIKNVDYNFVQYFDSIPGQHQTTVESTMTWYWLHDLLSTLNIPMVLAHAKYVKAIAYAKVKTDKVDSQTLAQLLRMDYIPEAYKISKDKRVLRDALRARLKIVQRHTSFTNSMHLLLAKYNFDNPSNLDGIAEYQYNQLAEVESLLKEQILDLEKQLYPSLIPNDDIQRLLWIPGIGKMNAFNIALEVDDIKRFVNVKNFYSYCRLTPSARNSAGKSKQRSSKDGNKYLKMVFSDAAIHAVQYYPVIRKYHSSLLRKKNKQIAKTLIAKEIAKIAFFILKNRTNFNNKFKGIDLEHTKSLRWPRVISPFI

SEQ ID NO: 368288 - protein, 355 aa, unidentified
MVDKVTKAAVVGGVDTHKDLHVAAVVDQNNKVLGTQYFSTTRQGYRQMLAWMTSFGTLKRIGVECTGTYGSGLLRYFQNAGLEVLEVTAPDRMERRKRGKSDTIDAECAAHAAFSGIRTVTPKTRDGMIESLRVLKTCRKTAISARRVALQIIHSNIISAPDELREQLRNMTRMQLIRTLGSWRPDASEYRNVTNVYRISLKSLARRYLELHDEIADLDVMIAAIVDELAPELIKRNAIGYESASQLLITAGDNPQRLRSESGFAALCGVSPVPVSSGKTNRYRLNRGGDRAANSALHIIAIGRLRTDAKTKEYVARRVAEGHTKMEAIRCLKRYISREVTRYCAIKTGGSTVSR

SEQ ID NO: 368289 - protein, 298 aa, unidentified
MDHFAGLDVSVKETSVCIVDETGKIVQEVKVASEPEALLAVLASPAYHLKRIGLEAGPLSQWLFSALAEAELPVICVETRHMQAVLKAQINKTDRNDARGIAQMMRVGLYRPVHVKTLRSQKLRMLLTHRKLLQSKAIAVDNDLRGTLRNFGLKVGVVGTVKFEARIKELVENLPDLAALVEPLLVVRRVLREQFVILHRRLLAIVRDDEVCRRLITTPGVGPVVALTYRATVDVPARFRKSKSVGAVFGLTCSKYQSGEIDRNGRISRCGDEMMRTMLYEAAQTMLMHSAKWSWLKA

SEQ ID NO: 368290 - protein, 348 aa, unidentified
MLADQLDYIVGVDPHRDSHALAVVHVVSGAVVFESTVIADSDGYGQALRLVDQHAPGRRAFAVEGTGSFGAGLTRFLTVRGERVLEVGRLRRERRPGGKTDALDAVRAARSVLIQQRPATPRAGGERQALQALVAAREGAVNAKRAGLCQLRDLLITTPEPLRSELRPLTRARLLQRLAATRPHSRHDAELRGSMLALRSIARRVLQLTAEERELAAEIETITRKLAPQLLEQPGVGPHAAAQLVLSWSHRGRIESEAAFARLAGAAPIPASSGQTIRYRLDRSGDRKLNRALHMILVTRKRSHPATIAYIQRRIQEGKTRREANRCLKRYLARSLYRLLEHGPPLAT

SEQ ID NO: 368291 - protein, 455 aa, unidentified
MTKQKSQPRMKAPVNALEQINPHAAGIDVGSEEVYVAVPPDRDVESVRSFPTFTADMRQLAEWLKACRVATVAMEATGVYWIPLYELLEEHGFEVCLVNARHLKNVSGRKTDVLDCQWIQQLHTYGLLRASFRPPEEIVAIRSLVRHREMLVQYRSAHIQHMQKALTLMNLRLTNVLSDITGVTGLTIIRAILAGERNPQRLAAMRQAGCKKSEAEIAKSLEGHYKREHLFALKQALELYDFYDRQLKACDAELEAMYSEFDPPEDPGTLPPAPRTRKRRKNQAHFDLSPALYRLTGVDLTQIDGVDELTAQKVLSEIGTDMSKWPTVKHFTSWLRLCPNNKITGGKIIHTGVQPTKNRASAALRIAAASLKSNDSALGAYFRRMRARLGTPAAITATAHKLARIIYFMLKEGKPYHDFGADHYEQQYRARILRNLNRRAAKFGFRLEPAVPEVS

SEQ ID NO: 368292 - protein, 407 aa, unidentified
MEVVYRCCCGIDVHKKMIAACLNHGGKRELREFGTTTGEIKVLANWLTEAGCEMIAMESTGVFWKPLYNLFELMGLDAIVVNASHMKALPGRKTDVKDAEWIADLLRHGLLKASYIPDREQRELREIARYRKSLIEERSREVCRLQKVLEGANIKLDSVVKDINGKSARKLLDKIIADEAPDSEEVAQMIHGRLLPKLDQLMQSIEGITTPLQRRLIAGIVDHIDDMTKRIADMDDLIKGYMEKYETAIAAVDELPGIARRSAEVIIAEIGMDMGRFPSAAHLCSWAGVSPGNNRSAGKRGSGKTTKGNKALKSILTQCAKAARNCKDSYFSTQYQRIAARRGKNRATIAVAHSMLIAIYHVLKNGVAFRDLGSDYYDSFNREHKIKGYLKRLQALGWSPDLAPASA

SEQ ID NO: 368293 - protein, 344 aa, unidentified
MSEVSTIGLDIAKHVFHAHGADSAGRAVFSRRLTRGKLLDFFASQPRCTVALEACGGAHHWARELEAMGHAVRLIPPAYVKPFVKRHKNDAVDAEAICEAAQRPTMRFVAVKTEEQQAAALVFRTRDLLVKQRTQLGNAIRGHLAEYGWVAPKGPSHLAMLADLLDDSEMAATLPQAARPMFAMMVDMLAELGTRVAALDKEIARRAREDEVARRLMTIPGIGPITATAIAAIAPPAETFAKGRDFAAWLGLVPKQASTGGKQKLGAISRMGERTLRRLLIIGSSAVVLQASRRGAPKGSWLEGMLARKPRMLVTVALANKTARIVWAVLIKQEDYRAPVAVAA

SEQ ID NO: 368294 - protein, 386 aa, unidentified
MKRNDLSRSPVAFDQASTMVAVVELGFRSWLAAGLVPGLTRQPLKKLGPDAQALFTLLRRWQGEATKAGSTIKRIVVAFEAGRDGFWLARWLRGRGIEAYVIHPTSIPVSREHRRAKTDRLDAELLMRAVLGWLRGEPKHCSMAAIPSIAEEDARRPNREHQTLVQEQTRVVNRIKSTLIRFGIRNFKIRLRKAGDLFAALRGPEDEPLPPNTVAEMHRDMARLRLIREQIKAIEQARLKQLKQAPRKGTHPMLLMLGQIIGIGVETADMLAHEVLSRQLRDQRAVARYAGLTGAPDESGIKRREKGLARAGNARVRHGMIQLAWRWLMHQKDSELAQWYATRTAGAKPAARKTMIVALARKLLIALWRYVTTGVVPAGAVLRAAT

SEQ ID NO: 368295 - protein, 362 aa, unidentified
MPNGMRWVGLDVHAHASAVAVFDDVTGEVISRRVGGRPIEVLGVLRELPRPLRAVYEAGPTGYGLVRRARAEGIEMAVCSPGNIERRPGDRIKTDKRDAIRLARLFAAGDLRLVWIPSEEQEQLRDLVRCREDLRADLMRARLRLAALLLRRERYFPGPGERWTLKHRHWLSQQRFDDAPSRVTYADYLHAHDVLLARRELVARELEQIAPTCVWGETIARLRCLRGINTLTALGLCAEIGDWNRFDHRDSIAKFVGLVPSEHSSGQTRRLGKITKAGSTHARRLLVEAALHYRLTPAVGGKLAIRQRGQDPALIDQAWRVQRRLHARWQLLREGRGKPAGVVTIAIARELVGACWEIATAP

SEQ ID NO: 368296 - protein, 427 aa, unidentified
MITDRVPCRKFYLGGTSMDKIYDKCCGIDVHKKLIVACFRCGREQEIRDFGATTRELLELADWLRDGGCEMAAMESTASYWKPLFNILESSGLKAMVVNASHMKAVPGRKTDVKDAEWIADLLQHGLLKPSYIPDRDQRELRELVRYRKSLVGERTSELNRLQKMLEGANIKLSGTVSDINGKSARSILEYLLTGESIDGAKYDEMYEKNIIAHNLKATREQVIDDLNGVMSPLQRRMMKELLAHLDELNVHIANLDEEIDSFMKPEEKQASQAIQDVTGIGSTSAQAIISVIGTDMGRFPTDGHISSWAGLCPGDNESARKRKSGRTRKGNVLLRTTLITCAHAAVKNKKSYFYAQFMRISAHRGKKRAYVAVAHSMLIAIYHILKDGVVFKDLGAGYYNQFNKERKVNAYLKKLKALGWEAPAAT

SEQ ID NO: 368297 - protein, 298 aa, unidentified
MHIASIGIDLGKTTFHLVALGERSKVLARKKFSRTQLLAHTANLSPSLIGLEACSGAHFLGSALREQGHDVRLIPAQFVKPYRKSNKNDFIDAEAIAEAVTKQNMRFVPIKTEEQLDVQAMHRVRDRLVQRRTALINEIRGFLLERGITFPVQPIHLRKNLPTVVEDAEQNLTPRLRWLRNRLWQEWKQTEIDIETVTDEIERISAEDERCRRLRQIPGFGPLVSTAMVAAIGNGAAFRRGRDFAAWVGVVPRQYSTGGKQKRFGISKRGNIYLRRMLIHGARAVLFRIKYDTAGLGQ

SEQ ID NO: 368298 - protein, 383 aa, unidentified
MEHTLRSWSRIIGLDLSKQTFKGCILSGENFTDREMFDGRMSQDSGGYGLIRARIRAGDIVLMEAGSSTFNLARYLTRESSAAEIVVLNPANLRIIWDSMRKTDKSDAMKIACIARDMRPEAWPTVPVPSAQEQAERSVITQHIFLKKQENQLFNRLFALYNSLGYPDIDKARLKEDLDYRFELADELLSVSELSLTNGMMLNDQINLVQLQMENHEERLRQICLDHPRQALSWLSIPGIGLVNTATLIAYIGDGSRFSKADQLLNYAGMVPRLNQSGTVDIHGRITKRGCSAIRRNVVQGAHVLMKMRVQCPLTRFAYRKRQQCPFNGKVAVAVATHMLRTGLAMLHHDNALYVAAVEDNYEKLRRKLAEYKLKALASYLPQ

SEQ ID NO: 368299 - protein, 347 aa, unidentified
MTLYCGVDFHSRRQTVCYCNTEDGEVKIKDLHHYEDDVRSFYEQFKNEQVIVGYETSGYARWFETMLFELRIEVWVGDAAEISRLGKRRQKNDRRDAEHILDLMLKGEFPKLYRMSEKSQEIVRLLRHRQKLVKHSVMIKNSLRRILIETGLIFKAPLSSQKAKQKFRELKLPLLLANERDRWLELLIEIEKQIAGLEQKLKAEAQSDERVQRLLTHPGVGLLTSLCIVHTLGDVRRFATTRKVAAYAGLEPMEHSSGEKRRYGAISKAGNRLLRFLLGEAAHIATRTDDELKQFFGRLKNKCGTAKAIVAIARKLLIRCFIMLRDEIDYAEFRRRGIEARFARVYT

SEQ ID NO: 368300 - protein, 399 aa, unidentified
MIATGLDVHKDTIFCGIHNGKKNLDVKEFSTLTHDIRNLGEYVRSLGGHTIAMESTGIYWIPIWNILNEMGFELILVNPYLIKQMPGRKSDVKDAQWIATLLQKGLLRASFVPDKKIQELRTITRKYMKLQQRRVTIEQNMERILEICNIRITSLVSNISGKSIYRIIESIVNGVDAPDELEKLVHGRIKNKHKEKVRQSLEGHIPEYHRFNLSLSFEEFNLNLSQVNRCLEKMEELCNKEFSKELELLQTIPGVSLISAMILIAETGADMRVFENSGKFTGWIGLRPRNDESAGKYKSTATTKGNVYLRATIVQIAWAATKTKGSYFKEKFNRLAMRKAKKKALIAIARKIAVVIWNVLNDMKKYNPNLLPILDPQKLMASLNYHQKELERLNKLVER

SEQ ID NO: 368301 - protein, 399 aa, unidentified
MKSPCVAVDVSKGKSYYQGFIEFDKPASKATPIQHDLEGFKSVYELGQTLKETYSDVVYVFESTGIYHKALETFLMKHEEKCVILNPLEASKIRKTDLRSTKTDARDCKSIAKAYFMKDFRLYNQKDELYEKLRSMNGHYNFLIQQLREMKVHFRNALDIVFPRFDEIYPDPYLDIPMSILKRYTHPDELKNKRVETIVKYLMKDTKHRESKAVDETKKLKGYIDNVSSGCRISSYEVTILKSMVQKIGDQEVEIELCLDEMRDLATEIPLYHQLMSIPGIGDNLAIRLIGELGDLDRFERSEQLVAYAGIDPRVYQSGQMTGEHLHITKKGNKHLRTLLFLAVSSNVRIGKTNPILDFYNKKRQQTNPLVYKAALIACANKLLRIIFGMYKSGMNFHK

SEQ ID NO: 368302 - protein, 466 aa, unidentified
MRTIGLDLAVQAAHKAVVLDDAGHFCTPILTLHTRPGDLDQLLARARDGAPSAEVQLVMEPTGMAWFPIAVYYARQALPIYLVNSQEVADLRRYYQRHAKSDRIDARVLARLPLVNPDKLHRLVLPAATTFACQRACKQLDHFATQITAIKNRLQAIDRFAWPGLEELVFTDPFAPAARFFREHCYDPRQVVLLGATTIRQQWEANVGEAEEGGTWVEPLLTLAQQILTLYGTDGQFLDFGQLQAEVQRDQVWLAWLEQQHYTLRVRTVRPLYRAVHPSRNLETLKGVGQDSAAVYVSFIGDPRRFSSTRLFRGWTGMVPESNQSAESEAKGLHVTQAGPDLIKKYAYLDAEIARRYDPQIAAIYYDQMVRKGKHHKQAVCACATHLLDRVLAVLRADKPYEVRNSDGKALSGQQARELIVERYTVPEEVRRRTNKRNRRQQADQRAERRVRREPGQQPLLDEQLS

SEQ ID NO: 368303 - protein, 367 aa, unidentified
MKKVSTAGAKPSKKISQQKLTVGLDLGDRNSWYCILDESGQIQLEQRVRSNAKALREVFGQLPHSRIALEVGTHSPWISRLLSELGHEVIVANARKVRLIGESRKKDDRLDAQTLARLARIDPGFLSPVKHRSAQAQADLMMIRARAGLVRARTALVNTVRGLAKSYGERLRGCNVRNMNPEKAEGLSPELQSALEPLLAGIEELSEQIREYNERIEKLAQESYPQVALLRQIKGVGTLIALTFLLTLEDPHRFRKSRDVGCYLGLQPGRRNSGQSEPQLHISKEGDPYLRTLLVQGAQHILGPFGVDCDLRRWGLKLAERGGRSGKKRAIVATARKLAVLLHHLWVSGEVYEPLHNSRRTAVAAAA

SEQ ID NO: 368304 - protein, 310 aa, unidentified
MSTEIFVGIDVSKDSLEVGVYPSHPGCRMANSEQGVEELIYALRALNPQLIVCEATGGYETLAVGCLAAAGLPVVVVNARQVRDFAKSIGRLAKTDAIDAGVIARFAEAVRPELRGIKDAASQQLSALVTRRRQIVEMITAETNRLSVACRRSRRDIETHVRWLHKRLDQLDDQIKRDIHSGPMWRTKDQILRSTPGVGPTTSAMLISCVPELGQLNRKQIASLIGVAPLNRDSGRLRGRRMIWGGRGQVRAVLYMSALSAIRHNPLIGQFYQRLRASGKCFKVAIVACMRKLLVILNAMVRDQATWRQC

SEQ ID NO: 368305 - protein, 444 aa, unidentified
MHYQKVLQMLQSIPYLSVGLDVGADFTWMSIMLPNGTLTGKPFKILHSDPHSRDLAVAKIKEAQETYSLESRCFLESTGIYHIPLLCFLRDKGFDCSVINPIITKNSTNMNIRKLHNDKFDSKKAAKVGLDASLKTSIVPDDAVIDLRNLVRDYYYFKDLQSAVVLKLHAELKVSFPAYLNVFSKITTQTSLKLLEAYPLAADMLAAPKDELVESIRQTARFGEKYAVSKYEAICAAAKDAAVFGRALPSNALRIRLYIKTYQEYQEHLGSILKELHKAVEKLEGTPVYDRILLLQSLRGVGFLSSVVLIAEMGSFDLFPSPKKLYAYFGLDPAVKQSGKFNADKVHMSKRGSSLARRILHMVALNNLKVDKGTKTPVNPVIHSYYADKCKNKKKNVAVGAVMHKICNIIFAMLRDNKPFEIITPEEHCERYLETHPDKAQNAA

SEQ ID NO: 368306 - protein, 443 aa, unidentified
MSELAVLDPRAAFVDVGSEKMHVSIAGGPPALFGTVTSQLHALRDYLAEHQVRSVAMEATGVYWLPLYGVLEAAGMEVVMVDGRQTRNLPGRKTDMKDCQWGATLHAHGLLRAGFVPPANIRRLQDYLRLRGDHIAAAAGHVQHMQKALERMNIKLHEVISSLTGASGLTVIRAILAGERDPQVLLGLCDIRIRNVKAERVVESLRGDWAEEHLFALAQAVQSWDHYQGLIAACDRQIAVVLRQMPDAKVPPPAASTKAGKPRTRPGVNAPDIADLREILAQICGAKDLTTLPAHSEYSVLQLIGEVGTDLTKWRTEKHFTSWLGLAPGSAQSGKRKASVKRRRNRAGQIFCVMARALARSKYVALGGFYRRMAARRGGLVANKALARKLATLFWRVMVKGLDFVETGVTQYEARVLETKHRILHRLARQLGQKLVPNPAAVV

SEQ ID NO: 368307 - protein, 436 aa, unidentified
MDNRALHIGIDFSHKRADVGLLGPQGQKIVDHRAFPNSRSGYEQFKKLVLKTIAAYEFDEVLVSGEATSTYWMPFFMQLRQDEEMQAYNLYQYLLNPRWVKWFKKCFAPDHKNDNRDGFYIAERTRTHRPAYEWQMDKQWLPLRFYTRLRFHLVHDLSRAKNFYQAYLFVLNNAYTQHKPFSDIFSVTSRKVLTQQDDLEWVESAETIEVVEYLEQISGRRLSDPLDNAQQLQKVITERILIDEQLAFALQQILNLVMDHIRFITHQINQVEQWLDAEAQSLPEVQFLRSIPGIGPVFASGIAAEIGDLNRFFYGQKWDSKRKRYRAKNLRDVDAAVAKLAGLWWPQSSSGGFESEDRKLAKSGNRYLRYYLIEAADHLRRWIPAYSSFYHKKYMEVNKHRHKRALVLTARKSIRLIVGLLHRKEPFRSEEVARKS

SEQ ID NO: 368308 - protein, 317 aa, unidentified
MAQKGTIVGIDVAKGKIDAAIRFGAEASFANSAEGRRELLAWLKEHGVCKAVMEASGGYEKSWATLLRGAAVEVVITDPNRVRHFAKSAGQLAKNDPIDARMIAWFGEVFGHASGQPHDEERQELDQIVTARLGIVRLKEQIENWGEHEQPKAVQKAQQALLKAVATQLAKLETIIAAKIDKTERFAQRAEIIQSVPGLAGTAAAGLIAFLPELGLVDRQAAAALLGVAPFDADSGQRRGERHIQGGRHKLRKLLFMPVLSAATQHNPVLKACYQRLIAKGKKAKVALIACMRKLIGILNTMLARGEKWNPARHAIA

SEQ ID NO: 368309 - protein, 347 aa, unidentified
MDHIGIDVHKRESQICILAEGGELIERRIRTEPERFAAVLGGRPQARIVIEASTDSEWVARCLEALGHEVIVADPNFAPMYATRTRKVKTDRRDARALADACVLGAYRRAHRLSDVQRHVRGRLLVRDALVRTRTRYISAIRALLRQQGYRVSSGSAEAFPARVRALALPGPLLSLIAPLLAVMRHLNRQLAYSDETIERVAAYDERVQRLRSVPSVGPVTAAAFVATIDDVQRFQHAHHLEAYLGLVPRECSSGDTQRRGPITKAGSGRARWLLIQAAVSILRRRPPEAEALRTWALRIAARRGKHVAVVALARRLAGILYALLRDGTVFTPRQISPPLASAARAV

SEQ ID NO: 368310 - protein, 344 aa, unidentified
MVTFGVDAHKRTHTIVVIDDHGKPLGQTTIGTTSKDHLGLVQWAARFGAERRWAVEDCRHLSRRLERDLLGAGEQIVRVPPKLMAHVRDSARTYGKSDPIDALAVARAAQREPDLPAARLDGPERELRLLVDHRESLVAERTRAICRLRWHLHELDPGWEPKARSLDAQRTLDEVQRRLDDQSGLVARLARELTSRCAELTVRIKSLEVEIADLARQLAPTLLAIPGCGTLTAAKILGETAGVERVKSRDAYARHNGTAPLPVWSSNKARHRLSRTGNRQLNAALHRIALTQARWHPPAQAMIERRRSAGNSGREAMRILKRRLSNAVFQALRTDQLEQLSPAA

SEQ ID NO: 368311 - protein, 394 aa, unidentified
MCVRIQGHDNRRTTSTVTTWGAMTNQILALREHLVEQKVTCVVMEATGAYWKPFFYLLEDAVPVMLVNARDARNMPGRKTDVSDSAWLADLGAHGLLRGSLVPPEPIRQLRDLTRARTAITRDRARQVQRIEKILEDAGIKLSSVATDIMGVSGRAMLQALIDGRDDPAVMADLAKRRMRSKIPALTEALTGRFTPHHGFLIGMHLNLIDEYANSLAELDARIEETMKPFRAARELLVSIPGISTTVAEVFIAETGADMSVFPTAGHLASWAGTAPGSNESAGRVKSTKTRPGNRYLKNALGIAALAASRSENTYFSAKYKRIATRRGPMKALVAVEHAMLVAAWNMLTNGDFYRDPGADYFTRRIPAKTKARAIGQLESLGYRVTLEPLADTA

SEQ ID NO: 368312 - protein, 357 aa, unidentified
MSQQSNNCAIAVIGIDIGKNSFHVVGHDQRGAIVLRQKWSRGQVEARLANLSPCLIGMEACVGAHHLSRKLQLLGHNARMMPAKYVRPYSKGQKNDFRDAEAIAEAVQRPTMKFVATKTTDQLDLQALHRVRERLVSQRTGIINQIRAFLLERGIAVRQGLRFLRIELPGILATRTDVLSPRMSRVIEELAGDWRHLDARIEGLSGEIETLAHQDQHCERLMTVPGIGPIISSAMVAAIGTGEVFPKGRDFGAWLGLVPKQVSTGDRTILGSISKRGNRYLRALFVQAAWVVLVKLGPKQWERYGLKSWIEAAKKRLHYNVLAIALANKLARIAWAVLNKGRAFMCVKTDAMASRPA

SEQ ID NO: 368313 - protein, 343 aa, unidentified
MQTVSTIGLDIAKSVFQVHGVDADGLVVIRRQLKRRYVLAFFEKLPPCLVGIEACASSHHWSRELQALGHTVRLMPPAYVKPYVKRQKNDMADAEAICEAVTRANMRFVPTKTPEQQSGLVLHRTRHLFIRQQTSVINAIRAHLAEFGVTAPVGRNGVEELLNVVGNPNDKRVPEIARRCLLALGAQLRRLKEQILEFDRLIRAWHRSSEMSMRLDDCPGVGPALASALVATVADAKAFRSGRNFSAWIGIVPKQHSSGGKDRLGSISKQGDRYLRSLFVAGALAVIRYAKIHGTKHRPWLAALLARRPTKVAAIALANKIARMAWAIMAKGERYKEPGALAA

SEQ ID NO: 368314 - protein, 361 aa, unidentified
MRIIGCDLHARQQTLAMLDTTTGEVTNVTLMHEGNQVREFYSQLPHPVLVGIEATGSMYWFLDLMAELGIECQVGHPATIRAAEPRKQKHDRRDADLILKLLVEKRFPAIWLPSKELLDLRALLLHRHQWVRIRTRIQNALQAIALANGLRRGPGLWSYDGQAKIAFLPLLPHASYRRSQLQALYRKMEEEIENLTQRVAELASQRPGARRLMTHPGVGPVTALATEVFLGDPRRFADGKALASYVGIIPREYSSGGKQRLGGVTKQGSPLLRFLWGEAGAHAVRKDPELKQFYRRKLIQKGLGKTRVAVARKLGIRLWIMLRDEIDYEEFCRRGQKPQSGAACAGVLEVGNGANRHRPVD

SEQ ID NO: 368315 - protein, 314 aa, unidentified
MNQSSPIYVGIDVSGDFLDLAIHESTEAWRVSNDPASIDQLVQRLASLSPTLIVMEATGKLELAVLKALCQARLPAVAVNPRQVRDFARATGRRAKTDRIDALVIAHFAAVIQPAVRPLDDEQTEQLQALLLRRIQLVEMLVAEKNRLARAHQAARASLREHIKWLEQQLHVADHDIDSFLRASPAWRQKEDLLRSVPGIGPGAAATLIAFMPELGSLSRRQIASLAGVAPFNVDSGNHTGRRRVQGGRAIVRRSLYMACVPALRFNPAIRAFYDRLRQAGKPFKVAITACMRKLLTTLNAMIRNSTPWNTTDA

SEQ ID NO: 368316 - protein, 348 aa, unidentified
MRPFGEVVVSPFEVLHTDSELSKLAGLLKSLDGETRVVMESTGYHHTPVAWLLHDAGLYVSVVNAMLVHDYGNNSLKRAKTDKKDAVKLANCGLDHWLTLPRYVPEEDTRLMLKTCYRKYQQYSKVQTMLKNNLISLLDIAFPDANRLFTSPPRADGSEKWVDFVAAFWHCECVCNLSEKAFTAKYHKWCRKHRYKFCEDKTLDIYSSACGHFGVIPKTDTAKLLVEQAVFQIRATSTTLAALKQEMQSLAASLPEYPVVMGMFGIGPALGPPLMAEIGDVRRFHSKKALVAVAGIDAPPYQFGQMDVRSHSISKRGSASLRRTLFLVMSVILQHAPMNEPVYQFMNK

SEQ ID NO: 368317 - protein, 355 aa, unidentified
MNQITTVGVELAKDVIVVCAADPAGRTVFFKQFGFQGFASWAANLPPCTIAMQACSSAHYWARTLSSLGHHAKLLAPDLVKPFRKSQAAKNDRNDAQAILITALQPDMRFVSVKSVEQQSILACHRMREGWKIERTALINRVRGLLAEFGIWLGRSPQNLARSLPRLIQDEQLPARVQGLLVQAQGHLQQLEALMEQGERDICEHARHSEAAQRLCALNGIGPITASALVVSVGDARDFRNGRQMAAWTGLVPKQSSSGGKDRLGKITKRGDTYLRGLLTQGARSALNAALTRAPDKRSRLEHWIVALRHRVGYHKSLVAIANKHARICWAMLARHESYAPQDGAAPHRHRRLSR

SEQ ID NO: 368318 - protein, 313 aa, unidentified
MNQDSAYVGIDVSKGTLDIFVTTTGEVQQFLNTQTDIQRLAKHLKPLSPALVVLEATGGFERLVAAELFAAGLPVVIVNPRQVRNFAKATGLLAKTDALDAQVIAEFAQAVKPAIRDIPDEHTHELADLLARRRQLIDMIVAEECRLKQAKFKTLQRDIKAHLIWLKKRLKNTDSDLHQTILASPIWKANYDLLCEVKGVGEVLALSLLAMLPELGRVSRKQVAALVGVAPYNCDSGQFKGRRRIWGGRAELRRVLFMAAMSSKIHNPVIKEFYLHLLSTGKAKKVALVACMRKLLTILNAMIRDQKHFGEMT

SEQ ID NO: 368319 - protein, 428 aa, unidentified
MPYKIAGIDVHKRMLAVVVSDVEVDGEYAFERRQFGSNPAQLRLLADWLLEQHVEEVVMESTAQYWKPVWAALERYWTPTCKKREGAGSMSGTPHLAQAQSNRARQGRKNDFADAERLVKRLVANELTLSFVPDPEQRLWRTVTRTKYQLTRNRVQLQNRLEALLEECHIKLSSLVSDLLGVSARRMVQALADGETDPAALAALANYHLRATQEQLRDALGACQELNPVYRRLLKLALEELQLIEKQISQLDQEIADLLRPYQDQVQRLAEVPGLGVDSAQQIIAEVGPTAATFPSAGNLSSWVGACPGDDESAGVSHSHRSPKGNRQMRRLLNQAANAAVKYKGGIFEILYRRYVPRLGHKQTIGVIAHRLCRLIWKILYQGVRYEERGPDVRKKSQRYRAAKMIRELQSLGYRVEQANSQSADVPA

SEQ ID NO: 368320 - protein, 408 aa, unidentified
MKRYYVGVDWADEFHQVWVSDAEGKKVVEMTIEQNMKGMSELGRWLHERKAEGVELWASIEKPHGRIVDFLLDHGVVVYPVNPKALDRARDRFRMSQSKSDCFDAYVLAEFLRTDHVHLHALQPDSEQAQELKMLTRDHHRLGRHKTRLLNQIEVTLKEYYPRPLEVFSDLESKIALDFLEQYPTPRALSELTRRKWNRFAKREHHLGEERCKELWQKLSQPQLKIPEHVVRAKAQLLLVLVTQLKSLAEAVKNYSEEVQRFFASMPAANLVKTLPGGKSGTTAPMLWAELGDAKNRWASFRHLQAEAGGVPVTKASGKSRVVQFRFACNKLLRYASYWFSFNSLNRCEWANKYYRDQRAKGHSHPQALRALGAKWLKILFVMWRDHKPYDENYHLANIARQAIRQQP

SEQ ID NO: 368321 - protein, 354 aa, unidentified
MTSTIIGLDIAKNVFQLHAEDASGQVLYRKRLSRDGLVKFLRSAPPALIAMEACGSAHYWGRTLRALGHEVRLIPAGYVKPFVKRNKTDARDAEAICEAVRRPSMRTVAIKSVEQQCARALETARTGMVQQRTGHMNTVRGLLAEFGVIAAQGMRGFAVLCQRIEAADPAIPPALLPCLTPYLTMIRALNEAIEGLEAQIKARAKAEPAMRQLMGIPGVGPLTAHAIVSAIGDGRQFRCARDFAAWVGLTPRQFSSGQKTRSGKIIRQGDRGLRCLLVLGASSMLRQAKARPPKASAWLRGLMARRPVRVAVVAQAAKTARIAWAMLTSGESYRAPREQAAGQAGGQAPLAAAA

SEQ ID NO: 368322 - protein, 429 aa, unidentified
MNYNTQNAKIASITEKTLIVGIDVGSETHYARAFNWRNYEYSKKPFAFSNDEAGFSSFKDWMDDIAEKHGMKVVIPGMEPTGHYWLNLGAYLQEQGMKPVHVNPHHVKKSKELDDNNPSKNDRKDPKTIAGLVNEGRFSYPYIPTGIYAEIRNLSNLRIQTQEEITRIKNRIARWFSIYFPEIKDVYRNPDAVSGLMVIKQAPLPCDIKELGVDGVNKIWRDARLKGAGIKRATTLVTAAEHSIGNTEAPRSARKEIRNLLNDYEIYKNRMDELMEEIKETLSEIPYIDKLMEINGIGIKTVSCVIAEVGDIGRFDNPKQVQKLAGYAIVADSSGKHNGESRISHRGRKRLRYALYEAAISVIGKNKEFKEIHSYYRTREKNPLKKMQSVIAVACKLIRIFYTILTKGVDYDGQKMLADIVRPEMQLAA

SEQ ID NO: 368323 - protein, 433 aa, unidentified
MDIIYDKCCGIDVHKKLIVACFRCGKKQDVRNFGATTRELLELADWLKEGGCELVAMESTASYWKPLYNILESSDLNAMVVNARHMKAVPGRKTDVKDAEWIADLLQHGLLQPSYIPDKDQRELRELVSYRKSLVGERTRELNRLQKMLEGANIKLSGTVSDINGKSARSILEYLLTVEFIDAAKYNETYEKKIIAHNLKANKEQIIDDLNGVMSPLQRRMMKELLAHLDELNKHIKNLNDEIDNFMKPEEKQASQAIQDITGIGNTSAQAIISVIGTDMTRFPTDRHISSWAGLCPGNNESAGKRKSGKTRKGNSFLQTTLITCTHSAVRNKKSYFYAQFMRISAHRNPKRAYVAVAHSMLIAIYHILNEGVVFKDLGADYYNQFNKEHKINAYLNRGSLRFLATRKLLFHSKVCNILNITASHSSHRHPQY

SEQ ID NO: 368324 - protein, 346 aa, unidentified
MPNTLIVGIDISSQSNSIFFIDDAGNHLIKKPFSLPNDQEGANELIKRVIDCLSQYNLSYVKFGMEATSHYGWHLHLYLASSSELLPYKPTFYVLNPSIVKGFKKIYTFLPKTDNIDAVVIAECVRFSKLNPTPLPDFKYAALQRLTRMRYHLVHNLTREKNRTLNLIYLKFSTYSQDCPFSDIFGKASCAIIENFTPDDIASMPLEDLIKFVSDNGNNRLSDVNKIAEILKTAANRSYRLHPLLAEANDLALSMTLENIRFMQEQLKKLDKEISKLLKAFSQTLTTIPGIGDVLAAGIIAEIGDIKRFKNEAALAKYSGLVWTQYQSGNFNAQETSLAKCGNQYL

SEQ ID NO: 368325 - protein, 358 aa, unidentified
METAYDGRQVVGMDLHRRRSVLVRMTGDDPRLGTARIANSPAELRAQIARAGKSPRVVLEATYGWYWAADTLAAAGAEVHLAHPLGVKAFTYRRVKNDERDAADLADLLRMGRLPEAWIAPPQVRELREITRYRHKLVHLRTSCKDQVHAVLAKLGVPVTCTDIFGTAGSAWLDGLGLPQPYAGKVTSLRQLTGELTAEITMLSEVIADLLAGDRGYQVIQQLPGIGPVLAAVIIAEIGEVTRFGNAGQLCSQAGLTPRHRESDIKVTRGHVTKQGSRMLRWALIEAIQRVPHDSVVGSVKDAIIARRGKQARNIAKVAAARRLLTLVFYGLRDGQIRCLSRPPANSPPLAQLPAGAA

SEQ ID NO: 368326 - protein, 338 aa, unidentified
MEGVSTIGLDLAKNVFQVHAIDAAGKVLVRRQLRRAEVLSFFAKLAPCLVGMEACATAHHWGRELMKLGHTVRLMPPAYVKAYVKRGKTDAADAEAIAEAVSRPTMRFVAVKTVDQQAMLMLHKVRDLLVRQRTMLINALRGHLAEFGVVTARGPAGVKAAIAELYDIQGSLPAPARLAFHRLVGQLETVGVEIRRAEKEIVAWCRDDAVSRRLMTIPGIGPITASAIAAAVPDASLFRSGRQFAAWLGLTPRPHSSGGKERLGGISKQGDGYIRRLLVTGATAVIRLARQDNPGKAWAVRLLERKPARVVSVALANKTARIAWAVLTRSETYRPAAA

SEQ ID NO: 368327 - protein, 401 aa, unidentified
MNAVGIDVSKGKSMITVMRPFGEVVISPFEVQHTDSELSELAKLLKSLNGETRVVMEYTGSYHAPIARVLSDAGLYVSAVNAMLVHDYGNNSLRRAKTDKKDALKLANYALDHWLSLPRYVPEEDTRLMLKNSYRQYEQYSKLRTMLKNNLISLLDQAFPAVNRLFNSPRRADGSEKWIDFVGAFWHCACVSSLTEKTFTQRYLKWCRKHGYNFSESKAQEIYVFASSCIGVMPRADAARLLVEQAVAQLRATSLALATIQQQMDALASSLPEYQVVMQMFGVGPALGPQLMAEIGDVRRFHSKKALVAFAGIDAPPYQSGQLNVQSRNISKRGSSSLRRTLFLVMSVILQNAPPNEPVYQFMNKKRSESKPYRVYMMASSNKFLRIYYAKVKAQLETAQV

SEQ ID NO: 368328 - protein, 345 aa, unidentified
MKIVGCDLHTRYQQVAMLDQETGELIERRLEHESGEARAFYAALPAPVRVGIEATGHTRWFERMLAELGHELWIGDAAQIRASMVRKQKTDARDAAHLLDLLISDRFPRIWRPTLAERDLRQLVWHRQKLVWMRNAVGNQLHALAMGEGVCRKKKLFTKKGRQELESLALGPWASHRRQELLEMLDQLDESLHELDQAVEQQAEQNAAAVRLMTHPGVGPVTSLAFVLTIGPVGRFERSKQVVSYLGLNPREHSSGGRQRLGAISKQGNRMMRSLLVEAGHTAARLDAELRQDYQRLKLRRGSGVAKVAMARKLAVRMYWMLRSQAGYAQLVRMQGSPWATLVKE

SEQ ID NO: 368329 - protein, 341 aa, unidentified
MELFVGLDVSVRTTSVCVMDASGKLIREGKVETEPEAISTLLHTIGGPYKRVGLEAGPLSQWLYSGLAVAGYPVICVETRHMKAALSAQINKTDRNDARGIAQMMRVGLYKPVHVKTIRSQEIRMLLTARKFVQAKILDAENNLRGLLRNFGLKVGAVTKLQFERRIIELLEQSPSLRLVTEPLLEVRRVLREQYQRLHKAMERLAESDDTCKLLMTAPGVGPMVALSFRAGVDEPARFSRSRSVPAHFGLTPSRYQSGEIDRDRGISKCGDAGIRWVLVEAAGILLRISKRSSPLKVWGLSVARRRGIAKAIVAVARRLAIILYRMWVDNTPYRWGEKTA

SEQ ID NO: 368330 - protein, 416 aa, unidentified
MFTMEWSGRLLFVGDDWAEEHHDVELQNETGRVLARAKLPEGVVGIARLHAMIGEQLGEDDEATVVVGIETERGPWVQALIAAGYQIYAINPLQVARYRERHGVSGAKSDAGDAHVLADMVCTDRHQLRPVAGDSVEAEAIKVLTRAHKRLIWERTRHLLRLRHALREFFPAALVAFDDLTGADTLELLGAAPDPASAAALSTEQITEALTRARRHNRAAKTEAIATALRAEYLSQPAVVTAAYAATVRAQVAILAVLNTQIKTIEEQVQAHFGQHPDAEIYLSQPGLGVVLGARVLAEFGDDKDRYATARARKNYAGTSPITRQSGKRKTVLARYVHNDRLIDALGLQAFAALRASPGARAYYDQLRVRGIGHRAALRQLGNRLVGILHGCLKTSTRYDEDKAWTPTQQDRQLAA

SEQ ID NO: 368331 - protein, 407 aa, unidentified
MISIGIDIAKEKFTVCALEQGSKIVRKPFDVHLKKTKVEEFLKKLDSLNEEVKIVMEATGKYHLPILYELKDKGYFVSVVNPLKMKQFCRVLNFRKAKNDNIDAIQIAEYGLMYWKELQEYKVDSESFRVLKELNRSYQHYMDLRINQMNFIDQTISQTFPGIKKLIPHASGDFSKDKLLDFLEIRWHKNLVLEKSEEKFIEDFKNWAKEKRYHPNADKAKSIYKLAEESISTQPSNSSYIKMNIQEGIELIKHINQILHTILSQMIEIAEPLEEYQEAKKFSGISDKLAVQITAEFGDLSKFKNKKSLISFVGIDSPPYESGNFKADQRKITKRGNAILRKVGYQAMKCMMSAKDTENDIYLYMVKKEKDGKSKKVCKFAGLNKFLRIYYAKVMASKQEKKVLKVA

SEQ ID NO: 368332 - protein, 398 aa, unidentified
MKTSGLDVHKDTIFCAIYDGKSYSVVKEFLTTTGSIRELGSYLQKEGVKKVAMESTSTYWVPVWDILWEMDFDLKLVNPFHIKQMPGRKSDAKDAQWIAELLHKNMLRGSLVPSPLIQELRTYTREYRNLVNLRTKVLTQMDRVLVMSGIRLSSCISNIDSKSFMQVVEALIRGETNPDKLISLVYANRKNKESGKLRACLTGNMKAHHRLKLITYKQQFDLFENQINIYLNEMQLLCEEHFSEDINNLTTLPGVSQISAMIIIAETGGDMSAFENSGKFTGWTGLRPRNDESAGRFKSTATTKGNKHLRAIIVQIAWGASRTKGSFFMDKFTKLAIRKPRKKALVAIGRKMLVIIWHILSEKTQYNPQLVHVYDPVKVEHKIKYHEREIERAKKLIV

SEQ ID NO: 368333 - protein, 386 aa, unidentified
MQTVADRSEAPTAIRTDLGAIFVSLELSRSTWLITSLSPAGGEKMSKHVVRGGDVAGLLERFAQLREKTRARTGKVFPFVVIQEAGLDGFWIDRVLQNEAIESHVVDPASIATSRRRRRAKTDRIDGEALVRALLAYKRGEPRVCAMVKAPTPKEEDRRRLCRERKVLIAERVRHVNRVKGLLFSQGISGYEPLRRDRRERLDTLQTGDGRLLPDHLKAQVRRELDRLELLLDQIKAVEAERDVLLAAQQAPAPAAMLLDIKGIGPEFAAILWSEGLFRHFDNRRQVASYAGLAPTPWQSGSVDREQGVSKAGNPRLRTTLIQLAWLWLRHQPQSALALWFEERVRRNGGRLKKTTIVALARKLLIALWKYVTAGVLIEGAVMKAA

SEQ ID NO: 368334 - protein, 356 aa, unidentified
MEYGAIDLHKRESQVRIITGDGEVLDRRILTTRDRLTVIFWGRPQTRILLEASTESEWVAQHLESLGHEVIVADPNYGAMYARRSRRIKTDRRDAAALADACRHGNYRPAHRRSARQRLVQSMLNVRRELTDSRTRAILLARAITRAAGFRIRSGRTETFLDRLGALELPAAMTATLWPLRSVIEVLDDELAAADEQFGTLAEEDPVAKRLMTLPSIGPITATAFMAALDDVARFDGAAQVTSYLGLVPREYSSGEHQHRGRIVRSAHPHVQSLLVQAAWRMGRSSDAKTAGLRGWAAAITRRRGKKVAMVALARRLARILFAMWRDHTEYQAPRVRIIRRTAAAIVEGPAAAAGV

SEQ ID NO: 368335 - protein, 342 aa, unidentified
MEHFAGLDVSVKDTSVCIVDDTGKIIREVKVASEPEALSAVLKSPAYHFKRIGLEAGPLSQWLLSALAEAGLPAICVETRHMQAVLKAQINKTDRNDARGIAQMMRAGLYRPVHVKTLRSQKLRMLLTHRQLLLSKAIALENDLRGTLRNFGLKVGMVGKVKFEARIRELVESLPDLAVLVEPMLIVRRVLREQIVILHRRLLALVRDDEVCWRLMTTPGVGPVVALTYRATVDVPARFRKSKAVGAVFGLTCSKYQSGEIERSGRISRCGDEMMRVMLYEAAQSMLRSKQWSWLKAWAMQIARRRGMKKAIVALARRLAVILHRIWVDGTKFRWTRETAVA

SEQ ID NO: 368336 - protein, 349 aa, unidentified
MKKIFIGIDFSKEKFDATVIKAEDLSEMLSVGHQEFVNKVSGYRKMLRWVDSLCGADTCENWLFCGENTGGYSQMMSDYLYSKGYDLWIENALSIKRAFAMKRGKSDRSDSLMIAEYAMRYQDKARLYEPLSPALSQLREVFLYRHMLVRHKCSFEVRRIEKRLTQQKSSAKTMISQSSRHILTELKHEIQKCDQRIQELVRSDEELSRIFGIITSMPGVGTLNAVCLMVFTNNFTKFDYNARKIACYYGVAPFSRDSGTSVHSAPKVGYLANKMIKSLLSQAALAAVNFCPAMSIYYHRLLDKGKMPMVALNDVKNKMLTIITAMVKNECKYQPEYISINARSEMLNK

SEQ ID NO: 368337 - protein, 503 aa, unidentified
MNRGQLIGLMRNSKTRSIYKSQNARIQAIFEKAQSPRKVLCVAIDYAKAKHVALICDGNGDILKNPFTVLNNLEGVAFLLDEIAATARHRKIPKTQIILGGEDMPSYVDNFIHALKKSGILVARVNAAEAKLNRENSLASTDQLDLLGIAKTLLSRRARSAGDPLDDGENLYLRIRDLSRTRRHLVKQKTACGNRIHTLSDRLFPGYLSGSSSVLTPFSPPCLDLMKERFSAPQIASRKPESLAKFLRKYSVHHPDEKAAKLITLARNALPPEADRVFALQQSLAASAELYLCLDRNAKHLKLEAANVLLQTPYAMLTSIGGVGLTLAAGLAGELGDPTRLGGIDSLCGYAGIVPRSNQTGGPDKPARQGGTSPKCNRILKDWLVQTSQKVALYGPDEWQQRHARWQVGGQHAAFAGAKRLLRLTRTMTRQQIPWMSAAARARNATRETRSRDAEVTFDILVHKWRVLPDWQDLVFAPDRPLGFWRKLSMDVHGARLPLRGDE

SEQ ID NO: 368338 - protein, 376 aa, unidentified
MLNLLAWAESIKQEHGLTDVLLGVEPTGHYWFPLFHFLKQYGVEVVLVNPHHVKKSKELDDNLPTKNDIKDAKVVAKLVIDGRYTQPQLPEGVYADLRVLMNQRDRLCGDLNRVKGRIHNWLDRFFPEYTQVFKDWEGKASLITLQHFPLPQDVIAAGETTVVAIWKKNDVKRAVGPKRAELLYRKAQKSIGLTEGAMAAKHELAMYLEQYAMLCRQIEQLMELVAGLVEQIPGATHMMSIPSIGLTTVAGFLAEVGDLSGYDHSQQIVRHAGLSLRENSSGLHKGETTISKRGRCRLRALLFRAALTMVAKNQEFRALHLYFTTRRDNPLKKKQSMIAICNKLIRVLFELGRKQKEYDASKVLGPHREAQLQAAA

SEQ ID NO: 368339 - protein, 351 aa, unidentified
MNINNKLFVGMDLHKNSSSFCVKDYDGNIVKQEKTLTDKNQIRNFMQSLGQPASIVLEPVSQWYTYADMLEELGNEVHLAHPMKVKAIASARIKTDKIDANVLADLLRANLLPEAYFAKKEVRSWKELVRFRASLLNIRTQVKNKVNAILHKHALRHNFSNLFGKGGRIWLQNLTLEEPFASNLTQYLSLIDFLTKQIDEAEEQVEKQVADYPQARLLTSIPGISFVSALTIMAEIGDINRFPSAKQLMGYAGLVPSTYSSGDTTRHGRITKTGSKWLRYIMTESAHHQVLCKRMPGFGSYYLAIKQRKGSGTAAVATARKLLAVVWRLLKDNREFQAVPPRCGKSGMPTE

SEQ ID NO: 368340 - protein, 350 aa, unidentified
MSECTTAVIGCDLGDKQSTLCILRADGRVERPKPIKTVGEAFRTFFLARPPAHVVIEVGAHSRWVSALLEELGHRVTVANARRVKLISQNDSKSDQVDAELLARLGKADVELLAPIHHRGMEAQADLAVPKARDALVGCRTKLINTCRGLVKSFGERLPQCSGESFHRQAREYVPAALKPALEPVFQTLERIDEAIRKEDKLVARLAKKYPDVEVIAQPNGVGILTALVFLLTLEDKNRFKSSRQVGGFVGLRPRKNQSGEDDPQLRITKAGDPFLRRLLVQCANYMLGPFGRDSDLRRWGLELARRGGKNARKRACVAVARKTGVLMHRLWVTGEVYEPLGYSAKRLAA

SEQ ID NO: 368341 - protein, 358 aa, unidentified
MNATTYGLDIAKHVFQLYWLDPETGEIHNQRFQRQKLIEFLAKREPGRVALEACGSGHWWARKLMALGYEVKLLHAKFVRPFVQTNKTDAADARAIWTAAQQPDIPAVTPKTVEQQATLVLHRMREQHIKMRTMMINALRGALYEFGLSFKKGRQAGLAEMRERLAEVEEDVPARMFEALREQFDLIGRLDKGIEGLEGQIKAWSQTQPACQRLMTIPGIGMLTATALVATIGDARGFRSGRQLSAYLGLVPRQHGTGGKVRLGAISKRGDRYLRMLLIHGARAVLFRAKDKGLWCEQLARRRPTNVTVVALANKAARTAWAVLMGNEPYERNHELKKAERTKQTANSALGQLCLQRP

SEQ ID NO: 368342 - protein, 435 aa, unidentified
MTQTAAPVLNVNRLVNAQTFNTREYIDRKTAANKQYLKYIFSGGLPMIYVGIDISKYKHDCYICNDFGDVLNGGFSFANNAGGFCEFQKELEQAKNSDEVRIGFESTGNYAVNLKMFLERAGFDYMEINPLLVKEHIRSKTLRKTVTDKLSAKAIASYLSEKQYRPHATSFYPKFALKQLTRLRSSLVTSRSRYLIQLTNVLDCIFPEFKPLFDNKFTVTALYILANYPSPEAISNMNSRSYDILRRKSRGHFSLDMFVRLKSLAKNTVGVFDECYRIELETLLDLHAQIDSKINELETQITKIIKDINPPTLSIRGVGEISAAVIVSEFGDFSRFSHPDKMLSFAGLEPGYFQSGTTEYNGRMVKRGSSHLRCALMNCARAMPLHNEVFAVYYRKKINEGKDYDAAVNHVAKKLIRLIFALETKGEMFDSDKLR

SEQ ID NO: 368343 - protein, 330 aa, unidentified
MKFKWYVGIDISKKTLDVSLYDQTDFKKSKHFKTENNRNGFGLVLKWLKNCGVQAGFTIFCMEHTGIYGVDLSAFMEDEQLFYSMVSPLQIKRSLGLTRGKNDKVDSIQIARYCYLHRKDLKLSKLPSRTIQKLRDLLNERERVVKMRTSDKQFLKEFSAKSNISTKRRVKQRISIFTNDIKLIENEIEEVIKSDPDVNVNYNLTKSVTGIGLVNAVIFIIYSNNFGGITDARKYACYGGVAPFENTSGTSVKGKTRVSYLANKRIKVNLSNAARSAIQNDAELRLYYNRKAIEGKEHGVIMNAVKFKLIARVFAVVNRKTPFVKMRQAG

SEQ ID NO: 368344 - protein, 317 aa, unidentified
MEQRQTNTKIAGIDVGKARLDAAIHGSEAMMQVANKPGGFSELIEWLKAHEVGRVGLEATGGYERGVRAALEAAGFEVVVHQPIEVRLFARLKRRLAKNDRLDARLIAAATAQIEAVRAAQDPRLMELAERLTAYEQVTDLTAQLKCALEHVTLKDLAHDLRAKIAALAALKAKLLRQVVAAIRAHGDLLARFQLLMSLPGVGSVVAATLVVRMPELGALRKGQAAALAGVAPFDRDSGQWKGLRFIAGGRRRPRRMLYLAAMAARRCDPGFKAFAHGLIQRGKPAKLAIVAVMRKLIEAANLILQRNQPWLKQPAT

SEQ ID NO: 368345 - protein, 379 aa, unidentified
MDAISAAAALQPCGPEDGLIVGVDLAKNVFQLVVADAQWRTCASHRLTRVQFERWFANRSVALVVMEACGGAHHWARWLTGLGIAVRLLPPRYVRAYMRRNKTDAADAAALLEAARCAELHPVRVKSVEQQALQALHRTRSLWQADRTRRINTLRGYCREFGIAIAQGARLGLEQIARVLAEPHAALPELLRPTMRLLVEEVRLLEARIAGLERELAALARCSPACATLLTIPGIGLLTATAMVAATSGDVTHFGDARHFASWFGLTPKESSSGERRRLGRLSKQGDRYLRMLLTHGARSVLRAASAAAQRGKPPQGLRAWALDVQRRSNHNKACCALANKLARIAYACLRDKVPFGLSPRMNEKLQRQAFSLPAGTHA

SEQ ID NO: 368346 - protein, 342 aa, unidentified
MQTNIGLDIHKKFIYAVVLDSSGDLLLEKKVRNDPYELDKFLKGIDKDSKIALESCSCWEYIYDYLADKGFTNLVLANPSRVRLIATSRKKTDAHDARVLADLLRTNMLPTSYAPSTVIREQRQITRHRASLGRLKGVVKNKIHAILIRNGINQEFSDVFGQEGTRYLMSLDLSVVDRYQMDQYLELIRHYDIQIRKTEARIEEYVEYTPQVKLLMSIPGVSFYSGLAITGEIGDIRRFSSARKLTCFAGLNPSVSQSGDRCYTGHIAKQGDSHLRWMLNQCANIAIMHDSTLAKIYQRIKKRRGHNIAITAVARKMLCFIYTILTHNIKYQALQIHKAKAS

SEQ ID NO: 368347 - protein, 406 aa, unidentified
MLETMVRCCAGLDVHRRQVVSTVIREGSKEAREYGTFHRELQELAHWLQREQVELAVMESTGIYWKAIYAALEDAGIETRVVNARHVKQVPGRKTDVQDSEWLAELARCGLLRSSFIPPRDLRELRLLTRYRRKLTGMLSAEKNRLHKVLDDAGIRLGCVVSDIDGISARAMVEALIRGGSTPEQMAEKALGRLQKKREALQLALEGDISDRHRLVLKKILLHVKWLQRQIVTIDGQIVAAMKPYQEEWKLLQTIPGFDILSAAMLLAEIGVDMGRFAGRDRLCSWAGMCPGNQESAGKRKSGRTRKGNAYVRSLLCEAANSARKTQSQFQGLYKGLVIRRGHKRAIVAVGHKILQVVYVLLSRKEPYRDPEIDYEALVVHRNAPRWLDALHKYGYLESIKGSVER

SEQ ID NO: 368348 - protein, 389 aa, unidentified
MEARTVNNLPPAGIHDDAICCVLAIELSKKSWMVAVNTPLSDKISRHSLKPCDGKELLDLCERIRTRVARETKQRAEIVSCYEAGYDGFWLHRLLEAHGIRNYVIDPASLQVDRRARRAKTDRVDVERLLRSLMAYLRGEPKVWSVVRVPSVAEEDDRRLHRERGRLINERIQHVNRIKGLLAIHGIYDYQPLRRDRAQRLEQLHTANGRTLPPRLKAEILRELQRLELVIGMIKTIEAERDAIALVNTETERRGAKKIQHLAKIKSIGPEFATTLVGEVFYRSFDNRKQLASYVGLTPTHFQSGAMSRDQGISKAGNAKARTVMIELAWLWLRHQPDSPLSVWFRDRVGKLKGRIRRIAIVAVARKLLIALWRYLETGLVPKGAALKV

SEQ ID NO: 368349 - protein, 343 aa, unidentified
MYYIGLDVHKKTISYCVKDAAGHVHREGKIGSTRRELDAWIKTLPEPRMIAMEATIFTGWIYDHLLPYAEKVKVAHPLMLRAIAAAKKKNDRIDAGKIADCLRCDFLPECHMASTAIRDRRRTLRYRNLVLRQMVQMKNRVSGLLMETGVSYDKQRLHKVGYFTDLLSTNEEISQSIRPLLRLSREHIQRAQRLDRALTSSLERDPLLSERLRRLRTIPGVGPITALTWVLEIGDYTRFRSVKEAISYCGLCSAEKSSADKAMRMPISKQRNKHIQHVLVEAAKLAPRYLHEFALVRDKELQRGNPNRATLAVARKMVAYMLAVERRQQDFVAAEEMAGKAVA

SEQ ID NO: 368350 - protein, 443 aa, unidentified
MKSKPSKSQKRKQKISIDQGWAAVNPRAAGIDIGAREHWACVPADAAPNPVRKFGTFTADLEALADWFQECGVTTVAMEATGVYWIPVFQILERRGLQVLLANARQTKNVAGRKTDVQDCQWIQRLHTFGLLQGSFRPADAYCVVRTYLRYRDELVSARSTQCQHMQKALQQMNLQLTQVLSDVTGLSGLAIIGAILQGERDPVKLSQLVDRRVRATPAALQKALVGDDRPEHLFVLQQAFGLYHTYEEKIQACDQEIVRSVTQLPDQVDLSRQPVPPRKEGRRAALDQMAGQNMRETLYRKTAVDLTAIEGIGPLTSLVLFTEVGPDLSRFPTEKHFCSWLGLCPDNRISGGKVLNSRTRRVVNRASDALRMAATTLERSQSALGGFYRRMKARLGAAEAVTATAHKLARIIYRLLKHGEAYVRQGMQAYEEQFRFRKLRAL

SEQ ID NO: 368351 - protein, 346 aa, unidentified
MNYISVDCHISSLDFAVVNDTGDLLKSNRAATSVNNLIGFVKSVPRPRQVYIEEGALAAWVLETCVQYGEKVVITDPKRNRWIGSSGEKDDAIDKFKLAQLARGGYIKEIHHPVGQRRRFRELMEAYHDTVRSTTRIKNKIKAEFRHNGIQCTGTTVYLEAYRQQWKQKLPQDATLLLILDGLWRQLELSEQTEKELLAAAKIQAKQYPEIKRFKALPGIGFIHAATVSAILETPHRFANKRKVWMYAGLGIMKRSSGGKLYTEKLTTDYNRLLKYTVKQAAGAAIRDTHSNPFRRKYLDMTLSGIAPHRARLTIARDMLATMWAMWKKGEKYNPEIREKASHKQG

SEQ ID NO: 368352 - protein, 429 aa, unidentified
MAVGDDPKQHVRQFGVSTKELFRLAQWLTEHQVRHVAMEATGGYEKPLVNVLQETGFEVLVTAGANTKNYRRFKSDTSDAIHIRTLHSLGLLPPIFLADEFSTLIRPLVRLRRSLVEDAADYIRRIQKALRAGNVRLDAVLTDTNSVSGLRVIAAICQGQEDPIKLAALVDSGCKKKPAEIIELLRGNWNGAMRFEVRSNYRLYLNLQAEIAGLDKELDQHFTDHTKELLQPQAVTDPSVGRQKLRQSPNTPRLPIEQYAHKLLGVDLSNIPGFGRDALLTFMAEVGESIAKFHSAKAFAKWLGFTPNNKASGGKVLSKKTLKNKSTLPNTFRLVANSLGNMKKPNPMTAFFLRIAYKAGRIKAITATARKLSVIVYKMLTTGEAYEPTKVVGNVEQVKQQQIRQMKKKLVKFGITGADLGLFANLGAA

SEQ ID NO: 368353 - protein, 367 aa, unidentified
MKQQTSATTETGIKGRNIIDFTGKTIYVGIDVHQKDYQVARVLNGICLGNHRMESNKEKLIEHLKRHYPGASFKCVYESCAWGFTLQRALEAAGMECIVVHAADVSTTDKEKRRKTDKVDALKLAHHYASGNLKGIHVPDEEIQKDRNLVRYRKRLTGDINRSKNRLKGLLKYQGIDLPPQYAGNNWSRNFLNWVEQQAEKDALLKDTLMLMLEQIKLLRQLLLKAERKLREMSKTRYADGVKLATSVPGIGQTTAMLFLLETGDINRFKGFDALNDFVGLCPDTDSSGDVHRDTGITTRRHKQLRSALIEAAWQAVRTDPALMDSYQTLLKRMKGTQAIIRIARKLLRRLRAVLLSGRPYQKGVIA

SEQ ID NO: 368354 - protein, 336 aa, unidentified
MFQLGIDVSKKTLDLCLLREGVKGSVKTRKLQNDINAVNAVIAWLSKQHCKPEDVHIIMEATGVYHESLAYGLHKAGGRISLANPHRAREFARGMGMLTKNDRVDAYMLACYGALKAPEPWLPPPEEVRHLSALLRRRDALVADSTREKNRLEKYLATDTPSVIAESVEAMIGQLNAEIKRLDRLIRSHLNQHPELKKDFDLLTSIKSVGYQIGLNMLVILRSHDFATAEQAAAFLGVVPVEKYSGTSVRGCPKLSKIGPPEIRAKLYLASLCGLRFNPLMKAMYERLCLRGKGKMCAIGALMRKLVHWCYGVLKTQKPFDVGYLSSYARSACKAA

SEQ ID NO: 368355 - protein, 370 aa, unidentified
MPMLADVADAVIGVDTHADTHALQIAGASGVPIAECTITNDENGFAEAIAFAGRHAPGPRVFFALEGTRSYGVGLARALTAAGIPVIEVVRSPRESRRRKGKTDRIDAGLAVLAALRMDVDRLPVPRSDGDREALRILLGARDELATTRTRQVNRLRALLLTGDDNDRAAAKAALTKARLNAFISRRPDRVEDCQSLVRRTEIRRLAQAIRQADEELTANNRQLTEIVNRITPLLLQRRGIGPVSAAQVIVSYSHPGRCRNDGAFASLAGSCPIPASSGRTRRWRLNRGGDRALNRALHTIAVSRMTSCPRTRDYADRRRGEGKSNAEIRRCLIGEVSARDPQGSWLLGRCRGTASLPRRWTASLSSAAP

SEQ ID NO: 368356 - protein, 310 aa, unidentified
MLTASGAQHYQSFPNSPDGFTQLQTWLSQHAVTQLHACMEATNIYWEALATWLYAQGHTVSVVNPARIKGYAMATMQRNKTDKLDSAVIASFCATHHPAAWQPLRDEHRRLRALVRHREDLLQTQLQQQNRLRDTTDSLVLASLQTVVEMLSSQLKAVEQAIKEHVAAHSEMRANLQLLTSIVGIGVVTAAKVLAEFGDIETYASAKAAAADAGLTPSHFESGTSVRHRPRLSKMGKAGIRGALYWPAITAMRRCPGCKAYAERLAARGKAKKVVIGAVMRKLVHIIYGVLKHRTPYDPTKVFGRTATPT

SEQ ID NO: 368357 - protein, 409 aa, unidentified
MTPSLFVGVDVSHKHNVVCGLDDQGQQVGKMASFANNLPGAEQLEQWIVEKMHTAGAEHLMVGTEATSFYDFHVMEHLAQSPLLAHLPPSLYRFNAKLIRDFKKALRSQAKNDYRDAFAIAMRLRMGDLPAAFRPQLAHLPLQRLTRFRAHNAQSLAREKNYFLSQLFLKFSAYTQIKPFSNPFGATSQAILAEYLSTDELMAMPLEDLLEFIIKKGKNRFPDPQKVVEKLKKVARESYRIRPALAQSVHLVLSLSYKNIQTLTSTIKELDEAIVKELDGFTTTLKTIPGIGPVYTAGILSEIGDIAYFRGHPQLAKYAGLTWTEHQSGDFRAEETRIIKTANAYLRYYLVEAANLVRLHDPTFRAFYQRKHQETLKHKHKRALVLTARKLVRVIFAMEKNGTIYRPQA

SEQ ID NO: 368358 - protein, 414 aa, unidentified
MERVFERVFERVAGLDVHKAQVTAAVRVPDGRGGRVQDIAEFATTVRGLLALRDWLHAHRVVHVAMEATGVYWRPVWAILEDDFECLLVNARHVKQVPGRKTDVSDAAWLAQLLEAGLLRASFVPPKPIRALRNLTRYRKTQIEERQREANRLHKLLEDTGIKLDCVASDILGKSGRAMLDALVAGTTDAAVLADLAKGKLRAKIPALQEALEGRFDPLHALIVSSILAHLDFLDEAIDRLSDAIEEQLVPFARAVELLCTIPGVQRRTAQVIIAEIGADMAVFPTPKQLASWAGQCPGNDQSAGQRRSGRTRNGSRWLGIALTEAALAATRTNDTYLAAQYRRLRPRRGHKRALGAVKHSILTAIWHMLSTGELYRDPGGDYFTIRDPDRQIKRLIAQLERLGQRVTLEPAAA

SEQ ID NO: 368359 - protein, 362 aa, unidentified
MAVEKASLDVIVQPPERFMFASQPDTQVSCLIIVLLRGLFMSVYKEDNSMNTHKVSIGIDVSKHHLDVYSEAQKKNLRFDNSTSGIKRLRAFIQAQPSLWRIVLEPSGGYEQQVFSTLVSERYPVSLVPAQWVRSFARASGLSAKTDRIDAQLLANYGSTMDPCVNQSLNALHAKLQSLIDRRAQIVEMIRSEGNRLEKSPSKEIIKWINVHLETLKQQLSEIEKVIKETLNDEHYKAIMNILTEVPGIGVTTAATLLATLPELGKLSKKKIARMVGIAPITKESGTFKGQAHIGGGRTKARGSLYMATLTAARYNPVIKQFYESLRGKGKKAKVALIACMHKLLGILNARLLRYFEGLPVY

SEQ ID NO: 368360 - protein, 385 aa, unidentified
MQKLNDLSRSLTALEPDGTLIAVIEMSLSSWLVAGIVPGIERQPLKKLAVDESALLKLLHRWREEAEKAGRRIERIAVAFEAGRDGFWLARWLKARGIEAYVIHASSVAVSREHRRAKTDRLDTELLKRSFLGWLRGERDHCKMVEIPTMKDEDAKRPNREHDSLIGERSRIVNRMKAALVRLGIRGFNPKLKRASTRLDGLRTPEGEPIPPNALAELRRDMERRRLVNNQIRQIEEERLKRIEQAPCDGPHVMVRLLARVMGVGIETADMLVHEVLSRNMRDRRAVARYAGLTGSPDESGRKRREKGLARSGNVRVRRGMIQLAWRFLLHQKNSALTKWFRSRTENARGTRKPMIVALARKLLIALWRLVREGVVPDGVVLRPA

SEQ ID NO: 368361 - protein, 340 aa, unidentified
MNRTLYALDLAKQVFQLFWVEGHGRTREKRLKRAQVLPFFAGLAPGRVAMEACSGAHYWGRELERLGHEVMLIHPRYVRAFVKTNKTDAADARAIWSAAKQPGMRGVPVKTVEQQTVLALHRVREGRRDMRTALMNQLRGLLSEFGVVLARGRAAGLAELYRRGPELEAKLPATMLTLLREQCAWMAQLTQELRALEGRIRAAHAGDERFAQLTGIPGIGLLGASAFLAQLGNGQQFGSGRQASAFVGIVPRQSGTGGRVRLGPISKRGDPYLRTLLIHGARSVIAKSKQPSPWLQGLIARRGKNVAAVALANKNVRIAWALLRRGGRYEPAHEPRALAH

SEQ ID NO: 368362 - protein, 480 aa, unidentified
MNIKAKKAKVQPLSKKSVINVLSQDEIKKKVQVIEQELKASTWRELETKGKFEKNDKLSFISEEMLIVGCDIGSETHYIRAIDTRGKELSKGAFEFSNSSEGFASAKAWVLKLAAKNDKKQIVLGLEPTGHYWFAIAAWMVSNGISVVQVNPYAVKQSKEIEDNSQLKDDRKDPKIIANLVKDGNYGMPYLPEDIYADMRRLSMFRDQLTEDRIRNINRLHREMKIYFPEYMDAFGKIDGAFTLEILKVAPIPSDIVELDEEGLKSLWHEAKLRGRGYSRARVIVDYAKKSVGLTGGTDAGRESIKWFVEQIIQLDEQLAEIENVLHQKCMEIPHAENILEINGVGENILAGILAEMGDISRFDDVKEIQKLSGMGLVACSSGKHKGQTKISHRGRKRLRYWLFQAAKSAVAHAVEFKQLHAYYTTRSMNPLKKLQSLVVIACKILRVIYTILNTGMKYDPERMLRDIRYPQGNTVQAAA

SEQ ID NO: 368363 - protein, 408 aa, unidentified
MNAVGIDVSKGKSMVAALRPMGEVALLPQEFLHTEVGLEQMAYAILALGEDTRVVMEATVRYYEPVAAALHEYGIYVCVLNPLFIKQSGGGSIRKVKTDKADAMKIAKYVLDNWVDLREYTPMDTIRQQLKLCSRQYNLYMKTVVSLQNNLISLTDKTFPGVNELFSSPERADGHQKWVDFVMTFWHCDCVCRVSEKAFTERYQKWCKRKGYHFSAEKALDLYASSCGHFTTLPKNDNTKLLITTAAQQLLAGKMTLAALRAEMTRLAKQLPKYDTVLAMYGVGEITAAQLMAEIGDVRCFPRRSSIVGFAGIDPGVDDSGKHSAKSVPTTKRGSPHLRKTLYQIICTYLKKSPEDEPVYQLLNKKRTEGKPYFVYMTAAQNKFLHIYYARVKECLETFDAQQDTVQN

SEQ ID NO: 368364 - protein, 395 aa, unidentified
MQVIADRPEAASAIRSDLGAIFVSLELSRSSWLITSLSPGSGEKMSKHSVPAGNICALLTRFSALKQKALARTGKTFPIIVIQEAGLDGFWIHRGLQKEGIESHVVDPASIATSRRRRRAKTDKIDGEALLRALLAYKRGEPRVCAMVKAPTPEEEDRRRLCRERKVLIAERVSHVNRIKGLLFCQGASGYQPLRRDRRGRLDELKTGDGRPLPKHLKVQISRELDRLELLVEQIKAVEAERDALLDAQRIVATSPAAMLLDFNGIGPAFAAILWSEGLFRHFDNRRQVASYAGLAPTPWQSGSIDREQGVSKSGNPRLRTTLIQLAWLWLRHQPKSALALWFEERVKRNGGRLKKSTIVALARKLIVALWKYVTAGVVIEGAAMKTHDNRCRAN

SEQ ID NO: 368365 - protein, 427 aa, unidentified
MNYTQNRKIEQITDQTLVIGMDIAKKKHFAAMVDARGRELKKRIPVSQSRAGFEQFFALIQEAMRKFGKTEVIVGIEPTGHYWLNLAYFLKEKGIPLVMVNPMHVKRSKELDDNLPTKHDVKDALVIARLVKDGRFSYPRILQDVEAELRAGCTYRESLLKERNVIHNQMIRWLDRYFPEFVQVFPSFGKNALAVLENTPFPMDIADQTVEDLIERYRQSGVLKCPQKPKVQKLIEISRHSIGITEGQQMARIEITSLVRRYRQLEQEIAALTEELTALAQTAEDYQWLQTISGLGDATIVELLSEIGSFHQYQDPRQLIKLAGLTLKENSSGQHKGQKRISKRGRRRLRTLLFRVIIPLISHNKAFRALHEYYTTRPVNPLRKKQSIVVLCGKLLKVLYAICVKQQAFDEERMMQDFFSSTQAQAA

SEQ ID NO: 368366 - protein, 450 aa, unidentified
MSPLALDVVTKTGKTPVLVRMLSKYVGRKTSSIENDITKARNHSRQRGNIMRVIFGIDVSKASSEVAILVNGEKIHGYTIPNDAIGFNRLLGDLRTVYQPEIVFEATGVYSRRLQAFFEDNSYAYIRLNPLESKKQLDSLRVRKTDKIDAEKLATSQFILNRKPSYVQEALYQELRDLSRFYQNLTEDIVCSKNRLHKVLQVTFPELENILSSPTGKQYWNLVMAFPCNSFVLELDDATLRAIIRQSTSKRISEKRVTYLVDKLTKLANHSYCAVKKTSPMMEEVKYYAGELLRLSEYRQSVLEEMITLAQPLPEYEILLSIPGIAETTATSIIGELGDIRRFHSANQINAFIGIDLRHYESGNFLAKEHITKRGNPYARKILFKCIQNIASASHTNPCHIADFYEKRKRQSQVTSTKPHTIASIHRLIRTMYYLITHNKLYDYTSTQNR

SEQ ID NO: 368367 - protein, 317 aa, unidentified
MSTSVDVFVGIDVAKDQLDVAVRPSGESWTVAHDEAGLSALVTRLRALAPSLIVLEATGGLEVALASALATAPLPVAVVNPRQVRDFAKSTGTLAKTDRLDAQCLAHFADAVRPQARALPDAQAHELHALLQRRRQLVDMLTAEKNRLQTAASRVRPQIQVHIEWLQRQIGQSDDELRALIRSSPLWRETEDLLRSAPGVGPVLATTLVAALPELGTLTRQQIAALVGVAPLNRDSGTLRGRRTVWGGRAQVRAVLYMSTLVAVRHNPVLAAFYQRLRAAGKVPKVALTACMRKLLTILNAMLKHRTRWAPVGAQHT

SEQ ID NO: 368368 - protein, 356 aa, unidentified
MSKVKELNFEGQTIFCALDVHKKSWRTNIRDRDFELENYSQDPDPQALVTHLRKKYPGANYQVAYEAGFCGFGIQRFLQQSGVNCIIVNPADVPSSDKDIRRKTDTVDARKISRELSKEGLKGINVPSEEIEHARSLVRQRTRLVRDQTRCKNRIWHLLMFSGLQLRPDEPMKHWGGRFVDSLKQLHCPSAPLRLALDIALEEYLQVRKLLSTATRHIRALSRQPAFEGTQKLLQSIPGIGLVNAMVIMTEVQDMARFKTLDKLCAFAGIVPDTDSSGESEKVRGITHRNNDYLRPAVVESSWMIIRKDPAMLMKYRKYCAVMNPNKAIIKVAKHLLSRIRYVWANKVAYEKAVVA

SEQ ID NO: 368369 - protein, 428 aa, unidentified
MTQSEIKSIEFAAYIGIDWADQKHDICLQEAGSKQLESLRLDHKPDSISNWVSELRQRFQGKPIAIALEQKRGALLYSLMHYEFIVLYPVNPQALASYREAFTTSGAKDDPVDAGLLQEMVRLHHNRLRPWIPDDPLTRELCLLVEHRRRLVDDRTRLTNRLQALLKQYFPQALDWAGELDTVRALDFLAQWPQLEALQQATPEQLRDFYQQHYRLREKLSPRLDEISRAQPLTLDKAVITASITMVQTLLEPLRGLIAGIETFDQQIKDCYQQHPDKEIFNSFPGAGAVLAPRLLAAFGADRERYQSAEQIQCFSGVAPVTERSGKTKFVRRRLACPKFVRQSFHEFANSSIKWSRWARAYYDQQRRRGNKHHEAIRSLAYKWARIIYRCWQDHQSYDESVYIAKLELRGSPLAKLIPTAVEEAANC

SEQ ID NO: 368370 - protein, 453 aa, unidentified
MPASITTPPCQRTVGIDLAISAVQVAQVFDDGCPVGKPIRFRLTPVDLKRFITALRAGVPANVPITALMEPTGMAWFPVAAWLQRAGVKVIRVKGQRVKALRKYLAEHIKSDLADAHVLGAMPGFGGRGLNAVHVPGPEQHALQRLTKQRHRYQELVCAARRRVLDLIRWACPALEAALPDTMTKLTLAILGELFDPRQVLATRRDVLGRFLGRHASGNHPKSGPFIDELVDKLKAVAQETIALHADSVDFAALQFEVAQEIEHLRLWEQHIDEIERRVELIYQCVHPSNALRSIPGIGPTLAPLLIGVLGQAKRFRNEDHIRGFCGMFPAKNSSGGVDKPGQRLTKSGSDRVKRALYIAADVARKIDPDLASVYWRLMVKKGHHHKQALCAVATRLINRIYRVLKTGEPYVLRDQQGLAITVQEGKRIVTAQFSVPFEVRQSRRRQLMPQPT

SEQ ID NO: 368371 - protein, 354 aa, unidentified
MDGLILAIDLGKFNSLCCWYDTVTKSATFRQAKTTWVDLGRDLTRQRVAGVIIEAGSPAGWVYDLCAELGVPCWVANTAGPAWQWKNLKRKTDRDDALKLARLAAIDELPTIRVPPRPVRQWKSLIGLRKRLVGERGRGQNRIRGLLVGQGLPAPKGNKAWTQLGLDGLSQLARPLSACSATELWRGELSALIARHRFLDGQLREVEAALDALAQSSPAVQLLTTVPGVGVRTAEVIATHLHEGRRFRNADEVSAYAGLVPRQYQSGVCDRRGCITKRGPKLLRAALVECAWCSLRYNRWALATWQRLVANGLSKKKAIVALARKLLIHCWGILKSGRPWQNPSSAVAAGPLVV

SEQ ID NO: 368372 - protein, 359 aa, unidentified
MQTQSNKIDFTGQNIYIGFDVHLKSWTVTVMTEKLTHKTFSQPPKPEVLYHYLAKNFPGATYYSAYEAGFCGYWIHNKLVELGVNSIVVNAADIPTTGKEKVMKTDPRDSIKIARSLRNGDLKPIHVPSIKTLEERGLIRMRATLVKDLTRYKNRIKSFLYFHGIEYPEVFNRPKTHWSNRFNQWLEGIEFNDLISKATLDMLLGQSNSLRGSVLQITRQVRELAKTDRYKMQEKLLRSIPGIGILTAMIILTEIETINRFSNIDQLCGYIGLIPSTCSSGDKEVIGDLTPRGHSILRTAIIESSWVAARLDPALNKSYHDYCKRMEANKAIIRIARKVSSRIRFVLKNNQPYVFSVVK

SEQ ID NO: 368373 - protein, 363 aa, unidentified
MNATAALPVVGVDLAKSVFQLAVADGSWRVIEQQRLTRTQFERFFTNRAVGLVVMEACGSAHHWARWLNNLGIEVRLLPAAYIRAYVKRNKTDAADACALLEAARCAEIMPVRVKSIEQQALQALHRTRSLWMATRTSRINALRGFCREFGIVIAQGSRLGVEQIGRVLADPQTAVPTLIRGTMTLLVEEIRLLEVRIAQLERELTALARQSPACTTLLSIPGVGLLTATAMVAATSGEGSHFRDARHFASWFGLTPKEHSSGGARHLGRISKRGDRYLRMLLTHGARAVLRAASVATHAGKTVDPLRHWALAVQGRSNHNKATCALANKLARICYATLRDAEPYGAARLNKKVARTAFALPA

SEQ ID NO: 368374 - protein, 472 aa, unidentified
MSLLCDFYGHVIVEPTSVDCNGHALRAMALQARAACDQAGIVDSIVAVEMTGVYHKPVVRAFREADFETRLVHPHASKHYAAVSHPDLKTDDNDLEAIFQAACQGFGLLQPAVDEVYQTLQVYSRHRRNLVQQRGRLQVQIRALLHQTMPGYADLFSIDKFFNNSIAIDVARNFISPQQIVDAGVKVLAEYLKRKQIRFRKPTLERIVAWAASAATPDSIAQLLHRTWCELDDLRQKMSAQIEAAEQKMAEFLAKTPYVLLLSVAGINVVTAAELAGEAGPIELYPNAEAIKGRAGLFPSRYQSDAVDYNDGAIARHGNRRLRGALMRIAECLIKHHPQYRGLSEKWKAQKVDPRDRRCRVANRAVRMIFQVVSGKQVYQRRGVDRQYLLSKLLEFHRRHSSSPEEIAANLSNVFTWLPKSSYQAEGSALGDELRKRKRKLQSLGELLIPLLIRLGVQTEPEVESKTSEARD

SEQ ID NO: 368375 - protein, 350 aa, unidentified
MFVGIDVHKHSHAAALIDDRGGELGVLMFPNSPAGYRRLIGWLADRDAAQAVIGVESPGSYGRCLTGALAAAGHEVLHVPAWRTHRERHRQGPGKTDPGDALAIADVVRRKRAELGPALQPELVRALSILELQRRRCVLDRTQAIQRLRSDWTQLDPVAEAKLIGCARPTALRKLKRLTLGDGLVERIAASTIRQLARDIEDLNARIAELETQIADLLDEHGNPVADLLGAGNQIAAALISHAGDVRRFKNAAAFARYCGAAPIPCGSGQTAGRHRLHRGGNRQLNAALYRIAIVQQRHHPDAKAFLARKIHEGKTAREARRALKRHLANVIYRRLLTWANTTPAMNHLT

SEQ ID NO: 368376 - protein, 341 aa, unidentified
MKNISILSIDLAKNVFQLHGQNKQGKQVLKKRLRREELRSTIANLPPCLIAMEACIGAHAWARQFMKMGHQVKLLAPQYVKPFVRVNKNDQRDAAAIALAASLPSIPSVSVKSEEQLDLQAIHRVRERLVRERVATGNEIRGLLADMGVVIPTGEAAIKNLLPTLLEDAEQPITHRGRLLLDDLRSQWLEKEAHVKRYDRILKEYSKGNEECQKLMDIPGLGIINASLLWCYIGDAKRFGSGRHVAASLGLVPKQASSGEKEKHKGISKQGNKYLRKQLVHGARAAYRVLLKDGATGRLADWAKRMKSSGKHPNKIVVALANKLTRIAWSLLSKADAHYQS

SEQ ID NO: 368377 - protein, 446 aa, unidentified
MTAATVIGIDLAKNVFQLHGVNEHGRVVLRKQIKRNQMASFFANIPRALIGMEACSSAHFWARKLQSMGHVVRLMAPQFVKPYVKTNKNDAADAEAISEAVTRPNMRFVPVKNVEQQAVLALHRARQGFVRARTAQANQIRGLLGEYGYSIPQGMAHMPQVFDVIEDASNDLPGVFRQLILRLMDHLKVLHQQVTEIDVQIKAWHRNSDLAKKLEKIPGIGPVTATALVATIGDAKHFENGRQLAAWLGLVPRQHSSGGKQNLLGISKRGDSYLRTLLIHCARSVISASKRKGNCEGWVHELIRRRNHNVAAVALANKIARTVWRSGRTTEMRHSSRKRPLKDSFFALSVGLPGREMSISTPFSYAHFVERLRNELAAIVDLDRGGVPAHGSNTRSALRPHALPSDFARPRLASSIPGVVVDDGQCQLDVSRRTVHPQRNPCSRFR

SEQ ID NO: 368378 - protein, 375 aa, unidentified
MGGPGIYVGVDVSKERLDVAVRPSGEGFAEANDKRAVSQLVKRLEALNCTRVVVEATGGYDTVVVGALYAAVVPVVVVNPRWVRNFAKGMGWLEKTDRIDAKLLALYAERAELKVQQLPDEVTRRLAELCARRIDVLEMIETERNRLEHASSAVRRAINSHIDYLRKQLKSIEHDIDGAVRGSELWRHRNELMDSVPGVGPTLRACMLAWLPELGQLNRGEAGKLVGVAPLPDDSGTIRGVRRIFGGRAPLRKVLYMATMGAMQHNPHLRAYYDHLRARGKPHKVALVATMRKLLRILNAIIKNDTPWSEPCPAKRLTRAQERCPQVHRRDTSRVPRACGPCGQRGSRPADHLTSKTVASLHGVPRAGSPASRVL

SEQ ID NO: 368379 - protein, 384 aa, unidentified
MDTVSVVGMDLHRDFSKVAMMSQDGKVLETRNIRHDSRKEMAEFFDGLEDGTAVVMEAGFNWPWVADLAEAAGMKPHLGHAIRCRELAKGMAKNDRKDAIFLAKLWLAGGDVFPEAYLAPQEVRVMRAKFRTRSLLVKIRSQMKNSIHGILHKYGVKCDEATDLYGKKGRKILDGLELPAVAKEEMERKLAFLDDLARHIDSIERQLQSELPLDKRAGLLQTIPGVGRIIAYGMLAEIGEIGRFPDKRALASYAGVLPLDNMSAGEDHGKHTNRRCNKALRWMALEAVRGAVRNSRRMRLLFERVKAKHPSTPGMAVVAVARELLEVAHLMLTRGVPYMENPPPRPGSVQTVDSCHPELLGTRGSRRASQMGRCAASERIQADH

SEQ ID NO: 368380 - protein, 350 aa, unidentified
MLIGVDYHPSFQQIAFFEEETGECGERQLHHSDGEAERFYRDLKQRGIRVRVGMEATGYSRWFERLLAELGIEIWMGDPAEIKAKRVKKRKTDRNDALLLLRLMREDNFPQIWVPSPENRDVRQLLWHRHRLVQMRTRIMNQLQALAMNEGYRWKKKLFSEQGRTQLEKLALAPWASRRRQELLELLDRMNPTIEELTAAVEREARKRPEAMRLMTHPGVGPLTALAYVLIIGTPTRFERGKQIGTYVGMIPSEDSSGGKQRLGHISKQGNSLLRFLLVEAAQAAVRSNPDWRRRYIHLAMRRHKSIAKVAMGRRLAVRLYWMWRNGCEYSPSLEFGSYAGQLGTGHGVK

SEQ ID NO: 368381 - protein, 334 aa, unidentified
MGLDQHRAQITAEWIDTATGEVSRARVAPSDRAGVRRFAARFGGRELEVALEATTGWRFVVEEFGAAGARVHLAEPAETAARRGTKKRAKSDRADARHLRELLMVGRLPESWIPPAHLLDLRARVRLRHTLVDQRREWQQRMQAVLYHHGAPARGGLLTAESRAWLAGLSLPAAAREQITVALAMIDAHDAQLAPLDRELRTYARRQAGCRALMRHYGIGPLTAVTILAELGDTGRFSSSREAVRYAGLDITVHQSDARRAPGRLSRQGPSALRWALFEAAQCARRPASPDHDYYTETAARLGGNRACLAIARKLLKRSFHTLRELGEEALQPA

SEQ ID NO: 368382 - protein, 429 aa, unidentified
MFLEVVCVLGVGVDWAEAFHDVALGVPGKGVVEQFRVEHGPSGVSRLVTRCLELEPDPAEVRVVLETRHGLLVEALVDAGFTVLPVNPDLVARRRGPAKKKDDAEDARICCLMALDSYLDLRKLIPHGEIGAELRAIARDDERAARDERRIGNRLRADLLAVFPAAIDIAAGDLSAPVFLRLLERWPSAGELAAASREEIEAFARSARHGWPGRFADTVIAALAAPRLNARPELARAKAGSIRLAAAQLLLLHDQRRAWEKRMGELLLGGTRPRPGASPKDADPGKAFPGGEIYLSMPGLGDRLTARVAGEIGEHSGQFTTPNALQCYAGRAPVTRRSGRSEFTIARRLAYNRHLGEAVQQWAFCSLTRSGWAREFYNAKTAAGDGHHAALRKLGNRWLEVLWHCLDKGVCYDEAVHAANRNRHQRPAA

SEQ ID NO: 368383 - protein, 348 aa, unidentified
MAVSIVEAGRVIVGGVDTHLEVHVAAALDPIGGVLGVESFVATPKGYTALLEWMTAFGTISKVGVEGTGAYGVGLGRFLARAGIEVVEVDRPNRQMRRTKGKSDPADAVEAARAVLSGRCIGAPKSRDGNVEAIRALLVAKRSAREGRLRAVHQMRQLSYTAPDQLRCRLKGLATTEFVAEAATLRVRAGGDAVVAATKMALASLGRRVHALEEEAGHLDERLGELVAATAPNLLELFGVGIDTAAVLLVAAGDNPERLRSEAAWAHLCGVAPIEASSGKVTRHRLNRGGDRSANAALWRIVMTRIAKDPRTRAYLERRTKEGRSKREVIRVLKRYVAREVFKHLPRA

SEQ ID NO: 368384 - protein, 430 aa, unidentified
MKFNTQNAKIEAITEKTLVLGIDVGSEMHYARAFDYRGIEYTKKPFKFSNTEAGFMSLQAWILDLKEKHEKDKVVPGMEPTGHYWFNLGKFLQDNEMKPVLVNPHHVKKSKELDDNNPTKNDCKDPKVIAGLVREGRYMIPYLPDGVYADLRTASNIRFQLQVELTRIQNRISRWFNIYFPEYKTVYGKPDAKSGILILKTAPLPEDILTLGIDGVNQIWRDAKLRAVGKARAKTLIEAAEHSVGSKEGTVSARMEIRILLEDYESRNIRLQEVMALIEELVAQIPMAEKLLEIKGVGIRTVSGFLAEVGDISRFNSPKELQKLAGLALVENSSGKHKGETTISRRGRKRLRYLLFEVAMSLVAKNPEFRELHVYYTTRRLNSLKKMQSLMAVAAKLLRIFYAMLTKGVDYDPKKMVSDIKRPAAYLQAE

SEQ ID NO: 368385 - protein, 341 aa, unidentified
MSSSSHSYHLVVGVDIAATSFMAAWARPGQPTAPARPFEQTAAGFAAFQKQLVATGVAPDATLVVLEATGSYWVALAVELHSAGYRVAVANPAHVHNYAKSLPRRGKTDGLDAHLLTLFGLERQPAAWTPPPAVYHELRQRLVARDGLLTMRQQARNQLHALEQWPVRVAAVQQQMSEVIESLDQQVRALEKAIAEVLADGAWAASAAHLQSIPGLGLVTAAWLLVGTVNFTTCASAQAAANYAGLAPMERQSGTSIRGRPSIGHGGNQRMRTALYMATLSAARYNPVIKTFYTRLREAGKPAKVARCAAARKLVHLAFAVVTKEQDFDPSYQKTPVVSAA

SEQ ID NO: 368386 - protein, 390 aa, unidentified
MLRKNIVQTLDAATSWKVFGLDLAKHDLAVVAIPADGSEVQYVKRYSYADFLEFTAQIPSATMVFEPGNGANHFALRLQAQGHTPKMVSGASVKSWITLHMSGQKTDLNDAYALARLSEDPDLKTVRIKSVDQNRLQSLQAMRKQLVEQRTKTIVSIKGIFQCWGILFKKDSRSLKKFKEAANNNKELLGEEVVEAMILQIDRIADLDKDIKHVEELLKKVTMQDPRAQPMLDIPCVGLQTVSRLCAIMGDIKDFETPRSFVAFIGLVPKNMISGNKTTTPSGYEQVGQGKVNRRGDKMARSLIIQCASSMYMNFHKDNFPECTLKDWIQKQKDAHKPYGKIMVSLAAKLLRIIYAVLKHGEAFSYEKAGISRSALAALKAAQPAEVGNA

SEQ ID NO: 368387 - protein, 330 aa, unidentified
MNELTNISYIGVDIAKNKFDICVFNGNFSSCVYESFPNNMDGFFDFFSLLDSVNHFENIRIGFEATSIYMVNLQKYLDSHKVKYILINPKKLHHFIKYKNFESKTDKLDSYYIAYYITTLEDYTFNSTHSNTKHLYKSYQAFINMITKTETHMKALDDCFINDELMSSSLKKEVMNLRGILTKTRNKLITEYTEIVKISMPEYDLIKNDLVGVSDMTLLAVLPVIYEVSEKYSLKQLKSFIGLNPVYRDSGSSVHGKQRISKSGNSEARKKLYMASLSSIQHNAEMKLKYRRLIDNGKPHKVALVAISAHIFRAIVTKLNYYKSIKNDLD

SEQ ID NO: 368388 - protein, 351 aa, unidentified
MHMLADSVEVVIGVDTHKHTHTAAVVAAATGAVIQQVTVPATPAGYQQLLELAGRQSSRRIWAVESTGGYGAGLTRSLAAHHERVVELDRPKRAARRHGAKSDPLDATRAAREALGRDQLAQPRATGPRAALSVRLAARRSAVQAAGDAQRQLHALVVAAPDVLRERLRARSTRQLVAACARLRVHADWDVETSSTAATLRSLARRIRELTSEAADHRQAILALVRAWRPDLLARAGVGPIVAATVLCAWSHPGRCRSDAAFAMLGGAAPIPASSGQTVRVRLNRSGDRQLNQALYTVVLTRLRTDPATRAYAQRRRAQGKTNREIKRCLIRYVARQLYRQLETQPALDTT

SEQ ID NO: 368389 - protein, 416 aa, unidentified
MNDQRDKACGADIHKNKIVATILSLSGTKNQSEFGTTLPELLKLKSWLIDNGCNVVAMESTGTYWIPVHSVLEDSMEVIVANPYMIKHIPGKKTDLIDADWLAELCLKDLIVPSRIFPKEARILRNLTRAREGLVKIRTRFKNKIHRDLSSSHIKLSSVVTDIFGKSGLHILRGMLDGRSIDEIIKSIPSNRVKKNADKIKEAIENNLDPSQIFLIESSLDLIGSVQDKINAIDADLKRKMSTKQKDLKIAMSIPGIEFTSAATILAEIGNYRSFSPPEQLASYFGIVPFVNQSADKLHNGCITKHGSPHLRWIMVQVAHAASKKIGSKLRRFYLRVRARRGANVAIVALARKILCILYHLLMNQEMYKEPGAAKRTRPKRLDQLSPQREFTAQEMIDILKRSGYEVRKIDRGACS

SEQ ID NO: 368390 - protein, 425 aa, unidentified
MGFIPPQHLPASLPYHWFVGIDWGSQTHQVCVLDRPRRCVAEREVHHDGLSLAQCATWLSELSAGEPTQVAVAIEMPHGAMVEMLVERGFAVFAINPKQLARFRERHSVAGAKDDRRDARVLADSLRTDLPSFRAVRLSAPELLVLRELSRAEESLLQEFRRTANRLRDHLHRFFPQMLQLCPAADEAWLWDLLELAPTPAHAQLLSEKQVHQVLKAYRLRRRQAPKVLTCLQAPALPVAPGVAEAAQAHCALLVPCLRVLAEQLRRCAQQVNTLLSILTRPTAETGPSDVAIVQSLPGVGRKITTWLFAEAAGPLAERDYEALRTQSGVAPVTRQSGKRRQVVMRRACNNRLRHALYHMARVAMQCDAEFSSVYQALRAKGQRHGQALRNIADRILRILIAMLRDRTLYNPAQRPFLTCAQMSR

SEQ ID NO: 368391 - protein, 385 aa, unidentified
MRSQTFIPRDYDVFSGLDVDKRSISVTFTDHHRFLKSLRMPYSVEHLLNHVRKHFANQKVAFVYEAGPTGYGLYDGIVAQGYPCLIAAPSMIPKAPGQRVKTNRLDSKALSENLRGGQLKSIHVPSPTYRQLRHLTQLRDVLVSELVGMKQRIKSLLLFEGIEFPPAPPGSQWSSIVKNKLRKLPCSGMVRFKLDQLLDSLEFNEKQVLKAIREIRRYCQNDPELSQCMKYLMTLPGIGWITASQLLARIGDWRELNNIRQLGGFLGLVPTEHSTGERTDRGSITRTGDERLRSKLIQASWSAIRQDGELREFFRTVYRKHPREIASRVAIVAVARKLSVRIAVVLMKQRPYEVREKVHSAPLTQEETSPQGTTRREPEPGDKNS

SEQ ID NO: 368392 - protein, 410 aa, unidentified
MAERFVGIDVGLREHRVAVLDRDGEAVGSSFTIAASKDGVTTLARALGARDATPAHTLIGLEASGHLWENLEAALGGAGYRVLVLNPLQTRRYRDVVRRKAKTDDIDAHVIAGLLRSGVAQASYVPDEQIQSLRELARLRARLMADRQDYQRQLVAQLDVVLPEHRAVLGDLLTARARGILAHFPTAQHLAQANPRAIRRAAEDAGARGFSLNDATGVRDSARRSLYRGKAAAARAHVVRTLVSQLERLTSAIDEIDRAATTLLPPSEPGTGPSDAELLQTIPGIGAQTAATLLGELGALTRFTDARALVAYVGFYPVIHESGDRAATPRLSRVGSRIARRSLYLAAVNAVRQSGEWRTIYLRKKAQGKTAKQALVVVAVKLLHALYAMLKHRQPYNPSRLLVAPATIGT

SEQ ID NO: 368393 - protein, 360 aa, unidentified
MKKKWLWAGVDLGVETASICIIDDAGEVLHEGVCPAVTKSVRHELACFRRTRFASVALEAGMGGHVARGLRSLGYPIELYEARQLSKFLRVRRNKTDAGDAQGIAEAGRIGASIVSKVYLKSIDSQALQSCLAIRRHLVRQRVAAVNLLGRQIEVFGGRLRRESLGLRRKSLGLCRAVDDEIRTLFRSGPSPLIAQLRYLAEHCERLIEYERAIDRELTQAAHDNEVCRRFMEIPGVGPLCALSFFAAVDDPHRFSRSSDIGSYFGLAPMLRESGMTSRQARISKMGSKSVRSLLVHAATIYILRSSPNYALRNWALLLEKRRGRRPSRVALARKLAVVMLAMWKSGDRFKPRELLPIAE

SEQ ID NO: 368394 - protein, 391 aa, unidentified
MIYVGIDVSKDKHDCLIINSDGELLFKAFTIPNNRTGFNDLYQKIEEVATDLSRVKVGLEATGHYSYNVLGFLIDKGLTTFVINPLHTNLYRKSLSLRKTKTDKVDAHTIATMLMSDVNLKPYSDISYHNEELKSLTRYRFDKVSERAKLKSSISRLVTILFPELEKLVPTIHMASVYALLSEYPSADLVANAHLTRLTNLLKDASRGRYNKDTAIMFREAARVSIGAKMPAKSLELKHTIKLIKELDFVIDEIESQIKLIMNEINSPILSIPGISYRMGAMIIAEIGDFNRFDSPDKILAYAGMSPSTYQSGKVESSYSRMEKRGSKYLRYALFNATKYVCHWDPTFSSYLAKKRAEGKHYYVALSHATKKLVRVIYKLEKSGQLYIKAA

SEQ ID NO: 368395 - protein, 405 aa, unidentified
MEVVYERCCGLDIHKKSITACVIVGKKKEIQTFGTMTDDLLQMTAFLKERKVQMTAMESTGSFWKPIFNIMEVEEIPAILVNAAHIKNVPGRKTDVKDAEWIADCLKHGLLRASFVKPRDQRELCELIRYRGSMIEERSREVNRMGKVLEGANIKLTSVASSVDTISGMSMVRSLCDGIDDPAVLASLAKGSMRSKESELKRALNGLVRPHQRMILKSMLDHIDNLNALISKLDSEIENRMKQDVELVDALDGITGVGKVSAQTIIAEIGTDMSRFPSADHLASWACICPGNNESAGKKKSGKTKKANSTLKKTLVQCGRAAANSKDTYLNAQYRRISARRGAKRAVVAVGHSILTICYHMIKNRTQYNELGADFFQQRSRESLINQNVKRLEALGFNVRLEEAA

SEQ ID NO: 368396 - protein, 320 aa, unidentified
MSVTSVTVGIDVAKAHVDVCVLGAKSSAQRFDNDAEGHSTLAAALQPLDVGLVVMEATGGYEAALACALQATGLPVAVINPRQARDFAKSMGRLAKTDAVDARTLAELAAVLLRRDDLQRFLRPLADERQQWLAALVTRRRQLLTMLHSERQRLQITPKKLHASIEAIEAAIKAQLDEIEEQMVTHVREHFGELDTLLQSAAGVGPVASATMIAELPELGRLNRREIAALVGVAPMANDSGGSKGRRRVQGGRFEIRRVLYMATLTATRYNPAIKAFYERLKAAGKLPKVALVACMRKLLTTLNAMVRTGKPWDKSLHCA

SEQ ID NO: 368397 - protein, 461 aa, unidentified
MSRQKPAGKQKRSVQKKVDWKALEIVHPDAAGIDVGGSEHWVAISPDRDPEPVRGFGCFTADLREMGRWLVEKGVRSVAMQSTGVYWMPVFEVLEQHGLEVYLVNAQHTKNVPGRKSDIQECQWLLKLHAFGLLNNSFQPTDEIRIARTLWRQRSNLVTEAASAIQRMQKVLIEMNVQLSNVLSDVTGMSGMKIIEAILKGERDPWKLSALVEPEVKATPEEIAKSLEGNWREELLFVLRQHVELYRIYQGKIDDCVLQLRKHLELLGSKVDLKTQPIGRRPKGKKNSKNAPGFDLRTELYRITGIDWSQINGIDVLTAQTVITEAGADLSAFPTEKQFASWLGLSPTNEQSGAKILNRRTRKVVNRATVAFRNAALTLLRSQSYLGAQYRRLRTRLGAPKAITAMARKLACLFYRLIKHGQPYVDKGTEYYEARYREQQIRSLAKRAQKLGLQLIIPKTA

SEQ ID NO: 368398 - protein, 385 aa, unidentified
MQASNASAPIADYHDTIFASIELSQKGWVVTVQSPDRDRLSRHHLEAGDHGGLLELFDRIGERAARKLGRRPAVISCYEAGFDGFWLHRCLTAAGITNFVFDPASIAVEQRGRRAKTDGIDGEVLLRTLRAHCRGEPRVVRIVRVPSREQEDARRGTRERQRLSEEQTAHTNRIKSLLRLVGMAAGNPRRRDWLKWLSEQRDLNGDPVPARLLVELEREHARLMLVRKQLIALEQPARVEQSPAAAEMAERQGVLLRLKCLGPAFSGTLTNEVFYKDFRNGKQVGSYFGLVPSPWKSGGTDREQGISKAGNRRARQAAIELTWLWLRHQPDSALSKWFRARTLNASKRIKRITIVAMARKLMVALWRFVTTGLVPDGAVLKPVKA

SEQ ID NO: 368399 - protein, 328 aa, unidentified
MNTKQPSKRISGVLYVGIDVAKDTLAVFAEGLFEGEIENKSKAIARMVHSIRTQTGKGTDVRFAIEDTGAYSLPVHLELDRLHEKVCVLNPVRVRHYAKFRGVLAKTDRIDARMIACYADECSCEPTPIPSSTHLTLRDLIRTRSLLVKIRTMIETLRRLPLIGPTSRKILSEVDRFIETRIDRLDQELSERTKDDAGVLRVSKELEKLRGVGSLTATTIAVLAPELGTLGRRQAASLAGLAPIPRESGRFKGLRTIGGGRDELRRALFMAALSATRWDPTIKAFYHHLKDEKKKKHMVALVACMRKMFVHMDRVVARRNETGSETAS

SEQ ID NO: 368400 - protein, 391 aa, unidentified
MFYIGIDIAKKNHEASIIDSSGKSLSKSISFPNSTKGIEKFNNFIAEFGVTTNNCIIGMEATGHYWISLFSYIVDLGFTCYVINPIQSDAFRKMYVRQTKNDSVDSFIIAQIMRFGEFSISNFSDENTFALRNLTRYRFALVDECSDWKRKLIAILDQVFPEYSSLFSNIYGVASKELLSKYPLPEDMLSIPAEELGNLLYECSKGRLGINKAEEIQSRARESFGIKFAKRSFSFQIKQIISQISFLEEQLKEIEIEISCLLEDICPIITTITGIGSVLGASIVSEIGNISRFERANQLVAYAGLDTRVKQSGDFSATNTKLSKRGSPYLRRSIWLAATVAAFKDPALSIYYQGLRARGKAHGTAIGAVARKLTNIIFAVLRDQKPYTPNI

SEQ ID NO: 368401 - protein, 407 aa, unidentified
MRAVMIGIDPHKGSHTAVAISAAEEPLGELRVRASAAQAGTLLAWAAAWPERTWAVEGAGGLGHLLAQQLVAAGERVLDVPPKLAARVRLLQAGDTNKNDPNDALSVAVAALRSKARREVAAEDHAAVLKVWSKRHRDLARARNQVACRLHAVLCDLLAGGVSKEITAAHAARILEQVTPSGPVAAARCELAGQFLEDLRGLDAQLRDTKKKLAAAVKASGTSLTEVFGFGPVNTGTVIGDVIDATRFPSRDHFASYNGTAPVEVSSGNRKIYRLSLRGNRRINHALHMAAITQIRHAHSDGRAYYDRKIAEGKTHKEALRCLKRRISDAVFARLQADARKATATAAAKGPGGQPGNDSDSSAASSHPATPALRTSHSRARHHPTARSPRGRAIPAAPTSKRTRGTG

SEQ ID NO: 368402 - protein, 349 aa, unidentified
MIVIGIDPHKQTLTAVAVDGGTGQALGELTVPARAPGFERLVEWARSLDAERSFAVEDGRHVSGALERSLIDRGERSVRVPPRMMGESRRTDRISGKSDPVDATAVARAALRHPDLPEATLAGIEREIGLLVAHREMLVNERTDRICKLRWLLHDLDPDLAPPLRTLDRFKMLDRLATTLRALEPSVVKELCLELLNRCREITVRANELERRIRAVMKTHAPALLEIPGCAALTAGKIVAETAQVCRFPTERHFARYAGTAPIPASSGARHRQRFNRRGNRQLNAAMHRIAVTQIRMHEPARVYLATKRAEGKTKTEAIRALKRHLTRVVFKTLTSMDRPADRLTAAAA

SEQ ID NO: 368403 - protein, 416 aa, unidentified
MDTMYERCCGLDIHKKTIEACFRSGKKKTHMSFGTTSAELRKLTMWLVENDCQSVAMESTGSYWKPIFNILELSGTDMKIIVVNARHMKNVPGRKTDVNDAEWIAELLQYGLLRPSFIPDREQRELRELSRYRKSLVGERAREINRLQKMLEGGNIKLTSVVSEVTGYSSRRLLDRLLRNDEPMTEDVISGLVHTSLAGKSKELETALDGLLSEHQKELLIKVLDHIDDMSRRIADLDDFCRKQMKKYEDALDKLDEIPGIARRTAETILIETGLDMSRFPTAKHFARWAGLAPGNNESAGKRSSGRTTKGNPTLKSTLIQSAKVAARKKDSFFKARYQKIAARRGANRASVAVAHSMLIAIYHILKSGERFKDLGEDYYNQFNKEKKKKYYLKKLTKLGVNLKEATLSISIQAAT

SEQ ID NO: 368404 - protein, 347 aa, unidentified
MSSKNQDCVVYGVDIGKTLFHVCGCDRQGKPVYRKKFSRRTVTRFFANAPEALIGMEACPGSQWLARRLVDLGHDARIMPAQFVKPYLNRQKNDANDAQAIAEAVQRPTMRFVAIKRLDQVDTQALHRVRDRLVRQRTQIVSQTRGLCLEYGLTMARGVPTFCRDMPRLLENPCDALTPRMLRILHALWEEFQLTNDRVNAISEEIKAIARHDETARRLMSVPGIGELTASAIVSAVGCPQNFRRGRDLAAWIGLVPAQHSTGGKTTLLGISKRGNPYLRRLLVHGARAAKLHLDRDKDQLGPWLNKAEARMPSNKVTVALANKLARIAWVILTRPGETYDKGAIAA

SEQ ID NO: 368405 - protein, 326 aa, unidentified
MTLSHLLDNTFVGIDVGGAGLDVAWHRGDGAHYANRPDAIATLVERLRTGPALTRIVLEPTGGYEKTLVKALRQAQLPVEIIHTTRFKAYCQLVGVKAKSDTSDARLLASYAAAPDEIRGRKAGHVELPEDAIREELSELASRRDQLKHMIHAETCRLGTVRVAELRQMITAHLEALRVEDKQVHEMMLVRVRQRFDLKRDQCLLKTIKGIGVKSALVLLASVPELGRIDNKAAAALIGVAPFSRQSGTMTAPSRIHGGRAAVRSILYMAAVTASRHNPVLRPFYERLIAKGKAPKVALIAVLRRLVVFANAVIRSGQPWKGATSS

SEQ ID NO: 368406 - protein, 397 aa, unidentified
MSMFFVGIDVSKDYSSAQGLDQEGKRVFYLEFAMNGEGFSQFLKVLKTHCEDLSGVTVGMESTGCYHINLFAFLCSEGMVCVVINPLLISNFARLSLRKTKTDKKDALTIAQFLLAHRSKLSQVSYSQSSQDLKDLARERESLAGMIAGLKNDVRRLLQMTFPELEHRCKLFTETMLRFLIKFPSARTIRIAKQKEISKALIHTEGKRKRVFISAEEIIRLAKGSVASESVAKELILSEKIETLLYLEEKKGRITEALVEACRSMRVDELDILTSVDGISAITGSTFLAELGDIETFRSYKHVIAFAGLDPSIHQSGQYEGVSRLSKRGNRHLRRVIFLMTLCAVRSQNIFREYFLKRKGEGLPPKKAILATAHKLLRVLFAMLTSKSYFRKEVVEV

SEQ ID NO: 368407 - protein, 315 aa, unidentified
MNRTTYGLDLAKRVFQVHWVDIDTGEVKRRTLRHGEVLRFFALQPGSVVAMEACGSAHYWGRALTNLGHDVKLIAAQFVRPFVKTNKTDTADAQAIWEAAQRPEMRRVALQTVEQQAVLGLHRVRQQLVKQRTMHANQVRGLLYEFGVVMPQGWKKLLAEAGPLLADDDQVAVPKPLAEVMGKQLSSIQSLSERIDALERRIGLWQRGDVECQRISAIPGVGPLSATAVIATIGNANGFRSGRELAAFFGLVPRQSGTGGRVKLLGISKRGDPYVRTLLIHAARSVLVAQTRNGREPDPWVKQLLGRRPWNVVLN

SEQ ID NO: 368408 - protein, 418 aa, unidentified
MKVEYPTCCGVDVHKTFLVATIITTQGFTPHYSKRRFSTFNKSILQFKQWLTDNNCFDMCMESTGKYYIPVLNLLEDTIHVTVANPKWVRAVKGNKDDVKDSKWIGDLFRLGLVPGSYIPDKPIRILREYTRYRSKLVSCKSSEKNRFQNAFTVCNVALDAVVSDMFGISASAITDYLITSDSFDPAHCTSLLKGSLKKEADTVIESIEGYQMTKEQKERMVMVRSHLDFLHQSVEVIDEKLDKMVAPYENAISLYCTIPGVARASAITIISEVGSSMAQFANSKRLCCWAGLTPSNNESAGKKKSVRITRAGVYLKPALVQVAHAAVKSNISPYYKLKYERISKRRGKKRAIIAIARMILTAIYHMSSTGEEWNPSDLYKIDMPQEMLEKQKEKAIKQAIKLLTAEGIIKPPSITVA

SEQ ID NO: 368409 - protein, 494 aa, unidentified
MKTSSKSKSISVYRNQNVHIAAVFKRANDPRKVLCVALDFAKRKHLALICDGNGDVLKAPFPVHNNNAGVDFLIEQVRASANRRKIPDNQIFFGGEDSPSYVANFNLALREQGFATVRVSARLASENRENTLASTDKIDAFGIAKTLLSRRASSTFADGEQNPAYHHLRELMRARRSLVRYQTATANRIHALADQLFPEFLDETRSGITKFSNPCLAIMKERFSAPEIARRKPTAFARMLSRMRLQHPDEKAAKIIDLARNALPPDPAKVATLQRTLSAAVDLHRCLTRNADALLTEAAQTLATTPYVMLTSVPGISFVLASGVAVERGDPRKLAPLDSLCAYAGVVPQTYQSGGPDSPAAQGSASPRCNHILKDYVVQSSQKIRLMGPPELKDRINRWEANGQHGIFAGARRYLRLTRTLAQNGIPYLDPAARSRDHTSPEYADAAQQSWKVMQNKWRTIPGGIELLLNSEYPAGFWRELLKEVHQIHLPERV

SEQ ID NO: 368410 - protein, 391 aa, unidentified
MVCVGIDVAKDKHDCCILDSDGMVRADCFTIPNNMDGFKQLLQTIRNCTKKSDKIKVGLEATGHYSYNILGFLLDNDLAVYVMNPLHTNLYRKSLSLRKTKTDRVDARTIATMLLSDVDLKSYTDIAYHNEELKSLTRYRFDKVQECAKLKQSVSRLATILFPELEGLVSSIHGTSIYALLSEYPGAKQISEVHLTKLTNLLTTASKGRYRKEKAIQIREAARASIGSVMPAKSLELKHTIKLIKELTSEIDEIEDSIQQIMDELHPPILSIPGVGIQSAAMILAEIGDFSNFESPDKILAYAGCSPSTYQSGKLTNCYAHMEKRGSRYLRYALYNATKYVCHWNPVFAKYLAKKRAEGKHYNVALSHATKKLVRLIYALQKSGKAYLTAA

SEQ ID NO: 368411 - protein, 416 aa, unidentified
MNAAGIDVSSRKSTVAVLRPFGEVVRLPFDVAHNTEGLASLAEQLKALDGETRVVLEHTGRYYEPVAKALHEAGLYVSAVNPLLIKEYGANSLRRVKTDKADAVKIARYALDNWADLRDYTPMDTIRYDLKTLNRQFQLASKQRTASANNLIALLEQSFPGIRKCFDSPVRSDGTQKWVDFIHTFWHVECVRKQSLNAFSERYRKWCKRHGYIFKQGNAVEVYSLAKNAVVLVPKSEVTKVLVQEAANQLTSISRSVETYRAEMERLASTLPEYPVVMAMYGVGKSFGPQLMAEIGDVRRFERKQSLVAFAGIDPMPNQSGDKNVRSNKSSKRGSPYLRKTLFNIMGIYLKCSPQDEPVYKFLDHKRSEGKPFYVYMTAASNKFLRRYYAQVRDYLSTLDNLPPVDMDSTGLKTSD

SEQ ID NO: 368412 - protein, 454 aa, unidentified
MTVRNRKVIPKPGKSRAAALTITHPNAAGIDIGSASHFVAVPPDRDDQPVREFASFTLDLNAIADWLTACGVDTVAMESTGVYWIPLFELLESRGFTVFLVNARHVKNVSGRKSDVLDCQWLQQLMTYGLLRGAFRPAEQVCVLRALYRQRGMLLRSQGRHVQHMQKALTQMNIQLTNVLSDVVGESGQKILRAIVAGERDGQVLGAMKNVRVRASVDEIAKSLQGNWRAEHLFALKQALGAFDFVGTQLAECDAEIELQLQCLQVHDGEPAKGKKRGRARNAPKFDLRTQLFRMCGVDLTRIDGVDVTTALAVVSEVGADMARFPTIKHFTSWLGLCPGTKITGGKVMSGKTRRVANRAAQALRLAAAALRSSKSALGAYFRRMCSRMDKPKAVTAAAHKIARLIYTMLTKGQEYTDQGQEYYEERYRERVLRALSQRAAKLGMQMVPIAQPA

SEQ ID NO: 368413 - protein, 345 aa, unidentified
MPVAAASSPSTYRLFAGVDIAAATFTAVWMAPGASPSRPLTLDQTPQGFAALEARLRSAGHAPGEVLVVMEATGSYWVVLATTLAQAGFAVSVINPDQAHNFAKALLQRAKTDAIDARTLARLASMLQPARWTPPPAIYAELQQRLAERDTLVDVRQQVRNQLHALIQLPVVIPAVRARMEDLIATFDAQIMAIEREIARVLPQDTAWAASAELLLSIAGVGLLTAAWLLVGTLNVTIGVNPEALAAYAGLAPHPKESGTSVRGRERVGRGGHKRLRTALYRATLAAARHNPVIKAFYERLRAAGKPPKVARGAAARKLLHLAWAVVRKGRAFDPAYGQHQRDVA

SEQ ID NO: 368414 - protein, 370 aa, unidentified
MLDTTTFVGLDVHARSIKAVSLDVMTGEVRCATFGYDAGAVAEWVRSVDPRARCVYESGVTGFDLQKRLSGLGVDCVVGAVSKMIKPSADRRRKNDRNDAEFLARMLSVGNVVEVWVPDDECEAARDLTRALEDARDDLSRSKQRLSKFLLRHGLAFDERTPTGRRKGNWTRAHWSWIESIRFAEGADNEALAYYVDAVRRAAEDKARLEGLVEAEARKPRWRRRVDSLRCLKGVDTATAADLVFEAGEFSRFRNARSFAAWVGLTPSEHSSGESDRRGAITKAGNKHLRKALVEAAWHYLTCSGRPKDLAKGQAPDRVARRHAAKGVRRLVERREALLARGVHNNKANVATARELACWVWAVGLMAEEA

SEQ ID NO: 368415 - protein, 309 aa, unidentified
MSSWVGIDVSKNTLAVWVRPSGVNFIVCNSSEGHQALLLNLAEIQVERVLLEATGGYERAVMGCLAQAGHSVVRINPRRARAFAQAMGKLVKTDPVDACVLAHLAQVIEPSACQTVSLARDELQELVRRREQVVKLRDDERRRLTLARSGVVQESLQTNISQLNEQIARLNSAIEAAAQRTDNQLVKQLGAIAGIGPVTVASLLAYLPELGQLSRRQIAALAGLAPYNNDSGQHSGKRCIKGGRASIRRVLYMATWSVIRCHSSFGARYASLRARGKCAKVALVACMRVLLIRLNAMVRDHSSWRAEAV

SEQ ID NO: 368416 - protein, 394 aa, unidentified
MICVGIDVAKDKHVCFILSSEGEVLADVFTFQNNAEGFDTLLQTIRRCARPEDKIKVGLEATGHYSYNILGFLLNEGLPTFVINPLHTNLYRKSLSLRKTKTDRVDARTIAAMLMSDVDLKSYTDAAYHNEELKSLTRYRFDKVRERAKLKQSVSRLVTILFPELEKLVPTLHMTSVYALLSEFPGARQVAEAHLTHLKAILSDASKGRYGRDMATTLRDAARCSVGSVVPAKSLELRHTIRLIHELDAEIEDIEAAIQSMMDEIQSPITTIPGIGVRMGAMILAEIGDFSRFDSPDKILAYAGMSPPTYQSGQLSLSGAYSHMEKRGSRYLRYALYNATKYVFCHWDPTFAAYLAKKRAEGKHYNVALSHAAKKLLRLIYALEKSGLPYSSAI

SEQ ID NO: 368417 - protein, 458 aa, unidentified
MYRELQPLREALSAELSAHLPPDNPGIALEPLLQAYLDRLTMYVGCDVADQTFTLYAQNAGGEELGHLSEIPNQPKGFEQAWNWLEELRQQQRLRMVLIAVETTGVFYWAWWDFLAGRPNLARVLYNPRTTEHMTEVLSKKVRNDLVDAYALAEQVRLGGTPEITPLDNWDLLTARFCSRAARDLAQQINRKKTQLRALLRAYNPALAQVFPRQQLHHPAVYALLEQYIFPQEFVAAGVEKLTTILEEHCRSAFGKQQAEQLVNQCRQVLSRPIGQEVLRQRIHQLCEDVRTARQRQKDFLRTGYRLIEDRIETTLLRQSVGAGASNTLALVSEIGSVERFSDGEHLASFLGITTSKHISGTTVFTSKHITKQGPPNGRYAAVMLALHLSQRVPKYRRMYQTIKARKPPRKGHYVALVAIARDFVTNILYDMWRYQRPFFVEIEEYRQYRREHPRLNS

SEQ ID NO: 368418 - protein, 342 aa, unidentified
MDYYAGIDVSLEASSVCVVDGAGKIVREAKVASEPEALVLFFRSLGFELTRIGLEAGPLSQWLYTGLKEAGFQMELLETRHVRDAFKAMAVKTDRKDARGIAQLLRLGWFKPVHCKSAAAQEVRALLTARKLVQSKLYDIEMSLRGILRGFGLKIGRTTPKRLAGRVAELTRDHPALKAIAKALIAVHEALLRELCVFEKQVRLLAKSDRRVRLLMTTPGVGAIVALTYVSAIDDPGRFSSSKRVGAHFGLTPKKYQSGETDITGRISKTGDAGVRAVLFEAAHIILTRPLKGGALKSWALKLSKRAGMKKAKVALARKLAVILHRMWRDETAFDAAKASAA

SEQ ID NO: 368419 - protein, 350 aa, unidentified
MLIIGCDFHSRFQQIAMLDGQTGEVIERRLEHATGEARAFYAALPGRARVGMEATGYAHWFEGLLAGQGHELWVGDAAEIHAARVRKQKTDSRDACHLLDLLLQDRFPRIWVPSPQERDVRQLLRHRHKLVCSRTSVMNQLHALAMGQGVCRKQKLWTAAGRRELESLALGPWASRRRRELIEMLGRFDASIQELDQAVIQEADRHPAAMRLMEHSGIGPVTALAWVLTIGPIERFEKSRQLVSYLGLNPRESSSGGKQRLGSISKQGNSMLRSLLVEAAQTASRFDPELRRHYVRLKFRRGRAVAKVAIARKLVVRLYWRLREQVSAAPPARTQGSPGNFLMELSPSTK

SEQ ID NO: 368420 - protein, 458 aa, unidentified
MAKVKKTSSAQKKGNSLSVINPAAAGIDIGDKIHAVAVPPDSCDDPVRTFGTMTCDLQTIAQWLKGFKVNTVAMESTGVYWKPLFNLLIREGFEVYLVNARNVKNVSGRKTDESDAAWLQRLHSYGLLSTSYLPTDEQETLRTLVRFRRTLQAEASKCVLRIQKSLELMNIKLHTVISDIVGQTGAAILEAILNGERNAANLLLLVGGRIKASKETIEKSLQGNWRNEHLFTLGQCYELYKEYLRRIGLCDKKIEEQLNAYEALRNDGVVVTTSVKEDVTQRQNVKTKSKNNPRFNVRSYLQHILGVDVLAIYGLSDNAGLQLLAETGTDLSKWPTEKHFVSWLNLCPNNKVSGGKLISSRIMKKQSSIAGQAFRIAANSVQKSDHWLGDYFRRMKAKGGNKYAIVATANKLATIYYKMVRYQTEFNPPLLEQYQKRNNEFKIKRLEKRLEQLKASVV

SEQ ID NO: 368421 - protein, 359 aa, unidentified
MTVTVGLDVHARSIRLAAVRADELLEERTLPYDEEAVERALRRWPGVRCCYEAGPTGFGLYRHLIERGIDCAVVAPGLVPQRPGDRVKTDPRDARKLARLLAGGLLGPIHVPSPELEAARDLVRAREDARLDRMRDRHRLSKFCLRHGRRLPGLSWSVVRRKWLGEQRFAHAAEQITFDTYLHTVDLVDRRIEALERAIRETAEHAPWRELVARLRCLRGIDTLTALALVAEIGDFGRFTCAQELMAFVGLVPSEHSSGEHRRQASITKVGNAHVRRLLVEAAWHARRRPKVGYELARRQRGQDAIVVERAWRCQQRLYQRWQRMAGRGKPQQKIVVACARELAGFVWAIATDQPLRTI

SEQ ID NO: 368422 - protein, 334 aa, unidentified
MNFKNFIGIDISKGTFDLGLIKNCDSENIVSSKFSNKPEGIVKLEEFLKKNQITKEETIFCMEHTGIYCRLLSTYLTENQYPVWLEMPVQIIKSLGIQRGKNDKIDARRIAEYAYLKRDKVRLWEPPREVLVKINDLLSLRDRLCESRKMLKMPIKEFKDCGHDETAKLIQDRCKATLASLDKEINQIEKELEKLINKDSNLKKLYHLAKSIPGIGKITAMALLYFTNEFKLYTNAKQLACYCGVAPFAHTSGTSVKGKTRVSHFANKTIKKLLHLVAMSAIQFDLELSQYYKRKVEEGKNKMLVINAVRNKILHRLCAVIKRGTPYQKEYQFA

SEQ ID NO: 368423 - protein, 319 aa, unidentified
MEEIRFEQILKVGCGIDVHQKLIVASIRKSNDEVETREFTAYTSSLTSLRDWCKQESVTHVVMESTGVYWKPVFNILEEDFEILLVNARHVKNVPGHKTDKKDSLWLSKLLLSGLLKGSFIPPRDIRDLRDLVRYRKKVVAQAASDKNRIIKILEDGNIKLSSVLSNVDGSAGTKIIDKMIAGVTDVDELMKFYHGKIKVSREEFRLALEGCLTAHHRLMLQIYKDSIADKERQVKRLDAEIEKATKDYQVEIDLLQTIPGVGKESAITIISETGVDMEKFPNEQNLSSWSGMSPGNNESGGKKKRQKQFTATRTYSVH

SEQ ID NO: 368424 - protein, 406 aa, unidentified
MDVIYPRCAGLDVHKQTVVACVRIAGATALVQEVRTFGTTTTDLLALADWLESFGVQQVAMEATGVYWKPVWHILEESFELILANAAHVKNVPGRKTDVNDSMWLADLLAHGLIRASFVPPTAVQELRTLTRTRKQFVRERAAHVQRIEKLLEDANIKLSSVITDITGKSGRAVLKALIEGQTDPEQLLTCIGRVKASRAELREALRGRVSAHHRFMLKLHLGHIETLDQTISSIEKEVGQGLEPFRQAAKLLSTMPGISDVSANVVVAEIGIDMSRFATPGHLLSWACLCPRNDESAGKRRSTRLRRGGVWLKTTLVQAAWAAIKVKGSYLQAQFQRLRARRGAKKAIVAVAASMLTAAWHMLRDGTEWQDLGAAHFDRADVTKTANRLIRRLQQIGYKVEAVPA

SEQ ID NO: 368425 - protein, 412 aa, unidentified
MRLFAGDDWAEDHHDIEVMDEAGKVLARRRLPEGVAGMAQLHGLIGQFLPEEDPDSVEVIIGIETDRGPWVAALVAAGYTVFPVNPLQASRYRERHGVSGAKSDAGDAHMLADMVRTDSHQLRAAAGDSPEAAGIKVLARTHKTLIWERTRAVQRLRHQLREYFPAAIEAFDDLDAADTLELPGKAPDPARAAKLTRAQVSAALKRARRRNIPDKATAILAALRSEQLRQPEALTAAYAATVRSLIAVITTLNEQVKILQGQVEEHFGRHPDAEVYLSQPGIGAILGARVLGESGDDPSRYRDGKARRNYAATSPLTRASGKKKVVAARFIHNDRLVDALNAQAFAALNASPGARAYYDELRTRKIEHNDALRRLANRLVGILHGCLKTGTLYDEATAWGHRENLPQSSAAA

SEQ ID NO: 368426 - protein, 376 aa, unidentified
MGTPSAQTLDDVGVREIFQKLEEVPLMTMVGGLDVHRAQITFDYVDDDGLVHWGQIRPATRKTLRGWLAEHCPDGDAEFALEGCTGWRYVSEELAGAGVGVHLGDPAEIAVLRGPKKRAKTDRADARLLRTLLLQGRFPESWIAPAHVLEIRTLGRLYCTLMDERRAWQQRIHAQLFHQGCPPVRALLSVTGRAALAGAELSAVGGQYVDTALGRIDELSTEIEPLRAQLVNFARHQTGCQALPRHYGIGWLCAAIIWAEIGDARRFSSSDQLVRFAGLDVTVYSSDGKRSPGHLSRQGSPELRWAAFEAAKCAARRGSPDYGYYRKLAAKRDGHNGKNPTLAVERKILRRCHHTLRELGDAAVALPVAEPQEVAA

SEQ ID NO: 368427 - protein, 455 aa, unidentified
MAKKGKKHTRTLENMPILHPHAAGIDVGAEEHWVCVPADRDAQPVQKFSAFTCDLHRLADWLTTCRITTVVMESTGVYWIPLFQILEARGFEVALVNARHVKNVPGRPKTDRFDCRWLQKLHSYGLLAPSFRPPEDICQLRSLLRHRDNLIQMTVKHIQHMHKALDQMNLHLHHVISDVTGVTGLRILRAIVAGERDPRTLAQYRDYRIKSSPDTIVKALEGDYRPEHVFTLTQSLALYDFTQQQIAACDQEIERVLGTFASLIDLDAHPLPPPTTAHRQPQRHEPAFDLRAHLYRITGVDLTQVPGFQALTIHTILSEVGLDMSKWPTDKHFASWLGLCPDNRISGGKVLATGSRRVQNRASRALRMAAQSLRKSPSYLGAFYRRMRSKLGPAKATTATAHKLAKILYHMLQEKTPYRERGAEAYRHKEHERQLRQLRKQAQHLGFALVPQTSN

SEQ ID NO: 368428 - protein, 370 aa, unidentified
MLDTTTFVGLDVHARSIKAVSLDVMTGEARCATFGYDAGAVAGWVRSVDPKARCVYESGVTGFDLQKRLSGLGVDCVVGAVSKMIKPSADRRRKNDRNDAEFLARMLSVGNVVEVWVPDDECEAARDLTRALEDARDDLSRSKQRLSKFLLRHGLAFDERTPTGRRKGNWTRAHWSWIESIRFAEGADNDVLAYYVDAVRRAAEEKARLEGLVEAEARKPRWRRRVDSLRCLKGVDTATAADLVFEAGEFSRFRNARSFAAWVGLTPSEHSSGESDRRGAITKAGNKHLRKTLVEAAWHYLTCSGRPKDLARGQAPDRVARRHAAKGVRRLAERREALLARGVHGNKANVATARELACWVWAVGLMAEEA

SEQ ID NO: 368429 - protein, 397 aa, unidentified
MFGSNPEQLRSLAAWLLEQEVEEVVMESTAQYWKPVWEALERHWKPLRQKKEGASRRSGTLHLAQAQSNRGRRGRKRDFPDAERLVKRLVARELILSFVPDTEQRLWRTVTRRKYQLTRDRVRLQNQLESLLEEVHIKLSCLVSDLLGVSAQRMLKALADGETNPAALAALADRKLRATPEQLCDALGACTDLKPVYRRLLKMVLEQLQFLDQQIGQLDQEMAMLLNQHQDAVTRLAEVPGLGVDSAQQIIAEVGPTAATFPSAKCLSSWVGACPGDDESAGVNYSHRSPKGNRHMRRVLNQTANAAARTKGSIFEIVYRRCVPRLGHNQAIGAIAHRQCRLIWLILRQGVRYEEQGPAVTKQSKQKRTARMIRQLRALGYRIELPNPQHSSSAQVQ

SEQ ID NO: 368430 - protein, 452 aa, unidentified
MKHKRAGRGGAVPSLECIEPNAAGIDVGAREIYVAVPANRDPKPVRCFSTFTQDLQALAAWLLACRIRTVAMESTGVYWIPLFQILEAAGIEVCLVNSRHVKHVPGRKSDVLDCQWLQYLHSVGLLRASFRPEDVICQIRCLLRHRDGLVEMAAQHVQHMQKALSQMNLQLHHVLSDLTGQSGLAMLDAILAGERDPRVLAELRDGRVKASAETIVQALVGDYRREHLFTLHQSLQAYRYYHQLLAACDQEIEAYLRELDSKIDVEQNPLAPEPKPHRPRKNEFRFDLRSELYRILGVDLTAVPGLNALSVHTLLGEIGRDVSRFPSAAAFASWLGLCPQADKSGGKVLSAKTRRTKNRLNRSLRLAAQALHRSHSYLGDYYRRMRSRLGAPKAITATAHKLARIVFHLLRTGEAYNESIFAAEEQRCRVRTEHRLRRHARQLGYDLVPLPA

SEQ ID NO: 368431 - protein, 395 aa, unidentified
MVVADVEVEDEYPSERRWYGSNPEQLQRLAEWLREQQVEEVVMESTAQYWKPVWGALERYWKPSCEKRAQALSNRGRRGRKRDFRDAERLVKRLVSQELTLSFVPHAKQRLWRTVTRTKYQLRRNKVRLHNQLEALLEEARIKLSSLVSDLLGASARRMLQALAEGETDPAALAALADQRLRATSTQLRDALGACTELNPVYRRLVKMALEELQLIEQQIGQLDQQIASLLHQHQDAVQRLAEVPGLGVDSAQQIIAEVGAKAATFPSAKNLSSWVGACPGEEESAGVNYSPRSPKGNRHVRCLLNQAANAAVKRKGSIFEIVYRRLVPRLGHNKTIGAIAHRLCQLIWMILYKGVRYEERGPAVCEQSKRVRTVRMIQTLRKLGYRVELQAHPA

SEQ ID NO: 368432 - protein, 402 aa, unidentified
MTYDYVIGMDVGKYFHHACVLDIDGTQVLSKRINQNEQSLRALFSAFSAYDHKVLVVVDQPNNIGRLTVAVAQDIGIDVRYLPGLAMRQLSRIHAGNAKTDIRDAYIIAHAAKNLPESLRSVDRVEEAFLQLKVLNGIDEDLARSYTRLINQIRSALVGCYPQFEQALRGQIIHRKWVLHLLARYGGPTKIKRLGKAKAAAFARRYKARNPEPVLDAIFAAISEQTVAIAGAHYAEMGVAMSAKDALLKLEHRQQIEKEVIELINDIPHTQFLLSMPGIGPKTAAQILMTAGDMSDFPSAGHLASYAGLSPRTNQSATSIMSNSLNRAGNKKLKNALWQSSFASIRFHERSRQFYERKRREGKRHNAAVVALARRRLNVLYAMMRNHEHYHDPAPSQEDLAA

SEQ ID NO: 368433 - protein, 356 aa, unidentified
MTSTKYIGMDVHKESISIAVRNSAGKVVMECVIETKASMILQFIDGLRGDLQVTFEEGTSAAAWLYDLLKPHVTKLVVCDPRKNKSMREGNQNDKIDARRLAELLRLDHLTPVYHGEHGLRTLKELVRSYLTITKDLARVMSRVKAIYRSWAIPCSGKQVYAARHRAEWLGKINEPGVRRRAECYYQQLDALRVLRQGVRRDLLAESKKQKAWKRLCEIPSIGPIRAAVLLGILQTPHRFRSKRPLWNYGGLAIEMHSSADHRRVHGQLERSTKNVLVRGLNRNCNHDLKNLFKGAAVVASSKPGPFQEFYTALVAKGMRPEMARLTLARKIATIVLMVWKRGVNFDAQHLKPQTA

SEQ ID NO: 368434 - protein, 436 aa, unidentified
MILIGEVVDAPVIMGALKPVHNSPCKEVIQMLTLFVGVDVSLKNNVVYIMKPDGDKYGSLHVPNTKSGATVLVDRIVSALNALNLKKVVIGLEATSIYGEPFVMYLREDGKLTSFDRAIHVLNPKQVKEFKKSYPDLPKNDDVDSFIIADKLRFNRGIPPAFEPDYRYTALQTLTRQRFCIVQNLTREKVRFGNYLFLKCSGLAQDKDFKNTSATTIALMEQFDTVDDLANADLDQLAAVVIKASKNHYIDPECIAKTIQATAKGSYRLPKTVNDSINQAMSVSIANMRFLEKQVKTLDAVILKQFEIIPNTIISIPGIGKVYSAGIIAEIGNVCRFKSQASIAKYAGLVWNEHDSGNFEGEITRMIKSGNRYLRYYLLEAADSVRRYDSEYKAYYDRKFKEVNRFQHKRALALTARKLVRLIFRLMKDNRLYVTE

SEQ ID NO: 368435 - protein, 418 aa, unidentified
MEDEKNWFVGVDWASQTHHVRLSDAKGAKIGERAFTHGGEGLKEMADWILKSTGAAPEAVMIAIEVPHGPVVESLMERGFQVYAINPKQLDRFRDRFSPAGAKDDSRDAEALADALRTDRRCFRLLAPLDPLVVELREWSRIADDLRVERNRLSNRVRELLWRYYPQFLELSDDVGADWFLDLWRLLPTPEKAKRVRETTVERLLKRHRIRRITAAEALQRVKAPSIPVAAGTVNAATGHLEAVARRLALVNRQIGEANGKIDRLTERLGGGEEDAEGQRKEQRDVTILRSLPGVGRIVLATLLAEAQDALHRKDYHALRCLSGVAPITKRSGKSKIVLMRQAAHVRLRNAVYHWARTAVQHDPRSRAKYAALRARGHGHGRALRSVADRLLAVACAMLESQTLFNPNLAIKISSPSV

SEQ ID NO: 368436 - protein, 343 aa, unidentified
MQTVTTIGLDIAKSVFQVHGVDATGNVVIRRQLKRRYVLAFFQKLAPCLVGIEACATAHHWSRALGAIGHTVRLMPPAYVKPYVKRQKNDAADAEAICEAVTRKNMRFVATKTPEQQSCLMLHRTRHLFIRQQTAVINAIRAHLAEFGIVARVGRNGVADLLDIVADPSDRRLPEVARACLAALGVQLRMLKTLILDFDRRIMAWHRSNETSKRLDEIPGVGPALATALVASVADPKAFRSARNFSAWIGLVPKQHSSGGKDKLGSISKQGDRYLRSLFTAGALAVIRYAKIHGANHRPWLTALLARRPAKVAAIALANKIARMAWAMMARGERYKEPAALAA

SEQ ID NO: 368437 - protein, 352 aa, unidentified
MLSPVAIKQPQSSPTDFTRTHVLGIDIAKDTLAACLIDGTNRETARVPLDAVQTFENRRRGHRGLLRWMTRQNVSHEMVSVLMEATGVYWEECAHFFHEQGYAVHVVNPARTGRFSSTYRQDGKTDAHDAETIARYGVSMPMRSWEPPDPVCRELRLRDESVSMLTQTKNRLHALRHEAHPCKFVAASLRRQIAFQEREVKRLIAEYAKRVAASPTLGRTQGLLETIPSIGPVIAGTLLTETDNFDAIMCSKQLVTYSGMVPVPWQSGSMDLPRRISKAGNPRLRRAAYLAAVSATRTSSPFAMFYKRLRANGKPPKVAMLALARKILTVAYAIVRSGTPYIPEYVSPTPTR

SEQ ID NO: 368438 - protein, 366 aa, unidentified
MRYYTGNHPFYCGIDLHSRTMHVCILDHEGNAVVDQGIACNPKAFLKLIAPYRQGLVVGVESIFCWYWLADLCQEEKIAFVLGHAFYMKLIHGGKGKNDRIDADKIARLLRCGSFPLAYAYPKGMRETRDLLRRRMYLVRHRSGLLTHIHIVHSQYNLPAPDKQLHWHSNQAGVAERFASASVRQNVSVDLRLINHLSQVIVELEEYLIRTARVEDRQTYERLQTIPGVGRVLALVLLYETHDWSRFSSVGQFLSYARLVRCLHESAGKTVGSGNNNIGNPHLKWAFAEAACLMLRVSERARQWKQRYQQKRGKGKAMSVLAAKLGRAVYHMLRKGEAFAEDRFWNEGARAGNRASPAAKAGAGCP

SEQ ID NO: 368439 - protein, 410 aa, unidentified
MSNLFVGIDVSSRKNVVHFMKPDGSKVSSFSVDNNFNGAKLLVVKISEALSALSFNTVTIGLEATSVYGDNLVFFLRGSSELSAFNPSIHVLNPKQVKKFKDAYPDLPKNDPVDAFVIADALRFGRITNEIYTQDYRYQALKNLTRARFFAVQSLTKEKQRFMNYIFMKFSSMAQNKIFSDSFGASALALYTEFDSVEELAAMSLEDLTVFLRTNGNNRFPDPEAVAKTIQAAVRSSYRLPKTVADAINQILALSVVSMRSLKEQIKSFDKAIEQQLQVIPNTLTSVKGIGLVYSAGIIAEVGDIKRFPNHAALAKYAGLTWTQHQSGNYEAQNTRLINSGNRFLKYYLTEAAYSLVRCDAEFKRYFNLKKAEVNRGQGKRALALTARKLVRLVFALLKDNRLYIPSEVY

SEQ ID NO: 368440 - protein, 457 aa, unidentified
MQSFYLGADVSKGYADFVILDEQKRTVVENFQLDDTSNGHSKLFNVLGRLLDRHPQSTVFAAVESTGGYENNWVHSLQRFQLTLNVSVARLNPLGVMHNSKADLKRNTTDKISARSIAEYLITHREKVSYRNNDQWAGLRKQWGFIKMLTKQCTQMLNQLESLLYTANPDLLKYCKDGVPNWVLKLLAKYGTAAHLGRARVPAVAKIPYISKKRASELVHTAKNSVASATDPVTRQLVEATAKQILSLKKTIEVQKARMVADCSVPEVALLKTFHGIGEASAIGMMLEIQNVERFASAKKIASFYGVHPAFKISGDGSSGVKMSKQGRKELRRILYMVAMTAIRSNPLIREVYERHLSRGKTRMDAIGVCMHKILRVIYGMLKNRTPFDPQIDKANRQRAVGKAADLKEDKSRRYQGFDLEAPISRRQNKKRLERKEPHCGNDTTCGVIAPAPVSST

SEQ ID NO: 368441 - protein, 415 aa, unidentified
MRGIQMLFIGVDLSDKSFDSCITNSEGDVLTINKFNFDDDGFAVFVFKIEQHEPESQKCIIGLENPHSRLVDFLIQRGYNVIPTHPLSISKYRESRIPSKAKSDPMDARLIADYIREHHKSLRAINIPDDTTRELSILLDDRDKLVEQKVKFSNQLTSTLKEYFPQALDAFGSITNKSALEFLVRFDTHQEVKALMSESHQKLDSVLGECGFFRTDSKERFHSAMSKNPSVISPAVIKAKVRLKNVLVGHLLLLIQQIEEYDKQVQKILDETPNGGIFRTLPGADYILGARLLVLYASREFASASEAQSFWGTCPYTSRSGNMMSIGFRKGCNHFGRNTFHQLAFCSLKSSQWAKKQHAKKRKEGKKSHHALRCIANTWVKITYAMWRSKTPYDESKHLASIANHIMNQPAFIQG

SEQ ID NO: 368442 - protein, 318 aa, unidentified
MVSPHVFVGIDVAKAHLDMALRPTGTRWTVANDDAGITDLVTQLQGMSPTLIVLEATGGLQRPVVAALAAASLPVVVVNPRQVRDFAKATGQLAKTDALDARALAHFAEAIRPEPRPVPDAQTEDLRALLARRRQLVAMRTAEQNRLGSAPSRLHADIEAHIMWLNARLAILDDELDAALRASAVWRERENLLRSVPGIGPVCARTLVLDLPELGTLSRQHLAALVGLAPFHRDSGTLRGTRSIWGGRAQVRTALYMSTLVAVRYNPVLKAFYQRLRAAGKLAKVALIACMRKLLTILNAMVKHQTPWQPQEEKIIAL

SEQ ID NO: 368443 - protein, 351 aa, unidentified
MTIEHSIGFDVHKKSISFCIKRADGSIFDEGRFRATRHEIKGWVGRQTASWHGAMEATLFSGWIYDELKPYAARLDMGNPSMMKAISAAKKKNDRLDARKIADLVRCDLLPKCYVGPREMRELRRMLRYRNAMVGHAVQIKCRMSGLLMESGAEYNGKQLHGKQYFSELMEGLEEVPASVKELLQMSRGMLEMFEKTQRQLVERLNEAPLLKKRLALLRTIGGVGEITSLTWALEMMDPRRFSSIGDALSYCGLTSALNVSADKAQRGPLSKQRNGHLQTVLIEAAKVAPRWNAQLAEVHEKELSRGHKNQATLEVARKLVAYLLAVDKSGRPFELRKPVQQPAEEVLAVG

SEQ ID NO: 368444 - protein, 380 aa, unidentified
MPQPINIANVCCVALELSKSNWVIAFSPPMDGGKNSVHQIAAKDIKRLLSFLESARSKAEREASRPLEIVVCFEIGYDGFWLARLLIALGIRTIVFDPASFLMPRKGRRAKTDRLDAEGMTRTLRAWLSGDREVARDVRIPTVEEEDAKRIERERKHLVEQRTSVVARIKGLLALHGIHLSGRRIGKGLQQRLDHIETGDGRKLAPFLRRDIERMLRHYEFICDQIKEVEADRKSALMDESGIFPHREKVHRLSTLGAVGETTATVLVAEVFHRTFQTRRHVASFVGLAPSPYASGETSRDRGISKAGTKLARHTLVELAWFWLRYQPNSKLSLWWHERFGGMGMRGRKVGIVALARKLVIALWRFVEEGVIPEGATLKA

SEQ ID NO: 368445 - protein, 339 aa, unidentified
MNYIPVGLDIAKHVIQLHMVDFHTGEMVDKQIKRDALLTFFANREPCLIGMEACGGSQHWARELEKLGHRVRLMPGRFVKAFVMGNKNDVMDARAIWLAVQQPGKSVAVKTEEQQAVLAMHKIRHQMVKYRTAQINGLHGLLLEFGETVRKGRSALDKAMPLVLARLEKRLPAALVEMLREQWERLSRFDEQIEDIEKRLKVWAQQDKSCQKLLKIPGIGVLIATAAVATMGDSKAFRNGRELAAYIGLVPKQTGTGGRVKLLGISKRGDKYLRTLLIHGARSAILLANAPGPWDEKIKERRATNVAVVAMANKLARTIWAVIAHDREWNKDYVSVRPY

SEQ ID NO: 368446 - protein, 344 aa, unidentified
MEYYAGLDVSLRSCAVCVVDGKGTVLYERDLPCEIEEIAGYLTALPVTIERIGFESGTLSQHLFYGLKAEGFDVVCMEARQVSAALSAMRNKTDRNDARGIAQILRTGWFSPVHMKSREAHGVRALLSTRKALLSKTIDLANEVRGLLKIFGIRLPKTVKHGSFDGVVRPMIEIDEVLAHAMLPLLDARLVLYQHFLELDRRVKRAASQDEVCMRMMTVPGVGPIAALTFKAAVDDPARFKRSRTVAAHFGLTPRRYQSGEHDNPGRISKAGDRDVRATLYAAANALLMRTMAGSQIKSWGMRLMRTKGRRRAVVAVARKLAVLLHRMWADGTEFRSEKVEGTA

SEQ ID NO: 368447 - protein, 345 aa, unidentified
MKNTIVGVDLAKDVIQVCVYANKKVRSNTEMTHHDFLEWLFKTHSTTIFFEACGTSNYWKQKAIEAGHAAHLISAELVSTVRQNQKTDKNDALAIVQASLLPDISFVKGKTIEQQQLQCILRLRELAVKQKTASGNQLKALLLEFNIRVSARNGGLGGVIESVLENAENEFSTAFREALDTAWIQHLNLIKSISIYDKNLEESVEQHDSCKQLLKLEGVGVINAVNLYIALGCADLGTFCKGKDASACIGLTPIQHTSGGKVKLGSIGKYVKNSMLRSQLITGAMAAVAQMCKRTALTKKELWIQQLVSRRGKKIASVALANKTVRTAFAMLTQGTEYKAELLVA

SEQ ID NO: 368448 - protein, 343 aa, unidentified
MHIASIGIDLGKTNFHLVALGEHSKVVVRKKFSRKQLLAYTANLQALLIGLEACSGAHFIGTALRNQGHEVRLIPAQFVKPFIKSNKNDFLDAEAIAEAVARQNMRFVPIKTNEQLDLQALHRVRDRLVHRRTAVINQIRGFLLERGLTFAKGPANLRHRIPAILEDAEQNITPRMRMLLDQIWQEWKHLENDITIISEEIERISKEDAACQRLRQIPGIGPLVSTATVAAIGNGAAFSKGRDFAAWLGLVPRQHSTGGNAKLYGISKRGNIYLRRMFIHGARAVLLRVKYDTGGFGQWVHQLESRAPRNKVIVAIANKLARIAWAVLSKQMDYRPTPVVATA

SEQ ID NO: 368449 - protein, 433 aa, unidentified
MQVGQNQIKERSIAVKTIKAKKHDFVNGKTLLVTIDIGKTTNMGYCRCPDGTEVKPFEFFNHAEGFQKLWGCICKVKTANHVEKVAVGIESTGAYGEPLVHYLSQKGVRVVQVNPLHTKRLKELQGNSPGKTDRKDPKVIADIIELGHALTVVIPEGVAADLRRLTHARERTLQRRTVLYNQLQDLVFILFPEFLQVIKKIKSRTARYLLQHYPTPQDLVKCGLEVLVSIVRQISCRRLKRERVETLYEAACKSVGIEQGQRSIVFEIQEILSWIETCDRFIGRLEQQMSDLLKQIPYSRSILSIKGIREVTAAGLIGEVGDFRKFRTLSEILKLAGLDLFEISSGQHQGARHISKRGRSLLRKLLYFAAINTIRQGGVMYETYQRYLQRGMIKGKALVAIARKLLRILFALVRDHSEYAVNYYEIENLKLAA

SEQ ID NO: 368450 - protein, 403 aa, unidentified
MNNVAGIDVSKGKSMVSVLRPFGEVVAKPFSIGHTGSELKELADYLKSLDGETRVVMEHTGRYYEPVARFLHEEGVFVSAVNPKLIKDYGNNTLRKVKTDKADARKIARYGLDNWAELRQHTPMDTIRMQLKTLNRQQSLYAKTKTMMKNNLIALLDQTYPGVNALFDSPVREDGSQKWVDFATAFWHVDCVRNMSLTAFAERYRKWCKRHGYNFSQSKAVEVHTGAQDLIAMLPKDALTKTMVRQAIDALNAVSASLERLKAEMQALAAQLPEYPVVMAMHGVGDSLGPQLMAELGDVARFTHRNAITAFAGVDPGADQSGTHEAKSTRVSKSGPPELRRALFLVMDCLLKTQPQDDPVYRFMDKKRAEGKPYLVYMTAGANKFLRIYYASVKAYLDSLEHD

SEQ ID NO: 368451 - protein, 348 aa, unidentified
MTTILAIDLGKFKSVACDYDTTTHQHTFTTIPTTPQAMHDLVVERSPGKLVIEVGSQAGWVKDLCEALGVAVEVANPNHEAWRWKNIKRKTDKDDALKLAQMSEMGQLPTVELPGAKVRQWRSLIGYRWALVGRRTAIKNGIRAILDRQGLSMPAGKSGWTNKARSVLQLDARPIKDVTCEELWRGQLHVELQALDQVETLIQQVELKLQAIAEADKRVQLLQTIPGVGPRLSEVMVAVIDNPKRFKNGKQVGAYAGLVPRLIESGTMSRQGGITSRGNRLLRALLVEVSWLIRRYNPHLRAIFDNVCRGSKARRKIAVVATARRLLIICWAMLRDGTTWRDPTATAA

SEQ ID NO: 368452 - protein, 377 aa, unidentified
MRETTRFVGLDVHAETIAVAIAEAGRGGEVRSLGTIPNDLQAVRRLLKKLAPVGTLHVCYEAGPCGYVLYWQLEQLGVRCEVVAPTLVPVKSGDRVKTDRRDALKLARCLRAGELTAVWVPGPDHEALRDLVRAREAAKKDQLRARHRLGKFLLRRGRRPPTKMKAWGSAYMHWVRGQPFERFAENATFVDYLAEVDHVAARIEQLEKDIDQAVTEAPAEMKALVEALQALRGVAKLSAVTIVAEVGRLSRFEHPSQLMGYSGTVPSEHSTGGPGKAHRGGITKTGNAHLRRVLVEAAWSYRYRPAVQGKLRTRQKDLSEDVKAIAWKAQHRLHQRYRHLSARGKPHQQVVTAVGRELLGFIWAIGVKAEAAFAQSR

SEQ ID NO: 368453 - protein, 342 aa, unidentified
MSFYCGIDLGARESQICVIDKGVKKVLEVKVPNKLEHIKQLLAPYKADLEIVVESTFNWYWLVDGLQAAGFKVVLAHTLGLYMITAAKVKTDRRDAFALAKLLLAGMIPTAYIYPAETRPVRDLLRRRGWLVQVRAGEYGSLRRLLLRHGILSHKQQEIKQATEEDLEKWFTHELVQLHASQELERIHLYSQQIETLEKTILERAKKARAFEKLQQLPGIGPIIALSIYYEMGELGRFASVKDFSSYCRVVPGVAQSGQMTRRGRGSKQGNPYLKWALSQAAVHAVRCYPGVRRYYERQLQRHRGRARQMVVYNIIAHKLAQAIYHVLKEDSEYREELLFGK

SEQ ID NO: 368454 - protein, 371 aa, unidentified
MSELPAETRPARRKVEASPRPPGARKPETELGAVSTTAVPHPDSRSGPSPHLQGRVMDEQRTVFVGIDVSRDRLDVHLKPSGEAFCVPREGKGMDDLIIRLQGLSVALVVLEATGGFEATVAAALAGVGLPLCVVNPRQIRDFARAMGRLAKTDTLDAEVIALFAERVRPQARPLREPERVHLAELVGRRRQIIEMIGMETNRGRQAIDKPLARRLARHVAYLQKELDAIDHDIGDAIKHSPAWREAEALLKSVPCIGDVTARTLLAELPELGTVSRHQVAALVGVAPINRDSGLMRGRRAIAGGRTSVRAVLYMAALTATRRRSPFRAFYDQLTARGRPKKVALVAVMRKLLTILNAILRDHTPWRPLNA

SEQ ID NO: 368455 - protein, 349 aa, unidentified
MELDTIGIDLAKTVFHLVGLSRAGEVVVRKRFSRPQLLRFTGNLRVRLIGMEACGGSHFLGRRLREQGHEVRLIPAQYVKPYVKTNKNDYIDAEAIAEAVGRPTMRFVPIKSDEQLDMQSLHRVRDRWVGRRTSVINQIRGLLLERGITFSRGRRHAEASLPGILEDADNRLSGLLRMLLAQLQGELRQLQSQIDEADALIAKAAREHEPCQRLMAIPGIGPLTATAVVAPIGSGAEFRKGRSFAAWLGLVPKQHSTGGKQNLLSISKRGNSYLRRLLVHGARAVLQCRDKQSPGLNLWLGQLASRAHTNIVAIALANKMARVAWAVLAKSEAYRPPLLASPVEAPACN

SEQ ID NO: 368456 - protein, 387 aa, unidentified
MDCTSTAAPAGSILHCALELSKNTWLLGIQFSDRPQPSLYPIRGGNTEDLMAKLTAARDRCAKLSGRTPSIVLCYEAGYDAFWLARFLKARGFECLVIDSASMQVNRRARRSKTDRIDVGKLLRGLIAWHRGDRQVWSVVRIPSVDEEDLRRSHRERDYLVHERTAHINRIKGLLFAQGIRGINVKRQYKTLHVDKLVTGDGHPIPPRLASEIVREIARLALLQEQIATLERERDEAPTPCTATEKKRAQLMFLNGIGPAISAVMTREVYYRQFDNRRQVAGFLGLAPSPYDSGEVERSQGISRAGKEWVTRKEKGSKRRRPLDNGPAHIIPIASAEPGAHSPRLRSLAVFERRPSVRGEASALGRHPKTVADPDIRLIRHTDQARR

SEQ ID NO: 368457 - protein, 371 aa, unidentified
MSNTIICGMDAHDNTLSNRIGVNRETPETKTVKNTQDGRQKLFKYLRSLAQKNEEARIIVAYEASPLGFGIYDDCVEAGIECHILAPTKMPKAAKDRKRKYDERDAQRIFEMLRAHVLAGNELPDIWIPDYQTRDDRELVRSRVDAGKKLTALKTQVQMLLKRNKAVKPKDVGNSWTLSHRRWLEGLELNAGARIALSSLLRQIEKLEEEIWILDKEIESLSKTDRYQLAAEALVVQIKGVGLLTAMVYLTEIGDMSRFNNRRQIGSYLGLVPSSNESGEDSDRKGHITREGPARVRKVLCQATWVRVAHDEEEAVVYQRIVKKNPKHKKIAVVASMRRLGVLMWHIAWDAQVKAGVFKNDSIKVESFQTA

SEQ ID NO: 368458 - protein, 457 aa, unidentified
MFRTKRTRQSRELPRVHPAAAAIDIGATMHVAAVGPDRDQDPVQTFRTFTDDLHRLADWFTRCGVKTVVMESTGVYWIPVFEILEQRGFEVMVVNARDAKHVPGRKTDVSDAEWLQRLHEFGLLRASFRPQAEIAGLRAYLRQRERLLDYAAAHIQHMQKSLMQMNLQLHHAVSDITGVTGMAIVRAIVAGERDPAILAAHRDRRCHVTTQTLCQALIGNYREEHVFALTQALELYDFYQTKVMACDKQIEAILTRLRKAVPAPAHKLPPARRRGRQQNEPVFDARDALHAILGVDLTQINGLGPYLALKLVGECGTDLSAWPTAKHFTSWLGLAPHNKISGGKVLSSKTRRTGNRAAALLRLAAGTLGRTDTALGAFYRRLSARVGKAKAITATARKLATLFYNTLRHGMTYIDPGAGYYEERYKKRVLSNLQRRAKSLGFMLEPVEPGGTQEAVS

SEQ ID NO: 368459 - protein, 343 aa, unidentified
MQTVTTIGLDIAKSVFQVHGVDAAGQVVVRRQLKRRYVLAFFEKLPPCLIGVEACASSHHWSRELQALGHKVRLMPPAYVRPYVKRQKNDAADAEAICEAVTRANMRFVATKTPEQQGCLMLHRTRHLFIRQQTAVINAIRAHLAEFGIVAPVGRNGVEELLGVVADASDKRLPEIARACLVALGAQLRMLKAQILEFDRMINAWHRSNETSKRLDEIPGVGPALATALVASVADPRAFRSGRDFSAWIGLVPKQHSSGGKDKLGGISKQGDRYLRSLFTAGALAVIRYAKIHGAKHRPWLTALLARRPTKVAAVALANKIARMAWAMMARGERYKEPVALAA

SEQ ID NO: 368460 - protein, 349 aa, unidentified
MIHLGIDHHKKYCHVVALNDKAEIVWDGRLDSERRAFAELKNQLPQDEPIQSVLEAGWNWGKLYDALHELGLNPKLANPLKTRLIAESYVKTDRIDALVHAQLLRVGMTPLVHVPTPEQRDQKNVLRRRIWLVRMRTALKNRIHALLDRNHLEPPPAHDLFAGRGRNWIDGLQLRDPEDRLLKAERALLDEVAEHIRQTEKWIADELKTNALFPHLLTLPGVGRILGAVIALEVGDINRFICAERLCSYSGLVSSTYSSGGKTRHGGLIPTSNAYLRFAYVEATWSAIRTSPSLRAFYQRLKMRVGTSKAIVATARKLCEISFYCMKQQRAYVEKPYQFKSGRLGRGLT

SEQ ID NO: 368461 - protein, 445 aa, unidentified
MQEEKMEEVVALIGIDWADESHEMCVYEMSSKRVEHETVEQKAEALHDWVNGLRKRFGGGKIAIAVEQSKGALIYALMRYDFLLLYPLNPKSLSSYREALRTSGAKDDPSDAELILHFLRAHRDRLRVWVPEDEVSRRLGMLVEFRRKLVADLVRVTNRLGSLLKGYYPQALEMMGELDSRMACDFLNKWPSVFELKKAKAARLRKFYAQHNCRSAEAIERRIALAQTAEPLTEDRAIIDASLLMVRMLVRQLQELLESKREIDVEIRKVFSLHPDGQIYESLPGAGEVLEPRLAAAMGTNRNKYDTALEMQQFVGTAPVTKKSGKSYRVHRRLARPRFVMQTHVEFAAQSIVYSRWAAAYYQVQKDRGSGHYAAVRALAYKWDRILFRCWKDRKPYDEGKYLEVLKRRNSPLVKLLNLPKPPKSSHSSWTSAGDTITELGQKLC

SEQ ID NO: 368462 - protein, 415 aa, unidentified
MERIFEVSAGIDVHRDKVLVSVRRVRNTKEEVKTKTFETFHDALAAMAEWLLAEQVEVVGMESTGVYWHPVVRAVQSALPKAVIWVVNPAHVKKVPGRKTDVTDSQWLAKLVMYGLVSPSFLAPAELQELRKLTRHRTKLTADQARYKNRILKELESSGIKVATVCTDVFGKTGRALLDAMVDGKVLSEPQIAKLARGRLRDKVPLLARAVQSPLTPSTVVVLRQLLRRFDDLTGDISSLESEIRQRMQPMNAELQRLIKIPGIDEVAAAAVLAETGPDMSVFPSAKHISSWSGLSPGSEESAGKSKKAPTRKGNKYLRTILVQAAMCAKNAKGTFWQRKFRRLARLGPKKAAVALARGLLGVIFHMLTDGSDYREPDAIPPPPHRLRARVDNLTNQLKALGFAVALSKATVPVS

SEQ ID NO: 368463 - protein, 344 aa, unidentified
MDHFGGLDVSVKETSICIVDDTGRIVKEVKVASEPEALLKVLGNPTYRFKRIGLEAGPLSQWLFSALAEAELPVICVETRHMQAVLKAQINKTDRNDARGIAQMIRVGLYRPVHVKTLRSQKLRMLLTHRKLLQSKAIAIENDLRGTLRNFGLKVGMVGKVRFEARIQELVENLPDLAVLVEPLLIVRLALREQIVILHRRLLAIVREDEVCRRLMTIPGVGPVVALTYRATVDVPARFRKSKSVGAVFGLTCSRYQSGEVDWSGKISRCGDEMMRTMLYEAAQSMMHSKKWSWLKAWAMQIARRRGMKKAIVALARRLAVIMHRIWVDGTEFRWTREQVAAAA

SEQ ID NO: 368464 - protein, 358 aa, unidentified
MNRNTGMNAGQIIGTMNGLQVVGMDIAKHVFQLHTVDMGTGEISNIQIRRAAVVELFANRQPCLIAMEACGGAHHWARELKNLGHTVCLIHAKAVRPFVSGNKTDATDARAIWLAVQQPGVKFVGVKSTDQQATLTLHRQRELLMKMRTMQTNALRGLLYEFGATFAKGRTALFKDVEQALDDLADKLPQMVRDSLREQVDRIKALGQDMQAIEKRLALQLKADPQMQRIAQIPGVGVLTATAVIATMGEASAFKSGREFCAWLGLVPKQTGSGGKVRLGNISKRGDTYMRTLLIHGARSVLHHVKDPGPWLQQIKERRPGNVVIVAQAAKMARTIWAVTAKEQDYQRGFKSVRPLAA

SEQ ID NO: 368465 - protein, 346 aa, unidentified
MLHAGLDLSRRRLDFHLLDERGETLEVGSAPPDRDGLHGLSERLRRYRQPVRAAIESMNGARFVHDQLELGGWEVEIADAARARGLAPLACKTDRIDAWVLAELSRRELVPAIWLPDPEVRAERERARFRLHLVRHRSSLKHRVHAVLLAHGRPCPVSDLFGVSGRALLERLALPEPWAGSVCASVRLIDELDQEIAACEAELRRLGADHTYVPLLLTVPGVGWVLAYTIAAEIGDIGRFGSATKLSGHTGLCPRVYQSGASDRRGPLAKQGPKYLRWALVEAALHASKHPIYRDRYQRTKKRLGKQRGPRVAQVDLARRLAEAIWHMLTRNQPFAPAGATKPVAA

SEQ ID NO: 368466 - protein, 450 aa, unidentified
MNKPEQIEEIPDAEHEQLIERVAAVDVAKESGKVCVRLPDPARPGRRISRVWDVAATTNAVLALAERLIDLDVQKVTLESTSDYWRIWFYLLEARGLDVQLVNARDAKNVPGRPKTDKLDSVWSAKLTEKGLLRPSFVPPAPIRALRDYTRMRIDFVREATRHWQRLEKLLEDALIKVSSVACKLDTLSTRDMIEALIRGERDPHVLADLARGRMRGKRAALIEALTGRFDDHHAELARMLLDQIDALTRQVDQLTTRIEATIAAIPAAHVPTPGDGDGPADTTPRAQLAAIERLDEIPGISRLTAQVILAEVGLDMTRFPTANHLASWARLTPRTIQSGAKHRAGKTGKGNPYLKGVLGEAAVAAAKTNTFLGERYRRIVKRRGKLKALVAVARSILTIVWHLLADPTRRFQDLGADYHTTRINKGRKIRNLVRQLEALGQTVILQPAA

SEQ ID NO: 368467 - protein, 359 aa, unidentified
MLQSPTTATPKLYIGMDIHKKSWSVHFRTDLFDHRGFTMPPSSSQLHRYVQDNFAEHQVALCYEAGCCGFSAARYFLNLGWKVTVVNAADVPRINKQNYQKTDRIDCRYLCKHLQAQQLRPIHIPTEGQDHLRSLVRQRNYIVKQLRQEKLQIKSMLLYLGIAIPDEFDNPNWSKAFLTWLQELQFSNMTATFSMQSKLRILNVLHAEYLEVGNQLRTYCRRHHKKDYYLLKSIPGIGGYLAAAILGELGDIRRFNNEDQFSSYIGLIPAMRNSGNTESTLGITPRGKSLIRSYLVEAAWVAIRRDPEMQRYYRSHFGKNVKNIIVKVAHKLVKRILSVIKTETPYILNVSRPANQQPA

SEQ ID NO: 368468 - protein, 375 aa, unidentified
MVKHGHKRCDQLPVLHPDAAGIDVGASELFVAVGTDRDPQPVRRFPTFTRDLHALADWLQQCGVRSVAMESTSVYWIPIYQILEARGLEVCLVNAQHVKNVPGRKTDVSDCQWLQYLHSVGLLRASFRPPGAICAVRALWRHRGSLVQMAAEHIMHIQKALDQMNLQIHRVLTEITGLSGLRILDAILSGERDPLILARLCHKRVKSSESTVAKSLEGDYRPEHIFALRQSLAAYRYYQQLVLETDQEIQRQMVELEAADNALAKMPKRTKRLPYQRQGHEPRVFDLRSELYRIFGVDLTNVPGISAMTSQTFLCEVGTDVSRFRNASAFASWLGLCPERKISGGKVLFTKSRRVRSRVAIALRLAARSLHHAKD

SEQ ID NO: 368469 - protein, 379 aa, unidentified
MEIITRNEKILYIGIDVHKDTYSLCSFDFHKNELSYEMTIKATTKAVIKYLEAIKKKHKEEILFACGYEAGPTGYGLCRGLQKAGFGCAVMAPTTMSNPDGKKRVKTDRIDARAIARILAYKSYSQVHLPGEEIEALKEYTRARDAKKRMFKKAKQELLSFLLRNGKSYPESGNYWTETFFKWIRTIQFSKKWMQEAFSEYLAEVYSLKHKIELMDAKIKEIAGLEIIKDKVDKLVCFSGIDVTTAVETVVEIHDFTRFATAAQFVSYLGLCPGEDSSGKTKNMLSLTKAGNCRVRALFCESAKAIKRTNPYGQKSKRILERQKNASPEIVAYADKATKRIRTKMKHLEEREKNYNVSSAAGARELACFVWGMMNGKIA

SEQ ID NO: 368470 - protein, 457 aa, unidentified
MSRKSKRTRGIEEAHPFSSLSRVNLHAAGVDIGAIEIVACVAGDENTQIVKAFGNYTVDLQALAQWMNDHHVKTVAMESTGVYWIPLFEELERQGFECLLISSRSLRRVAGRKSDISDAQWIQTLHSYGLLEGSFRPQAELVALRTLLRHRSQLVEHRSPHVQHMQKALLQMNVQLPQAVSDITGVTGQTIIRSILAGIRDPQTLASMREPGCKKSEEEIGKALTGTWREEHLFILKQSVALYDFYTQQIHACDEEIERLYGMTRPDWEAGEVQPLSWRKRNSHSKNIPHNSEAIRKHLKRISGVDLSVVDGFGVSLAQTVIMEVGTDMGKFPDDKHFCSWLGLAPKHEISGGKVLKNSTLKTKNRAGQAFRMAANSVKQADCVFGVMYRRLRARLGPAQATVATAHALARLVYRMLKFQVEYEPLSVNEYQKHYEEQQIKYMRKKAAKFGFQLVPA

SEQ ID NO: 368471 - protein, 388 aa, unidentified
MRRSNQDRIVGLDVHPDSFAGAILQGMDPWKARVVSTSTRVALPLLEKWALRHTREEDILVMEASGNAFCVAERLRALKRKVVILESHRAGKVGKIYCATDRVDAIKIARIYLSALSPVVWQPDAKTRERREIFSAYQAVVKEGMRLKQQIKSMLNEHCVRLEKGFRLSHPSALGRLLRRRKWTEAQKMLLSQLHAGLVGARVRRQRLRHYMAQEILAEKELLRLTRLCGINLITLYGLIAAIGEIKRFATARKLSAYFGLNPTVEQSGNYEGSGALKRHGRGAIRALLVQSAKKLLQVDNPLQKWGLALAARRGRNKAAVAIARKLCVAVWHVMQGHVIGAIERMDTLHTKLHKLATELGVPTIKQLGYETKEAFVQKKLYLLRSYA

SEQ ID NO: 368472 - protein, 370 aa, unidentified
MEFNAYIGLDVHKETIAIAIAETGRTGDIHFHGEIANTPDAVGRMLKKLGGRYGKLHFVYEAGPCGYGLYRQINSAGHVCEVVSPAHTPRRAGDRVKTDRRDSVLLGRLSRAGELTSVWVPDEAHEAMRDLIRAREAATKELRQVRQRIQGFLLRHGRRYAGAVWKKQHRVWLANQTFNHPAQQIAFQTYLNAMDQAIERKDLIETQIEALVPEWSLGPVVDALQALRGVALVVAAGMVAEIGDMRRFEHPRQLMAFLGLVPGEHSSGSKRKLTGITKAGSIVARRLIVEAAWAYRMPAKIGQTIMLRQQSLATPIRDVAWKAQVRLCARYRRMLARGKKAPIVITAIARELVGFIWAIGQQVKLKAFNE

SEQ ID NO: 368473 - protein, 428 aa, unidentified
MSNSDISRVKRFRQFKNEIRGSDRYLIVGLDIGKSMHHAFLGTATGKTVKRGLRVENSASGFEHLLTMLQFYMDRDGFTNVVFGLEPTSVYHKPLAEFLITQDHLVVYVTNEAIKKNRALIDGRWDKNDTKDAANAADLVSQGKCQFYDFPDIQLRDLRALLSLRRRLKKQLHSSRVRIRNNLVAQYFPELDKCWTQAQQENLAIVRWCLSPHKISELSFEDFFKIVTTGNKGLRQYNRLIKIWEIAPYSIGCQSGIAMEIEAQILVENIKSIQTHIATVEETIEDICAGFQEYQYLLSIPGFGPYVSAVVLAAIGTAQRFDNTHQVLRFAGFDLNANRSGKRSQSAVPVISKRGKAALRYAVYQAALIASSLNTQFRGYYHHLLQGREREKGIRTKMRVKLAAKLLVIAWTLMKKKQPFDPSYLNAQ

SEQ ID NO: 368474 - protein, 312 aa, unidentified
MENKVYVGIDVSKDKLDLAIRPDGQEWSEGQDDASLERLVRKLKDIAPALVVLEATGGYEARVAALLATAGIAVSVVNPRQVRDFAKATGKLAKTDRLDARAIAHFAEAIQPQVRYVSDEEGREIAALMSRRKQLIEMMVAEKNRMHTCLPKLLPKLKAHIAWLKQCLEELDKDIQDKIQNSAIWHEKDDLLRTVPGVGKVVSFTLLAGLPELGVLDRKKIAALVGVAPLNRDSGKYSGRRGIWGGRGDVRSALYMATLSATRCNPVIKSFYQAMVARGKLKAVALTAAMHKLLTILNAMVAQSKPWCPPIA

SEQ ID NO: 368475 - protein, 410 aa, unidentified
MDVVYGRCCGIDIHKRIAVACVIVSEKKGRTRKEIRTFGTMTDDLLALADWLASEGVTHVAMESTGVYWKAPFNLLEGQFEVLLANAQHIKTVPGRKTDVKDAEWIADLLRHGLLRASFVPDRPQRELRELTRYRTSLVRERAAEANRLQKTLEGANIKLGDVATNVLGLSARQMLDALVAGTAEPATLAQLARGRMRAKIPQLERALSGRFAAHQRFIVGQQLAHIDYLDEVIERLSAQVAERLAPFDTMIERLDAIPGIARRTAEILLAEIGSDMSRFPTAAHLASWAGMCPGHHESAGKQYDGKTRKGSPWLRQALIEAAAAAGKTKDTYLAAQYHRLVPRRGRNKAAVAVGHSILVIVWHLLQHDCPFVDLGSTYFDERDRAATERRLVRRLEQLGYSVRLDRPAA

SEQ ID NO: 368476 - protein, 474 aa, unidentified
MIYSVGIDFHRDQHRVRCLDERAQFCDSFSFQSSPEGLAKLEERVFQDGANPIIVFEPAGLAWLVVAVYLRSRHPECRLVKAKMQKIAALRRYLRGSAKSDRIDALTLAKMPFIDPEQLYEIYLPPAKVYALQRLTRQRKRLEGNIAGRKIRIGATTDGYLPGVRRAFDDPWSPQSRAFLRSQLNPFAVVRDGEEALHMFLSKATRRGKWSRAETWLVFLACQSVAALYELSQSVETINEEFFADLQEEVARELRLMEAEEAESESLARRIAELYRELHPSDNLRTIPGVGEHTAPIFLSAVGDPTRFRSQSAFANWEGVVPGARQSSNAEAKGLRMTKAGPSIMRMGLYQAGDVGRRWDPQLAAVYYGEMVYHGKNHKQAMGAVMSHLGARVFAVLKEDRPYELRDVEGNLVSKDEARRLILSRYQVPEEIRRERRRRKPVKSRKKEREMATYRTNEAAKAPQPVEVMAISRK

SEQ ID NO: 368477 - protein, 355 aa, unidentified
MTDNQQKIIIGVDTHKDFHHVAVISALGESLTDRKFDATPDGYADLIRWVTEQGAVLRAGVEGTGSYGAGLTARLRTAGIDVIDVLAPDKQERRLRGKTDQIDAYSAARAVLSKRATTVPKLRDGEVEAMRILRTSRRLVVKQRTEIMNQLHSLLVSAPETLRAKLTGLKAKDLAKACARLRDLAGDDVVTAATKDAAKSLGRRHVELSLEADRFEESIRALVTAYAPELLAVYGVGPDVAATLLTVAGENVDRIGTESALAHLAGTAPIPASSGKTNRHRLNRGGNRQGNAAFHRIVLVRMKRHPETRAYVEKTLARGKTKRDTMRLLKRYLAREIFPILIAVQERHATTQIAA

SEQ ID NO: 368478 - protein, 366 aa, unidentified
MKKQLTGKSIEQGSGEGKCNRVLKLGLDVHYRQVTVAMQEEAGAIKAVGRMGHDGFENWVERKREAGWEIYSCYEAGASGYWLHRDLEQLGVKNLVVAPKAMGQDKGQKTDRRDSAELVDQLDRYLRGNRKALSAVAIPTVEQEQKRALLRYHRQIMADRSRYEARGKGLLCAQGIEVQGKWWQPQTWKELKTHGRFQGWMQTQLQGWRRKLLSAEQEQQKLRTQIEALAPALLPKGVGAYSAVALEYELKGLARFKTARALSSYTGLCPGIHSSDGRGKEGSINRCGNAAVRWNLVEMVWRLLKWQPDYQVVRQLGAGLVRSKRARKRLVVKAARQLAIDLWRLETGRVTAQELGLVMQPSSKAK

SEQ ID NO: 368479 - protein, 433 aa, unidentified
MEVMHERVAGLDAHKAMIVACVRRIVGGKVSRECRTFETTTAGLEALLGWLTEAGCTDVAMEATGVYWKPVWNILSDGAFELIVANAAHIKNVPGRKTDVNDAMWIADLVACGLIKASFVPEEEIQELRSLLRARKQLTREQTSHIQRIQKTLEEANIKLDSVISDILGISGRRMIEAMIAGVRNPLRLAELADRRIKASPKALYDALHGRLTDHHRFMLKLYLGQHDSLSEAIARIDRQVHGLIIRMDAEVKAGQATFRALIILLCSIPGISTLAATVILSEIGRDMSRFPTSGHLVAWAGMCPGQNESPTGQARGLKAHGKRKSSRLRKGAPWLKTMLVQCAWAASRKKDSYYKAQFNRLRGKRGPKKAICAVAASMLTAIYHMLKDGTFHQDLGADHFDRRSTEVKAKRLVAQLTKLGFQVQLQPLAEAA

SEQ ID NO: 368480 - protein, 393 aa, unidentified
MRTPGASKRKRSRSQIIRTFATTTNALLELRDWLVAEKVTLVVMEATGDYWRGAFYLLEDHLNVILVNASHVKGLSGRKTDVSDAAWLCQLGECGLVRASFVPPEPIRHLRDLTRYRTTLTTERTRETQRLEKELEDAGIKLSGVASDLLGKSGRRMLAALIDGEHDAEVLADMALRRMRSKIPQLTEALTGNFGEHHGFLCRLHLERIDQLSAAIAELSARIEEQMRPFSRQIDLLETIPSVGRGVAEVFIAESGGDMRRFPTAGHFASWAGVCPGHHESAGKQRSGKTRHGNTWLGGALGIAAMAAGHTTDTYLAARYRRLRPRLGTKKTIVAIQHSIVIAAWHMLTDDTGYQDLGGDYFTRLDPERAMRRIVRQANALGFTVRFDPLAAI

SEQ ID NO: 368481 - protein, 350 aa, unidentified
MEFIAFDAHKHYTLASVATPDGQLVREGRIEHERGALREFLERCEQGSPVAVETIGNWYWIVDEIEAAGCLPRLVHARKAKLMMGEINKTDKLDARGLNRLQRSGTLPTVWIPPGELRDQRDLPRTRMVLVRQRTQLKNRIHATLAKYALHDLEVSDVFGVHGRALLRERFERLPSHTGYASRQLLGQIEELGRQVRALETRIRVTFKLTPAIQRLLTLPGVGLTLAVVIALEVGDVARFASAEKLAAYAGTTPRVHASGGKTRFGPPRPDVNRYLKWAFVEAANVICLRRGRAPHCHVSHLYDRIARRKGHAKAIGAVARHLAEATYWMLSRQEPYREPKGSGRFVHGG

SEQ ID NO: 368482 - protein, 367 aa, unidentified
MEKTLEKLNLVSLSNHLYLGVDTHKDKHSVVGLDCFSQVLYEKEINNSEEDFDQLIKEVEDMGLESVFGLEDCYSYGSRLAEYLYQNGFVVKIVSPVLVERERKYQTHPEKSDFLDAFGIAEALIHRIGTLPHYSISKEGEVSQEIKELVMDREFLVKEQTRLKNQLHRLLHKAYNSEYREKFKNPFSVKALKYWLRTSLKIDSSILGSQIRRKVKRLIDIKKEIMEIQEELRLLVNQTDQRLETMNGCGLVLAASLLAEIKNIERFRSSDSLAKYGGFCPRERSSGKTIRRIKTKSGNRRLNRAIHRIALSQIGKNGNQCAKEYFKKKISEGKSKVQALCCLKRKLVDIIFMMLKYKEEYRYFSKS

SEQ ID NO: 368483 - protein, 416 aa, unidentified
MKKRSYRAQKVNEIRWEEVADRVKERAVVWAIDVAKVEQYGVLMDSEREVMVTVKWAHPAETPALLERLRGLPCASLTAVMESTGVYGDTLRRQLREVGIEVHQMSAKRVHDACEVYDGVPSMHDAKAAQVIGRLYFEGASRAWVEASEQQRSHDAMGRLYRLYQKQHQQQQNRLEAALTRHWPELIGYLDLDSVTLEDLILSFGSPAELSARAEEGRERMRRASRGKLAAEKIEAVIESARQTIGVPCVAAEREYLMALGAELRHSREQKERVGLRLSALTQADPELHALGVTLGRVTTGLLIAEGLDPRAYANSGSYCKAFGLNLKERSSGQHKGQIKITKRGSGPARRDLYLATLRLINHNEIVNRWYEKKVQAQGGRHKLKIVVALMRKLSRALWYVARGQAFDARRLCAVG

SEQ ID NO: 368484 - protein, 337 aa, unidentified
MALELLAIDLGKRSFHLYGIDTNGEILSRKVSRTKLAEVVNNLAPKAIAMEACASAHYWARCWLAAGREVRLINPRFVKPFVKGSKNDAVDAEAIFEAAMRPTMRFVPVKSTEQQDLQSLHRARDRLICQRTALINHTRGLLAEYGVVLPQGPWRFTAQAPAAVAGAESDLARSIFGELMDQLDELDRRVKKLDATMVALCRTNETCRRLAKLPGVGPVIATAIVAAVNDGRQFRSGREMAAWIGLVPRQYTTGGKPRLGGIGRRANHYLRRQLIHGARAVVSRLPQHDARHDARRSTWLKALVARRGFNRTIVALANKTARIAWALLNRKEDYAIA

SEQ ID NO: 368485 - protein, 369 aa, unidentified
MAQVTTIGLDLAKRVFQVHGVDATGTVVVRRSLRRRQVLAFFAKLPSCLVGIEACATAHCWAREITKLGHDVRLIPPAYAKAYVRRNKNDPADAAAIWEAVSRPSMRFVAIKTEAQQAAAGIHKVRAMLVKQRTMLINTLRGLMAEFGIVVADGRQHVEELIAVLTDPAEARIAAPLHDGLMAIVDSLRSLEQRIERIEKQILGWGRSNPTCRHLTTIPGYGPILSSAMAAMVVEPTAFASARHFAASLGLVPRQDGTGGKVKLGPISKRGNGYLRRLLVNGAMSVLCSKRAKEDPWLMKLLASKPRKVAACALANKLARIGWGVMMRQEDFRSRRMISRTPDPSQPDVVLTALKTASRAPLAVACGQS

SEQ ID NO: 368486 - protein, 383 aa, unidentified
MGAVARTQLRETPVKQNRTCVGLDVHARSVWACTVDDESGEMRTSRISPKTAEIVKWVKALPGEVEVAYEAGPTGFGLARALIAAGMQCHVLAPSKMERPSGDRVKTDKRDCEWIARLVRLGELPVVVIPSEGQEAARDLVRAREDVRGDLMRSRHRLSKLLLRQGIVYEDTAWTAAHGKWLRSQSFDKPGVQFAFDEAYDTVLTTLARRDRLDKAILTMAAEPAWAPVVARLGCLRGVGTLTGFGLAVEIGDWHRFTGNSIGSFLGMTPSEHSSGGSRSVGSITKTGNGHARRLLVESSWHHRKPYRLSAEMIRRRDGQSPLVRARADQANRRLNQRWRTFDARKKRPTVAAVGVARELAGWCWSLAVMDGEKDNSAMNRQR

SEQ ID NO: 368487 - protein, 419 aa, unidentified
MSFKILKNNCCGLDVHKTWIFACIGITDSRSRTEYKQARFSSFSKGLQELCDWLAKYNCTDVCMESTGKYWIPVFNILEKNNVWVTLSHPKYTKPQKGNKTDRKDARWICDLYMCGMVKPSFIPPADIRELRDLVRYRYKLTCMITGEKNRAQNCLTVSNLKLDEVFSDVFGKSSRSITEQILQHPGEIFDVTPFVDGRCKTPIEEIQAAVDGAVSTEQAVKLKQCLNHIDELEMHKAEIDREIFRLSDKYEEALILIRTVPGFDKNPMTAIQVLSEIGGDMSVFPTAKNLVSWAGCCPRNDQSNQKIKSTRISRAGSYFKPVLVQVANALIKSKKNPEFTTRYRRIKARRGHKKAIIAICRMILTAIWHILTDLKPYTPEGFLESRPVNKEKVLTISQALNLIKQRGYIIKDDVGPVT

SEQ ID NO: 368488 - protein, 312 aa, unidentified
MDAIFVGIDVSKDRLDVAMRPNGESFFVSRTGAGIDDLIERLKAVSPQLVAIEATGGFETVVAAGLAGGGLPVVVVNPAQVRAFANALGQRAKTDPIDAAVIAHFAEATKPQVRQLPDETTQMLADLVTRRRQIVEMIAAESQRARRVTSARLKKSITRLRKALEKELCDLDGEIGDHVRGSPAWAEKEDLLASVPGIGPTIARSLIAELPELGSLDRRQIAALAGLAPWTRQSGQWRGKSFIGGGRANVRRVLFMGAMVAARFDPTLKLFRDKLVAAGKPKLVAIIAVARKLLTILNAILRDKTPWQPKIA

SEQ ID NO: 368489 - protein, 430 aa, unidentified
MEQLDGIRLQEFRQVRKEIRGSGKYLVVGIDAAKERHNAFFGTATGRTLHKGLVFDNTIEGFRKLLTLTEALKVQHDLTNVVFGLEPTANYHKPLGEHLIKCGHLVVLVSTAAVKNNRQLLDGRWDKHDTKDSANVADLISQGKCLYYEYPDQKVRDLRSLLSLKRRLKKEEHGLRVRIRNQLLAQYFPEMDRHFGPSVSLAVVRCCLDPSEIARMEYDEFCRNVAPGKLNVSQQKRLHAIWQTAPESIGCRVGDSAPFEARVMVSGLRQVRETIKAVEEKIEDLCIQFPEYSCLLSIPGFGPDVSSKVLGAIGCPFRFASGKQVLKMAGFDLCAERSGKTSNSATPVISKQGKSGLRYALYQAALIASLSNKDFMTYYTNKLRGRQREKGIGTKMRVKLAAKLLVIAWTLMKKKETFDPKYLNQGDTQI

SEQ ID NO: 368490 - protein, 349 aa, unidentified
MLADELDYVVGVDTHRDQHVLAVVAAPTGALIAQRAVRADASGYAAAVRFAERHAPGARLWAIEGAGHYGAGLVRHLGRRGELLHEVSRMGRGERRLRGKDDPLDAVRAARTALAGEAVATPRSGQHQEALRVLLVARRSAVDARRVALVQLRSLIVTAPEQLRQELRPLPAGELLRRCSRFRRSRSRTPEQLATILALRSLAQRIEAADKEAAELKHEILAHVRAAVPELLDEAGVGPIVAAQLIVTWSHRNRVSSEAAFARLAGVAPLPASSGQTTRHRLSRGGDRQLNRALHTVILHRRQHDPATRDYIARRVADGKSTREAVRLLKRYLARHLYRVMQNSTPLTT

SEQ ID NO: 368491 - protein, 430 aa, unidentified
MTTDIPFAAFVGIDWADEQHAVALCLPDARQYEPSDLMQRAEDLDEWVAQLRTRFGGRPVAVCLEQSRGALIYALMKYECLVLFPINPKQLASYRDSFKTSRAKDDPTDARLLCQFLAERHSQLRPWRPDDETTRVLRLLVEGRRRWVDQRTALGNQLWQQLKEVYPLAVTLAGAQVFAVGFLEMLVKFPSQKELQQASPKQLDHWLPKRRITTDEPSLEQQQRDGIAKLRAVPALVTDPAILQAGRLAVLSLAQMLQQLNQTIAQYDRDIAARLATHPDAELFQSLPGAGEVLVPRLIAAFGTDRERLESAEDLQELSGIAPVTSRSGKTCTVRKRRACPHFLRQTFHEFAGASIRFSRWAGAYYRMLRDRGTQHHAAVRALAFKWIRIIFRCWQQRTPYDEQRYLQQLTLKHAPLLAYLAPENSSSNP

SEQ ID NO: 368492 - protein, 338 aa, unidentified
MIVIGIDPHKKTHTAAAVDSATGAFLAELTVPGTDDGHEQLRSWAHELARERALGFAVEDCRHVSGRLERRLIDRGERVVRVPPKLMGRARRSQRQSGKSDAIDALAVARAALREPDLPTAQLDREARELKLLLSHREDLVCERTAQIQRLRWHLHDVAADLEPNPRALRSERARRSLAQRLARREQSVEVAIARELLSRIAAISRRERALQEEIRERVRAYAPVLLELPGCGELTAAKLIAEIAGARRFRSDAQLARHAGCAPLEASSGARPRHRFSRRGNRQLNCAFHRIAVTQARIHPDARIYLERKRAEGKSTREALRSLKRHLVRAVWQALRH

SEQ ID NO: 368493 - protein, 410 aa, unidentified
MEKVYERCCGIDVHKKLIVACLRTGNKKEIREFGACTRELLTLADWLAENSCEMVAMESTGSYWKPLYNVLEAHELPAMVVNAQHMKAVPGRKTDQKDAEWIADLLQHGLLKSSYIPGKAQRELRELVTYRRSLVGEKSRELNRLQKMLEGGNIKLSGTVSNVNGVSGRRILNALVQGENISRERLAELVVTRLKADPEKLLDDLRGILTPIQRKMIGVVLSHIDELDRHIAELDDEIDNNMSDDDKAQVELLDDIPGIGPDSAKTILSIIGTDMSRFPSANHLCSWAGVSPGNNESAGKRYSGRTTKGNKVLKSTLVQCAHAAILVKTSYFYAQYQRLSVRRGKKRAIVAVAHSMLIAIFHMLSTGEVFRDLGADYYNHFNKERKINSLLTKLKNLGWKPDDGLTMAMA

SEQ ID NO: 368494 - protein, 393 aa, unidentified
MHSVGIDIGKRQHVAAICRDGQRVADKPVLRFSSDRAGLAHLERWLGQHGPVDRVVMESSGHYWIPLAAALHRQSVPVAVINPMSSKAFGKRRLQRIKSDPADARTLAALGMADQPRIREPLAGTELREAARFAMHLVEEQSRVDNKIVRLIELGFPELEQAYDDPTCTSALAVLRLAPTAHAVARKRVATLADANRAPGHRAVGPTKAAQIQDLAKNTMAPPELAAQIGFEMELLIAQHDLLEQQIAAAEARVAALLDGPLARRLQTIPGVGPATCATLIAEIGDIHRFTDFDQLVAYAGVHPAEKSSGQKGGPETSWRMAKTGNAYVRAALYRMSVVGLQHNPTIAAHYARKRAQGKTKMNALGHCMKKSLAIVWGIWRGNHDFTSEPPTA

SEQ ID NO: 368495 - protein, 320 aa, unidentified
MASRESLFIGIDVSKQTLDGAFGADPHAPRETIPSTDEGVQLLVTRLQRLQPTLMVLEATGGLERMVFAQLLQAGVPTARVQPRRVRALAHAEGRQAKTDRLDARLLARFAERVRPPHHQAPDEQRASLRDLPVRREQVIQMRTAEIKRLTAAAPNLRPGIQQHIDWLDQEIRALEQERDNEAERTDEVRRKRELLESVPGIGAITALNLLLRLPELGTINRKEAAAVVGVAPYANQSGAQHKPRHISGGRRDVRSVLYMATLAATRCNPTIRAFYQRLYQAGKPRKVAIVAAMRKLLTILGAILRQQKPWDPAVHTSAP

SEQ ID NO: 368496 - protein, 342 aa, unidentified
MNITTIGLDLAKNVFQVHGVDERGKTVLKKQLKRAQVLPFFANLVPCRVGMEACAAAHYWGRRLVALGHEVKLMAPQFVKPYVKANKNDARDAEAICEAVGRPNMRFVALKNAAQQAVLSIHRARQGFIKARTAQANQLRGLLGEFGIAIPKGIRELPAHIPDILEDAENELPSLMRALVQRLWEHFRELDRQVGELDREIQRLHREDESMQRLAEVPGIGALTASALAATVGDAKTFDNARQLSAWLGLVPRQHSSGGKQVLLGISKRGDCYVRTLLIHGARSVIQQAERRNDGDPWIKKLLARRPRNVVTVAVANRNARIAWAILAHQRRYERGYQPQPQ

SEQ ID NO: 368497 - protein, 431 aa, unidentified
MGFVGGGHHAAFVERIRDVDRGRLLAAPIDVGKSSAAAMVCDFWGEIVTPPFEFALNESGFGLLRTVLARAEAQRDASWVRVGIEQAGHYHDTLVARLQADGIDVAALNPAQVKENRSQDLLRSLKSDARDLGAMAELLIRGKGRELPVEEGPLACQVVAASHRRRKVKARTALKNQVLSTLDLVFPGLDSCFTDMLDTKIGRLLLAEAMTPDRLARMGADRLRAFARRRGVVVTRRKAAQLVQAAHLAFRLPQSRGQALREVLVRDVALWQSLEGAIAEIETTLAEVLPHTPASILTSMPHVGVVRASAYGGALGDPARFASAAQVYRMSGLVPRLYSSAGRTRAGTPISREGKVELREAILDLGKALRHGHPDFRAYAASLKDRGKLAGVIACALGNRTNRVAFAMVRDQRPFDETRWPDEGGRARHDR

SEQ ID NO: 368498 - protein, 394 aa, unidentified
MILVGIDIGKNQHTFSIVDMNTGEILSNPSLFNNNQEGFLFHIKKLNIYSKSDLLIGMEDTGHYHFALLKYLLDIRYTVALINPTTTDLTRKLQGGITKNDPLDSLTICDVIGSNQRKKPYRVTKVNRFDLYEQKQLTRHHHNLKEELNTYKNRLQKCIDIVFPEFNSLFRSKYGIVYMNVLKTFASAQKIANSDIRTIRKCFEYDGRGKRITLSADQLKAAAKTSIGIPSVAEEIQIRHLVCQIEMIEEQLSEIDKKIEEFSLQNNSPILSIPGISHFSGTSILAELGNICNYTKASQIIKFAGVAPYHYESSQFTAQHTAITKKGSRYLRKTLYQIILPVINHNTVFTAYYNKKLAEGKGHRCAQGHCIRKLLRIIYHLLSTEQTFDPALLI

SEQ ID NO: 368499 - protein, 419 aa, unidentified
MSFKILKFNCCGLDVHKTWIYACIGITDSNNRTEYKQARFSSFTKGLNELCDWLTKYNCTDVCMESTGKYWIPVFNILEQHNLWVTLSHPKYTKPMKGNKTDRKDAKWICDLYMCGMVKPSFIPPADIRELRDLVRYRYKLTCMITGEKNRAQNCLTVSNLKLDDVFSDVFGKSSRSITEQILQHPGEKFDVAPFVHRRCKTPIEEIQAAVDGVISKEQAVKLRQCLDHIDELNKHISEVEQEILRLSDKYEAALNLIRTVPGFDKNPMTAVQVLSEIGGDMSVFPTAKHLVSWAGCCPRNDQSNQKIKSTRISRAGSYFKPVLVQVANALIKSKKHPEFITRYKRIKVRRGHKKAIIAICRMILTAIWHILTDLKPYTPEGFLESRPVKEEKTLTTSQALNLLKLRGYVIKDDPLPTS

SEQ ID NO: 368500 - protein, 468 aa, unidentified
MSKLSRRPTSSTAQPQENVRPFDGLERIQPHAAGVDIGAHETMVCVPGPGNTQIVRAFGTYTADLETLAAWLKDHAVETVAMESTGVYWIPLFELLEQRGFHCCLINAAGSKRFPGRKSDVLDCQWLQTLHSYGLLADSFRPDADLIPLRTLLRHRAQLVQHRSPHILHMQKALLQMNLQLPQVLSDITGETGQRIIRAIVAGERNPHTLAALRNSRCHKEEHEIALALTGTWREEHLFVLRQSLALFDFYSQQIAACDAEIERTYSAIRPDWDAPKPDLPVIAHKPHSHSKNQPQGVQVRQHLYRITDVDLLAVPGVSASIAQTIIAEVGSNLARFPSTKHFCSWLGLAPHNDISGGKVLRSRTLNNHNRAGQAFIQAAAALTRSDTVFGAFYRRLKSRIGPAQALVATAHKLARVVYKMLKEKVPYTHTTAQEEDARFRDREIAYLQRKAAKLGFTLAEPEATLVS

SEQ ID NO: 368501 - protein, 346 aa, unidentified
MGKIIRIGMDTSKQIFQLHGVDEAEQVVLRQKLRRREVLEFFGKLAPTVIGIEACGSSHYWARELTRLGHEVKLMAPQLVKPYVSRGKNDAADAEALCEAMSRPKMRFVPVKSAESQAALMLAGLRDRLVRNRTQLANAIRGYAAEFGLVAAKGKAKLEPLLLRLQADETVPPLARELFAEHAKEYAQLEAQLAAIDAKLMAWHRANALSRNLARIPGVGPVIASLLVMKTPDPHAFRSGRHFAAWLGLTPKDHSTAGKVRLGVITRAGDEILRSLLVVGATAVVWQVRRGTGRNPSPWLVELLKRKPPKLAAVALANKIARVAWKLMTTGEIYDANRALPATAAA

SEQ ID NO: 368502 - protein, 440 aa, unidentified
MTEFGKINLHAAGMDLGTEQIFVSTDGETVKAFGTFTSDLHDLKTYLIANGVTTVMMEATGVLWVPIFDILESAGINVCLVNAAHAKNVPAQKSDPADCRWLYKLHVYGLVRASFIPDEAIRELRIYIRQREDNKDIAASHIQHIQKAFELMNIKLHNVISDIMGVSGLSIIEAILAGEHDAEKLTALCNKQILKKKKEKVLESLKGNFKREYIFMMQQAYDAWCFYQKQIENCDIKIGELLKKMTENLPKPPQELLGKPKPSRHDDLNVDNLHDQLVCINNGRNAASLPGFSDSAVLKLTAELGTDFSKWVTDKHFTSWLGLSPRKYQSGKTNKTRRSLKKNTKAGQIFKELSMSIAGSKHLALKGFYNRIKSRSGSKAAIKAVARKLAKLYYDYMTRGFTYVEQGLIEYEKKFKAAMIKGLEKKAKNIGYQLVPIGVH

SEQ ID NO: 368503 - protein, 342 aa, unidentified
MDEYDGMQFVGIDLHRRRSVIVRQSESGEQLSAVRILNDPVSLQLELERAGVDPEVVLEATYGWYWAVDVLQACGARVHLAHPLGVKGFRYRRVKNDVRDAGDLADLLRMGRLPEAWIAPPATRELRELVRYRAKLVAIRSGLKAQVHAVLAKAGVLIVVSDLFGVGARKRLAKVPLGSAYAERVRSLLELIATLDDHEARFVGLIAKRLDADRGYQAIQQVPGIGPTLAAVFVAEIGDVHRFAGPAQLCSWAGLTPHHRESDTVVHRGHITKQGSKLVRWAAIEAVQRHQTTTKIAADKDRIEARRGKNIAKVAAARKLLTLVYYGLRDGHIRALDRARAA

SEQ ID NO: 368504 - protein, 342 aa, unidentified
MESAVTIGLDLGKSVFQVHGVDAGGAVVVQRRLTRGKLLHFFGKQASCLVGMEACAAAHHWGRELRKLGHTVRLIPPRYVKPYVKRQKNDAADAEAICEAVTRPNMRFVEIKSCEQQGTLVLHRVRLMLMRQRVQLSNAIRGHMAEYGLVAPVGRNGLQRLIAILGNPDDERVPAVARASLAQLVCQFGLLNDQVLENDRRVRASARATELGCRLMEVPGVGPVLASAMVATVPDPAAFKSGRNLAAWIGLVPRQNSSGGKEKLGGITKQGDRYLRQLLVAGALAVIRYAQRHGTKRPWLVQLLSRRTPKIAAVALANKMARMIWAMMMTGERYREPTVAAA

SEQ ID NO: 368505 - protein, 470 aa, unidentified
MPERESKIISHQAKKQSAKAKEFTVVDLPRHLRHINVNAAGIDIGSDRHLVAVPEGRDLVSVREFKAFTADLHALADWLSQCGVTTVALESTGVYWIPLYEILEQRGFEVYLVDARRVKNVSGRKSDVLDCQWTQELHTYGLLVQAFRPPEEVCVLRSYLRQKEMLVQAAAEHIQHMQKALQQMNLLLHNVVSDITGVTGLKILKAIIAGERNAQVLAALRDPHCQNSVETIAKSLVGNYREEHLFALRQALELYETYQVKIADCDAAIAAYLLRQDHHTDDEPPAPQKPIPARNRLRAGLDVRDQLYKMSGVDLFRVSGLAADTLLTLAGEVGFDMSPWQSVKHFTSWLALCPGTKQSGKRVLSRKTKPSANRAAQAFRMAAVTQARAKTALGAFYRRIRGRSGGREAVTATAHKIARIYYSLLKHGSAFVEQGEAAYEQQFKERRLKALKKQATALGYQLSPLITTSF

SEQ ID NO: 368506 - protein, 431 aa, unidentified
MYPFDFISVGIDVGADFSWISILTPDHKTVVKPFKISHNDIKSLEKAVSTIKKVEELYSLEAHTFLESTGIYHLPLFYYLKESGFEVFILNPLITDSNKNSGIRKVKNDKSDAIRIAKTAYTENLKVSLVPSDLVLNLRTLVREYYYLVDHKTSYVNKLHKELRVCFPGYSKVFYDIAGKTSLAILKIYKTPQNIINAPKDEIISLIANTSRRGTQYANEKYELLLKSACLSKSFGKYLSSAFEIIELNIDIIEIYKQKIECVLSSIKEYTVKHQNDTFIKQIHIVESINGVGFISAVTLMCEIGDFSAFKRPKQLYAYFGLDPSVKQSGKFIGTRVSMSKRGSRLARRVLFTVAKSSISSSSKGKAVNPILKEYYEKKKLSKPKLVALGAIMHKITNIIFAVLRDNKPFVIKTLHDHHNDYKNSKLSLVA

SEQ ID NO: 368507 - protein, 453 aa, unidentified
MAQRNRSVPLKARNSREPLSLTHPNAAGIDVGSASHYVAVPPDRDDQPVREFPSFTADLHRLADWLQACGVDTVAMESTGVYWIALYELLERRGFTVLLVNARHVKNVPGRKSDVLDCQWLQQLMSYGLLRGAFRPTDAVCALRSLSRQREMLLRAQARHVQHMQKALTQMNIQLANVISDVVGATGQKILRAIVAGERDGHVLAEHRDVRIKATKQEIAASLKGNWREEHLFALKQALALFDFYATQLLECDAAIDAQMQALAVHGGSASPGKKRSRARNAPKFDLRQRMFAMCGVDLTRIDGIDVTTAMIVLSEIGTDMSRFASVKHFTSWLGLCPGTRITGGKLLSGRTRRCANRAAQALRMAAAALRSSKSALGAYFRRMCARMDKPKAITTAAHKLARLVYTMLTKGQEYVDQGQDYFEERYRERVIRQLSQRANKLGLKVTVAEQPA

SEQ ID NO: 368508 - protein, 417 aa, unidentified
MKIVRNICCGADVHKDIIVATIATTNQDGITEYLQESFSSQNYDLYRLKSWLKENNCLEIAMESTGKYWIPIFNVLEDEINTRIVHPKYTKAIKGKKTDKKDSKWIADLFKYDLLRFSFIPPKEIRELRELSRYRIKLIGMRSSERLRYQNSMTVSNIGLASILSDPFGKSAKAIMNEVLSSKTLDEDKIKSLLSKSAKKKTAEVLKSLEGCHIETDQRLKMNVASKHMGELDKHIEQIEIEMAKRCIPYASIIECLIQIPGISYISAMIIIAEIGVDMSVFDSDKQLSCWAGLAPANNESAGKKKSVRISKAGSYIKPLLVQCALSAIKSNSEPYYRVKYERIKKRRGHKKAIVAIARMILVAAYHIILTGETFNPSDIEDIHKPKTSKNNQITVDLALAFLQQSGYDTSTISLIS

SEQ ID NO: 368509 - protein, 421 aa, unidentified
MNQLSGKPYTAYIGIDWANSKHDICLQLAGGEDRAFERIKHTPEAIEEWAQALYQRLGGPIAVALELSEGAIVSALEKYDFLVLFPIDPKRLARYREAFVPSGAKDDPTDAEFAMDYLMRHPEKLKALKPESAPMRKLRYLVEARERIRGDQSRYVNRLIQALKQYYPQAVDWFNDHNTLVFCDFLQQWPTLTKVRRARKARLERFFKEHNVRFAHIIEERIQAIKAATPLTHDEAVIEAHRLQVEVLVEQLRLTIKAMKCFDEQIAAIAAQFPDYEHLYTPLPGAGKVIAPRLLAAFGEDRDRYHCAAQLQNRSGIAPITKRSGDSTWVHWRFQCPKFLRQTFIDFAAQTINKSAWAGAYYRQQRDKGASHHVAVRALAYKWIRVLYRCWQQRTPYDESKYLDTLRRRGSPLLKQLAEAA

SEQ ID NO: 368510 - protein, 386 aa, unidentified
MQRNDLSRSLVAFDQNSTLVAVIELSLKSWLIASIVPGLTRQPLKKQAPDADALLALLYRWRDEAIKAGRAIDRIVVAYEAGRDGFWLARWLGVRGIEAYVIHPTSIPVSREHRRAKTDRLDTALLLRAFVGWLRGEPKHCSMAAIPTVAEEDARRPNREHQVLVSERTRIVSRMKAMLIRFGIRNFNVKLRKAAERLEQLRSPEGVALPPNTLAELGRDMARLRFIAEQIKAIEKTRLEQLHKAPEEGTHPMVRMLARIMGIGIETADMLVHEVLARDLRDQRAVARYAGITGAPDESGTKRREKGLARAGNARVRRGMIQLAWRWLMFQKESGLAQWFRARTADARRDIRKTMIVALARKLLIALWRYVTTGELPAGAVVRPAM

SEQ ID NO: 368511 - protein, 364 aa, unidentified
MTSMPHTSTLVHTGPDRQVVVLGVDTHKDVHVAAVLTEMGSVLGSSGFPTGSDGYAQLLAWARSFGVLRRAGVECTGSYGAALARVLAAEGVEVFEVSQPDKAARRRRGKSDEVDAEAAARAVLSGRATAIAKSGDGPVEMVRLLRRTKESAVKARTQAINQLRAALVVADPGLRASFDGLGAKALIRRCADLAVGPVADVDSATLYVLRLLATRIQSLSQEIDALEQLMEEVIRRHVPALLDRVGIGPDTAAALLVTAGDNPQRLEKEGSFAALCGASPVEASSGKSQRRRLNRGGDRQANAALYRIVLTRLRWDDRTRAYLQRRTTEGKTRREVIRCLKRYVAREVYALIKAATADHAPDPA

SEQ ID NO: 368512 - protein, 359 aa, unidentified
MLYLAIDQHRKQLTVNLRDERGDVLLKRQVSTEWRRVRAFMDEVRKRSVAEGGFITILEVCGFNDWLLGVLVEYGCVETILIQPDRRSKKKTDRRDANALGELLWVNRQRLLAGRRVQGIRRVQPASPGDAEDRQITALRQRLGQLRTRTINKIKHLLRKHNLEQECPTKGLDTIRGRKWLSRLALGGIDRLELDQLLVQWKLWDEQMEQVDGEIRRRQAQSEKAAVVATIPGCGAYASLALASRIGSIERFPRPCSLANYWGLTPGCRNSGQATDRLGSITKQGSAMARFILGQLIMHVLRRDSWMKSWYGRIKRRRGSKIARVAVMRRLATIIWHMVKHNEPYTTGGPPRQRLTTAA

SEQ ID NO: 368513 - protein, 343 aa, unidentified
MYYIGLDVHKKSISYCVKDAAGQVHREGKTGSTRRELDTWIKTLPEPRMIAMEATIFTGWIYDHLLPHAEKVKVAHPLMLRAIAAAKKKNDRIDARKIADLLRCDLLPECHMASTEIRDRRRTLRYRNLVLRQVVQMKNRVSGLLMESGVSYDKQRLHKMGYFTELFSTNEEISDSIRPLLQIGREHILRGQRLDRALISSLERDPLLSERLRRLRTIPGVGPITALTWALEIGDYTRFRSVKEAISYCGLCSAEKSSADKVMRTPISKQRNKHIQHVLVEAAKMAPRYSHELALVRDKEMQRGNKNRATLAVARKLVAYLLAVDRRKQDFVPAEALAGEEVA

SEQ ID NO: 368514 - protein, 357 aa, unidentified
MTTYYIGADVHSNITELAVEKSKKIVARYKVPTSITSLSTILDSLHGEKHLAIEEGPMAGWLYRNLSKKVDRLIICDPRRNKLIDSDGDKDDRIDAAKLACLLRGDYLRAIYHSDDDNRTELKHWVSLYNDRVRDAVRNINKLRSRCRMHGISIPRLVVRHPYARDNWLSKTNNPVLARQMEMLWIGYDATGRQVKIAKRQLGALGKKYNIIKSWGRLPGIGLIRATTLFAYLDTPWRFKKKNKLWKYCGVGLQRTTSGTDKKGKPKPARLQLPWAVNRTLKNAVLGAAISAINQKDNLFSDYYERMVADGIMPSNARHAVARKLLTVMWAMWKTNSRFDEGLGRKPYIEKATALSR

SEQ ID NO: 368515 - protein, 344 aa, unidentified
MENYAGIDVSLELSSVCVVDADGKILKEAKVASEPDAFVEFFEKLGFAVKRIGLEAGPLSQWLHARLKRAGFETVLLETRHVKAALSAMTVKTDRKDARGIAQLIRMGWFRPVHAKSIGAQEIRALLVARKQLLGRLIDVELSIRGILRGFGLKVGPVTRKNFEARIRELVAGQATLERIATSMLLARSALKAEYGRLHKAVLAIVRDDAVCRRLMTVPGVGPLVAITYKSAIDDPHRIVKSKAAGALFGLTPKKYQSGEKDVTGGITLAGDEIVRTGLYEAANVLLSRITRFSKLKRWGMDVAKRRGSKRAKVALARKLAVILHRIWVDGTTYRWAEAGSIAA

SEQ ID NO: 368516 - protein, 345 aa, unidentified
MNKSIPTSTTTVFCGIDVSAASLSVALIVPDHAVCQREFPNSASGYKALLGWLAKFNAPVRVSLEATGIYSLDLALALDAAASIEVAVLNPKLVNRFAQTLRRSKTDAADAVALAEYSQRMPFTAWKRPGVNHLRLRTIGRYIESLVVDLAEVKNRLHTAASTSTTPRAVLVDLRQAQAALLRRLAKMRREAMKLIQADELLRERFALLVSIPGIAEVSARQILSELVLLPPGMTVRQWVAYSGLDPVHQVSGNSVHKPSRISRAGNRHLRRALYMPTLSAVRNDPHLRAFYQALRQRHKTGLQALMAVARKLLHAIYGIFKSGKPYDGRRLFPQIQLAVESIAG

SEQ ID NO: 368517 - protein, 410 aa, unidentified
MKVFCGIDWSERHHDVAVVDEAGTLVARARIGDNAGGFADLLELLGAAGDSPESLVPVALETPRGLLVAALRATGRPVYAINPMAAARYRDRHSVARAKSDHADAVMLANILRTDAPAHRTLPADSEAAQAVGVLARAQQDAVWHRTRIANELRSLLREYYPAFLTLFAGKPSGVADPVARAVLAVASTPAAAARCSRPRFAAALRRAGRKRGIDGSVETIRAGLRAPALRQPGGVEEAFGRQALALLGILDAACRAADDLADATREAFAAHPDHQVITSFPGLGDLLGARVLAEIGDDRTRFPEARNLKAYAGSSPVTRASGRSRTVVHRRVKNQRLASAGHLWAFGSLTSSAGARAHYDRRRGGGDRHNAASRHLFNRLLGTLHHCLATGQTYDEQRAFPPPRMEDAA

SEQ ID NO: 368518 - protein, 487 aa, unidentified
MLAWFRNTSVILVKSVSLIIPFERVIYKTFPQWCRLFSNLGDIAMSKIKNHFELTHPNAAGIDIGSSSHFVAVPPDRNEQPVREFPSFTEDLYALADWLTACGVDTVAMESTGVYWIPLFELLESRGFTVYLVNARHVKNVSGRKSDALDCQWLQQLMSFGLLSGAFRPQGDFCALRAVARLRDMLLRNQAKHIQHIQKALLLMNLLLTEVISDVVGETGQKIIRAILAGECDGQVLAKYRNNHIKASEEDIAKALQGNWREEHLFALKQAVALYDAYAVQLMECDQQLEKMLKDLARNDLKAEKPKRRGGKSKNAPNFDARTLLMQMCGVDLTRIDGIDVTTAFKVLAEIGADLSRFKDAKHFASWLGLCPGTKISGGKKISAATSRTTNRAAQALKMAAVNLRASQSALGAYYRRLCGRMDKAKAVTACAHKLARLIYAMLTKGEDYVDQGQEHYEEKYRQRVIKNLTKHAEKFGFQLIPVPEGV

SEQ ID NO: 368519 - protein, 358 aa, unidentified
MKKTRGEYILRNEKVFVGLEDSKKTWVLCVRSGGIIVHETSMPAEYEVLRSYFHNKFPECQIRVMYEAGFRGFELHDQLVAGGWECVVTPPHTVTEEKCQRKKNDRADCRRLAKNLENGDYHSCFIPDKELREDRQISRTCGQVQADITRVCSRIRRMLEFHGLDSGLPAGRWSGAAYIRLREQLGKTEMSDSLRFSFEVMFRELENLRQLKKELLLQLRRLARSDRYRGSVELLKSAPGIGVLTAIRLALEWGDVSRFGRKEEFASFLGLVPSDYSSGEQERRGHITKQGNRSVRRWLVESSWVAIRYDPVLLDKFRRVLRNCGSKKKAIVAVARKLALRLRRALLSGESYVAGVVE

SEQ ID NO: 368520 - protein, 362 aa, unidentified
MAMSHNEFQSSEPIEPQEASPMKHEMHVLGIDIAKRVFHAVGMDDRGNIVYRKRLSRHDLIPFIAKLPPVRIGIEACGGAHYWARRFRAHGHEVKLMAPQFVKPYVKSNKNDSRDAEAIAEAVTRPTMRFVPIKDVDQQDIQALHRVRERLIGERTALVNEVHGLLHEYGIVIPKGVAKFRQAVVGKLESEKDKLTPLSQELFWKLVDEFALLEKQLAYYQEKLDTVATTHPECQRLMTIPGIGPLTATALVAAISDASAFKNGRQFAAWLGLVPRQYTTGGKERLLGISKRGDTYLRKLLVHGARATIRWVGRKTDRRSQWMRQLLERRGKNRTAVAVANKNARIVWALLTSHQDYQPATS

SEQ ID NO: 368521 - protein, 410 aa, unidentified
METIVKRAAGLDVHKTQVTACVRVPGRGRERAQEVAEFPTTVRGLLSLRDWLKAHRVTQVAMEATGVYWKPVWAILEDEFDCLLVNARHVKQVPGRKTDVSDAAWLCQLLEAGLLRRSFVPPKPIRALRNVTRYRKAQIGERQREANRLHKILEDTGIKLDCVASDILGASGRAMLDALVQGTTDPQVLAELAKGKLRAKIPALKEALVGRFDRQHALIVSAILAHLDFLDEQIQLLSDEIEEQLSPFAGAVELLCTIPGVQRRTAESVIAEIGTDMSRFPSGRHLASWGGQCPGNDRSAGKRRSGRTRHGSKWLDTALTEAALAATRTNDVYLAAQYQRLRPRRGHGRALGAVKHSILCACWHMLTTGELYREAGGDYFTRRDPERATRRLVAQLERLGHHVTLEAAAA

SEQ ID NO: 368522 - protein, 354 aa, unidentified
MNTSKANIGIDAHARNCVVGWRDGQGVFQGKVHIKTSEEELIKAVEAIPAKYKVVTVEESTIAGWVARTLRHHVDEVVVCDPHRNKSITQASVKNDDKDVEELTRLLWMGQLHGIYHPQDDSRAVFKSQVQQYLDLRQEQVKLKLQLKAKYHLWGITQVDGDKVYSEAGREAYLERIKDDSVRRQIQRIYALHDEAVRLQKDVLKEIVAHGRRYPEIEQFKKMPGVGVIGAHVFDAILQTPDRFEAKSKVWKYCQLAVTERSSDGKPLARRRLDAHGNPVLKSMSYMAWMASLRAKKGNEIQRFYYASLERTKDKTHARLNTQRKIVATMWAIWKNKEEYKPERFLSPADASDR

SEQ ID NO: 368523 - protein, 364 aa, unidentified
MIAYERSTLVNYEKYIGLDVHQATISVAVMDSTGKLIMESILETKASTILEFLGGLRGTLSVTFEEGTWAAWLYDLLKPHVAHVLACNPRKNAALNQGNRNDKIDARELANRLRLNDLKSVYHGENGIRMLRELARSYLTIVKDLTRVMNRLKALYRSWAIPCAGRDVYYTRHRSQWLAKIREAGPRRRAEQLYQQLDMLQHLRQQARRELLRESRKHSIIAKLRQIPALGPIRCALAVALIQTPHRFRSKRQLWKYCGLALETRISGEYVYVQGERRRSKKQLSIRGLNKDHNHDLKGLFKGAATRASVMPGPFQEFYQRSLAKGIKPTMVRLTLARKIAAITLTLWKKGGSFDVQKLKSQAA

SEQ ID NO: 368524 - protein, 343 aa, unidentified
MEYFAAIDVSLEASSLCILDEKGTIVREAKVASDPESLAKALAAAPGPLVRVGLEAGPLSQWLHAGLTGLGLSVVCLETRHLKATLKAMPNKTDRNDARGMAQVVRTGWYRAVHVKSLPAQEARALLSARQLLIRQVKDIGLSLRGLLRNFGLKLGTASKAGFDGRVRELAGGSPALSVIVEPMLTARAELLRQAKELHRHVLRTVRDDAVCQRLMTAPGVGPIIALAFKSAVDEPDRFAHSRAVGAHFGLTPKRYQSGEVDRSGHITRTGDAMMRTLLYEAATVILARASRWSNLKAWGVRLAKRQGLKRARVAVARKLAIILHRMWCDGSEFCWGKQPATA

SEQ ID NO: 368525 - protein, 351 aa, unidentified
MEKPIKQCVGIDVSKDELVVSYGIMDGNFDSRMLSSTCFANQPAGFKKLLKWSNKLHSDPGEVVYVLEATGVYHEQLALYLHDKGCKVVVMLPNRAKAFMKTLSVKTINDKVSAQMLSQLGLEKKLDRWEPPAAIYRELKQLTRERDQLIGEQTQIKNQLHAEQSGAWPSSSSIKRMKSRLQLLAKQIEQIKDEIAQAVEEQPWLKQKIDTICTIPGVGLITAVTVIGETDGFHLIRNKKQLVSYAGLDVITKDSGISVKSKARISHKGNKYLRKCMHFPALTAIRSTPLMKALFVRLVSKHGIKMKAAVAVQRKLLILIYILWKNNQPFDENYPLKLKEPRMIGALHELA

SEQ ID NO: 368526 - protein, 405 aa, unidentified
MNAVGIDVSKGKSTVTIRRPGDVVLMPPRDIPHTKSAINELIKQIQSLDGETKACMEHTGRYYEPLAAWLSDAGIFVSAVNPVLIRDFADDSLRSPKTDKADSKKIARYTLDRWAKLKQYGSMDKTRNQLKTMNRQFGFYMDQKTAMKNNLISLLDQTYPGANGFFDSPARSDGSQKWVDFVYTYWHVDCVRSKSLQAFTEHYQKWCKRNSYNFSASKAEKIYQRSSDLIAVFPKDDSTKTLIRQAVTMLNTASQTVESLRLKMDQTASLLPEYPVVMAMNGVGPSLGPQLMAEIGDVTRFTHREALTAFAGVDPGKNDSGKRNQKSVRTSKKGSPSLRKTLFQIMDGLIKRSPMDDSVYAFMDKKRSEGKPYYVYMTAGANKFLRIYYGRVREYLASLEESKES

SEQ ID NO: 368527 - protein, 351 aa, unidentified
MASKLDSEIAVIGIDIGKNSFHIVGLDRRGAIVLRQKWSRGQVETRLANLPPCLIGMEACVGAHHLSRKLISLGHDARLMPAKYVRPYSRGQKNDFRDAEAIAEAVQRPTMKFVATKTAEQLDLQALHRVRERLVSQRTGIINQIRAFLLERGIAVRQGLRFLRAELPRILATPRDVLSPRMVHVIEDLAGDWRRLDERIEGLSSEIEALARRDVSCERLMSVPGIGPIISSAMVAAIGAGDAFSKGRDFAAWLGLVPKQISTGDRTILGKISKRGNRYLRVLFVQAAWVVLIKPKSWDRHGLKPWLEAAKKRLHHNVLAIALANKLARIAWSVLAHGRTFEASRIDEAAA

SEQ ID NO: 368528 - protein, 380 aa, unidentified
MEKVCGLDVHKDSVFACILDEQGKKILEKRYRTLTPDLTTLREALIEQGCGSVAMESTSIYWIPVWHVLESDFSLKLANPYFIKQLPGRKSDVKDAQWIAECLQKDLIKGSFVPEGILQQMRQVSRQLRRLSKSITRVKQQMDNQLQRCNIRFSNYVSNQGNNVSLRKIVDALIAGERDPSRLVRLVHGRTKNKHGHQVIAASMEGVINPTDIEMLKGCMEQINLFEKQQAACLNHLEELADAYFAGEISLLCTIPGIQKYSAMCILSEIGNDMSVFGKASHLVGWAGLRPRNDESAGKIQSRKTMHGNKYLRQMLVEVSRSAARSKKTFLGKKYYLLSKRMKSQKALLSITRKILVIIFNVLQTGQPFDANRNLQDVKA

SEQ ID NO: 368529 - protein, 369 aa, unidentified
MRTSQKTAGIITTIGIDLGKNTFHLIGFDRRGAIILQQKVSRGQLERRLANIPRCLIGMEACSGSHHIGRQLQAAGHDVRLIPAQYVKPFLKGHKNDYRDAEAIAEAVLRPTMHFVAIKTPEQMDLLALHRVRSRLVSQRTGVINQIRGFLIERGIIVRQGVVPLRKALPEILSSQTGPLSPRMIGLIADLTQDWRRLDERIAAVSAEIEALAEQDESCQRLMTVPGVGPIISSAVVAAIGNGAGFRQGRDFGAWLGLVPKQESTGDRTILGKISKRGNKYLRTLFVQAAHVVLVRRPRAAMRGLWPWIEQASKRLHRNMLAIALANKLARIAWAVLARGRASWPTTVTTSRCPRALTRRMQKPFSVFW

SEQ ID NO: 368530 - protein, 401 aa, unidentified
MESPIVSIDVSNGNSHYMCFIKNNKRFGKVKKIDHDIEGFKRLLEDIQKLEAETNEKVCAVFEATGVYTKPLERFLSKNSIKTYIINPLESARKRKEEIHNKKTDKLDPISISKVYYDKEEMMELKKKDETYNWLRKKNRLYEDQLNHLRKYKVTFQNQLSICFPGYLDLFKDGYSDIPMTILKKYPHPDLLKNKKAETVARYLEKNTCHTHKVSLEYALKIIEFAKKTYPGCEKDDVEVEIFKILLDKVIETQRECEKTLNEMITVVSTLEEYRYISSIDGIGPNLAARIIAEIGDIEEFKSREALVAYAGLDPHIYQSGDQDGKHLKISKKGNKYLRCLLFLAVGCSIRGAKDNPVNRFYQKKKQQSNPLNSKAAKTACTAKLLKIIYGICKNKTTYER

SEQ ID NO: 368531 - protein, 400 aa, unidentified
MFYLGIDIGKYNHVASLLDEHSKVIFKGFSFPNTTAGADSLLAKIASYPLDDVSIAMEATGHYWLALFSYLTSQGFSVHVVNPIQTDGWRKGTEIRKRKNDKIDSVLIAELLRYGDFMETALTDEIIFSLRTLTRFRHYLVCSMGDLKRKTICVLDQVFPEYQSVFSDVFGQTSKELLMHFQTPESFQNITVEQLAAALENIRQKQFARQKLEEISALAAASFGLTFAAESFSFQLRLLLEQIMFIEAQVDDLEAQIAGLLEQMDSVITTIPGIGPVTGATILAEIGDINRFQTAAKLVAYAGIDASVSQSGEYESSHNSMSKRGSPYLRKALFQAALAASNSDPVFRAYYQKKRAEGKHHLTALGAVARKLCYTIHALLKNNEPYQPQLQTIPSNSPSL

SEQ ID NO: 368532 - protein, 370 aa, unidentified
MLDTTTFVGLDVHARSIKAVSLDVMTGEVRAATFGYDAGAVAEWVRSMDPRARCVYESGVTGFDLQKRLSGLGVDCVVGAVSKMIKPSADRRRKNDRNDAEFLARMLSVGNVVEVWVPDDGCEAARDLTRALEDARDDLSRSKQRLSKFLLRHGLVFDERTPTGRRKGNWTRAHWSWIESIRFAEGADNDVLAYYVDAVRRAAEEKARLEGLVEAEARKPRWRKRVDSLRCLKGVDTASAADLVFEAGEFSRFRNARSFAAWVGLTPSEHSSGESDRRGAITKAGNKHLRKTLVEAAWHYLTCSGRPKGLAKGQAPDRVARRHAAKGVRRLVERREALLARGVHNNKANVATARELACWVWAVGLMAEEA

SEQ ID NO: 368533 - protein, 314 aa, unidentified
MKKAVEIFVGMDVSKAWLDVGVHEQKDTTRFSNDEAGIIRLVKKLKKLKPKLIVLEPTGGFEMLVVAELSQASLPVAVVNGKRVRDFAKATGQIAKTDKLDARVLAHFAAAIRPEVRSLRSEEEEQLTALLTRRRQILDMLTVEKNRLVSVRAKMRPDLEAHIHWLSNHLKELDQEIEEFVKGSPLWTQKDALLQSVPGVGPVTSATMLGMLPELGCLNRQEIAALVGVAPMNKDTGNKQGKRSIFGGRADVRSVLYMAALSAKKHNPFIRKFYQRLIQHGKEKKVALTACMRKLLVILNAMVRTNQPWRSQTA

SEQ ID NO: 368534 - protein, 322 aa, unidentified
MSDANKNQNEINVGVDTGKYQLDIYIRPLDIFFSVNNDEQGIKEAVKRLKTHKPKRIIIEATGRLEHAFIIACGKAGLPFVVANPIHVRKFAGAIGQVAKTDKLDAQLIAHYGEAIKPKLSQLKPELIQLMSDFLARRQQLIKLQTMEKNRMKIMPKEVSNLIKPILTAIRKQLEKVENKLLKLIERCPEYKEKKDIIQSMPGVGNVMTFSLLSNMPELGYLSNKQAAALVGVAPMNRESGAYKGQRRIRGGRAQIRTVMFMGMMSAMQCNPVFKTTYQRLLAAGKPKKVAIIACLRKMVVMLNAMVRDGKHWCPVLEVKSV

SEQ ID NO: 368535 - protein, 286 aa, unidentified
MKTHKKKILDFQGSNLYIGIDVHLNQWTVTMRLRDLELRTFSMNPSPKELKDHLNKSYPHAHYYSVYEAGFCGFWIHRELSQLGINNLVVNAADVPTTHKEKYQKRDKIDSRKLARELAAGSLKAIYIPTKAQESLRLLSRLILQIAKSTKRVKCRIKQFLHTQGIHLPNRSEMYHWSGRFIQWLKDLEFEDNNARYYLDELINSLEKKRKEKLGLLRRIKKITKDNKIIQYLRTVPGVGLVTAFTFYTEIIDIFRFQTLDHLISFVGFIPSVEASDETEHILGLA

SEQ ID NO: 368536 - protein, 569 aa, unidentified
MNGDGGGRVVVGMDPHKRSVTIEVMTADESVVGGGRYDTDVVGYRAMLKYLRGWPDRVWAIEGCEGIGRHVAHRLIADAEQVVDVPPKLSARARVFATGQGRKTDATDAHSVALVGTRMAGLRPVVADEQLEVLRLLVDRRRSLGEEHTRKVSQLHALLLELIPGGAKKDLSAAQARRLLASVRPRDVVGKTRKRVAMELVVDLEKIYTRTKAADKELKQLVQATGTGLLDLHGIGPSGAARLLVEIGDISRFPDRGHFASWTGTAPIDASSGDHVRHRLSRGGNRQINRVLHIMAVVQLRNPTEGRAYFDRKKAAGKTSMEAMRCVKRRLSDIVYKTMLDDLVTAQKTGPGGQPGNDSVSSVTGSQPTTGSSDKSLPGPATTDPSPPSSCDLTQKGAMTVRFKGRSLGLRTVARPLRSCDSWPRGKGTAMFQRHRVPRERLDVLRQVPLFDGLSSRHLARIDRHLDEVNVEAGRPLTEQGEGAYEAFIVADGVAEVRRDGEVVRNTEIGELIGEVGILKRSLRTATVVAKTPMRLLVINGNEMSALLREDKKLAARVQENLNRHLEGA

SEQ ID NO: 368537 - protein, 452 aa, unidentified
MIMEEKEHGNYNLLRLVSVGNKNTLTGGVTAMHRKNDNRQVEKRQRITDATLVIGMDIGCEFNAMCLMSKEGTILGRYPKIYNSRKGFDYFHGIVESMKEKYGFTDVLIGMEPTGHYWRKIAYFAMDKQYEVRFIRTTALKHQRELDESSSAKNDIRDAYTIANIAREGKYIDTVIEDNIFRQLRTLAHTREKIQRISTGAKHALKGMLEDYFPELKHIFWSMKAKGLWALLEHYPFPEDVLKTDIDTVTELIAQSTRRKIQAHEKALQIYKAAQHSIGLQRVGDADRFRVAAYLSEIRHSETQLKEIEAQIEALLKKIPLAEYILSMPGIGTLTCGVFLGELGNPCNFTNPKQIVKYAGCDPKEHDSGQRTGRRIISKKGRWLLRKYLYFMAMRVVHRSPFLKDYYENKQKTMTKKEALCAVVIKLIKVIFALLRDKRTFTEKQSCLKQAA

SEQ ID NO: 368538 - protein, 338 aa, unidentified
MTIETLGIDIAKNVFQLHGVNRNGRVVLKRRVMRDQLLAVLAQIGPCTVVIEACTGAFYWAHKFEALGHRVKVISPQYIKPFVRRQKNDGNDAEAICIAARQPHIPLVPKKTVAQQDIQALHRARQRMVNHRTAVVSQIRGLLLDRGFAIAKSITRARRAIPEILADLKNELTAVAREALSELYDLFRDLDRRIASFDKKIERIFRQSEPCQRIAKIKGVGPKTATAVIAAIGDGSEFKNGRRFAAWVGLVPRQHSSGDRKVLMGISKRGDRHLRSLLVHGARAVVRTVPSKTNLNNEWVNQLRERRGFNRATVAIANKNARIIWAVLRTGEAYRAAH

SEQ ID NO: 368539 - protein, 416 aa, unidentified
MDVIVARCAGLDVHKNTVVACVRTPGPGGGRVSTVRRFRTFTASLRELRDWLVAQGVTQVVMEATGVYWKPVWHVLEPVPGLELLLANAHAVKNLPGRKTDVADSQWLAQLCECGLIRASFVPPPVIAQLRDLTRYRKKLIEERSRETQRIQKLLEDAGIKLDSVVSDILGVSARQMLEALIAGVRDVEALAGLARTRLRSKIPQLRLALEGRFDAHHALMLRMHLEHIDQLSASIVRLDEEADRVIRPFSEQLKHLITIPGVGRRTAEVIIAEAGVDMGRFATAGHLASWAGMCPGNHESGGKRRSGRARKGNRALRAALCEAAWSAARTSSGYLPAQYRHLMRTFGKKGQTRAVFAVGHSILVIAWHLLANDCDYTDLGQDHFTRRDDPEARKRYLIRQLEALGHTVTIDPAAA

SEQ ID NO: 368540 - protein, 349 aa, unidentified
MSQTAQTAVAVIGIDIGKNSFHIVGHDERGAIVLRQKWSRGQVEARFANLPPCLIGMEACVGAHHLSRKLNGLGHDARLMPAKYVRPYSKGQKNDFRDAEAIAEAVQRPTMKFVATKTADQLDLQALHRVRERLVSQRTGIINQIRAFLLERGIAVRQGQRFLRAELPRILATPPDVLSPRMARVIEDLAGDWRRLDERIESLSSEIEAVARQDAGCERLMSVPGIGPIISSAMVAAIGAGDAFTKGRDFAAWLGLVPRQMSTGDRTILGKISKRGNRYLRVLFVQAAWAVLIKPKSWERHGLKPWIEAAKKRLHHNVLAIALANKLARIAWSVLAHGRNFEVSKIQAA

SEQ ID NO: 368541 - protein, 412 aa, unidentified
MDIVHERAAGMDISKRDAKVCVRVPGTRAGTYTSKVTSWGATTGAILELREFLEREHVTVLVMEATSDYWKPFFYLLEETLPVMLVNAKAARNIPGRKTDVSDAAWLAQLAAHGLLRASFVPPEPIRDLRDLTRARAIAVRDRAREIQRLEKFLESSGIKLSSVVSDLTGVSSRDMLEALINGERNPEVLAGMARGTMRSKIPALVDALTGRFRPHHAFMARLHLDQIDAHNRAIDTLTGRIEEAMEPFREAREALATIPGVSQRIAEVIIAETGADMDVFETPARLASWAGVCPTAHESAGHIKSSHIMPGNKYLKAALGTAAMSAARSKDTYLAAKYRRITARSGKNKALVAVEHSLLTAAWHMLRNGECYTDPGADHFNRINPTRAKNNAIKQLNNLGYNVTITPANAA

SEQ ID NO: 368542 - protein, 440 aa, unidentified
MAMRKREDEVFPNAAGIDVGASSHWVAVPPHSTDAPVREVGTMTDDLHALADWLLQCGVEVVALESTGVYWIPVYEVLEQRGLEVWLVDARQVKYVPGRKSDVQDCQWLQKLMSYGLLRAAFRPAAEVCVIRAVARQREVLLTEQASWVQRMQKALVQMNLQLTEVLSDVMGMTGQAIIRDIVAGERDARRLARHRHRRIHASEADIVRALTGNWREEHLFVLTQALAMYDDIAKRLRECDDKLAALLAERAAAKVDIGKTPREGSKVRAAFDARQQLANWAGCDLTRIDGLGPDSVMKILSEIGTDLSRFGSVKHFCSWLKLAPGTKISGGKVLESRTTRSANRVRQALKMAAMSLSHSDSALGAFYRRLCSRMDKPRANTAVAHKLARMVYFMMTRGEAFVDQGQQRYEQQQRERGIAALKRRAASLGFQLTPVGTAA

SEQ ID NO: 368543 - protein, 443 aa, unidentified
MDQCAPYPLRGRAARDGVCVSVRVLRDVLRKADDMNHNVAGIDVHKKVLAVAVGKATDDALVFERKLFGTVGRSLAELAEWLKERGVKEVVMESTAQYWKPVWLALEGSFDLHLAQARSNLAPRGRKTDFRDAERMVRRLLSGDLTLSFVPSAEQRQWRLLARSKYQLRRDRVRLQNQLEGLLEEGRIKLSSVVTDLLGLSSLRILRALAAGENDAVKLAALADKRLRVSGEDLAEALRGSLTRIQRLLLNQFLTRLDAIDGQIRELDRTLAEEMEQYSDAIHRLSQIPGVGPDAAAQIIAEIGPKAAAFAAPEKLASWVGVCPGRQESAGESTSNRSPKGNRPMRRILTEVAFAAVKTKDSHFQEVFRRLVPRLGIKKAIWAIAHRICRLIWKLLHEGAVYIEQGARGQDPQAIRKRARKLVGDLRRLGYKVLIEEPTPKAA

SEQ ID NO: 368544 - protein, 340 aa, unidentified
MRQLYAGCDLHGNNNVIGIVDGEGKRVFKKRISNELPLVRETLKPFKEELVGIAVESTYNWYWMVDGLMEDEYKVHLANPTAIQQYSGLKHSDDPHDAFWLADMLRLRILPEGYIYPKEERPIRDLLRKRGHLMRLRTSLILSLQNILSRNLGRKMNVNDMKALKEDRVSVLLEMNEDLALAGRVSKEVIDHLTRQIHKIEGVVQKRIVLKEPYRYLLTLPGVGKILSLTIMLETGPISRFETVGDYVSYCRKAPSQWVSNGKRKGSGNRKNGNKYLAWAYSEASEFARQLYSEPRDYYQRKMQKTNAAVAHSALANKLSRAGYYVMRDQVPFQPEKLFG

SEQ ID NO: 368545 - protein, 402 aa, unidentified
MTDRLGAVIGGVDTHKDLHVAAVVDEAGRIQGTASFPANANGYGQLERWMRSFGTLQRVGVEGTGAYGAGLARHLAEVDVAVVEVNRPNRQMRRRRGKNDTVDAEAAARAALNGEAQGQPKAKDGLVESIRVLRIAFCSARDARTRIANQIRDLVLTAPDQLRQALEPLETAQRVARAARFRPGELTDPLEATRAALRSLARRYQNLTTDLAELREQLDALTTQANPALRAAKGVGPDVASILLIAAGDNPDRLHSDAAFAALCGASPIEASSGRTVRHRLNRGGNRQANHALWRIVMTRLATDPATRAYAERRRAEGKTTKEITRCLKRYIARDVYNLLTKTRHVPNTTDLRPARLAAGLTLTDIATQLGTWPARISELERGRSRNDDLETNYRAWLSQVA

SEQ ID NO: 368546 - protein, 360 aa, unidentified
MSHNTTTTTMTTRVPKLTIGMDLGDRTSRTYEVNAKGACVREETIPTTEAGLTRYFGQRERCRVVVEVGTHSPWVARFLAQLGHEVIVANPSAMFAGAPRRRRNDRLDARFLARQGRADVQLLYPITHRSAEGQQDLEALRARDQLVAVRTKLINHVRGTVKSSGQRLRKCSADVFAKRAIGELPSGLAPALTPLLEVIADLTRRIATADRQVARLIAERHPAAARLQQPAGVGPITALAFVLLVEDPARFRRSRDVGAYFGLVPRLDESSASTPQLRISKAGDAMGRRLLVSAAQYILGPFGPDTDLRRYGEAIAARGGKNAKKRAVVAVARKLAVLLHHLWVSGATYDADYQRKRRAA

SEQ ID NO: 368547 - protein, 361 aa, unidentified
MNYIFVGCDSHDKTLVNRIALNREAAERKGFAATGAGRRKMIEYLKERSRLAGGAKVVVAYEASGNGFILCEELKKAGFECHVLAPTKIERSTKQRRNKNDDRDADRLLEILRGHYLAGNKIPSVWIPDPQTRDDREPVRGRQDLSQKQTAVKTQIQMLVKRHGFEKPAIAGNSWSKPYRRWLKSLTEDEHPGWGMQKALGSLLRQLEFLEKEVEQLDEAMTELADTPRWKPIVQAMRKEKGVGLMTAMKYATDIGDFSRFRRGRQVGAFYGLVPSSHESGENDDRKGHITREGSPSGRQVLCQSTWSRVQHDQHEREVYLRLVDKNPKKKKIALVACMRRLTVKLWHVGLEAQVKLKAAV

SEQ ID NO: 368548 - protein, 344 aa, unidentified
MAQYAALDVSQETTAICLVDESGKVRRQAKVATCPETIFRWFAENATGLVRIGMETGPLAVWLWNELDAKGLPVVCMDARHANAALKMRPNKTDRNDAAALAQIVRTGWFKHVRIKSRASYEIRSLLAAREVLVRVRVKLENEIRGLLRTFGVLFGKAAGGFARRAHEIVAGELDASPPMRLVVENLMQARLTILDRIKVLNRQVLAVARTNATARLFMSAPGVGAITALSVASAFDDAERFKRSSSAGAYLGLTPRRYESGEISWNGRISKHGNKLTRTHLYEAATTLLTRTVRFSRLKAWGLRLAKRCGFKKARVAVARKLAVILHAMWKTNTGFRWSENAA

SEQ ID NO: 368549 - protein, 339 aa, unidentified
MKHTVVGVDSAKRVFQLYWVERETGEIVNVPLKREKFLEHFANRAPCLIGMEAGGGSQHWARQLKALGHTVKLLPGRRVKPFVGVNKNDRADARAVWSAVQQPGMKSVAVKSEAQQAVLALHRMRQQLVKFRTAQINGLRGLLAEYGEVMPQGKAGVRKAVLKALQSLVDRLPAVLIDTLREQFERIGELDAQVAHIERRLRQWHKDDPASQRIGAIPGVGLLTATAAVATMGDAKAFKSGREFAAWLGLVPRQSGTGGRVKLLGISKRGDTYLRTLLIHGARSVLAHSKELPQWVTNLAKRRPHNVVVVALANKMARTIWALLAHDRAYQRGFVSQPA

SEQ ID NO: 368550 - protein, 340 aa, unidentified
MKITTIGIDLAKEVFQIHGVDVQGKAVLRKQLRRSEMAKFFANLEPCLIGMEACGSAHHWARKLELYGHRVKLMAPQFVKPYVKTNKNDVADAQAICEAVGRPTMRFVTKKTVEQQSILSVHRARQGFVKARTAQGNQIRGLLAEFGIVLPHRIYTITERMPDILEDGENGLTQIMRQLLARLTDHLKELDKQVNELEVQIQCWHQDNEVSRKLAKIPGLGPITASAIVATIGDAREFKNGRQLAAWLGLVPRQHSSGGKQVLLSISKRGDSYLRTLLIHGARAVIRYADNKEISDNWLGKILTRRNKNIVAVALANKNARIIWSLLTKGTSFKANFAPA

SEQ ID NO: 368551 - protein, 347 aa, unidentified
MTTLEATRGITGGVDTHRDVHVAAALDPLGGVLGSESFPTDVAGYQALLKWLEAFGQVTKIGVEGTGSYGSGLAGYLRRSGIEVIQVDRPDRQKRRRTGKSDPLDAVEAARAALSGRATGKPKSRDGAVEAIRVLVVAKRSARQARVKALLQMRHLGITAPDQLRCRLSGLSVEALIAEGIKLRPTRSGDPVMSATKASLSSLAHRICALDDELAELDERIEGLLVATVPSLLDLFGVGPDSAAALVVAAGDNPERLHSEAAWAHLCGASPIPKGSGKSSGRVKVHDGGDRQANSALWRIVVVRMAHDPETRLYVERRLKEGKNKHEVIRILKRYVAREVYRHLPRG

SEQ ID NO: 368552 - protein, 357 aa, unidentified
MNTLPERDGDVIVGVDTHADVHVAAALDAVGRLLATTSVPTTPAGYTQLVTWAGALGSIRSVGVEGTGAWGAGLARFLTGKGHAVIEVDRPDRRNRRRRGKSDTVDAEAAARAVLSGQAVGQPKAQHGHVEMIRALRVARRSAMKARTSAMNQLHGLVVRAPEALRAELRSLSSRQLVERAGALRPGELTTVEAATKMALREVARRHQVLSAEITRLQDAIGPLVAATAPNLLALHGVGPETAAILLVTAGDNPERLRSDATFAHLCGVAPVEASSGRTTRHRLNRSGDRQANHALWRIVIVRMKSHQPTRAYVERRTTEGLSKREIIRCLKRYVAREVYRHLVTHHQPPTLAAQAA

SEQ ID NO: 368553 - protein, 337 aa, unidentified
MKYSGIDLHSNNSVVVISDEADRVLVRRRVANDAEVILALLAGHREELVGVVVESTYNWYWLVDALQAAGYRVHLANTAAIKRYEGLKHSGDEDDAAYLAQLLRLEILPSGYICPPAARAVRDLARKRMQLVRSRTAQVLSVENMLSRETGAGMRSRAVQRLTAQAVERFGFNPEVERSMCANVAVIKTLNREIDKLEQRLHQCVRLRPEFRLLTSVPGIGQTLATLIMLEVGTIERFAAVGNFASYARCVDSARMSNGKKKGQGNVKNGNAYLAWAFVEAANFAHRYCAEARRFYERKKARTNGIVATKALAHKLARACYHMLKENKPFDVKRCFA

SEQ ID NO: 368554 - protein, 377 aa, unidentified
MKYVGIDLHKKTISGCVVVKDRGKKKIVARKRLECRDEAGIKSWFSELGKFEVVVEATASYEWFVKLVEPLAQRVVLAHPKKLRIIAESKRKSDKLDAQVLAEFLASDEIPLAYRPGPRVREHRALVRWRCFIQRRITSVKNKLRHILAAYNADVPHLFTAEGRAHLAAVQLAAADRFVSDQLVVELEQHQERLVAANRRLREFAATAPLAEREARAVLDSIPNVGPVTTDVILAELGDWRRFHSQADVACYAGLAPGFRESAGKAKQLGITKEGSRLLRWVMIEFAWRMVGTSRKWGGHYHRLEARVGAKKAIVAIARRLLGMIFALLRTGQKYSLALESPPSASCRSKSPRDTNPSDPTCLRGQPRQASSLGAGG

SEQ ID NO: 368555 - protein, 341 aa, unidentified
MEQATTIGLDIAKHVFQVHGADGAGHVLFRKRITRVKLLSFLAAHTRCVVAMEACAGAHYWAREIAKLGHDVRLIAPTYVKPFIKRQKNDAADAEAICEAAQRPSMRFVPVKTEEQQANGIVFRARDLLVRQRTQCVNALRGHLMEYGYVFPKGITHVETLVALVEDLQSSLPDSVRVILKLLVDTFTALEAQITVLDAEINQRSKSDPTARRLMTIPGVGPIASTAITALVPAAEGFPAGRDFAAWLGLTPLQKSTGGKQKLGAVSKRGERTIRRLLIIGASAVVQQANRRGAPKGSWLAQMLARKPKMLVTVALANKMARIIWALLVKGGTYRTPAAAA

SEQ ID NO: 368556 - protein, 420 aa, unidentified
MEVVHERCAGLDVHKKTVVACVLRPGPGGSVQRETRTFSTMLGALEALAAWLTEAEVTHIALEATGVYWKPLYNVLEGVGRWTILVVNPEHVKAISGRKTDRADAERLAFLVRHDLLQGSFIPERNQRELRELTRARTALVRERARVVQRLEKVLEGANIKLGAVVSDLLGVSGQRMLEAALQGVSDPDELADLAHPRLQPKRDLLVASLQGRLTRPLRFLAQQHLDHWRELDTRIAAFDDEIADQLRPFDELLARLDAIPGVGRRTAEVIATEIGTEVSAFPSDRQLAAWAGVSPGNRQSGGRRKTARTRHGNPWLKGALTEAAWAASRCRHGYLPAQYRRLAGRRGRKRALVAVAHSLVTIIYHLIAEGTQYQDLGTHYFDERERANRERRALAILHGLGYDVSLTPHPSTDAALGVA

SEQ ID NO: 368557 - protein, 399 aa, unidentified
MIAVGIDVSKSKSTVAILNGDGSIRAKPFDVHHVADELQALVDYIKRTSEPPTILMEPTSHYHYPLLKAFTEAELPVCLINPYQMKKYGDTELRKAKTDKRDSLRIAQYALEKSYSLIPYTPQDQKYEDLRFLSRQYSQRISTLTVAKVQLLSLLDETMPGITTILPLKSRDPDNCVLLRFIKRFKSFDVIRKMGKTRFLDSYQVLVKKTKDRFAGSKGLAIYELVLSSVTTRGENPLSAMTQDQCVDLVSTSQKAADEINLQMRIIAETMPEYKVLRSMAGVGDRLGPIILGEIGDIRRFHSGKALNAYAGNDAPPYQSGQFESRNRHISKRGNPALRKACFEVMQALKLTKPQDDPVYLFLLKKEQEGKQYNVAKMAGVNKFLRIYYARAMETLKQQ

SEQ ID NO: 368558 - protein, 417 aa, unidentified
MTVNSLMQKRSAIKPDTLIVGVDVAKFNHVARTMVPGGEIGRPFVFPNSREGFLALSAEIEARKPTAASAVIVGLESTGIYWINLARWLADHGCQVVQVSGLYVHRTKELPDNSRGTSDGKDALLIADLVAQGKYLGFVRPKGILADLRQLVGLRQRLVHERAARYNLLHQSVDLLFPEFVTVFRDVTGPSARRVLRRFPTPAAALAHPPDEMRRLLSEDGRVRVSVAKLARLQAVAQQSIGACEGTTGLEYALNDTLLELDSLDARVRQVEAEISRLLAQVDETPILTSLVGPMTAAIILGETGGLKQYSCAAAVLKLAGLNLYQISSGQYRGDRHISQMGRSLLRQTVYLAVLQHTHPGTPLYPYYAELLRRGKPKPVALIALCCRLVRLLYALVRDGRCYSAQPPEKNQQTQAA

SEQ ID NO: 368559 - protein, 452 aa, unidentified
MSCAGLQSQDIEEDVMPHGSGLSRGDKRRNGRLARLRALVPPQNAILGIDLADEKQALVVTDHDSRVLARKRVRAKAWRLDSALEWARNVARRHGFADVTVGCEPTGHRWRVLDQLAAGLGMPLVCVQPLLVGRARESEDYTRDKTDDKDAVLIARLVGDLRCYVLERAEETWARLRHLGARREGLVAEATANVQQLRDLLECAWPAVLGCAAKPFESNSWCAALTVVLDRCHGRPERLARMGLARFLQAVNREVARWGGRQVWRLTDQAGVTAQRTGALERASFVLADWHATKRRLSEVEARMVEVLDHLELTDLVTSIPGLSTVGAAAILAETGDLARFDSPRAVVKHAGLCPRENSSGTKEGRARIARRGRPGLRLAAWRAVWGAQANNPVLTARFHHLTAREENPLTTGQAHAALAAALLRWLHVIITQRVPWNEQIASGRTDLSAAA

SEQ ID NO: 368560 - protein, 342 aa, unidentified
MQVITTIGLDIAKSVFQVHGVDAGGQVVMRRQWKRRYVLTFFQKLPPCLVGIEACASSHHWSRELQALGHTVRLMPPAYMKPYVKRHKNDATDAEAICEAVTRANMRFVATKTPEQQSGLMLHRTLHLLIRQQTAVINAIRAHLAEFGIVAPVGRNGVEQLLGVVADSNKKRLPEVARACVAALSAQLRMLKEQILEFDRMIRAWHRSSEMSMRLDDCPGVGPALATALVATVADPKVFRSGRNFSAWIGLVPKQHSSGGKDRLGSISKQGDRYLRSLFVAGALAVIRYAKIHGTKHRPWLTALLARRPTKVAAIALANKIARMAWAMLGYERYKEPVAPAA

SEQ ID NO: 368561 - protein, 392 aa, unidentified
MSLIEDCAGLAGAEPQTWETGLMNNIVFVGLDVHKATIAVAVAEGARGGEVRELGNFINHPDHIKKLVERLAKGGRSLSFCYEAGPCGYGLYRQLIGLGHGCVVVAPSLIPMKPGDRVKTDRRDAVMLAKLHRAGELTAVWVPDDAHEAMRDLIRARSTAVRVLVKARQHLQGFLLRHGRIYVGKKGWTLAHRRWLTTIRFDHSAQQVVLQDYINAVTDAEERVDRLTRQITDLAQNWSQAPVVAALQAMRGVAFVVAVTLVAEVGDFTRFANPRQLMAYLGLVPSERSSGGTVRRAGITKAGNALARRALIEGAWTYRMQPRVSRKLHDRIDGLSQTVRNIAWKAQVRLFSRYRRLAATGKPKVVVTTAIAREMLGFIWAIAQTVQAPHAI

SEQ ID NO: 368562 - protein, 463 aa, unidentified
MIVRSVGIDFHQGRHRVRCLDDRAQPCDSFSFQTAPEGLAVLEERIFQDGSNPTIVLEPAGLPWLTVAVYLRTHHPGCHLVKAKMQKVAALRRYLRGPVKSDRIDALTLAKMPFIDPEQLDEIYLPPAGIHALQRLTRQRKRLESDVAGRKIRISAIVDGYLPGVRRAFNDAWCAQFRAFLRSRINPFAVVRDGEEAFHAFLRKATARSRWLRAQTQLVYLACQDVAVVCEGAAGTLDDEFFTELQDEVSRELRLMEVDEAESELLARRITEIYRNLHPSNNLCTIPGVGEHTAPVILAAVGDSTRFPNQSAFANWEGVVPGARQSANAEAKGLRMTKAGPSIMRMALFQSGDIGRRWDPQLAAVYYREMVYHGKNHRQAMGAVMSHLGARVLAVLKENRPYELKDSEGKLVGRDEARRLILANYRVSEDIRRERRRRNNRIGKLRETATNRTNEAAKAPQPV

SEQ ID NO: 368563 - protein, 383 aa, unidentified
MLNESVVSTEQRRQAMGKSSKLYVGMDVHKESIDVATGDEGIGEVRHYGAIGGDMGAVSRLARKLESTGKVLVFVYEAGPCGFGIYRMLRDRGHECWVVSPGMTPRSNADRVKTDRRDCLKLARLARAGELTPIHVPDQTDEATRDLVRAREDAVVMQRQARQRLGALLLRNDVRYNGKTAWSPAHRRWIAELKLPHAAQHIAFEEYVQSVDETGKRIERLEAAIGDELTRWRWRPVVAALEAFRGIRTIHAVRLVAELGDLTRFASPRHLMGFLGLVPSENSTGNRRRQGAITKTGNSSARRALVEAAWAYRYGARVSVGIARRQSGLPKPVTDLAWKAQLRLCSRYRRLSARGLNRNKIIVAVARELSGFVWALGQQVKPL

SEQ ID NO: 368564 - protein, 337 aa, unidentified
MPALTIGLDIAKNVFQIHGIDRHGNVVVQRKLRRNEVLTYFARLEPCLIGIEACHGSHYWARELTSLGHTVRLLPTQYVKPFLVGGKNDANDVAAICAAVARKDIHFVSIKSAEQQSLQSVHRMRERLVHDRTAKSNQIRSMFAEEGFVFPVGLYQLRKGIVELLGNSNVRVTPVLRRLGAMYLEQVDALQKWIDELGNEIAELFKRSEVCQRLATVPGIGPVIATALVSSVGDPLQFRNGRQFAAWLGLTPRQRSSGGKTKLSGITKRGDTYLRTLLVQGARAVMHVVNRRDDRHSRWIKTLMQRRQASIAAIALANKTARIAWAILTRNEVFQVA

SEQ ID NO: 368565 - protein, 340 aa, unidentified
MSEIKTIGLDLAKHVFQIHGVDAAGECVLRKRLRRGQVVSFFAQLPRCVVGLEACATAHYWARELEAAGHEVRLMPAQYVKAYVKRNKTDAADAEAICEAVRRPTMRFVPIKTAEQQAAVLLHRGRERLVRQRTSLVNALRAHLAEFGVVAPAGLRNVSRLIAIVRDASDQRLPDLARPVLRVLATQVELAQAAVAKVEKELTAWHRSNPLSQRLATIPGIGPIIATAIAATVVEPSGFGSAREFAAWLGLVPRQHSTGGKARLGGISKRGNRYLRRLLINGASANLLRSKATNADPWVIGLRRRRPPLVIAVALANKTARIAWAVMHRQEDYRSVAVAG

SEQ ID NO: 368566 - protein, 386 aa, unidentified
MQTLNDLSRSPFALEAASTLIAVIEMSLSSWLVAGVVPGIERQPLKKLAVDESALLRLLHRWREEAEKAGCRIERIVVAFEAGRDGFWLARWLKARDIEAHVIHAASVAVSREHRRAKTDRLDTELLKRAFLGWLRGERDHCKVVAIPSLKEEDAKRPNRERESLVCEQSRIVNRMKAALIRLGIRGFNPKLKRAAGRLDSLRTPEGEPIPPNTLAELRRDMERRRFVSNQIRQIEDARLERLEQAPSDEPHAMVRLLARVIGVGIETADMLVHEVLSRNMRDRRAIARYAGLTGSPDESGRKRREKGLARSGNGRVRRGMVQLAWRFLTYQKESALAQWYRARTQNANSARKPLIVALARKLLIALWRFVRQGVVPDGVVLRPAQ

SEQ ID NO: 368567 - protein, 415 aa, unidentified
MALKIVYKICCGIDVHKTFVVACIASTNDKGITSYESHRFSTYTSGLKTLLQWLLDRNCKDVCMESTGKYWIPVYNILESDCSIVLAHPKYVKAIRGKKTDKKDAKWIADLFKHDLVAGSFMPPADIRQLRDLMRYRFKLTCFKSSEKNRLQNCLTVSNIQLGNVVSDTFGKSAQAILDKLLENPADTSFDLDPLVYKSLKKKLPELRDAIDGYITPEQAGKLKVIKAHYENLESRKAELEELILALAAPYQQELTILQTAPGISSPFTAIGIISEIGTNMEAFPSAKHLCSWAGLTPTNNESAGKKKSVRVSKAGCYIKPLLVQCANAVVKSTKHPEMRNRYLRLKKRRGHKKAIIAIARMLLTALYHMLKNGENYNAELYQKSDLLPVDREITVEQALMIARNQGYKIKSATA

SEQ ID NO: 368568 - protein, 350 aa, unidentified
MLIIGCDYHPGFQQIAYVDSETGEFQERRLKHPEEAEKFYRTLWEQGVKVHVGMEASGHARWFERLLEELSFELWTGDAAKIRAKRVRKKKTDREDARHILELLLENRFPKIWVATWQNRDLRQLLWHRHRMVQTRTRIMNQLQAVAINEGVRYKKRLWREAGRKQLESLPLAPWASRRRKDLLEVLDRINPTIAELTRSIEEEAEKCPPARRLMTHPGVGALTAVAFVLIIGEAHRFDCGKQIAAYLGLVPEEDSSGERRRLGHISKQGNSLLRFLLVEAAQATARCDQRWRNQFFHLAQRRGRKIAKVAMARRLAVRLYWMWRREWNYEQLQSFGSHVGQPGHPHGVQ

SEQ ID NO: 368569 - protein, 370 aa, unidentified
MKSIIYVGMDVHKASFTLSCFSVTTQETFATVKISPDAKAIKKYLDGVSLSRSEECEFVCGYEAGCLGYTLYHQLTAMNIRCVIMAPTTILRNSKRVKTDRIDAENLARCLAYGGYKSVYIPTAQDEAVRDYLRMRDDHKLMLKKIKQQINAFCLKHNKIYPGNKSKWTQAHVKWLNALEFDGYLQDAFNEYMITYRELTDKVERLESQIEQLAELEEYRDKVKKLICIKGIKTHTALSLIVETGDFSRFQSAERYASYIGLVPGEHSSSEDQNRLSITKAGNRHMRMLLIEAAQCYSRGVPAKKSKDLKSRQKGASPEVIAYADKASIRLRRKYIRMELVNKKKANVAKTAVARELACFIWGMMTDNIA

SEQ ID NO: 368570 - protein, 428 aa, unidentified
MQYALPLVLPDVPAGGVCAGIDWATADHVACVVDLAGRVTDRFCAAHDKAGITGMITRLRKNKVTEVAIERGDGPLVDALLTAGLTVVVITSRQVKNLRSRYGAAGAKDDRFDAFVLADTLRTDRARLRPLVPDTPATISLRMAVRARRDLVRHRVAACNQLRAHLAVAFPAGITLFHDLDSPISLAFLARFGSQDAAAGLDEQAIGAWLATIAARGRPAPASELHARLQAAPPGATGADGAAQAGITAALTATLTALSTQIKALEAQIAGQLAAHPDGHIFTSLPRPGTVRAARLLAEIGDCRSRFPDPESLAGLAGVAPVTRRSGTRIAHGFRWSVNRQLRDAVCDFAADSRHASPWAAAIYDAARARGKDHPLAVRITARAWTYVIWRCWHDGTGYDPAKHRALQAILSRQQAAQAAGPAPQEHQ

SEQ ID NO: 368571 - protein, 347 aa, unidentified
MNQIIRIGMDTSKHFFQLHGVDTAEQPVLRRKLRRKEMAGFFAKLPPTEIGMEACGAAHYWGRVLRELGHTVKLIAPQHVKPYIKRNKNDGRDAEGMCEAMSRPTMQFVPVKTEEQQAALMLVGMRERLVARRTQLSNAIRGYAAEFGLTAAKGLDKIEPLLAEIAADEALPVLARELFAMHGREYVQLQAELKKIEARLMAWHRANTDSRRLAQIPGIGPVVATTLVMKAPDPRLFPSSRHFAAWIGLTPKDHSTAGKTRLGTITRAGDEMLRSVLVAGATAVIQQARQGRGRALPWLLALLARKSSPKLAAIALANKIARIAWKLLVTGESYHAGGKPIASAHAA

SEQ ID NO: 368572 - protein, 411 aa, unidentified
MENIYPCCAGLDVHKESVEACVRRMGPNGRLDQQTRPWGTMTRDLLAMSDWMAAQGVTHVAMESTGVYWKPIYNILESRFTVLLVNARHLKQVPGRKSDVRDCQWIAQLLQHGLLKPSFIPPQAQRELRDLTRHRTQLAEERTRTVNRLHKVLEDANIKLASVATDILGVSGRAMLSALMAGEESPVKLADLAERQLRGKIPELERALQGQVTKHHRFMLRLLWKQLAQQEELIAELDARIEEQTRPFADEIERLDAVPGVDRRVAEVVLAEVGADMNPFPSHRHLACWAGMCPGNEESAGKRTRRRIPPGNRWLKRSLVQAAWAASHTKHTYLASQYRRLVGRRGRKRALVAVGHSLLVIFYHVLKRRTTYADLGGDFFDRLEPERLTRYFVRRLQALGHKVTLESAVAA

SEQ ID NO: 368573 - protein, 413 aa, unidentified
MKKHSSVLKSGKVSAKEAKPMRRESQQVMTELVSKLRKRLEGERIVEPDDQSAAEGERPNLDRLTVGVDVGDQWSNYCILGLGGETLAEGQFRSQPEEVAGFFHGLAQSRVAMEVGTHSAWMREVIAELGHEVLVANARRMQGSKRRRRKNDRIDAARLARLGRIDPKSLYPIQHRSTEVREDLLVLRAREVLVESRTKLISAVRSMVKTVGARVPSSSSDAFSRKAAAEIPQQIRDTAQPLLNLIAQLSEEIKSFDQQIEQMSEEKYQHPKLLRQVTGVGPVTALAYALTLETPLRFKKSRDVGPYIGLVPKQEDSGDIQPQLGISKAGDRMLRKLLVGSAHYILGPFGPDCDLRRFGNKLFEHGGKNAKRRATVAVARKLAVLLHRLWISGEAYEPLGYASSRNIAQTVAA

SEQ ID NO: 368574 - protein, 353 aa, unidentified
MAVKYVALGLHQASTSISIRDARGRVIRREVVPTSAARIVEAIDSAGGTIHVTFEEGTLSQWIYDQLVSRVARVIVCDPRHNRLLAAGNKSDRIDADKLSDLLRLGALRAVYHERSAVAALRELVRSYNTLVEDSTRMMLRVKAIFRARGIDCSGIAVYHPKNRLRFLAALSDRGARLRAEHFYAALDGLLAVRARARHQMLEEAKRHPAVRLLRSIPFIGPVRAAEIVAIMVTPERFRTRRQLWPYAGLAVTTRSSADHRFDRGTAVRNGKTINRGLNRNFNRTLKKVFKEAAASAVYSPGPLHDCYQRLLARGMRPELARLTIARKIASIVLAVWKKGVPFDPRILNAQNT

SEQ ID NO: 368575 - protein, 356 aa, unidentified
MGQKWLMYCSQFKTKIMKKQTCFFLGIDVSKLWFDISLMAIINYQKQQMLTERFDNTKEGLALLKKWLKAQKVTFDNDTLLVIENTGIYHRLLWKFFSENNIPIHIGNAAHIKKSFGIARGKNDKIDSQRLCSYAYKNDDELKDTSVLNPVFLNLKDLITSRTRLKSQLGANRTYLKELKSINDKATQKMMEKAYKMAMTGLQNSVDEIERQTAVIIKSDESINTNYNLLVSIPGIGPVTATYILCCTNNFAGKVSGKQLACYAGVAPFSDTSGTSLKGRNKVHKMANKELKSLLHMCALSTIKYYPAFRDYYDRKVKEGKHPNSVLNALCNKIVLRVVAVVNNQKKYVENYKKAA

SEQ ID NO: 368576 - protein, 408 aa, unidentified
MECIHARCAGLDVHKRTVVACVRLTEARRAQHEVRTFATTAAGLLALQEWLGATGCTHAVLESTGVYWKPVWHMLEEHLTLVLANATAVRNVPGRKSDVRDAQWLADLLAHGLVRGSFVPPAPIQALRELTRTRKQLGREVTAHSQRIEKVLESADVKLAAVLRPLLGVSGRAILAALAAGETDPDCLVALAHPRLRAKREALRAALPGRVRPHHRVLLQQHLRVVATLQATIAELDAAIEAALAPYRTAVAHLVTIPGVSTTAAQILVAEIGTDMTRFPTAGHLISWAGLCPRQDASAGKHRSTRIRKGAPWLKPVLVQGAWAAVRGREGYLRAQFLRLKPRRGPMKAIVAVAASMLTAAYYMLRNDTDYHDLGAEHFRRADQARLVAGLTRRLQHLGYEVTLRPAA

SEQ ID NO: 368577 - protein, 316 aa, unidentified
MNLLKGNEINVGIDVGKSQLDIYIRPTGKFFSVANDAQGVREAIKRLKAHQPKRIIVEATGRLEHRLVFACAKQGLPIVVANPVHVRRFAQAIGQLAKTDKIDARLIAHFGEAVQPKLTEVNAESVRKISDLLTRRRQLLRMQTMEKNRLGIMPQVLHASINTILKSFKAAIKKLDELLDRLIVTNEEWATKSSILQSVPGVGKMVAYTLLSDLPELGHLNNKEISALVGVAPMNRESGKYQGQRRICGGRHQVRTIMFMSMLSAIQHNSTLKAYYDRLKLAGKRSKVAIVACMRKMIVILNTMLRNGTPWENKNV

SEQ ID NO: 368578 - protein, 396 aa, unidentified
MDSFIGIDVAKDFHVAAVVDASGSPVADTTFTNDAAGFALLAEWLAGLGLDSSNSCVCMESTGHYHRLLLHRLVLDGWRVAVVNPVRTDAFRRVRSVRRTKTDLVDAYLIADFLRVERPDPVESSPGGLSDLRRLTRLRSELVKHRTALKNRMAAAVDVLFPELPPHLGGLWSASCRKVLELWPDPMELALVSEDELAEVLRSSSRGRRGLGDAMTIQRVARCSIGRCDPCAAFEVRSILRSVASLDDEIKRLDMECQRILKASDAAVLLTVPGLGPVLASSIAAEVGDARLFRRANSMMAFAGMDATKTQSGKFESTEEHMSKRGSSHLRWALMEAANQVRRRDAYFADYYDSLKARNKHHYVALSGVARKLCGVIIALWTEQRAYESRPTVRRE

SEQ ID NO: 368579 - protein, 344 aa, unidentified
MHAITIGLDLAKHWFQVHGVDAAGKVVFKRRLRRTEVVAFFKALEPCLVGMEACATAHYWGRELIGLGHEVKLMPPTYVKAYVKRNKNDATDAAAICEAVTRPSMRFVPVKAVDQQAILMLHRGRALLVRQRTMLVNALRAHMAEFGFIAAKGLAHVEELVEAIEDDETPIPDLALSILRVIVAQLNDTDKRVREFDAKLAQWHRENKTSKLLATVPGVGVMGASAIAATVTDPAMFDSGRDFAAWLGMTPRQNSSGGKERLGRVSKRGDKYIRRLLVGGALAVIRHARGRTTAEGEWVRSLLARKPAKVVALALANKTARIVWAVMKRGEAYLPREKFVGRVA

SEQ ID NO: 368580 - protein, 339 aa, unidentified
MEIITIGLDLAKNVFQVHAVSSTGEVVVRRALRRAQVLPFFSKLSPCRVGMEACGTSHHWARELARLGHEVRLMPPAYVKPYVKRNKSDAIDAAACCKAMSDPDMRFVPVKTVEQQAALSLHRSRDLLVSQRTQLGNALRALLSEFGIVAGKGKAGLTLLMDELRAGTLDLPADAVVAAMALADQRAALDAAADALERRITAQAKADEKARLLKTAPGVGPLSAHATLATMPDPSLFKSGRDFAAWLGLTPRLTGTGGKTRTGRITKQGNQPLRRLLVLGATAWLRQVKARPEKGSPWLRGMLARRPSKVVAVAQAARTARILWAMLTHNQPYRAPAIG

SEQ ID NO: 368581 - protein, 332 aa, unidentified
MKKVQFFVGIDVSKATLDVFIHGLNLYFVVENNPQGFVCLLEKVMTGTKCKKDELFFCFENTGKYSRMLAVLLQSENILFTMESALQIKKSLGITRGKNDRIDAQRIAHYAYEKRESLEPTTLPGAKIDQIRSLISLREKLLKHRTAYKNGISDLHDCYQDGESEIIKEVQQRLINSLNEEIEKVEQKIESIIESDESISRNYKLILSIRGVGKILGFYMIGYTANFTSFANARAFACFAGIAPFSYSSGTVKGTPRVHPFANKMLKALLNLAAMAAIKYNGEYLQYFNRRVNELGKNKMSTLNIIRNKIVYRVFAVVQRQTPYVDLLKFAA

SEQ ID NO: 368582 - protein, 378 aa, unidentified
MNRIIKIGMDVHTTNYTLCIFEPSFEHDGTVHCITQVKPEIKKIIHVIETFKKKHENEELNIVCGYEAGCLGYSLYHELKEKGVECVILAPTTMKTEKGGRKLKNDYRDAKMIAECLAYGGYSAVHVPTELDNSVKEFIRMRDDIKENLKSIKQQIIAFLTRNGKQFEGKSYWTRKHIDWINTVSFSEPLLQDTLKEYMIEYNHLCDRVETLDRQIEEISLKEEYVEKVQQLQCLIGIKTHTALSLIVETSDFNRFKKGNMYSAYLGLIPGDDSSGGHEKKLGITKAGNNHLRRLLVEAAQGYTRGRVGFKSKDLKSRQEKCSSEVVAYADKANERLRRKYYRMILRGKKYNVAKTAIAREIACFIWGIMTDHIDLCS

SEQ ID NO: 368583 - protein, 375 aa, unidentified
MKEKLRFLGMDVHAETIAAAIAEPDGEVRSLGTIPNRMESVRKLIKKLGPAEKLRVCYEAGPTGYVLYWQLAELGVQCEVIAPSLVPVKAGDRVKTDRRDAEKLARSYRSGDLTAVWVPDEGSEALRDLVRAREAAKQDELRARHRLGKFLLRSGHRPPSGVRAWTHLHLIWVSQIRFAQAAQESTRLDYLHEVEHMRERVLRLEQAIVEAVKLASPALQEVITDLQALRGIAHISAVTIAAELGQVSRFPGARELMGYCGAVPSESSSGKRTRRGSITKTGNAHLRRIVVEAAWSYQRPPAIWAGLRKRQQSASDGANEIAWKAQHRLHKRYARLAAAGKDKRKIVTAVGRELLGFIWAIGTKAEAAAGQRIAA

SEQ ID NO: 368584 - protein, 369 aa, unidentified
MVKKSSKLFVGMDVHKDSIDVATGDEGGGEVRHYGAVGGDLAAVSRLIRKLEATGKALVFVYKAGPCGFGIYRLLRRRGHECWVVSPGLTPHSNADRVKTDRRDCLKLCRLARAGELSAIYIPDEADEAMRDLVRAREDAVGMQRQGRQRLGALLLRNDIRYSKKTAWSAAHRRWIAELKLPHHAQHIAFEEYAQAVDEAGKRVERIEAAIREELPQWRWQPVVQALQAFRGIRAIHAVRLVAELGDLSRFASARHLMGYLGLVPSENSTGNRRRQGAITKTGNSSARRALVEAAWAYRYGARVSVGIARRQSDLSKAITDLAWAAQLRLCARYRRLSARGLPRNKIIVAIARELSGFVWALGQQVKPT

SEQ ID NO: 368585 - protein, 421 aa, unidentified
MKITTQTKINHPAILAFDVSKDRLNLAVSIAGRMTDHEFDNQTLVVEEQLQAWQHRAHMAGHAQVLVVCEPTGCYHGTLMQTAHRLGLETAWVSGEAVFKMRAIETNDSGKTDIKDPHVIHTLASIGKTLIHRHYDEPYSLLREWNGLYEQADVAVVRAKCLLASQIKSLFPDYGFKKDFLYGNSGRVLIEHYGGNPYRIVRSGRIRFSQLMRNRAPGIRHLTIETLYNQAESSIRNQLSPRMSEIMEQRLKQTWEDYLLHDARKKEAKQQMEVLYHEARQVDPKLPLAEKGVITTFHLARIIAETGPVSDFSSLRKFIRYAGLNLREKQSGKYRGKTKLSKKGRSHLRKVLGQIVLPLVKKDGLFGPYYHGKKRDGMPGTKAMTAVMRKFLKLFYGWYQSGGVFDRNRVFACESQHAVAA

SEQ ID NO: 368586 - protein, 334 aa, unidentified
MENIALIGIDLGKNSFHIHCHDHRGKAVYRKKFTRPKLIEFLATCPATTIAMEACGGSHFMARKLEELGHFPKLISPQFVRPFVKSNKNDFVDAEAICEAASRPSMRFVQPRTESQQAMRALHRVRESLVQDKVKTTNQMHAFLLEFGISVPRGAAVISRLSTLLEDSSLPLYLSQLLLKLQQHYHYLVEQIKDLESQLKRKLDEDEVGQRLLSIPCVGTLTASTISTEIGDGKQYASSRDFAAATGLVPRQYSTGGRTTLLGISKRGNKKIRTLLVQCARVFIQKLEHQSGKLADWVRELLCRKSNFVVTCALANKLARIAWALTARQQTYEA

SEQ ID NO: 368587 - protein, 306 aa, unidentified
MVVIGSDVHKRTHTFVAVDQAGRKLGEITVKAVPMGHDKAIRWVQERFGGEVLWAIEDCRHLSARLEIDLLDAGQAVVRVPPKLMAEQRRIARTRGKSDPIDALAVARAALREPGLPVATHDEASREMKLLVDRREDLVGERTRMINRLRWHLHRIAAGDPAADPKSKSLKQVSVRRRLATWLGDRPGIDARLARDILADIDRITPVINALEKELTALVEARVPQLLGIPGCAALTAAKIAGETAGVTRFATEAKYAMHAGVAPIPVWSGRTHGRVRVNKSGNRQLNTALHRIAITQLQRPRPGRT

SEQ ID NO: 368588 - protein, 367 aa, unidentified
MKDSSTVVGLDVHKNSIQIVTADTDGAMEVRHFGRIGGTMDELDRAVRKLVSKGSTLRFVYEAGPCGYEIYRHLTGKGFSCKVVAPSKTPKKSGDRIKNDRRDAETLARLERAGELTAIYVPREEDEAMRDLTRAREDAGKALRTARHQLNAFLLRYGKRYPGKASWTPSHMRWLSDIALPHPSQQIVLQESILAVTGCTERTTRLTDQILKLLPEWRMYPVVKALQALRGVAPIVAATTVAEIGDLSRFQNPRQLMAYLGLVPSEDSSGESTHRGSITKTGNGHVRRVLIEAAHAYGFPARVSRHLLKRHEGLPQPVLAIAWKAQVRLCGRFRRLMARGKLKTKVVTAIARELCGFMWAIAREVKV

SEQ ID NO: 368589 - protein, 296 aa, unidentified
MKIIMGLDLAKNVFQAHGIDETGNTVLVKRLHRKQMLPFFSKLPSCLIGMEACGTAHHWARTLAAMGHEVRLIPPSYVKAYVKRGKSDALDAEAICEAVQRPTMRFVPVKTVEQQGILMTHRARALLVRQRTMVANALRAHLADFGLVANPGIANLAKLAQQALSDEDGLPSYARTSLDILIRQIMVFTDEIAVLDQQLHAWHVDSEASRRLAAIPGLGVVTATAVAATVTDPDQFRSGRQFAAWLGLTPQQHSTGGKTQLGGISKQGDRYLRRLLVVGATAVIRHTKDKATPMAN

SEQ ID NO: 368590 - protein, 383 aa, unidentified
MGAVARTQLRETPVMQNRTCVGLDVHARSVWACTVDDESGEMRTSRISPKTAEIVKWAQALPGEVEVAYEAGPTGFGLARALIAAGMQCHVLAPSKMERPSGDRVKTDKRDCEWIARLVRLGELPVVVIPSEGQEAARDLVRAREDVRGDLMRSRHRLSKLLLRQGIVYEDTAWTAAHGKWLRSQSFDKPGVQFAFDEAYDTVLTTLARRDRLDKAILTMAAEPAWAPVVARLGCLRGVGTLTGFGLAVEIGDWHRFTGNSIGSFLGMTPSEHSSGGSRSVGSITKTGNGHARRLLVESSWHHRKPYRLSAEMIRRRDGQSPLVRARADQANRRLNQRWRTFDARKKRPTVAAVGVARELAGWCWSLAVMDGEKDNSAMNRQR

SEQ ID NO: 368591 - protein, 365 aa, unidentified
MASVAHHPPIHLGLDVHRDTISVGILGPGEEVPAVDKIAHDEPSVRRLVGRLGDRRRLRACYEAGPTGFELARLLHSMGVSCQVIAPSLIPKAPGDRVKTDKRDCRRLARLYRASELVAIRIPTPTEEAVRDLCRTRGDMVEDRMRARHRLSKFLLRHGQVWRAGKAWTLAHERWLVTQHFTEPALQTTYDHYRAVLASRDAQLEAIQADLAIWQDRAPFAEQVARLAAYRGVTRLGALHLAAEVGDWRRFARASAFMGFCGLVPSEYSSGQTTHRGHITKAGNVHLRTQLVESAWAYQHRPSVGARLASRQQGLDPQVVARAWAAQLRLCGRFRRLAARKPSTNIVAAAIARELAGFLWAEMTA

SEQ ID NO: 368592 - protein, 317 aa, unidentified
MKDSLIFVGIDVSKAQLDVAIRPTGETLSVANDKAGIKALVKRLAKIQPALVVLESTGGLERQLISALVSAEIAVVRANPRQVRDFAKATGQLAKTDSIDAAILAHYAQAVRPQLRPLPDAVTLELRALSARRRQLIEMIVMEKNHLVTAAKAVAKDITEHIGELEQKLQGVDTDIDGLIEQSPIWKEHEDILRSAPAIGPVTSRTLLAELPELGTLDRKQISSLVGLAPFNRDSGTLKGRRCIWGGRASVRCALYMAALVATRYNPVIRDFYKRLKTKGKPFKVALIACMRKLLTILNAMIKHKSRWSDTCSLQIP

SEQ ID NO: 368593 - protein, 318 aa, unidentified
MNTNTLQNINVGVDTGKSQLDIYIRPLNIYFTVPNNEKGINEAVKTIAKHRPSRVVIEATGRLEMPFIFACDKAKLPYVIANPLHVKRFAGAIGRRAKNDRLDAALIAHFGEAIQPKLTKLKSENIRLMSDLVTRRNQLLSMQTMEKNRQQILPQSLASSIKPILTALKNQIVKVEEKISKLIDTCPEYQAKNEILQSMPGIGKIASASIISNVPELGFITNKQASSLIGVAPITRESGRLKGKRMIQGGRAQVRTVLYMAMMSAIQCNPVFKATYERLLAAGKPKKVAIVACMRKMVVILNSMLRDGVMWDNNSAKN

SEQ ID NO: 368594 - protein, 403 aa, unidentified
MERTAGIDLASQEHRLVVVEADGSRLEERRYSHSEEGISALVRRLDELGVCRVAIERPNGLVVDRLLDAGIAVVPVHPNQLAASRDRYRSGGGKSDGFDAYVLADLARTDMHRFRLLEPDGDETRALRALTRTREDLVEQRVALANQLRAQLEAFWPGAARVFANVDSPICLAFLERYPSPEDARGLGEKRLAGFLARNGYSGRRSPNELLARLREAPAGRVGELETEARRAVVLALVATLKPLVAQIKLLTSQIAGALNEHPDGPIFRSLFRDRKSVVTAAELLAEIGDRRERYPSSVPLEAIAGQSAIAVESGKKKVGSFRWACNKQLRSAVSVLADASRKHNPWAQKIYADAIARGKDHPHALRILGRAWLRVIWRIWQDGTPYDPARHGSLNRLLIAQG

SEQ ID NO: 368595 - protein, 351 aa, unidentified
MNILAMDLGKSNTVICYYDSESGKHKYGKVKTTPRQIHDLLAEHKPDRVVFEICSAAGWVYDIAIAIGIEVQAANTNHQAWRWKNVKNKNDRLDALKLAQLSAMNQLPVVHMPKHSIRQRRIIIQYRQGLVRQRTRIKNSIRAILDKEGESMPDGRNGWSATSIKRLTDMSLSLEECGIDNLWRGQLRVELGMLGKVESCIVEVEKKLDALGKQDKDIQLLQTTCGVGPRLAEAVVAFVDEPDRFATGKQVGSYAGLTPRQYQSGDMNRQGKISGAGNKVLRSLLVEVSWLGLRHNKWMNETYHRILRGSPSRKKIAITAVARKLLVRCWAMLRDGQPWRDMEVVKDKQAA

SEQ ID NO: 368596 - protein, 351 aa, unidentified
MSHKTAATVAHTIGIDTGKNTLHLIGLDDKGAIVLREKIARGRIAARFANVPRCLIGIEAGMATHYVARELIALGHDVRQVPPAYAKPFRQGHKNDFRDSHAIAEAVQRPSTRCVPVKTDDQLDLQALHRVRSRLVGQRTAVINQIRGFLLEHGIAVRQGLRFLRQQLPDILAKRGDVLSPRMIRIMEDLSGDWRRLDERIKHITEEIEVLAHGSESCRQLMTAPGIGPLIASAMVAAIGNGTAFAKGRDFAAWLGLVPKQMSTGDRTILGRISKRGNRYLRTLIMQGARVILLRPANWAKHSFGLWLTAAAQRLHHNVLATALANKLARIAWTVLAQGRSYEARVVPKVA

SEQ ID NO: 368597 - protein, 357 aa, unidentified
MGKSIRNLLTVTRVGLDLAKRVFQVHAVEAKGEIVVARKLTRNQLIPFFAELPPCVVAMEACSSAHHWGRALIELGHEVRLIPPAHVKPYVRRNKSDRVDAAAIYEAMSRPGQRFVPVRSIDNQAELMRHRARELLAGQRTAALNALRGHLAEIGLIAPQGAHHAYGLKRMAADGFNENGEIVVPDCVRGALRSLVGQIDALDEAIGAIDRELAASVKADETAKRLMTIPGVGPVTASAIMATIQDASAFASGREFAAFLGLTPRQNSTGGKTRLGRITKMGDRYLRKLLVVGACATLRHRRGHSDALRLWASGMLERKTIKYKFNLTAVALANKVARIVFVLMTRGGQYDDRPVAA

SEQ ID NO: 368598 - protein, 409 aa, unidentified
MQEATQHDAVDVFVGVDVDVDVDVDVGKGRHHAVALDRNGKRLYNKALPNDEVKLRALIAELKTHRRLLFVVDQPSTIGALPVAVARAEGVLVAYLPGLAMRRIADLHAGEAKTDARDAAIIAEAARSMPHTLRSLRLADEQLAELTMLRGFDDDLAAQVTQTSNRIRGLLTQIHPALERVLGPRLDHPAVLDLLERYPSPSALAAANEKTLANRLTKLAPRLGKNWAAEIVQALNEQAVIVPGTQAAAIVMPRLAQQLAALRKQRDEIAAEVERLVLAHPFWPVLTSMPGVGVRTAARRLTEAAPKAFATAAHLAAYAGLAPVTRRSGSSIRGEHPSRRGNKVLKRALFLSAFAALRDPVSRAYSSRKIQQGKRHNQALIALARRRCDVLFAMLRDGTIYPPKSAPNA

SEQ ID NO: 368599 - protein, 408 aa, unidentified
MQVVHEVCCGLDVHKKSVTACVLWASGRRRQIRQFGTFTRDLLAMSDWLRSCGVTPVAMESTGVYWKPVWNLLEGQFEVLLVNAQHIQAVPGRKTDQKDSEWIADLLQHGLLRASFVPPTPIRELRDLARYRASLAQEINRIANRIQKVLEDANIKLASVASDTLGASGRAMIEAMVRGEQDSQRLAEMSRGLLRNKIPELQQALEGRVTAHHRFLLKEFLDHLQFVESKMRRIEQEIEERRGPFQSEVARLCTIPGVDRVTAWGLLAEIGLNINQFPDAQHLASWAGLCPGIHESAGKRKSGRIRKGSLWLRRCLCQAAWAVSTKRDNYLSALFRRLAARRGKKRATIAVAHNLLVIAYYILRDKVCYRDLGPDYFDRLDPEGLRRLTKRLEGLGFKVTLERLPHAA

SEQ ID NO: 368600 - protein, 451 aa, unidentified
MKRKRTYGSVDVENLELDAVLKLLTVGCIVAIDVAKSKFVAAIATAVGEAVRLVRFEHPRQTGLFLRMLVALREAKLEPRVVMEPTGTYGDAVRYQCHRLQIPVHMASPKHTHDFAEVLDGVPSMHDPKAAVTLARLSVIRPTKRWDPDTDAKRNLRALLDRRGPVLRIQTLYYGLLEGMLARHWPEFDTLLDVRTQRSWLTLLQRMPTPQAVAAAPEEAAEVLRRASHGALPQRSIAAIVESAGVTLGVPMTFEEQVTLRAIVVTLEREERQLDAIDKQLGDLCRTDPETTRMAALVGPACAAAIVGYIGCPSSFANARALEKAIGLNLRERSSGEKKGRLSITKRGPGQVRKLLYMAALRAVQSDAFVAAWYRGRGAYRRDLKRAALVAVMRKLARALWHVARGGVFDPQKLFDTRRLDLTPSKVDLSIHPLSPNAQTLHPGGAPPPTA

SEQ ID NO: 368601 - protein, 343 aa, unidentified
MEYYVGLDVSLKQTSICVVNQTGSVAREGVVESDPETIAAFVRSRAPGAIRIGLETGPTATWLWTELKRLGLPVICIDARHAKAVLKMQINKSDRNDAAGIARIMQTGWFKEVRVKDLDSNAVRALLASRALLVKIKRDLENQVRGLLKNLGLVIGRAKFNVFAVRAEELIEGRPELVAAVRPLLEARKAIEQQVDDLDRKVQKLARHDAQVRRFMSVPGVGPITALCFKATIDDPARFKRSRSVGAYVGLTTRRHASGELDWSGRISKCGDAMLRMYLFEAAGVLLTRVSKWSALKAWGTRLIKRNGLRKAKVAVARKLAVILHRMWIDGTEFNWSKKAIAA

SEQ ID NO: 368602 - protein, 411 aa, unidentified
MIFVGDDWAEDHHDVFVCDADGVRLAKRRLPEGVVGVAAFHELVAGFVDEPVEVVVGIETDRGLWIQSLIDAGYSVFAINPLAASRYRARHVLSGAKSDAADAKMLADLVRTDRHNHRQVAGDSGAVEGVKILARTHQSLIWDRSRFVARLRSALLEYFPAALSTFSELGDRDALAVLAKAPTPAEAKALPLGKIRSALRAGGRQRNIDVRARQIAEGLRVDGLDAPPAVVAAFASTTQSMVAVVGSLNAQIAGLEKELADHFGQHPAADIYRSLPGIGVVLGARVLGEFGDDADRYEDAKSRKNYAATSPVTRASGRSHVVVARFVKNKRLADAVHQWAFCALTTSVGARAYYDLRVGLGDSHHKALRALSNRLVGILHGCLRTHTIYDENTAWAHRPENQLDPQFRSAA

SEQ ID NO: 368603 - protein, 335 aa, unidentified
MKHYAGLDLSMESTQVCIVDDNGRKVVSEKVENSPEAIAMMLERYGPIERAVIETGRMSPAICLGLCELGVAVVCIDARQAHQSLKAMKANKTDPHDAAGLAQLARTGFYKEVHVKSPAAHGVRSVITARSHLVEARVRLDNTIRGLCATFGYRPGAGQGKAFLERIMQAAHIPGLGDAIASLLSVRAELVGQIKEMDRRLRIIASQSQACEILMTIPGVGVQTSAAFAAAVDEAGRFPQSRNAGAYFGLVPRRHQSGELDWTGRITKQGDSTVRKLLYEAANSILTRSRETFALKTWAMKIAKRRGLKKARVALARRLAVIMHAMLRDGTLFQA

SEQ ID NO: 368604 - protein, 371 aa, unidentified
MDYSSKNLYVGLDVHKDSIAVAYAPEDRGAEVVSLGAIGTRQYDIDKLIRKLQSQGATLVFVYEAGPCGYWLYRYLSGKSLACHVVAPSLIPRKAGDRVKTDRRDAITLARLMRSGDLTSIYVPGVEDEALRDLSRGRDDAMQDLKRSKRRLKSFLLRQDIRYEGQATWNAAHLRWLSEGVCPTPPQQIVFQEYVRAVSEQQERRRRVEHELHEAVKGWRLYPVVEAIQALRGVELTGAVILLTELGDITRFENPRQLMSYLGLTPSEYSSGARRRQGGITKAGNSHARRALVEGAWAYRYPAKVSRHLQLRLEKLPAEVQAISWKAQVRLCKRYRQLTARGKHVNQVVVAIAREMAAFAWAIARLVPLTS

SEQ ID NO: 368605 - protein, 387 aa, unidentified
MTVCTVNHLPAATHGETARCLFAIELSKQSWVIGFITPLSAKINRRILSGGDWRGLLELIEEMRARVSRETGRAVEVISCYEAGYDGFWLHRQLEAHGIRNYVIDPASLQVDRRVRRVKTDRIDTERLLRSLMAYLRGEPKVWSVVRVPSVAEEDARRLHRERDRLVSERVQHVNRIKGLCALQGIYDYQPLRPQAMAGLEQLRTAQGAALPPRLKSEIKRELHRLELVVEMIASLEAERDTIVEDKASTHVNAKKIQNLHKLKAIGPEFAAVLVGEIFHRDFNNRRQLASYVGYAPSPFQSGNVAHDQGISKAGNRKGRTTGIELAWLWLRYQPDSDLSVWFRARVGTVKGRIRRIAIVALARKLLVALWRYLETGLVPRGAVLKG

SEQ ID NO: 368606 - protein, 337 aa, unidentified
MEYFAGLDVSMAETHVCVMNRDGAVAYEVKVPSTPGDIAGAFEQAPACERIVFETGRMAPMLYHGLGLLGLPIVCIESRQAYQALKSLATHKTDRNDARGLAHLARTGFFKPVHVKSLSAHALRSLIVARKKLVGQRVTLENQIRGLAVVFGVRLPRALTAAFIRQALRASEGIPGLSAAMRGLIAARTAVLAAVAAIDADIRRMVRASEACRRLMTIPGVGQLTALAFTAAVDDPGRFRRSRDIGAYLGLVPRRYQSGEVDYTGSISKCGDRRVRTLLYEAANVMLTRFKGPLKLKDWAFAIAKRSTMRKARIALARRLAIIMHAMLRHGTEFKPA

SEQ ID NO: 368607 - protein, 361 aa, unidentified
MEKYIGFDIDDKKTVACVVQKGKKDRYDTMRTDVAVMKRWLARQRKPRAKLHLTFEVSGQAGWLYDQLRDSVDTLTVSNPSKMTWIYRTAKKSDRIDSRKQAILLQIGEIPKVHMPPQEIRQWRLQIQHRRTLTDARTQSKNRIRKILKSHGYRRPRCKGSWWKKANRQWMQDVVEGVAEPWADTLADLLEQLDVYEIQIERATKRLNDRLKGNAAVRLLMSIPGVGPRTAEAVLAYTDEVERFRRGKEYCSYFGMTPKLDESGSRRRMGHISKQGPSVVRWLIVESAWRAVQKSPALQAFYQRVLWRQEKRKKIAIVATARKLLSVMRAMLISGDVFQEELVLRQDHRTSSRKKCREFYS

SEQ ID NO: 368608 - protein, 393 aa, unidentified
MVYVGIDVAKDKHDCFIVNSGGEVLYDVFTIQNDMDGFEDLFFKIKTASRDLSKVKVGLEATGHYSCNILGFLHNKGLYTIVINPLYTSLSRKSVSLRKTKTDKVDARTIASMIMSDVSLKPYSDTLYHNEDLKSLSRYRFDKVSDRSKLKQSVSRLVNILFPELEKLVSTLHTKAVYELLSEFPGAHQVASANLKHLTALLSSASKGHFGREKANEVREAARRSISSYLPAKSLELRHTIKLIRELNAEIAEIETEIKKIMDSIDSPTLSVPGISYALGSVIVSEVGDFSRFDNPDKLLAFAGCSPSTYQSGQIYSTHAKMEKRGSRYLRWALLNAAKYVCKWEPTFAVYLRKKLAEGKHYNVAVSHAAKKLVRLLYHLETTGEKYIPQTLS

SEQ ID NO: 368609 - protein, 339 aa, unidentified
MQVTTIGLDLAKNVFQIHGITEDGTVAFNRSLRRAQMISFFEKLEPCLVGMEACGSGHYWARELSKLGHTVKLIAPIYVKPYVKRGKSDAADAEAICEAVTRPTMRFVEMKSPEQQAILSLHRARDLIVRQRTQTINMMRGLLAEFGIIFAQGVGHAIKFAKGMIDKSTLDVPQAAYDVVTDLCEQLLALHARVNWYGRRMSAVAKSEPRIALLETIPGIGPITASAIVATVGSGAQFRSGRDLSAWLGLTPINKSTGGKERLGRISKMGDRYIRRLMVVGMTSRIKQIKSTPERFDPWFADILQRKPAKLDAIAMANKTARIIWAVLSRNEPYQARTT

SEQ ID NO: 368610 - protein, 340 aa, unidentified
MTITTVGIDLAKNVFAVHCIDQNGKAVLVKPKVSRAALSELIAGLPPCVIGMEACSGAHYWARLFRQYGHDVRLMAPKFVSPYRMAGKTGKNDAADAIAICEAVQRPHMRFVPVKDESQQAMQCLHRTRQGFIQERTATYNRLRGLISEFGVIAPQSTDALRHVVSDQKETLPVQVRLCIDDLLTHVTNIEEKIAEYDRVLSRVAKTDHRSQQLMELKGVGPTTASALVASIGNAHDFKNGRQLAAWLGLTPSQYSSGGKSKLGRITKAGDAYLRTLLVQGARSVIVGAENRTDPFSRWVCSLIGRRGYWRAVVAIAAKNARLCWASLHYGDDFRLYSTT

SEQ ID NO: 368611 - protein, 315 aa, unidentified
MTNPIETFVGIDVSKATLDVAIWQPEQSWQMSNDAQGIGKLLQGLKELGPNLVVIEATGGYEKLIVAELVLAKLPVSVVNPKRVRDFARSVGQLAKTDKIDARILAQFAQAVRPAPRPLRTAEEERLSALVSRRRQIIDMLTAERNRLVTAHLATRKRMEKHIEWLQQELVDIETEINQFIQGTPLWKQKDELLRSVPGIGEVTAYTLLADLPELGTLNRQGIAALVGVAPLNKDSGIKRGKRRVFGGRETVRNVLYMAALSAARFNPTIKTFYDRLIKAGKEKKVAIVACMRKLLIMLNSIIRHQRPWQLNFHA

SEQ ID NO: 368612 - protein, 341 aa, unidentified
MQIKSIGIDLGKTTFHLIALGNRSQVVIRKKFSRSQLLMFTANLPASLIGMEAGVGSHFLGRALREQGHEVRLIPAQFVRPFVNDYRDAEAIAEAVERENMRFVRIKTEDQLDLQALHRVRDRLVARRTSVINQIRAFLLERGISFRKGPASLRRQMPEILENADEKLSTRMRRLLDFLWQEWKGLQSQIDTLNVDLEQIASSDPTCVRLQQIPGVGPLVSTAVVSAIGNGAAFKKGREFAAWLGLVPRQWSTGGKPKLLGISKRGNPYLRKMFIHGARAAVLRVKREGSNLGTWMSGLETRAARNVVIVATANKLARISWAVLASGNDYHPRHKALVFSN

SEQ ID NO: 368613 - protein, 392 aa, unidentified
MKTTAKGVLQTGGEQVAVGVDPSRNALQLAILAPHGTTTKRFPLIPASLASIDAVLGQGQGVRIGIEGAATCGAMVLLHWLRQGYDIREVNPQISKRLRECLTESHTDISDAQGLAWSVRFHPHLPKVRLTVTTAAWKRLSRLRARLVKARTGLYNRLHSLLAESYGAVYKRLFPNLKSKRALEFFQAFPTLDDALDDLPQVRSLLGEERARLLEEAGRWGEGLYLETLRLEICLTIQLIFAHWTAIEGVGAKMAELSQADPQVGRLRAVPGMGTTLALTILGHSGDFSRFESHDAYAAYCGLAPAVWQSGQSRVYAKRRRRYSRPLKQAFLQLALTQLRLNPESRAYYERKRREGKPHWVALIALARQLCKKVYKLMAEKAPPNPPLDIDG

SEQ ID NO: 368614 - protein, 399 aa, unidentified
MINGHDEIAVFLGLDVGKSGHHAVAQDRSGKKLLDRALPNDEAKLRELYGRMKAHGPVLLVVDQPATIGALPVAVALDEGVTVAYLPGLAMRRIADLHPGSAKTDARDARVIADAARTMPHTLRALKVDDETIAELTVLSGFDDDLAGQITATSNRIRGLLTQIHPALERVLGPHMDHPAVLDLIETWPTPAALTTAGKTRVRTRLLKKAPRLGGRLTEEIFTALAAQTVVVTGTNAAGIVLPRLATQLAALRQQRAEVAEQVEELVAAHPLSKVLTTMPGVGVRTCARILTEVVGKDFPTAGHLASYAGLAPVTRRSGTSIRGEHPPRGGNKILKRALFLSAFAALSDPVSRAYYDRKRTQQKKHNAALIALARRRTDVLYAMLRDNKPYAQPPAAAA

SEQ ID NO: 368615 - protein, 263 aa, unidentified
MNHSENNEINIGIDVGKSQLDIFVRPIGDYFSVPNNENGVREAVKRFCKYQPKRIIIEATGRLEHKLVFACVEHNLPIVVANPVHVRRFAQAIGQLAKTDKIDAALIANFGDTIKPDKTIIKPKNIRTISDLLARRKQLLTMQTMEKNRLGIMPQELHASIKSIIKAFKSAIDKVDKLLDTLIIENKEWAIKNDILQSVPGIGKVVSYTLLSNLPELGHLNSKEIAALVGVALINKDSDSYEGQRRIRGGRHQVRTVLFMSMM

SEQ ID NO: 368616 - protein, 478 aa, unidentified
MKKHKKTKPLSETSKPLHEPEPDAAGIDLGATEIWVAVAPDRCEMPVRRFGAFTEDLMAIVQWLLACGIRTVAMEATSVYWVPLYQLLADAQIAICLVNARHVKNVPGRKSDVRDCQWLQYLHSVGLLMASFRPEQAICQVRSIYRFRQNLLTQGTQHLQHMQDALDQMNIKIHHVIDDLSGVTGMAIIEAILNGERDPLRLAQYRDRRIKATEETIVKSLEGDWRSEHLFVLKLAWENGRQVQEQIKKCDHQLMEYARQLEASTIVAKPVVPVKIVSLNLEPGVAELQLAPAAAVRPAKPRKKTSKNEPDGPWREELHRFFGVDLTLIPSISVLTGITLMTELGNDLSAFKTAQHFSSWLCLCPDNDTSAGKVLRRRTRRSQNRARQALRMAASSLHHDKSYLGDKYRRLRTRLGAPKAITAMAHQLARIIWYLITHQVAFDMSIFAALEKANQKRRLNGLNSAAHQMGYQLTPIAA

SEQ ID NO: 368617 - protein, 427 aa, unidentified
MNNTQNEKIAQVTNETMVIGIDIGSTKHWARAFDNRGMELSKKAFWFMNTAEGFASFEVWYESQRRAAGLKRIMVGLEPTGHYWFNLNQFLDEKGIRVVLVAPQHVKHSKELDDNTQRKDDLKDPRVIAKLVTEGRYFLPYRPTGVYADLRDGFNRRCGIIESMTQAKNRLNRWFCINFPEYLNAYGSVAAKTGLMVLKKAPLPKDIVELGVDGIVKIWRDAKVRGAGIKRATTLVALAEQSIGEKTANEAARLELWQLLEDYEHYAHQYEVIEEMLEHKVHEVPHADKLLQIPGIGYFTVIGFFAEVGAIDRFNDPKQIQKLAGLSVVENSSGKRKGLPGISKRGRDRLRLVLFQAAMSAVRSNQEFKEIHLYFTTREDNPLKKMQSLMAVAAKIIRVFYGMVKNGTEYDPERLLRDIRRPEKAAA

SEQ ID NO: 368618 - protein, 350 aa, unidentified
MKETGEIIGETKIPADVSLIIKFIENAKKSVDSDDVQIKTGYEAGCLGYSLYWQLAAKGIECDILAPSTMHRSAKNKVVKNDRRDAKNIAANLANGTYKSVYVPTDEDVEIKEYIRMMHDFKIELKKVKQHINAFLLRFGHHYPGKSKWIPAHIKWLKELELSDMYREILDEYLSQLEILSEKIERFKHRLEELSQKETYNEKIGQLRCIKGIDTTAAMTMHAETSDFDRFPTANAFASYCGLTPGEDSSGESYHRLGITKQGNSMIRTTMVEAAQVLVRGTIGKKGKKVKSKQKDQDVKVIDYADKAVVRLQKKYHRMIFRGVKRNIAITAVARELACFVWGIETGHIS

SEQ ID NO: 368619 - protein, 310 aa, unidentified
MAQNIGVDISKDRLDVAVPETGEAFQESNDKAGWARLVARLAGRQIAAIGLEASGGYERGPIRALLKAGLPVRRINPYRLRRFADALGIKAKNDKLDAGVIAQFVALLPTRPVRVDAKVERLAEQATARHQLSDELTRVQNQSEQVRDPVVKHLGKQRMAQIKRQMVLLDKLIAQAVAADPDLAHKDRLMRSVKGVGPVYSHTLLAFMPELGKLTRAQAGSLLGVAPFDHDSGKLKGQRCIWGGRQNVRDVAFMAALSASLHNPALRAFHQRLRAAGKAPKVALVAVMRKLITILNAILRDNVEWQNQLA

SEQ ID NO: 368620 - protein, 355 aa, unidentified
MNDAKYIGMDVHQATISVAVRDSRGNLVMEAIVETKAETILQFIRGLRGSLSVTFEEGTWAAWLHDLLQPHVTRVVVCDPRKNALLKVGNKNDRIDARKLSELLYLNKLSSVYHGEPGIRTLKELARSYIAMTRDLTRVMSRLKAIYRSWGIPCAGQQVYAPRYRAEWLAKILEAGVRRRAGLYYQQFDALAALRQQARRELLAEARKHPAMKLLRQIPTIGLIRAALLIALMQTPNRFRTKRQLWAYCGLALRTYTSGEYRFVGGQLKRSKKVLAVRGLNINHNHDLKNIFKGAATRAASTVGPFQDFYQACVARGVKPHLARLTLARKIAATTLLVWKKGVRFDAEHLKQQAA

SEQ ID NO: 368621 - protein, 455 aa, unidentified
MAKKNPATRQSKGKVRQNILERINLHAAGIDIGANFHFVAVGEECTEENVRKFDAFTSDLHRMADWLSEHHIQTVVMESTGVYWIPAFQILEQRGLEVKLVNAAHVKNLPGRKSDVSDCQWLQQLHSFGLLNGSFRPKDEVCVLRSFLRLRDTLVKDSSSHILRMQKALTQMNIQVHRVITDITGYSGMAIIRAILDGERNALKLAQMKHPLVKAPTEVIVEALQGDYRTEHLFELQTALDLYDVYQRKILECEAQVEQHLQQWETKVDFEQALAQTAALQTRSASVRLELHRQAQLLSVCGVDLTRVPGLSTLAVRTIIGETGLDMNCWKSEKHFCSWLKLCPDNRISGGKVLSSRARRTRNRATAMFRLAAQSAMRSQTAIGAFIRRIKARLGAPIAINAGAHKLAQLFYRMLKFGETYVERGQTYYETKYKERLLRNLNRRAKEFGLQLAPS

SEQ ID NO: 368622 - protein, 380 aa, unidentified
MVFLPSTIPSRMARTNLASAPEPGGDSEPVSVYIGVDTHRDFHVAVALGGQGCLLGEMHLPACTAGYEALLDWALELVEGQAISLLFGIEGTGCYGAGLSRHLQAAQCSVREVNRPNRQTRRQRGKDDAIDAEAAARALLAGTATAVAKASNADAEMLRVLKSTRDSAVRCRTRAITQLKALLIVVPAELRESLQHLDTAELVNRCLNRNEEVASSPLTAACLVMRTLAERIRHLEQELMVLGRQLDRITQAVAPGLRAAQGIGPDNAAALLIAAGDNPQRLRSEAAFAALCGASPIPASSGTRQRHRLNRGGNRQANCALFRIALNRLRWDPATKAYAERRTAEGKSKREILRCLKRFIAREVYRLLQAGSLRPEVTRA

SEQ ID NO: 368623 - protein, 423 aa, unidentified
MNNTRNQRLNQVSEATLVIGIDIAKKTHYACAVDDRGLELCKPFSVKQSSIGFQQFYDNLQELLNTHQKREILIGFEPTGHYWMNLAAFLTTKEIRFVMVNPMHVNRSKELDDNLQTKNDQKDARVIAKLITNGYFSYTRQLDGIEAELRQGSSIRWSLKKDLVKVKNRIIRWLDRYFPEFQIAFKDLGQNACAMLKHTPLPIDLLEKDVDDLVALYREKENLKYPAKRKIEKAKKAAEYSIGLTEGTTMARIEINLLIAQYELLQAQLENVSEQLKEKAKELTDYHHLLSVPGIGEETIIDLLAETGSLSHYHHPRQLIKLAGLTLRENSSGERKGQKQISKRGRRKLRALLYRAVLPLIRNNKAFFDLYQYYLTRMDNPLKKKEALVVLCSKMLKIFHGLCRHHVNFDGEQMRRDLVILHS

SEQ ID NO: 368624 - protein, 362 aa, unidentified
MDDAITPICKDKVTVGLDLGDKYTHICVLDSDGEVCEESRLRTTPMALRRRFAPMPRARMVLEAGAHSPWISRLLKECDHEVYVANPRKLRLIYQNDSKSDRVDAQYLARIGRLDPALLAPFQHRQADTQTDLALIRSRDVLVRSRARLINHVRGAVKSQGGRLSTCSSATFAAKALPDLPAQLEPALAPLLEVIATLDEQIRSYDRRIEELAKERYPETALLRQVAGVGALTALTYVLTLEDPARFPDPRAVGSYLGLRPRRADSGDLSPQLHITKAGDEMLRRLLVSSAHYILGPFGPDTDLRRWGLALAERGGSRGKRLALVAVARKLSVLLLRLWATGEVYEPLRNSAGHGGSLPCSA

SEQ ID NO: 368625 - protein, 332 aa, unidentified
MYLGIDVHKRYPQVAVMDEAGEILEEVRVENANLDDLAQRYAGAQAAIEATSNYYHIHDTLSEHLDVTVAHPKELNQIADTDKKTDRVDAKELARMVRLNAVPESYVPTDEVREARALVRGRQTLVENRTKYANKIHGLLADHGITEDVKPLNKEGREFLRELSLPTPWDTLLESYLELIETLTEEIQKLEETIEERAGSLQETQLLMTIPGVSYCTALTIYAELGVIDRFDGDKEVVSYVGLNPVIRESGDSRIEGSISKRGSGRVRWLLVQAAHNAVHVCNDAYLSRFYERLASRKNSQKAIVATARKMLVSIYHMLDRGEVYDPPGVSA

SEQ ID NO: 368626 - protein, 343 aa, unidentified
MQAITTIGLDIAKSVFQVHGVDAEGNVVVRRQLKRRYVLTFFQRLPACLVGIEACASSHHWSRELQALGHTVRLMPPAYVKPYVKRHKNDATDAEAICEAVGRPNMRFVATKTPEQQSCLILHRTRHLLIRQQTSVINAIRAHLAEFGIVAPVGRNGVEQLLGVVADATDARLPEVARACVAALGAQLRMLKAQILEFDRMIRAWHRSSEVSRRLDEVPGVGPALATALVASVANPKAFRSGRDFSAWIGLVPKQNSSGGKDRFGNISKRGDRYLRSLFTAGALAVIRYAKIHGTKHRPWLTGLLARRPTKVAAIALANKIARMAWAMMARDERYKEPAGLAA

SEQ ID NO: 368627 - protein, 312 aa, unidentified
MSEPLYVGLDVSKQQLDLAFEPARTPRRVPHTDEGIATLVTELRPLAPALIVLEATGGYETDVATALALAGLPVTLVNPRQVRDFARALGRLAKTDALDAQVLARFAARVRPEPRPLPDEAHQALAALVTRRRQLVDMLTAERFRLALAKGPIRRDVQAHIHWLEQRVKHTNQDLRAALKTSPLWQAATRLLQSVPGIGPTTAAVLIADLPELGRLTRQQLAALVGVAPLNHDSGHHHGIRTIWGGRAQVRCALYMATLVATRYNPVIRAFYRHLLAVGKPKRVALVASMRKLLTILNAMIKAQQPWAPRHP

SEQ ID NO: 368628 - protein, 368 aa, unidentified
MDEISAFVGLDVHKATISVAIADSGRLGEVRHIGNIENTPTAIAKLARRIGRQHETVEFVYEAGSCGYNVQRQLTALGFTCRICAPSLTPRKPGDRIKNDRRDAIALARLHRAGELTYVWVPDVLHEALRDLVRARHAACQDVRRGRIRIQAFLLRCDLRYEGKSWSYRHRMWLCNRQFVHPAQQIAFQNYLNALEYEEQRKAELEKQIQDLLQTSHWAPLLTALQALKGVGPVVAATIIAEVGDFTRFAHPRQLVAYFGLAPGEHSSGSTVRPRGITKAGNAIARTVLCEAAWNYRTTPKVGQWMKQHRPPTSKEVIAIAWKAQLRLHKTYKRLTSRGKRTVVATAAVARELLGFVWSIGRLVPLGA

SEQ ID NO: 368629 - protein, 404 aa, unidentified
MRVRFIGLDVHLDFCEVAICEAGRVRSGGRVATSSEGLAILANSLGGDDYVALEATGNALAIARRLEPHVARVVVATRTELRAITEAKVKTDHRDARTLARLLAAGLLHGCWLPDEPTRALRRRLARRAQLVRQRTRAKNEVHAVLMRTLKGRPPMSDLFGRGGRVWLSGLQLPADERETADGCLRQINFLDAEIAILERGIAEHAVGSEAIRRLVTVPGVSLMTATTFIAAVGDIRRFRDPGKLVSYLGLDPKVRQSGSGPARHGRISKQGAAQVRHMLAEAAIVAVNTAGPMRAFYERVRARRGRQIAIVAVARKLAVLFWHLLTREQDYAFQRPSLTRKKLRGLELRAGATRTPGRRDLTTKNTYSQRAHRERERELSEQAEIAYRRLVTDWRATFNKTAP

SEQ ID NO: 368630 - protein, 384 aa, unidentified
MDAAYYVAGIDVHKKMLAVVVANVREGEWQFVCRRFGTTVSELQNLSAWLRERAVEEVVMESTAQYWKPVWLALEGQFQLWLAQARSNRGPRGRKTDFRDAKRCVSRLLSDDLRLSYVPDAEQRCWRTLTRTKYQLMRDRVRLQSQLESLLEECQIKLSSVVSDLLGASGQRILRAIATGETDPARLRALGDKRLHATDAQLRDALSGQPQPTHRALLTLYLQRLDLIETQIAELERMIAEAMKAHEAAIVRLSELPGLGVDSAQQIIAEIGPSAAAFPSAGQLASWVGVCPGSEESAGETNSNRSAKGNRAMRRLLNQLAHAAVRKRDCYLQILFKRLSVRLGYAKAVWAVAHRLCRLIWKVLHEGVRYVERGPTVNALTLQR

SEQ ID NO: 368631 - protein, 482 aa, unidentified
MKKKNIFQNRSQQLLRLFEKAGNRLKMMCVPIDYAKKDHMVMFCNGYGDILRKPFSVKNTLDGVKYLIDQVMRSCRQRRIKKEYVFFGGEDVNSYAENFANALRAEGWLVANVNAHDAKKQRENLQASTDRIDLMGIATMLLNLRAKCSPAQDGIYRNLRTLVRHRKKLVVMKTEVKNRVHALVDRLFPGFLNEKNTGINPFSKSSLVLMEDRFSAQQIRRRQKSTLIKTLKRCATPDAENIAAKLHSYAAQVITTPDEYAASLQLSLQHHINHFRCLQENIDQLLSEIALVLAQTQAAFLTSIKGVGIVLAAGVSSEIGNPFEQKPLNNLSSYSGIIPRVKQTGGVEGHSHTGRVSKRSNHLLKDYVVQSAFQMGLRGPEPLLQDYKRREAAGQHADFGIGRRFLRMAMCLMRSSQVYLPPELRNPKAQMHERAGYYLTMWPLLRDKWKKAHAHQVAFAKDQPLGQWRQMIQELYDIKLKL

SEQ ID NO: 368632 - protein, 366 aa, unidentified
MYREFIGVDLHSTQVTVHRIVVGESGSLERKKGQYPMERMETHFIASLHAGCAVCIEAGSGSHALARMIVAAGARAFVVNPRSLPQIFMSAKKTDKVDAKKLADCLKQHLESKDSDDGFPEVCVADEDTQRLRMLISQYQRVNADMTALKNNLYSLFRQWLVQVDKGFVIERLDSYLEHPRLPPEVGIIARREKQRHEELEAFKAELRSLIESIGVIRYREQVSLLIGISGISVFGAACIMADIIKVDRFRTSKNLASYLRAAPRVDASNNTVHIGRLNKAGRKMAFEILLQSVNHLVDGNPNLLRYTKHAVGKSKNKVRAAVVGRTIRQIFYILKNKEPNWFLKEETYSNKKRQVEKILLAKKSA

SEQ ID NO: 368633 - protein, 342 aa, unidentified
MEFYVGLDVSLKQTSICVVDQTGLIVREGVVDSDPEAISVFMKSKAPDAVRIGLETGPTSTWLWTELKRLGLPVICIDARHAKAVLKMQINKSDRNDAIGIARIMQTGWFKEVHVKDIDSHSVRALLGSRALLVKIKRDLENQVRGLFKNLGLVIGRGTFNVFAVRAEELIEDRPELVAAVRPLLEARNAVEQQVRELDRKVTKLARRDAQVRRFMTAPGVGPVTALAFKATIDDPARFARSRSVGAYVGLTSRRHASGEVDWSGRISKCGDAMLRSYLFEAAGVLLTRVPKWCAVKAWGRRLAKRNGLSKAKVAVARKLAVILHRMWIDGTEFNWSKEIAA

SEQ ID NO: 368634 - protein, 336 aa, unidentified
MNYIGMDIHKQFTVAVVKDREGNELETEKFDNSKENFQKFLKIYKPEETDIVMESTSVWEPIYDIIEDLKYHVKLANPVKTRAIAEARIKTDKVDASTLCDLLRANLVAESYIPSKEVRELRDIVRARKSLVQGKTKIKNKIRAILIKTGIKLPYKTLCKNSMAFIVEEIEKKHFSMKTIVSCNINLLEQYNFEVKKIDDKLTEIALKDNRVQLLKTIPGIGNIIAITLIAEIGDINRFESSQKLSSYAGLVPGIRQSGNTLKVGRLIKQSSKDLKTCLIEASWVLVRTKEASRFKWFFGNLSKKKGKQKAICAVARKLCCVVYAMLKKNQTFMLL

SEQ ID NO: 368635 - protein, 360 aa, unidentified
MAPDDTKHDRRIVGGVDTHKDLHVAAVVDERDRLLGTASFATTRHGYRQMVAWMQSFGRLDRVGVESTGTYGAGLLRHLQSAGIEVLEVTAPDKADRRRRGKNDDFDAEAAAHAAFAGMRVVTPKRRDGMIEALRVLRACRRTAVAARRVALQLIGNTIISAPEELRDTLRKMTRMRLIRTLAAWRPDLTDYRTPLSAHRIALKSLARRYLELHDEVADLDVMIARIVNELAPDLVACNAIGHGTAAQLLITAGDNPERLASEASFAALCGVSPVPASSGKTNRHRLNRGGDRAANSALHIIAIGRLRTEERTKAYVARRLAEGHSKLEAIRCLKRYIAREVFSLIRNRLREINQTQVAA

SEQ ID NO: 368636 - protein, 386 aa, unidentified
MQASNVCTPTAGHIGTIFVAIELSQKSWLMTIHSPDRDRMSRHKLGGGDHAGLLGLLESIRTRAIRKLGSAPPIVSCYEAGYDGFWLHRLLTAAGIRSHVFDPASIAVEQRGRRVKTDRIDGELLLRTLMAYCRGEPRVVRIVRPPSPEQEDARRETRERDRLVKEQVGHTNRIKALLRLHGLAVGNPRRRDWLKWLSAQRDWQGQAAPPHIKAEIEREHARLMLVREQLAALERRSAQAQSTPAAAEMARRRDILFKLRALGPAFSGTLTNEAFYKDFDNRRQVGAYVGLAPSPWQSGGTDREQGISKAGNPRARKAAVELAWLWIRHQSNSALTHWFLARTVKASKRIKRIAIVALARKLLVALWRYVRTGLVPVGAVLKPVEA

SEQ ID NO: 368637 - protein, 402 aa, unidentified
MAYDCVIGMDVGKYFHHACVLDPQGRQVLSKRINQHEGSLRKLFGTYLADNASVLVVVDQPNNIGRLTVTVAQAIGADVHYLPGLAMRQLSRIHVGNSKTDVRDAYVIAHAGLNLPDALRSVDRVEDVFLQLKVLNGIDEDLARAYTRLINQMRSALVGTYPAFEHVLHGQMIHRKWILHLLAKYGGPTKIRRVGKARLAAFARGHRARNPEPVIDAMLAAIEGQSVTIAGAEYAELGVAMSAKDALAKLEHRKEIEAQVLELIQDIPQTEILLSMPGVGPRSAAQILMTVGDMSDFPDAAHLASYAGLSPRTNQSGTSIMSNSPNRAGNKKLKNALWQSSFASIRFHERSRQFYERKRKEGKRHNAAVVALARRRLNVLFAMMRSGELYRDISTVQEAAAA

SEQ ID NO: 368638 - protein, 347 aa, unidentified
MEHYAGIDVSLDSVSMCIVDAHGKILKEAKVACEPEALIAWLAEHGTPMARIGLEAGPLSQWLFAGLRAAGLPVELLETRHVRAAFKAMPVKTDRTDARGIAQLMRLGWFRPVHCKSLPAQEVRALLTTRKLLQAKRHDVEMSLRGVLRGFGLKVGPTTPKTFAMRVQELVAHHDTLRTIAEALLKARAVLAQEFKAIEKRLAALARTNAPTRQLMTTPGVGAIVALTFASAIDDPSRFRSSRRVGAHFGLTPRKHQSGETDVTGRISRIGDHGVRVALYEAANVILTRAVRGSDLKSWALRVAQRAGMKKAKVALARKLAVVLHRMLADGTTFMASKVAQSAAGAA

SEQ ID NO: 368639 - protein, 321 aa, unidentified
MAAILGIDLAKKKFDVALLRDGKFKAKVFDNSPNGFAALKAWLVRQDVDQVHACMEATGNLFEGLATFLADEGHQVSVVNPWKIKAFGESLLTRTKTDKTDARMIARFCEAMNPSLWKPSPPEIRQLKALGRRRDALIEMRNQESNRDGSSSSRVQESIGTVIRMLDREIDDMTRQIKEHIDNHPDLKNKKDLLRSIPGIGDASIEAILSETNGFANFDKVEQVVAYMGLSPREKSSGSSVRGKASLCKTGNRRLRKMLYMPALVAMRYNPLVQQLAERLKEKSKHGKLIACACMKKLVHIMFGVIKNNQPFDPNYMLNSA

SEQ ID NO: 368640 - protein, 339 aa, unidentified
MGVHCAVDLHGNNGYYGIVDETGKRVYSKRLPNSLEKVLEALGPFRDQLEHGVVVESTYNWYWLVDGLNENGYRARLANPAAMEQYNGLKNGDDETDAFFLTEMSRLGILPEGFIYPREERPVRDLLRRRLLLVRQKTAHVLSFQNLVARERGEQISSNRIQKLWPSEVQQFFEDERLVLMGRTNIETMRFLTKQIRQIEKVVLDATKLRPEYEKLLSVPGIGKILALTIMLETGDINRFKKVGNYCSYCRCVKALRKSNEKPKGENNRKNGNRYLNWAYVEAANFIRRYCPEAKRWYQRKLTRSKQVVATKALASKICKACYFIIRDQVDFDVKKIFG

SEQ ID NO: 368641 - protein, 311 aa, unidentified
MNTKIDPIHYVAIDVSKSTLQVQDDRRAFAVGNDPQGHCELLDYLKTCPNPLIVFEATGGYERGLLQSLHKDGMPLAMVNPSRVRNFARSEGVRAKTDPIDGKMILAFAQSKALRPMEAPSEACVKLAALLDRRGHLVEQLAREKNRLQNSEAFIHRSIRRMIRILDKEITAIEKNIDQLVGSDPGLKSRSEIIQSVKGVGNITAWTLLAYLSEIEDLNRNRLVALAGIAPFNRDSGKFSGRRSIIGGRAKVRKCLYMAAHTAASCNPVIAAYVQGLRDRGKPYKCAIVAAMRKLLIHIQSLMKKAQLSPC

SEQ ID NO: 368642 - protein, 371 aa, unidentified
MITIGVDAHKKTHTLVAVDQVGHRLAEVTLAATTAGHLRAVQWADALATVGGNGDRQPVRFAVEDCRHLTRRLEADLLRSGEQVARVHTHLMAAARRGSRRPGKSDPIDAEAVALAALREPDLPVAQLDGPSREVKLLTDARADLVVQRTQAASRLRWFLHELNPELVVPPRGLRRTVVVAALATWLADVEGVVARLARDLLSRIAELNSQIKQLEREVRGRVRALAPSLLEVPGCGETTAAVLLGETADVRRFRSADGYARFTGTAPIPVWSGNTERVRLNRGGNRTTNCALHTIAMTQAARGIGGGKDYVDKQLTRGKTRTEALRLLRRRLSDRVYAALRADAPSLAADSPQAEQQHAGGPSAGVNRAA

SEQ ID NO: 368643 - protein, 343 aa, unidentified
MVHYIGLDVSLKRTSICVVNQVGSVVREGVVESEPEAIAAFVRSKAPGAVRIGLETGPTATWLWTELKRLGLPVICIDARHAKAVLKMQINKSDRNDAAGIARIMQTGWFKEVRVKDLDSHSVRALLASRALLVKIKRDLENQIRGLLKNVGLVIGRAKFNVFTVRAEELIEDRPELMAVVRPLLKARQAIEQQTDDLDRKVLKLARYDAQVRSFMTVPGVGPITALCFKATIDDPTRFKRSRSVGAYVGLTTRRHASGEVDWTGRISKCGDAMLRSYLFEAAGVLLTRVPKWSALKAWGMRLAKRNGLRKATVAVARKLAVILHRMWIDGTEFNWSKKEVAA

SEQ ID NO: 368644 - protein, 403 aa, unidentified
MDRCAGIDWAKEIHKVCVLEADGGPLVERGIAHDERGVDGLCELLVELDVKRVAIERPDGVLVRCLLEAALVVLPIHPNQLKAARPRFRAAGGKSDSFDAFCLAELARTDHHRFRVLAPDSDETKALRALTRTREGLVRTRVSLTNCLHAELEAFWPGAERLFCKIASPIALAFLERYPSPRDAQGLGEKRLARFLARHGYCGGKSAAELLARLRSAPEGRAEEAEEEARRTAVLSLVAALRPLLEQIAVLNSRIAKAVRTHPDGEVFLSLFRDPGSTLTAAKLLAEIGDRRERYPTAEALAADAGMCPVAKESGKRKVATFRRACDKRLRDTLATLADSSRQHNPWAKDIYLRARGRGCDHPHAIRILGRAWVRVIWRMWRDGVPYDPLKHGGRRRLDAAGG

SEQ ID NO: 368645 - protein, 319 aa, unidentified
MKTRKPSTVVGIDVSKDSLEIGVLPGGEGWSTGQSPEEVSALAERIAALKPALVVLEATGGLELPIVHALLERGVPVHRAEPKRARYFARALGLLAKTDRIDAFALARFGATGELAAQSFPAAGTRQLDALVTRRRQLVGTVTAESNRLQASSDPAARASVQRHLAWLKAELKALDAQIQTCVAACPDTRAKVERLRSVPGVGPVTAAVLVSALPELGTLDRWQAAGLSGTAPLNDDSGKHQGRRRTWGGRKDVRCALYMAALVASRHNPVIRALYVRLLAKGKLKKIALTACMRKLVVILNTMLRDGTDWRQTAPAAH

SEQ ID NO: 368646 - protein, 355 aa, unidentified
MNGAKYVGMDVHAATISVAVRDAAGKLIMESVLETKASTILQFIHGLRGELHVTFEEGTWAAWLYDLLKPYVTNVVVCDSRRNALLKEGSKSDRIDGRKLSELLRADLLRPVYHGEHGLRPLKELVRAYLTLRQDLTRVMNRVKAIYRGWGIPCAGQSVYHPRHRDEWLSKITHAGVRRRAQLCYLQLDMLVGLRQQARQELLVEAKKHPAWKLLRSIPALGPIRAAVLMAIVQTPHRFRTKRPLWKYGGLAVVTHSSADHRYVEGQLQRAKKPVSVRGLDFSHNHDLKDLFKSAAIQASTREGPFREFYDALVAKGMRPEMARLTLARKIVTIAFTVWKRGVVFDAKYLKPQTA

SEQ ID NO: 368647 - protein, 337 aa, unidentified
MEQVIRIGVDTSKQVFQVHGVDAAERAVLRRQVRRSELERFFGALAPTLIGLEACGASHHWARVLRSLGHEVRLLPPSYVKTYRKRRSKNDARDAEAICEALGRPSMRFVPVKTEAQQAALMLHSARELLIKQRTMLVNAIRGHAAEFGIVGAQGLGKLSDLLERVRSSAIPELARRMIELLASQIDPLDVKLREIDTRLRDWFRASPESQRLATIPGIGLIAATALALKIPDPRAFRSGRHLAAWLGLTPSQRSTAGRHRLGKISRQGDETLRSLLIVGATAVVRWAKPGRASPWLLELLARKPRKLVAVALANKTARIAWAIMMRGETYRRPMPA

SEQ ID NO: 368648 - protein, 392 aa, unidentified
MYIVGIDIGKNHHEASIVSPEGKQIGRSLRFATTHKGADSLMSFIFNNIGNSSCIFGMEATGHYWYPIYSFLKARGYTIYVINPIQSDSLRKMYIRQTKNDSIDSFLIAEVIRFGQFTTTSMADENILAMRQLCRYRDSVISSRTEIKLRISTIMEQIFPEYEKQFSSLWLSTSMGILEKYLTPENIENAPIDELFEIIKDKSHNRLTKAKAISIKEAAADTFGIKIAQDAFSFQLKQLIDRMNFLDKQIEALDCQILEYYEKFDCYLHTIPGIGMIAAATILAEIGDINRFKSSSALVAFAGIDPTVRQSGEFSNTHNHMSKRGSPYLRHAIFLAATTCSFHNSPLNAYYKKKREQGKHHLTATGAVARKLTTVIYAVLRDGKPYEPKSFC

SEQ ID NO: 368649 - protein, 415 aa, unidentified
MALKIVYKICCGIDVHKTFVVACIASTNDKGITSYESHRFSTYTSGLKTLLQWLLDRNCKDVCMESTGKYWIPVYNILESDCSIVLAHPKYVKAIRGKKTDKKDAKWIADLFKHDLVAGSFMPPADIRQLRDLMRYRFKLTCFKSSEKNRLQNCLTVSNIQLGNVVSDTFGKSAQAILDKLLENPADTSFDLEPLVYKSLKKKLPELRDAIDGYISPEQAGKLKVIKAHYENLESRKAELEELILALAAPYQQELTILQTAPGISSPFTAIGIISEIGTNMEAFPSAKHLCSWAGLTPTNNESAGKKKSVRVSKAGCYIKPLLVQCANAVVKSTKHPEMRNRYLRLKKRRGHKKAIIAIARMLLTALYHMLKNGENYNAELYQKSDLLPVDREITVEQALMIARNQGYKIKSATA

SEQ ID NO: 368650 - protein, 405 aa, unidentified
MQITYDVCCGIDVHKKMIMACLRKGNKKEIREYSTLTKDLRDMASWLESADCKMVAMESTGSYWKPIYNILEMLGLNAIVVNAQHMKTVPGRKTDVKDAEWIADLLRHGLLKASFIPNKEQRELREVSRYRKSLIEERAREKNRLQKVLEGANIKLASVLQDISGLSSRSLINGMLEDNITPETIDDMLFGSAKEKKQDLLQAMDGICTKVQKMLIKAIVDHIDDMTERIKDLDNIINKEMKKYDDAINAIDEIPGIGCQSAETIIAEIGVDMDRFPSPAHLASWAGLCPGNNESAGKKKTGRSNKGNKILKTTMTQSAQSAIRNKDSFFRAQYNRLVVRRGANKAKVAVAHSMIIAIWHILKYNVPYEDLGSDYYNKKNTEKKMAFHMKKLLELGWKPAVSSMS

SEQ ID NO: 368651 - protein, 347 aa, unidentified
MLADQLDYVVGVDTHRDAHTIALIAALTGAVVLEIEVGADQRGYARALTLAFEHAAGSRLWAIEGSGSYGAGLARFLAEQGERVVEVERPQRTERTKGKSDRIDALRAARTALGQTKLALPRAGGARQALRALVTTRKGAVATRRAALNQLRALIVIAPESLRAELRQLTRAKLIARCARLRAERHACPELRGTTLALRACARRVQAATAEERELRREIVRLVNELAPQLLAEPGVGPISAAQLLVSWSHGGRFAGEAGFARHAGAAPIPASSGQVVRSLLDRGGDRQLNRALHTILVARHKRHAPTIAYIERRRSEGKSVREALRCLKRFLARHLFRVLEAGPLAT

SEQ ID NO: 368652 - protein, 348 aa, unidentified
MSGKSTDQVTTIGIDIGKNTFHFIGLDSKGAIVLRQKLSRGQVQERLANLPRCLIGMEACVGSHHLCRQALEFGHEARLMPARYVKPYLKGQKNDFRDAEAIAEAVQRPTMRFVAPKSVEQLDLQSLHRVRARLVRHRTSVINQIRALLLDRGIAARQGRQHLRRTLPDILAREAERLSPRMVRMICDLSADWRHLDERVEEVTEEITAIAMADEACQRLMTAPGIGPIIASAIVAAIGDGMAFAKGRDFAAWLGLVPRQISTGDRTILGRISKRGNTYLRTLLVRGAKVILLRPKNWPKHSFGPWLEAASRRMHRNVLAVALANKLARIAWSVLAGERRYETRGIVA

SEQ ID NO: 368653 - protein, 370 aa, unidentified
MHTAHAVAGIDPHKHTATAAIVDVLGVLVTSLSFPVTKSGIGALTALLTATGLTIDRIGIEGSGGLGRPVMIALAAAGHDVREVQANRTAERRKRRRRAKTDINDAEAIAGETLAHPDLPPAGKNHTPPSAADELAVVRDWRESLVLQRVRLLTEAEAVLVSLPLQLREQLPPSSRVQASLDRLAQLDDIGPDLGAADRVKLDRLAQARADVDTIRGRIKELDAQVPALLKALGCTLTAIHGVGVVTAMTLMTEIGDPHRFTTEGRFARWCGVAPVALSSGEGDGPPRHHRLDLGGNRRVNSMLHIVHITQARCHPAAPEYMARREAESKTKRAARRAHKRQLANVIIRRMWGDADRLAQASLSAASAAS

SEQ ID NO: 368654 - protein, 409 aa, unidentified
MLFIGDDWAEDHHDIEVEDEQGRRLARRRLPEGVAGIEALHALVADHLPDDAEANQVLVGIETDRGPWVQALIAAGYTVYAVNPLQAARYRDRHGVSGAKSDAGDAHVLAELVRLDRAHHRPVAGDSAIAEHVKVLARAHQSLVWSRQRQNNMLRSMLREFYPGALDAFAGELDGRDALAVLAIAPRAADGRRLSRARVETALRRAGRQRYLATRAAEIVAALRADQLPARAGVEGAYGASVRALVAVISELRHQTLALAGAVEAGFGRHPDVEIYLSQPGLGPVLGARVLAEFGDDPARYADAKARRNYAGTSPITRASGKSSAVLARHVRNRRLADALDQQAFAALQASPGARAYYDARRARGATHHQALRALGNRLVGVLHGCLRRHQRYDEARAWQQHAVVPRAA

SEQ ID NO: 368655 - protein, 346 aa, unidentified
MTIIAEHFDHVIGVDTHARTHTLVVLDAAGVKRKADTFPTSTPGLKRAQDWIGRNAPGRTLVAMEGTGSYGALFAERLEQAGFPVMETKPPKRQSRRHGKSDIIDAELAARFALASPSGSSAAPRRNSGDRAALQVLLTGRRHRTRERTATVNMLTALLRTHDLGIDARTPLTPGTIAAVAGWHARRTDTPAAVTIRTEATDLARRIRALDTELSRNLAGLTGHVDAIAPALLEEKGIGPVSAAQLIASWSHHGRIRSEAAFARLAGAAPIPASSGNSARYRLHRGGDRHLNHALWTIAFSRTITDEATRDYVARRTAEGKTRKEIIRCLKRYIARATFRKLQNMP

SEQ ID NO: 368656 - protein, 425 aa, unidentified
MNNVEKKQLAYGDVLVVGIDIAKKVHWARVLGPMGVDVIMPFKFHNTREGFIRLESKINEARNKAGIQRVIVGMEPTGHYWKPLAYYLKEREYSVVIVNPHHVKKSKELVDNSQTKSDRKDAGIIADLVKSGRFLSCLLPTGIYAELRNLSTARIQARKLFNGALTQLQAILDEFFPEYTQVFKNVLGKASTWVLRHYPFPKNILSLTEKELTIKLKQASNNRVGLKRAKQLQNVAKESIGIKEGLEGAHLKLMTIMDRLEYAASEISKIEAALERTLEKTGLAKYLLSIPGIGVITAAWFLAEVGDLSKFDDWRQIRKLAGLNLVENSSGMRIGSKKISKRGRPGLRNVLYLASLVLVAKNAEFKALYNYFKTRAENPLKKKQALIAISMKLIRVIFALVKNRTLYDPAKVFGEYRAAQLQQAA

SEQ ID NO: 368657 - protein, 357 aa, unidentified
MKIIGVDLHTRQQSIAMLDDQTGELVEKELQHEGDQVRAFYSSLGKPVLVGLEATGSMHWFLRLLEELAIEFRVGHPAKIRAAEPRKQKNDRRDARLLLTLLAEKRFPAIWMPSREQHDLQILLRHRDQFVRIRTRVQLSLQALALSHGLRRGHSLWTRTGQHTLRALPLAPHASEQRDTLLALCPQLQGPINELDREVEQEAQQRPQARRLMTHPGVGPITALATEVFLGDPRRFADGKCVASYVGMIPSERSSGRRQRFGRLSKQGNSLLRFLWGEAAIHAVRRDPELRRFYSRKLVQKGMGKARMAAARKLGIRLWIMLREEIDYTEFCRRGPLRRPDSGVVRAGMPAGDSGLN

SEQ ID NO: 368658 - protein, 419 aa, unidentified
MDEKSLVWCMEFSAVGKPENHMTDIGRVCEWANFWSGPLNAPSARIGDCRVQANQERNGGEIAMAVYVGIDVHKRYCQAALMSEQGQITHQLRFDNSQQGAASLIDLARSVDPHIKAVVEPSANFWIRIYDKLQDEGVEVKLSNPLRTKAIAEARIKTDRIDAKTLAQLLRGDLVAESYVPSRKNRERRALIRHRASLMRMRVDIKNRIHAVLDKHELTHNYTDLFGKQGLEWLHSLQLSTPDHEILQSSLQVVETLSEQIRSMDIHIAKDATNEEKAKLLMTMPGVDYYAAMVLLSEIGDVHRFSSDEKLVSWVGLAPQVHQSGDSNWTGHITRKGSKRARWILSQCAQSARQHDPRMREFYERIERKHGSQKAIVAVARKMLAIMYVMLIRNEPYRGENPELTDRKHKRLDMLVDSA

SEQ ID NO: 368659 - protein, 429 aa, unidentified
MQESSSSAPAEGVAAYVGIDWADENHDVILRPASDPTKVEYRRIAHQPDALMEWLAELQQRFAGKGKILVALEQSRGALIYHLMGYEFLELYPINPSQLASFRETFSPGGAKDDRPDAELICELLYCHRDRLKAWKPDDELTRKLAFLNEGRRKAVDQRTQLANEMKSELKVYFPLALQVLDNDCSTALAADLLLQWPTLDSLQKQSAHKLRKFFYAHNCRQEQKLLERLQLIKAAQPLTRDLAVIEPAALRVQLLAQQLKSLLPYIARYEKLIAELFDAHPDSFLFRDLPGAGAAMGPRLLTAFGTDRGRFEHSMEISSLSGIGPVRRASGKKSGKHATVHFRNACPKFLRQSFHEFAACSIRYCSWAQACYQTQRNRGKGHHAAVRAVAFKWIRILFACWQQRVPYDPQRYQQALQTRGSAYAKTTA

SEQ ID NO: 368660 - protein, 341 aa, unidentified
MTSTKYIGMDVHTESISIAVRNSLGKLVMECVIETKASTIVQFIDGLRGDLRVTFEEGTWAAWLYDLLKPHVTEVLVCNTRKNASRDSSKSDRIDARKLSEQLYMNNIKSVYHGEHGLRTLKELARSYLTISKDLTRVMNRLKALYRSWGIPCAGKEVYAPRHRAEWLAKISEAGVRRRAEHYYQQLDVLRPLHQEARRDLLLEAKKHKPWKLLRLIPGIGPIRAAIVIAVMQTPHRFRTKRHLWTYSGLALETYDSAQYRVAEGQLQRSKKPATVRGLNKDYNHDLKDIFKGAAMRGEEAHDGPPDLGKKDCRDHADRVEEGGTFRRQLFETTSSLSASG

SEQ ID NO: 368661 - protein, 374 aa, unidentified
MTTIGASETSSHTVYAAIELSKKTWVLGVATPERDRPSIHRIAGGDLRELVARVRAAAKGGRRILICYEAGYDGFWVARSLARENIECRVLDPASIQVNRRARRVKTDRIDVLALLRALIAIDRGERHVCAVVRVPSVEEEDARRPHRERQRLVRERTGHINRIKGLLFAQGVRGIEPKRRSTRIDFSALTTAEGHPLPNRLRRELEREYARLDLIQQQIREVEKERDAADAQEPAVERKREMLIALQGIGGAGAAILAREVFSRAFGNRRQLGSYLGLTPSAYDSGSTTRCQGISKAGNSWARRVLIEIAWLWRKYQPESPLSRWYAAKTREQSPRIRRIMLIALARKLAITLWRYVETGVVPQGAIMASKAA

SEQ ID NO: 368662 - protein, 331 aa, unidentified
MTCITGIDVSKKFLDCAFRRDPGPAKAKRRRFMNNSGSYDSLLAWTETLVGRGCQDIIFVVEPTNIYHELVVAFLFEAGAKVYLVNPARVRKFAEGIGILSKNDVIDADLLTHYGLMSKKLIPYTPLPRDIATLKSLLGRLDTLERGLRREQNRQEKVGKTSVFHKLEEQSIQRFVKHHEVETKRFKKFIRETVEQSDLLQRDYELLTTIPGVGEKTAWTMLVILKSRPFNSAQEVASFIGLNPIEKRSGTTEYRRPRLSKAGNSYFRQSLFYPAMVATSKNPDIKVQYERLLGNGKSKMCAIGAAMRKLVHICYGVVKNQEAYTVQSAIE

SEQ ID NO: 368663 - protein, 367 aa, unidentified
MAKRSTTVGLDVHKETIDVVVAEPGAQGEVRHFGTIGGDLRAVDRMVKQLQGGGRRLQFVYEAGPCGFHLYRHLQAQGLECTVVSPSMTPKRSGDRIKTDRRDAEALARLHRAGELRGIYIPGPDDEAFRDLVRAREDAVTSQSRARHRLKALLLRHGYRYEGRAAWTFRYRQWLSNLKFPTAAQQIAFQEYIDTIGEAERRVERLTEQIRVLLPEWKRAPVAAALQALRGVSMVTAVTLVAEIGDITRFSNPRELMAYLGLVPMEYSSGPKTRRGAITKAGNGHVRRVLAEAAWAYRGQARVGQALMWRQNGLPRPIIDIAWKAQLRLTGRFRRLAARGKSLPKVATAVARELTGFVWDIARHAAA

SEQ ID NO: 368664 - protein, 365 aa, unidentified
MDQGITFIGLDVHKRSIVVAGRQPGSGVIEERVPHEVPAVKRWAQRWKRRSGGQLLCAYEAGACGYALQRQLEALGVPCQVVAPSLVPRKPGERIKTDRRDARKLAEYLEGGLLTEVRPPTPSEEAARDLCRAREDAKQDRMRCRHRLSKFLLRRGRSYPAGRRSWTLAHRAWLKQQSFEDLSEQAVFDDYRLAVEQVDARIAALDRQIERLAQEPAYRAAVGALRCYRGIDTHTALGLVTELHGIERFDRPSGLMAFVGLVPSEASSGDRQRRGAITKAGNGHARKLLIEAAWHARHKPAIPVALRQRRQGQPPEVIAMADVAQNRLHRRYWRLVQRGKPTTVAATAVARELAGFVWAALRAVA

SEQ ID NO: 368665 - protein, 412 aa, unidentified
MEQIRDRVAGLDVHRDTVVACCQLRERDGSVTVRKKRFATTRKGLCELADYLMTAGVQTVAMEATGVYWKPPYYALEGLFDELWLCNAQHVKNVPGRKTDLSDAEWLADVAAHGMVRPSFVPPPAIRELRELTRYRKTQVTARGIEIQRLEKVLQDAGIKLTSVASTVWSVSSREMIEALIAGERDPVVLAQLAKRRMRSKIPELEEALDGHFGAHHGLVCRQIIDHIEFLDRCIASITEEITLRLVPFERAVTVMCSVPGISRTTAEVIIAETGADMSRFPTPGHLCAWAGLAPGSYESAGKHRPASTRQGAPWLRRTLVEAARAAARTKGTYFSAQYVRIAKRRGPNKAAVAVAHSMLEVVWHLLTTGALYEDPGADYFNRRHDPAIEAKRLASRIEGLGFEVNLTPRAA

SEQ ID NO: 368666 - protein, 324 aa, unidentified
MQGKEPSKQETPKITAGVDVSKAWLDAHILPVDEALRVPNTVTGIAKLKRWLVRRKIELVAVEATGRWHRLLCRSLYASKIPAAVTDPYRVRMFAKAQGIAAKTDRLDARVLAQFAMVMAPPVRPPAPQALEELQELVTARQSAVAEETTLKNQRHAAAGTFLKSQLLRRIARLKADIRAIERECRKRVDSDEQLARRFAILISIPSIGPVVAITLIACLCELGTLGHKQIGALAGLAPVANDSGQRHGVRTIWGGRALIRTMLYLAAVTASRCNADMKAFYGRLSLTKPPKVALLAIARKLVILANTLLANDRLWQPNASIRT

SEQ ID NO: 368667 - protein, 457 aa, unidentified
MPQKKRSRSTPDLPRVHPAAAAIDIGARIHVAAVGPDRDPEPVRTFNTFTNDLHRLADWFAHCGIKTVVMESTGVYWIPIFEILEQRGFEVMVVNARDAKHVPGRKTDVSDAQWLQRLHEYGLLRASFRPQAEMAALRAYLRQRERLVEYGAAHIQHMQKALTQMNLQLHHVVSDITGVTGLLIIRAIVAGERDPVVLASYRDPRCHSSVETVRQALVGNMREEHIFALTQALELYDVYQAKVIACDRQIEAILKRLKTSAPPPANKLCAVRQRGRQPNAPAFDARGALYAILGVDLTQIHGLGPYLALKLVGECGTNLAAWPSAKHFTSWLGLAPHNKISGGKVLSSKTRRTSNRAAALLRLAAVTVGRTDTALGAFYRRLSARVGKAKAITATARKIAVLFYNTLRHGMSYADPGAAYYEDRYRQRVLGNLQRRAKSLGFVLTQAPQDAAPVGVS

SEQ ID NO: 368668 - protein, 342 aa, unidentified
MTKVSTIGFDLAKNVFQVHGVDDAYQVVVRRQLRRANVLAFFAKLPPCLVGMEACASAHYWARELTELGHTVRLIPPAHVKPYVKRGRKNDEVDAAAICEAVTRPHMQFVPIKTEEQQAALMLHRARRLLVTQRTMLGNALRAHFAEYGTIAAQGQAGLGTLIVAALDAGDATLPQAAREALAMMAAQLRDAEAKIDALDREILACHRADADSRRVATIPGIGPLIASAMVAAIGDANRFKSGRQFAAWLGLVPMQNSSGGKERLGGITKMGDRYLRSLLVIGATGMLRRRRGETGTWLAGLLARKSAREVTIAMANKMARTVWALLAKGGVYRKPTAELAA

SEQ ID NO: 368669 - protein, 403 aa, unidentified
MDITVSDFMKGRYNLMIYVGIDIAKLNHFAAAISSDGEILIEPFKFSNNYDGFYLLLSHLAPLDQNSIIIGLESTAHYGDNLVRFLISKGFKVCVLNPIQTSFMRKNNVRKTKTDKVDTFVIAKTLMMQDSLRFMALEDLDYIELKELGRFRQKLVKQRTRLKIQLTSYVDQAFPELQYFFKSGLHQNSVYAVLKEAPTPNAIASMHLTHLAHTLEVASHGHFGKDKARELRVLTQKSVGVDDSSLSIQITHTIEQIELLDSQLFSTELEMANLVTCLHSVIMTIPGIGVVNGGMILGEIGDIHRFSNPKKLLAFAGLDPTVYQSGNFQAHRTRMSKRGSKMLRYALMNAAHNVVKNNATFKAYYDAKRAEGRTHYNALGRCAGKLVRVIWKMLTDEVAFNLE

SEQ ID NO: 368670 - protein, 464 aa, unidentified
MTKRTKARTKKPTATTATSLPTVQAMGAGIDVGSSQHWVCGPAPGDGGKPMIRSFGTTTEDLEALVDWLAAQGTKAAAMESTYVYWIPLYELLEARGIEPVLVNARQLHNVPGRKTDVSDCQWIQLLHSCGLLRGSFRPSEAIAQLRALQRQMANLIAERSRCVQWMQKELDQMNVQVHRAVTDLTGKTGMAIVRDIVAGERDPARLAMHRDGRCHKSTEEIVKYLTGHWREDHLFNLASALRIYDVLEEQIAAYDARLMKELQALQPPERQDQPVPPHPNAGKERAIKARGDQPIRLALWRFAGVDLTRVDGISAGAAQVVLTEVGSSVASFSTEDHFVSWLRLCPRTPISGGKPLKKRRNGLGANRIAGVLRMAATSLQRSKTALGASFRRIARYKGGAVAVFATARKLAQLIYRMLRYGQDYVDIGEKAYEAQFEARRLSSLKEAAHGLGYTLVQEPLAEG

SEQ ID NO: 368671 - protein, 356 aa, unidentified
MTNSSKYIGMDVHKESISIAVRNTAGKIVMESVIETKTSMILEFVEGLRGDVHVTFEEGTWSAWLHDLLKPHVTRRVVCDPRRNALLQEGNQNDRVDARKLAELLQNNQLRSVYHGDHGLRALKELVRSYLTITKDLSRVMTRVKAIYRSWAIPCSGKQVYSSRRRAEWLGKIQEPGVRRRAEFYYQQLDALRALRQEVRRDLLAESKKHKIWKRLCQIPSIGPIRAAMLLGILQTAHRFRTKRQLWTYSGLGIEVHSSADHHTVKGQLERKKKHIEIRGLNENCNHDLKNLFKGAAVVAATKPGPFEEFYAALLAKGMRPEMARLTLARKIATIVLIVWKRGVCFDANHLKPQTA

SEQ ID NO: 368672 - protein, 430 aa, unidentified
MGFIVPTDMHPERDDQPMPYEWFVGIDWGSQQHQVCVLDGERRRVGERAVDHDGASLAQLAAWLWTVSAGQPQRVAVAIEVPRGAIVEGLLERGFHVFAINPKQLDRFRDRHSVAGAKDDRRDAFVLADSVRTDQPSFRRLHLDEPQLLRLRELSRAEETLLEDFRRSANRFRDQLHRFYPQMLELCSAADEPWLWDLIDVAPTPAHVALLSEEQVQRVLQAHRIRRVKAKEVLTCLQALALPVAPGAAEAAQAHCQFLLPCLRVLAEQLQACSQQVSALLHTLAEEPGDGEGPSDVAIVLSLPGVGRKITAWLFAEAAQPLAERDYQVLRTHGGVAPVTKQSGKRRQVVMRHGCNPRLRHALYHMARVAMQRDAHFSGVYAALRAKGQRHGQALRNIGGRLLRILMAMLRHRTCYDASRMRREPVVQMG

SEQ ID NO: 368673 - protein, 337 aa, unidentified
MKRYLGVDLHRTQFVVCTRWENGEQEIRQWRIGELPKFVEQLRNEDQIAVEAMGTTARFYDAVAGRVTRVVVVNPHQFKVISESVKKTDRKDAQALALYLEKDLLPEVRMKPKQNRELMHLAETRDLLVKQRSALKGKINNLLAMQGIELKREALSSKIALARVLALPVSGMVQLELRILVEQVRALSESIAELDERLEEEGQQLPGYENLTSIKGIGALSATVLLTVIGKISDFADENKLAAYLGLVPKIANSNESERSGRITKQGNKLARTALVQCGLVAKRYSPYLSRFYERIKHRRGGGKAKIALARKLVKIVYDTLKNQWVFEDFPSFTLAA

SEQ ID NO: 368674 - protein, 368 aa, unidentified
MTTNTLKAAPAASAKELKNEKPAKAKRMLVGVDTHLRGYQAARKIDSGVIGVVENFRSEEELRLYVAKQTTRAEQVVVVYEAGPLGYTLYRKLTAAGVLCYVCAPDSGEQRKKRRKNNKIDARSLTSKLFNYLNGDQNALQLVRVPTEAQEQLRMASRQHDQLVEERKRLGAKGNAMLLSQGFGSWSNWWRPKAWADLSSKLPPWLLERLEIWVDVLKVLDEKIAQAKAAFARSCNGPRPKGVGALSQMQLQSEVLDWSLYSNRRKIACLAGMVPSEWSTGDKERRGSITKVGVPALRRIIVEMVWRIIFFQPQYKPVQKWLEVLRGPNPALKKKAVIAIGRQLMVDLWRLQTGRVTAQELNLIMVTD

SEQ ID NO: 368675 - protein, 456 aa, unidentified
MNPKRSKPKNDRTMPMIHPNAAAIDIGATMHMAAVRADRTPEPIRSFGTFTTDLHRLVDWFTECGVETVVMESTSVYWIPIFELLDARGFAVFVVNARDAKHVPGRKTDVSDAQWLQRLHSYGLLRASFRPKGQIAELRAYVRQRERLLEYAASHIQHMQKALTEMNLQLHHVVADVTGATGLRIIRAILAGERDSKVLACLRDYRCHSSAEAIEKALTGNYRAEHLFALELALALYNIYQDKASACDARIEAVLKELSISRGRDACPLPSPRRRLHGKANGPDFDVRAALFKLLGKDLTQIDGLGSYLSLRLIAECGDDLSAWPSAKHFTSWLCLAPSNKISGGKVLSSRTRSGSRASALLRLAAVTVGRTDTALGAFYRRLSARIGKAKAITATARKIAVLFYNAVRHGMEYVDPGSSYYETRYRTRVVENLHRRAKAFGFVLLPLESKAGAVS

SEQ ID NO: 368676 - protein, 464 aa, unidentified
MTKKGKKSTPSPENMPILHPHAAGIDVGAEEHWVGVPADRDAQPVQKLSAFTCDLHRLADWLTACRITTVVMESTGVYWIPLFPILEARGFEVALVNARHVKHVPGRPKTDRFDCRWLQKLHTYGLLAPSLRPPEDICQLRSLLRHRDHLLRMTVKHIQHMPKSLDQMHLHLPHGMSDVTGVTGMRILRAIVAGERDPQTLAQYRDYRMQSNEETIAKALEGDDRAEQVFTLTQSLALYDFTQQHIAACDQDIERVLATFDSLVDPAEHPLPPPTTAPRRPQRHEPAFALRTHLYRSTGVDLTQVPGLQAPTIHIVLAEVGLNRHTWPTDKHLASWLGLCPDHQISGGKVLSTGSRRVQNRASRALRMAAQSLRTSPSYLGAFFRRMRSTLGPAKATTATAHTLAKILYHMLKEKAPYRARSAEDYLPKDHERQLRQLRKQAQYVGFDVVPQTNHESPRHCCDD

SEQ ID NO: 368677 - protein, 344 aa, unidentified
MDYFAGLDVSVKETSVCIVDDTGKIVRELKVASEPEALLAVLTNPAYRFKRIGLEAGPLSQWLYSALAEADLPVVCVETRHMQAILKAQINKTDRNDARGIAQMMRVGVYRPVHVKTLRSQKLRMLLTHRKLLQSKAIAIENDLRGTLRNFGLKVGIVGTAKFEVRIKELVENLPDLAILVEPLLIVRRVLREQIVVLHRRLLTIVRDDGVCRRLMTTPGVGPVVALTYRATVDVPARFRKSKSVGAVFGLTCSKYQSGEIDRSGRISRCGDEMMRVMLYEAAQSMLRSKKWSWLKAWAMQIARRRGMKKAIVALARRLAVIMHRIWVDGTEFRWTQEQAAAAA

SEQ ID NO: 368678 - protein, 344 aa, unidentified
MSKKTTLKQCLGIDVSMKKIDCCLSLLTEELKVKVVASRSFDNTQKGFAQLEEWLSKKKETALVLYINMEATGTYHEEAAYFLSDLGHSLSIIQPLKGKQYAKSLNEKNKTDKIDALMLARMGLERQLTLWNRPDEKMRILKRLSRERMSLIRDRNALTNQLHALNHSFQAFADSKQRLEDRVLLINKQLSEIESQMRELASGDAVLWKKICHAITIPGINFVTAITVIAETDGFANMSGRRQLVSYVGLDVIMKESGTLSWRPHISKRGNAHIRAALYMAAVASIIHNKNLRSYFNQLKDKGKPGKTGIVALERKLLVLIFTLYKNEQDYIVDYDNGVAAESK

SEQ ID NO: 368679 - protein, 408 aa, unidentified
MKLFVGIDVSSEKLDTCFLTSEDQILLEVSLPNNVVGASKIKEHISHFTDLIRYDRIIIGMEATSIYSFHPSTFLSEDSELKSLGVEVVVMNPKAIHRFKGLFEEDKTDKIDAYRIADFLRFDRFNTSLIKEEQYMALQRLTRSRYQLIGQLTEMKQHFLENIYYKCNTLTKEIDTSVFGTTMMDLVTDSMTLEDIANMSLEDLAAILQEKGRGRFSNPEKLAKSLSKAIRDSYRLGKVMQNSVDVILASYAMMIKTIKKQIKELDKAIQQLFEILPESKSLLSIPGIGPVYAAGIIAEIGQIQRFENESKIAKYAGLYWKRKQSGNFESERTTMTKTGNHYLRYYLIEAANSLMRNEPVYREYYLKKYHEVPKHQHKRALVLTARKFVRMVDVLLRNHQLYAPERSV

SEQ ID NO: 368680 - protein, 391 aa, unidentified
MAQVNDLSRSLTAFDPISTLVVVVEMSKARWLVSGAVPGVERQPLKKLEPDATALLRLIERWRSEAMRAGRPINRIALAYEAGRDGFWLARWLIARGIEAHVIHSASVAVSRERKRAKTDRLDAAMLMRVFLGWLRGERGHCGMVVIPTMEEEAERRPSRERENLVNECSRITNRMKSALARLGIRGFKPHLRKAPERLVGLRTAEGTGLPANVIEEFRRDMARLALVREQIRSIEKTRAERLERAPDTGSHAMVRLLARVIGIGIETADMLVREILSRKLRDRRAVARYAGLTGSPDESGLKSREKGLAKAGNARVRRGLIQLAWRFLMFQKDSALARWYRTRTEGPSGARKTTMIVALARKLLIALWRLVTTGEIPDGVELWPAARATL

SEQ ID NO: 368681 - protein, 394 aa, unidentified
MKLVGIDVGKNSHHFCVMDKETGEFNVAPSSFSNNKEGFDFLINSLKPYSKKSILIGMEDTGHYHVALLKFLLSNGYTVALINPKTTDLTRKMEGGITKNDKLDTITICDVLDTPERKKQYRITKVDRFDLYEQRQLTRHHHNLKEELNVYCNRLQKSIDLVFPEFNTLFSSKYSIVYMNLLKTFGSAEAIASTDIRTIRKCFEIKGRGNRISLTPEKLKECAKNSIGISSEVETIQIKHLISQITLIKEQIAEIDKKIEEFSITNNSPILSIPGISHFSGTSILAELGDIGNYSKPSQIIKFAGVAPYHYESSQYNAQHTGITKKGSKYLRKTLYQIILTVINNNPVFKKYYLLKISQGKGHRCAQGHCIRKLLRIIYHLLETGQSFDPALLR

SEQ ID NO: 368682 - protein, 376 aa, unidentified
MNSVGIDVSKGKSMVSVTRPFGKVVMKPIEVRHTTSELKSLADYLKSLDGETRVIMEHTGRYYEPVAQMLHDSGLFVSAINPKLIKDYGNNSLRKLKTDKADSMKIARYGLDNWIRLRQHTSMDTIRYQLKTINRQYGLYTRNKTALKNNLISLLDQIFPGANALFDSRARSDGSQKWVDFVTSFWHVDCVRTMSQNAFAERYHKWCERHGYNFSALKAAEIHVEAKDLIAMLPKDALTKLLIQEAIIQLNAASRTVELLRAEMKHLAEQLPEYPVVMSMYGVGDSLGPQLMAEIGDVIRFAHKGSLTAFAGVDPGASQSGTYEAKSTRASKHGSPELRKTLFLVMDVLIREHRLMILCSALWERNVPRASPTSST

SEQ ID NO: 368683 - protein, 463 aa, unidentified
MARKARRASQSHQLPAPLQHVHLNAAGIDVGAESHYVAVPVDRDPQPVRSFSAFTHDLYRIADWLKACGVDTVAMESTGVYWIPLYEVLVRRGFKVYLVSPQHLKRVPGRKTDVLDCQWLQELHTYGLLAGAFRPEDHEVVLRSYMRQRAMLVSYAAQHIQHMQKALVQMNVLVHHAVDDITGATGMRIIRAIIAGERDPNTLAALRDPGCKKDAATIAQALEGNWREEHLFALRQAVELFDSYQEKIHACDQQMLAHLRSFEDRSQSGRGAPPTPGEGRPRKNELTFDAATEAYRITGVDLTKVTGIKGHTAFKLLSEIGTDVVHWPTAQHFVSWLTLAPRNRISGGKRLPHHWAPANAHRAAQALRVAAYSLHNSHSYLGAFYRRMAARLGKVKAIQATARKLAILIYYALKYGNDYVERGERYYDATYRNRVLKNLTRRAKDLGYRLVKEDPNTPAPQPA

SEQ ID NO: 368684 - protein, 403 aa, unidentified
MFCGWDWGSTVHGVCLIDDQGAVVRRWMVQHTEDELAAVFDELAQLVEDGDVGQVPIAIERGEGLVVGLIARAGHPVWMVEPAAFKAARPRWGSAGAKSDLGDAFMLADYARTDGHRLRRIEPVEHATRELAALVRARAALVEARTAASNQLWAILAEHWPGAAVVFQKLTSQIALAFLTDYPTPQAAALLGEGRMGQFCRRHSYRGGKTPAELVRRLRAAPASANPIAPAILTAIVRGSTAQIRLLNTEITRLEDDIAEALAVHPKAPLLQTLPRVATVSLAALIAEIGPLLERCQNPEQVAALCGAAPVTRASGKSRIVGFRYTANRSARVAITSFADNSRHSSAWAGDCYRRARSRGARHPHAVRILARGWVRVIWTCWTTNTPYDPARHRGEQQLTTAT

SEQ ID NO: 368685 - protein, 412 aa, unidentified
MTLMIGVDPHKGSHTAVAVDETEQALAELKVRSGPAQLEQLLSWAQRFPERSWAVENATGLGYLLAQQLVAGGERVIDVQPQLAARVRLLDSKSVNKNDPHDARSVAIAALRSPTPVEVRPEDHSAVAKLWSKRQRDLARARNKVACRLHSLLCELVAGGVPDEIYAAKAAKLLASISPDGAVAAARVELAEDLLEDLRRLDAQIKESRRRLEAVVTASRTSTTKIFGVGPVVAATAIGITGDVTRFPNRDHFASFNGTAPIDVSSGGKKVYRLSRRGSRQLNHAIHMAAVTQIRHRHSEGRAYYDRKVAEGKSHKEALRCLKRRVSDALYACMVEDAKRDDRLVEKGPGGQPGNVSVASAAGSHPGTPALRLSHSRTRRQAITARRSSPAQKTRARARSVTTTRKATRSGS

SEQ ID NO: 368686 - protein, 402 aa, unidentified
MNAVGIDVSKSKSVVAIMRPFGEIVSTPFEIKHTASDIHSLIELINSVEGESRIVMEHTGRYYEVLAHQLLEANLFVSAINPKLIKDFDNDSLRKVKSDKADAVKIARYTLDKWQNLKQYNVMDELRNQLKTMNRQFGFYIKHKTAMKNNLIGILDQTYPGVNTYFDSPARSDGSQKWVDFASTYWHVDCVRKMSLNAFIDHYQNWCKRKKYNFSQSKAEEIYGKAKELVPVLPKDAITKLIIKQAVDQLNSASTTVESLRTLMNETASKLPEYPVVMAMKGVGTSLGPQLIAEIGDVSRFTHKSAITAFAGVDPGVNESGTYEQKSVPTSKRGSADLRKTLFQVMDVLIKTHPQDDPVYQFLDKKRAQGKPYYVYMTAGANKFLRIYYGRVKEYLSSLPES

SEQ ID NO: 368687 - protein, 351 aa, unidentified
MKLEPTAQPKLYIGIDIHKRSWKVHCATDLFGGKSFAMPPKPEVLHDYVAKHFPGHQVTTAYEAGCCGYYAHRSFEIYGWTSLVVNPADIHRKGKERFTKTDKIDAQLISRELKDGRLDGIHVPDMEREQLRSLFRRRNDLVKDYRRVKSFIKMQLLYFGIAIPEEFDNDHWSHKFRYWVDAITFKYPPARETLDSRMRSFRFIDQELRDVSTKMRAYCRKHYKKDYYLLKSIPGIGGIVACGIICELGDLRRFNSIKHLAGYVGLAPGIHQSGDNQKSTGITMRTHRLMRSYFIEASWQAIRTDPIMQTYYRKHLGKNVKSIIIKVARKLLSRTLAVIKTETPYAIGVIE

SEQ ID NO: 368688 - protein, 364 aa, unidentified
MYDSTTTVTVGLDVHARSIRFAAVRADELVEERTLPYDEEAVERLLRRWPGARCCYEAGPTGFGLYRHLVERGIDCAVVAPGLVPQRPGDRVKTDPRDARKLARLLAGGLLEPIHVPSPQLEAARDLVRAREDARLDRMRDRHRLSKFCLRHGRLLPTSAWTVTRRKWLGEQRFEYVAGQITFDSYLHAVDLVDRRIEALERAIRETAEQGPWRELVARLRCLRGIDTLTSLALVAEIGDFDRFRRAEELMAFVGLVPSEHSSGEHRRQGSITKVGNSHVRRLLVEAAWHARRRPRVGYELARRHRGQDAVVIERAWRCQQRLYQRWQRMAGRGKPHQKIVVACARELAGFVWAIATDQPLRTI

SEQ ID NO: 368689 - protein, 343 aa, unidentified
MTVMIGVDPHKATHTALVIDGREVELAKLKVRASKRQSLQLLAWAAEFEDRVWAIESAGGLGDLLAQQLVAAGETVWDVPATLAARVRVLGSGRSDKNDPNDARSVAVAALRAPSLTGVRPEDHVSVLRMLAKRNLDLARWRNKVCCRLHALVAELVPGGIATEVVVAQASQLLDGLRPDGASAAERHRMALELVEDLVHIDTQIRESRRHITTAVAASGTTLTDIFGVGPVIAAMLIGYTGDPCRFDSQHRYAAYNGTAPIEFSSAGRKTHRLSRRGNRTLNHAIHMAAVTQIRFAHSPGRGYYERKLAEGKTPKEALRALKRRISDAIYRQLITDAHRAGR

SEQ ID NO: 368690 - protein, 412 aa, unidentified
MKQIRDKVGGLDVHRDSVVACTRVKASTGEFEIEKRSFPTTQQGLAGLSAFLVEADVTTVAMEATGVYWKPVYYALEGLFPELWLCNAQHVKNVPGRKTDLSDAEWLADVAAHGMVRPSLVPPPEIRELRDLTRYRKTQVDARGKEIQRLEKVLQDAGIKLTSVASGVWSKSSREMIEAMIAGERDPAVLAEMAKGKMRSKTERLEEALEGNFTSHHAFMCRQIIDHLDHLDAAIAAVTNQITTVIVPFEGAVTLLTSIPGVSAVTAQVIVAETGGDMSKFPTPGHLCAWAGVAPASNESAGKRKPAGTRRGSPWLRRTLIEAARAAARTKGSYYSALYSRIARRRGPNKAAVAVAHSILETSWHLLTTGALYVDPGADFFDRRNDPALQVKRLQARIEALGFAVTLTNTAA

SEQ ID NO: 368691 - protein, 477 aa, unidentified
MQQPIEVQVDEHEPIVERVVGIDVAKASGMVCLRVPHETIPGRRVTKVWSVKATTRALVELGDHLRCQGVQRVVLESTSDYWRPFYYLLEAAGLTVWLVNAAQAKNVPGRPKTDKIDAVWLAKLAERSMVSPSLVPTEPMRQVRDLARARFDLVADRARVKQRIEKLLEDALIKISSVLTDIHGVSGRAMIEALIAGQRSPKALAELAKGRARARSAALQEALDGRFTDHHARLARLLLDQLDELTARIDQVTALLEAAITALTPPQADTDTPTGDSGGDSGGDSGDSGDSGDSGDSGDSGDGAPAQPAPGRYARAVERLCAIPGGGPDSVRAVIGEIGLDMSVFGTHQRLCSWAKVAPRTVQSGRKTGRARTGRGNPYLKSALAQMAMGAAKTDTFLGERYRRLIKRMPKAKALVALQRSILVIIFHLLADPTAEFTDLGSDFYQRRIDRARRTTHLLRQLHALGYQVQLTETEAA

SEQ ID NO: 368692 - protein, 403 aa, unidentified
MARTAQTDATTEARPTLYVALELSKNTWKLGFTTSRTKRARIRDVTARDLTGLLAEIGAARQRAGLPEDAPVMSCYEAGRDGFWIHRFLEANGIMNLVVDAASIEVNRRKRQAKTDRIDAQKLAGLLVRESEGEEALRIVRVPPVEAEDERLLPRQLSMFKNKRTQTSNQIRARLFQHGVDLDPRKGSFARQEFLEKVERARQWDGSRLPPELCTTVRMLWDQYVLLTRQIKDLEQRQRQMLREARRGSAEATAAQKKAARLSQLCGVGDVGGYTLATEFFGWREFSNRGEVGALAGLTGTPFQSGGPGKDQGISKAGNPRVRTLMVELAWLWLRWQPSSRTTLWFHEHVGKAGSRGKRKAIVAVSRKLLVEFWHYVEHGVIPEGTLLKSDCATGPSDAQAAA

SEQ ID NO: 368693 - protein, 444 aa, unidentified
MKRRCIGLDVHRYFAQVAIWQDGLVRQAGRIAATPEALRLFADSLAPSDEVALEATGNTHAIVRLLEGRVARVVVSNPQKTRAIAEAKVKTDKVDAAILAQLLAADYLPAVWVADEDTQARRRQVARRAHLVRQRTRLKNQIQAILHRNLVPRCPAADLFGHKGRRWLAGQELPADERRAAEALLRQLDFHAHELGLIDAELARVALGCEDTRRLMTIPGVDVTVAMSITAAVGDFSRFGTPNKLVRYVGLNPRVKQSGGQPAAHGRITKQGRAHARGMLVEAAWVAVKTPGPLRAFFERVRARRGMQIAVVATARKLAVLCWHMITRGEDYAFARPSLTAKKLRALELKAGLPARRGRKGTAAAYSLKDVRAREKALAEQAERSYRQLVADWQAKAPAAKRMGAAAANEARLSRPSDGATAARQDSAPDPALRSGVDHAHHEG

SEQ ID NO: 368694 - protein, 389 aa, unidentified
MEARTVNTLPSAAAHDGVRCLLAIELSKKSWVAAVNTPLSDKISLYKLKPCNWEQLLELIERIRKRVAQELKKPVEIISCYEAGYDGFWLHRLLEAQGVRNHVIDAASLQVDRRARRAKTDGIDVEKLLRSLMAYLRGEPKVWSVVRVPTVIEEDDRRLHRERSRLINERIQHVNRIKGLLAIHGIYDYEPMRPESIQRLERLHTAAGHSLPPHLKAEILRELQRLELVLRMIETIEAERDAIALAKSKSRHTSAKKIQHLVKLKSIGPEFATVLVGEVFYRTFDNRKQIGSYVGLTPSPFQSGSTSRDQGISRAGNAKARTTMIELAWLWLRHQPVSSLSVWFRERVGERKGRIKRIAIVAMARKLLIALWRYLETGLVPEGAALKSK

SEQ ID NO: 368695 - protein, 422 aa, unidentified
MHKERRWFVGIDWGSQEHVVSLCDDVGKRIGQRKFAHGGTGLTDMIAWLLKESGGKPGEIHVAIETPHGPIVEVLLERSCNVYSINPKQLDRFRDRFTVAGAKDDSRDADVLADSLRTDMRAFRKLSSVDPTIVELREWSRIDEELKAEHVRLTNRLKHQLWRYYPQIYELANDVGAGWFLDLLEALPTPEKAAKTREKTVARILKQYRIRRFDAAHVLGELRKPALTVAPGTVEAATAGIRILIARLRLINSQLVDAEQQLDRLCKKIVGPVAGEEGENTPGQKNELRDAAILDSTPGIGRTVLASLLTEASDALQRRDYHALRALCGTAPVTKRSGKSCLVSRRRACNRRLRNAVHYWAHNAVQHDATSRAKYEALRAKGHGHARALRSVADRLLNVVCAMLRSGTSFDSSLASKKQAGA

SEQ ID NO: 368696 - protein, 349 aa, unidentified
MSIVAYCYDFVIGVDTHARNHALAMVACPTGEQVTTAQFPASGAGMARAIAWVARHTRDRVLWSIEGAGSYGAQLAAMVSAGGHQVVEAPRMNPRTRRGIGKSDELDALAIARATLPVALDQLRHLRADTGPRAALRVLIGARDQMSTERTRTVNALTALVRTIALGVGARRALSAAQITQITRWHARNEPAHLAVARTEAVRLAKRVGALDRELATNLHQITQVIAATPAAPLLAHTGIGPVTAAVVLLAWSHPGRVRNDAAFAALAGVNPIPASSGNTTRHRLNRGGDRRLNQALHMATISRMTHDPAIRAYVERRRTEGKTTKEIRRCLKRYLARNLYRELNTLHT

SEQ ID NO: 368697 - protein, 457 aa, unidentified
MAKTKKKGSQKRKHRKLDRSLPVMRPNAGGIDIGATEIFVAVPADRDTESVRSFPTFTEDLHALADWLQQCRVDTVAMESTGVYWIPLFQILEARNIEVHLVNAQHVHHVPGRKSDVLDCQWLQYLHSVGLLRASFRPEQSVCEIRSLMRHRENLVQMACVHVQHMHKSLDQMNLQIHHVISDITGVTGLAIVDAIVAGITDPKELAKLRDHRIKASIETVKKSLVGDYRPEHIFTLKQSVTAYRQYLQLIADCDREIQQRVQTFQTKDNHTSAAAADSSSTTTPTPSSFDLRSHLERIFGVDLTLIPGFDTLRVQTIFSELGADLSSKFPSDDSFGSWLNLCPKDGTSAGRRIRGPKMKTKNRVTQAFRMAAQCLYNNKSYLGDYYRSQRARYGGLKAIKNAAHKLARIFFHLVTTRQPYDETVFAKLEARNQKRRLQNLQTRARQMGYTLVEAHA

SEQ ID NO: 368698 - protein, 316 aa, unidentified
MSDALYVGIDVAKDSFDVASNPAGLKLSLPQDPKGRQRLLDSLQVHAVALIVLEAAGGYERSLVAELLQAGYNVVIANPRQVRDFARGIGKLAKTDRIDAEVLAHFGRMVQPKPRSQPSQQTTNLAELVTRRRQLSDLSTQESNRLPMARHAKVRKSLQKIIRALEQQIIDLDKLIRDNIESDDGLRRKDDILQSFKGVGPGTSAMLLSHLPELGRLNRQEIAALAGLAPWDIKSGAWAGKSRIRGGRKEVRSLLYMAALSAIRSNQIIKKFYQRLTSQGKAFKLVITACMRKILVILNTLVRNNCLWSPHPAENA

SEQ ID NO: 368699 - protein, 429 aa, unidentified
MSETKSIELRVSVDVGYRRHSVAIGLPNGEVLEEFEIAHGPEGFQEFFSRIEKHRKEREYGVAVAMEGYNGYARPLDSLVRSRGYRLYNINNLKLARFKEIFPGAAKKDRIDARKGLELFQLSDHLPLAKEVLQEVRGTPKENEVLKRLTRRRRRLVNERVRVVNNLQADLQAVCPGLLEITSEASNQWFLNLLLSADSLSQLARLRKATLLKIPSVGRKYASLIQDWQKRAHFSEEVEWVSEMIQEDAKRCVELEEKIKTLETKITEVAKDSKIAKILLSIPGFGPVCTTELAGEVGTVERFSKEGSLALYLGMSTLDNSSGKYQGSKAPKHVNTRAKAAMMIALDRHRKYVPESQRYYEKKRAQGKKHNQAIRALGRHLCRIIYKMLKEERDYQLRSEKGDTQARVGSRSCVKTKIRRPKISPSRQK

SEQ ID NO: 368700 - protein, 313 aa, unidentified
MPVALSNPIVGVDVAKNELVIYQADSDLLEAIPNTKTSIKQWLKALLVPVSIAIEATNIYHLEFADLAYAAGCTIYMVGGYELKHYREGVKIRAKTDALDAKLLARYLKNEAEELHPWTPPSPLYRQLLSLFRRRAALVQARVGLVQSWSNEPLLKAAFAEQIKSMQRLETMIEKTINDQLKQAGLLGQLKRCLKVEGIGFLTGARLLTAFQRGEFSNADAFIAFLGMDLRVSKSGQKDGRRSLTKRGDPEARRLLHNAAMSASRTIAWKGFYEAQRARGFSTTQALVMLARKLARVVFALLKGQSEYQTKVS

SEQ ID NO: 368701 - protein, 357 aa, unidentified
MTSDKYVGLDVHQASTSIVVLDCNGKLICESVIRTRADAIRDFISGLSGTIHVTFEEGTQAAWLYEVIRRLVAELVVCDPRQNKVLAVGNKGDRIDAGKLAELLRAGLLKPVYHSNHDTKMLKQLTHNYDSLVSDTTRVMSRIKAVFRGQGIPCSGRDVYYKRNREQWMTRLAEPGLRTRAQFLFDELEPLKALRRGAKRVMLKEARRHQAFKILSEVPTLGPIRIAQIIAAVGAPHRFRTRRQFWAYCGFAVVTRSTDDYRFEENGPLRRSRPPATRGLNRNFNRRLKHAFKSAALQGAGKEPFKSYYQARVAAGMRPEMARLTLARKIANITLTLWKNGGQFNERKLSAQYDRAT

SEQ ID NO: 368702 - protein, 402 aa, unidentified
MFAGGGAILLHGVREMTYVVGIDVSSEKHDCCILGDDGTCDSFTFSNSSKGFQELLEKLPDPENTMIGMEATGVYGNNLVDFLRRKGFRTTTFNPLHIKRLASATTLRKTKTDKTDAKFIARSLAVLDAQPDRNILYHISELKSLSRLRFSLVNERSKVKNQLKAALVQIFPEYVSVFSDCFGATSLAILEKYTCPRKISGCRAASLAKLMLTVSKGRFGYDKAEQLIRLAKNTIGIKSEALNTMISFYVNQVKLFTQQISVLEEQMKSLLAEIDSPITTIPGIGPVLASMILSEIGDISRFSTSAQLLAFAGLEPSVSQSGKSINSTGKMVKRGSHYLRWAIIQVARNAGKYNSVFANYLEKKIKQGKHFNVAVSHLAKKIIRVIFAVLQKNIPFNPQFCS

SEQ ID NO: 368703 - protein, 430 aa, unidentified
MNPKKAIPRPELIVSLDRSDASVAVVLLHATNHERVEQTVSTAPEALAAWWQQVVSTHPEHDLIVAFEQPAPNLLAFFAPRQPAAIYALNPSATWAFRQSLTVSHARTDQSDALHQALFILHHRAELTAWQPLPAVVVVLDRLTQGRRKLVEQRIRLTNRLQAALKRYFPQALGLMHEDIWRPINLAFLRRWPTPAALQASRLTTIKSFYHRYSSRSAERWTERATLLQQFVPLAAPDADLTADELDVAVIVDQIEVLNRSIIRYEQEISRLFAPQEQAATLQALPGAGPTLAPRLWVALARYADHCDSGDQLAVAVGIAPITDQSGKAHRVYRRLRCDNHTRQTFVEWANGAYKRSIWAKRFMDQRKAQGHGFNASLRALAYKWIRILWKCWREKSPYDEVRYLTLLRAKGSPLVPPDWTPPALAAQPT

SEQ ID NO: 368704 - protein, 353 aa, unidentified
MKKIIIGIDVSKEKCDATAISVEKGIPEVSKLDYICIENRPCGFRKLLSWSRKLVKDTADEEILFICETTGAYDHSMCDYLYAKGMDIWREAALRIKWSSGVRKGKDDTADSLMIAEYAMRHMDKMQLYESPDKRISEIRAAFLYRRSLEQDKVSRLVRVRELEATAGKSKTNTSILRDVKKHIRNIEKSIRECEEMIRSLIGEDEALSRSYSHLDSVKGLGIVNITALIVYTNNFRSFRTSRQLASYWGVAAFRCKSGTSMDKRSNVGYLSNPMLKAYLTQAALHTIAVNGIFHEYYQRLIDAGKPRPVAFNNVKNKLLHLAMSLIRNDMDYEENHTHKWARRDTLQPRLTH

SEQ ID NO: 368705 - protein, 318 aa, unidentified
MMTNPPAKIHTALGLDVSQGSVTLYDSLTRQTLTIDNRRDALLEALAPFTDRELAICEATGGHEDVLLAALHALGIPAHRADAAKVKAFIRSYGKRAKTDPIDARWLAQYGLDRAEKLTRWQPPEACQRQIEALVARRLDLVAMRRQEQCRLKAPRALLADDIAGHIAELDARIRAIETEIQHLIAQHQQLALRDVALRSVPGISHVLAPLLIATMPELGSINRHKAASLAGCAPHPKDSGKTNAYRQCSGGRRQLRPPLFIAALAATRGKNPLADFYRNLLKAGKPKRLALAAVMRKIITIANARIRDALHQHPQLN

SEQ ID NO: 368706 - protein, 335 aa, unidentified
MAKRSTFVGLDVHKESIAVAIAESGRFGEVRAYGTVGGELEALEKVLRVLRAPGRTLHFVYEAGPCGFTIFRHLRQLGEDCAVVSPSMTPKRAGDRVKTDRRDAMTLARLHRAGELRAIYVPNENDEALRDLVRAREDAVEVTREAKQRLKAFVLRHGLRYRGRAGWTIPYRRWLAGLTMSEPAPQMALQEYLATVDEAEQRVTRLTEQLRQLVPAWRWAPVVTALQALRGVSFITATGLVAEIGDIRRFAHAPELMAYLGLVPSERSSARSLDGAASPKRAIPTRAGCWRKPRGLIAISRGSVASCSSVRTRSRRRCARWPGRPRSGSAAAFDA

SEQ ID NO: 368707 - protein, 363 aa, unidentified
MPKSVAAANPAPSSAAGVIGGVDTHTDTHTAVALDSVSGMRLGTAVFPTDTNGYQALLDWLSRFGPVGRVGVEGTSSYGAGLAWFLHDHQIEVIEVNRPNRQLRRLKGKSDPIDAEQAARAVLAGTATAIPKAHNATVEAIRVLFNTRSSAVGNQTAALNQLHSMLVTAPEPLRAQLRGLSTTQLVDTAANLRPNLNLTDPTQATKHALRTLAERLHHLDAEITTTTKLLDTLVADHAPRLVAEFGVGTLTAAQLLITAGDNPDRLHTSEAFVALCGANPIPVASGRTHRHRLNRGGDRQANRALYLIALTRIRSHPETQALMTRLEANNKTKKEALRILKRYLARRLYTLITAPSTTLTAAA

SEQ ID NO: 368708 - protein, 342 aa, unidentified
MKDTMIGVDLAKRVFQVHGATMRGEVKFRRKLTREQFRAFMAAQAPAVVVFEACGGASYWARQMAGLGHEVRLIAPQYVRPFVKRQKNDAADAEAIVVAAQRPEMRFVTPKTADQQARAVLFRSRERLVRQRTELVNALRATLYEYGHTIPQGIAHIKQIEAILDAPHSELPALVRHECRDLLAQIAEQTARIDERARKIKTLAAETDAARRLQTMPGVGPMTALAVEAFAPERTQFRRGRDFAAWLGLAPRQHSSGGKERLDRVSKAGQADIRRLLIIGAMARLTARARRSIPEGSWLAKMLGKKPRMLVAIALANKMARTIWAMLTKEEDYRDPARAAAA

SEQ ID NO: 368709 - protein, 329 aa, unidentified
MKEFLVVAVDVSKKTLDFCFKPLGSTMRIDNNLEGFKLWHRQLKEFMSPVTKVMILMEHTGGYSFKFEKYLSRKNIDYCKIPALQIKRSLGVIRGKNDKIDAQRIAEYGWLRKEQLKADQPCSESMERLKFLLNSRDNLVKNRSGLICRLKEIKSTTSLSSGDFLIQSHNRIIKCLSAEIKVYEQKILKEINSDTQLKKTYELIRTVKGVGLIVAAFIIAKTNNFTRFRDARKFNCYAGLAPFKYESGSSIKGKSRVSHLADKTIKTLLNLAAWCAIRYDEELKQYYQKRVSEGMKKMSCINIIRSKMVSRIFAVAKRQTPYINLTVAA

SEQ ID NO: 368710 - protein, 440 aa, unidentified
MDIHKESVSVCVRRRVRGNSKVETEEAVFGTFTQDLERLRQWLKERKVKQVAMESTGVYWIPVWNVLESGKYKVEMTLVNPANVRALQGQKTDRIDARRIAEYLQYGLLRASFVPPRPVRQMRELTRMRVHIQQDRNRVINRIGRLLETVNIKLGSVAKKITCKSGRAILNRLAAESQQPEQLAKLALGRLKEKIPQLILALDGRPDEHFRWLLSRLLKKLESLDAELAGIDARLCEQTAEHEDLLRRLCTIPGVEITTARVLIAELGTDMTQFPSAAHAASWAGLCPGNAQSAGKRFSGRTRKGDRYVRRILVQSAWAAARTRDCFLAAVFNRVAHRRGMKKAAVAVAHRILAIAWSIIRNGTEYQERGGDHFDRLHPERTARKLLRRLERIASEIALKRPVGRPRSGPKEPIPLSSCERCWHFGIRDCIHLIKRSKKT

SEQ ID NO: 368711 - protein, 340 aa, unidentified
MKDTVIGVDLAKNIFQVHGASRAGEVMFRKKLRRQQFMQFMATQPPALVVLEACGSAHYWARELAGAGHEVRLIAPQYVKPFVKRQKNDAADAEAIVIAARQPEMRFVEPRTEAQQARGVLFRARQRLVHQRTELVNALRAVLYEFGLVVPQGIAHIRHIEAMLDEAVLPDLVRQECLDLLRQISEQSVRIDVRTKKIRMLAQESENTCRLQSMPGVGPLTALAIEAFAPDLQSFRRGRDFAAWLGLVPRQFSSGGKERLGKISKAGQADIRRLLIMGAMTQVNWASRKAPAPGSWLARMLARKPRMLVAIALANRMARAIWAMATKQEDYRDPALSVAA

SEQ ID NO: 368712 - protein, 325 aa, unidentified
MTGQPSATEESVTVGIDVAKHTIEVAIGADGPILSLANDAAGFEALLEHLAAHRVALVVVEATGGLESALACTLQLAAYALAVVNPRQARDFARAMGQLAKTDRIDARILAQLAQVLARHPERDQFIKPLPTAEQQALAARVTRRRQIMAMLVAEHNRLAQAHARTKKSIHTIIQALRTELERIDTDLAAHVRSHFADLSSLLDSVKGVGKNTISTLIAEVPEWGKLRGREISALVGVAPINRDSGVMRGRRTIFGGRASVRHALYMAALVASRHNPVIKLFYERLVAAGKPKKLALVACMRKLLTILNAMVKAGKPWDASLHAA

SEQ ID NO: 368713 - protein, 369 aa, unidentified
MEVGGCSPTGWKYGLTIRTGPRHLRENSHGRLYRPRCFDEETAVSIRRYGKRVRRGRCASDPKVIAELVRKRAPAAKRVVFETGPLSVWFYHALRAEGLPAICIDARHAKAALDVAANKTDANDADGLAHLGEVGFFREVRVKGFDSMLTRTLVAARTRLVRITTELSNQIRGLMKTFGLLVPAGKGSTFEKNVRNLLVDQDGLAPIVLPMLEAWRSMRVRAAELGRQLVAGARQSRACQILMSIPGVGAITATSFVTAIEEPDNFKKSRSVGAWLGLTTRRHQSGEVDYDGHISRRGDCHLRGLLYEAATVILTRSCADSSLPTWGLKLRERIGFKRAAVAVARKLAVTMHAMLKTGELFDRTAGATA

SEQ ID NO: 368714 - protein, 345 aa, unidentified
MGPMYYIGLDVHKRIISFCVKEASGKIHAEGSIPATRLHLDCWLRTLPQPWSAAMEATLFTGWIYDHLKPHAAALKVAHPLMLRAIAAAKKKNDRIDASKICDCLRCDFLPECYMTSTEIRERRRTLRYRNLLVRQMVQTKNKIAVLLMEAGVSYNKQQLHKAGYFRELLATSPDINQGLGALLRLCRETVVRLQKTESALVRSLERDSLLKDRVERLMTIPAVGPITALTWVLEIGDVQRFSSIKKAISYCGLCGAERSTGNTVQRTPLSKQRNKHLQTILIEAAKMAPRISPDLAVVYACEKQKGNSNRATLAVARKLVAYLVAVDRRQKDFLVVRNESQTAA

SEQ ID NO: 368715 - protein, 413 aa, unidentified
MEKVYDKCCGIDVHKKLIVACFKCGKKQEVREFGATTRELLKLADWLGSGGCGMVAMESTASYWKPLYNILESSGLNAMVVNARHMKAVPGRKTDVKDAEWIADLLQHGLLQAGYIPDKDQRELRELVRYRKSLVGERTRELNRLQKMLEGANIKLSGTVSDINGKSARSILEYILTGESFDDAKYDEMYDKKVIAHNLKATKEQIIDDLNGVMSPLQRKMMRTLLKHLDELNSHIHELDDDIDSFMKPEEKQASAAIQDVTGIGSTSAQAVISVIGTDMGRFPDDAHIASWAGLCPGDNESAGKRKSGKTRKGNALLRETLVNCAHAAVKNKKSYFYAQFMRISAHRGKKRAYVAVAHSMLVAIYHILKDGVVFKDLGADYYNQFNKERKIKAYLKKLKALGWEDSAAGQPA

SEQ ID NO: 368716 - protein, 353 aa, unidentified
MNKVARKKQVREVHFEGPIWVGVDVHKSSYAVAVRDQEGRTVQFTMSADNAAFVRKIVSYGQPVAQVAYEAGPCGYSLYRACEEAGITALVAAPSRIPRPVTRGNKTDRLDCRKLADYAARDMLVPVSVPTEAEEMFRSLQRRRHGLTDRIRSVKQFIKSLLLEYHIEEPHGLAKWSKASVEALKRLALSATLRDTLDSHLRELAYLEAERHNVDQAIANAAPQAVLQRMRVLRSVPGVGDVLSVTFASEIFRPERFADGDRLSSYVGLAPVVSQSGASAATGSLVRTGQQRLRSLLVECAWMHKGRDAGAELLYRRILSRTGHAQKAIVAVARRLLTLLWRLCIEDRMYVAA

SEQ ID NO: 368717 - protein, 332 aa, unidentified
MIHYIGIDISKAKFDVAFINPSTNKVKTKVFNNNKAGFDLLLAWLKTNVSNHLDEPHIILEATGVYHEHLSEFLDNNNIKQSIVNPSYVRKFADSLGVIHKTDKKDSIILSRYGYSHKPEVWVAPSIEAKQLKALLARLEALKEDLQREQNRQELLLSPNLPDLVKASMQTVINVLQEQIAKPTKDIDDFVDKHPSLKQDKTLLETIDGIGSVIAKEVVCLIHTKQFKKASQMASFLGLIPKQRQSGVFKGATKLSKQGQVSLRAKLYMSAMSAIRYNSTIKAFYERLQQNGKTKMQALCACMRKLVHICFGVIKTQTPFEQQVSLSEFVRY

SEQ ID NO: 368718 - protein, 351 aa, unidentified
MLIIGCDYHPSVQQIAWVDTETGETGERRLKHSDREAEGFYRELKEKGFSVRVGMEATGHARWFERLLGELGFELWVGDPGKIRAKQVKKQKNDRRDAEHLLKLLMKDDFPRLWVPTPENRDVRQLVLHRHRLVGMRTRVMNQLQAIAMNEGIRRKRGLWNKQGRALLESLSLPPWTSRRRQELLELLDHLDPSIEQLSQAIEQEAEKWPEVQRLLTHPGVGPITALAYVLVIGTPHRFRCGKQVASYLGLAPSEASSGDRQRLGHISKQGNAMLRHLLGQAAQSVAHCEDQWRGQYVHLALRRNHAIAKVAMARKLAVRLFWMWRKEWDYQQLKNFGSHVGQLVQSHGVE

SEQ ID NO: 368719 - protein, 409 aa, unidentified
MNAVGIDVSKGKSMVAIMRPFGEVVASPTEVAHTDSALSELAASLKSLKGETKVIMEYTGHYFHPVAHALREAGLYVSAVHAKLIHDYGNNTIRKVKTDKADAVKIANYGLSNWLELPEYVPTDDIRQMLKAFSRQYTKYGKVKTMLKNNFIALTDQTFPGVNEQFSSPPRKSDGREKWMDFAMKFWHCECVCGLTPKAFSDRYQKWCKKEGYKFSQDKADDVYASACDHVSVIPKSDTVKLLITQAVKQLNAISESIAVAAGEMKRLAEMLPEYHVVSQFFGVGDILGPQLMAEIGDVCRFQNKGALVCYAGLEAPPYQSGKFESGDRNISKKGSPHLRKTLFQVMVCYLQLAPEDEPVYQFIDRKRAEGKHYYSYMTAASAKFLRIYYARVKEHLNQDCPSQHPIEI

SEQ ID NO: 368720 - protein, 345 aa, unidentified
MELRTIGIDLGKMVFHLVGMNLRGEVVVRKKLSRRQLLQFTANLHVDLIGMEACGGAHFLGRALREQGHEVRLMPAQYVKPYVKTNKSDFIDAEAIAEAVARPTMRFVPIKTDDQLDMQSLHRVRERWVMRRTAIVNQIRGLLLERGITLRKGRRHVDAALPGILEDADSKLSGALRILLAQLKLELDQMAIRIDEADEVLNKTARENEACQRLVAIPGIGPVTATALIAAIGNGAAFRKGREFAAWMGVVPREHSTGGKQKLLGISKHGNSYLRKLFIQGARAVLQQRTKQAPGLNEWLARLASRTHHNVVAVALANKLARIAWAVLAKEERYQPQALPSQQAA

SEQ ID NO: 368721 - protein, 346 aa, unidentified
MPIVGGLDIHRKQITFDYLDTETGQVQRGQISPADREHLRAWLARFAGRQDVAFAVEGCAGWRYVAEELAAAGIAAHLAEPADTAFARGRKRHAKTDRTDARHLRVLLAEGRLPECWIPPARILECRALLETYNDLRRERTAWAQRIHAVLFHQGAPALGEGALRTEKGVTALREVAAAHLSPAGQLQVATALEVIDALEARLHVVRHQLTDAARHLAGARALAARLYGVGPVTALALTCWLGGAGRFSSSRQAVRFAGLDITVHSSDRKGPPGRLSRQGPPVLRWAVYEAGKAHARTSAPDHRYYAQVKDRKNSKRACLSEARKILRQAHHILAELGDDALAPAA

SEQ ID NO: 368722 - protein, 341 aa, unidentified
MQQQVTTVGLDLAKNLFQVHGADAQGRPVLKRKLARGKVLEFFADLPACLVGLEACAAAHYWARELAKLGHEVRLMPPRYVRPYVKTNKHDAADAEAIREAVQRPGMRFVPVKGEDQQALLMLHRVREQLLKQRTATTNALRAHLAEFGVVAARGRRGLRELPAVVADPEDRRLPPLARELLQALAEHLRGLEERTAEIDRRLLEAARADAACARLAAVPGIGPVVATALVAAVGDARTFASGRHLAAWRGLVPRPHSSGGKERLLGISGRGDGYLRRQLVHGARALVKVSRGRDGKPWAWIDGLLTRRSFNVAAVAVANKLARVAWALLSRGEDYRTAAA

SEQ ID NO: 368723 - protein, 343 aa, unidentified
MQTTTTIGLDIAKSVFQVHGVDAAGQVVIRRQLKRRYVLSFFQKLPQCLVGIEACASSHHWSRELQALGHTVRLMPPAYVKPYVKRQKDDATDAEAICEAVTRANMRFVPTKTPEQQSGLVLHRTRHLFIRQQTSVINAIRAHLAEFGIVAPVGRRGVEELLTVVADPNDKRVPEIARACLSAFGAQLRSIKEQVLEFDRLITAWHRSNEMSMRLDEAPGVGPVLATAVVATVADPKVFRSGRNFSAWIGLVPKQHSSGGKDRLGSISKQGDRYLRGLFVAGALAVIRYAKIHGTKHRPWLTALLARRPTKIAAIALANKIARMVWAMMAKGERYKEPVALAA

SEQ ID NO: 368724 - protein, 341 aa, unidentified
MAEYVGLDVSMKETALSIRRDGKRVWRGKCASDPKLIAEVIRRRAPGVARVVFEAGPLSVWFYHALTAEGLPAICIDARHAQAALDMAPNKTDAHDADGLAQLAEVGFFREVRVKGFDSMLGRTLVAARNRLVQITTELSNQIRGLMKTFGLVVPAGKGSRFEAHVRALLADQAGLAPILLPLLDAWRAVRVRAAELGRQLVASARRSEACQILMSVPGVGAVTATSFATAVEDPENFRRSRSVGAWLGLTTRRYQSGEVDYDGHISRRGDTHLRGLLYEAATVILTRTSAESSLRTWGLKLKDRIGFKRAAVAVARKLAVVMHAMLRSGQLFDRTAGMAA

SEQ ID NO: 368725 - protein, 350 aa, unidentified
MPKRNVPRPAAVYGIDIGKNIFHVVALGSDGMVVQRVRFRRDTLLQFFQRAEPATVGMESCAGSQWIARKIQALGHKVRLIPAQFVKPYVKSNKSDIIDAEAIAEAATRPTMRFAALKTEEQADLQALHRVRDQMIGTRTRLINQMRAFCLEYGVAPRQGAGLFKLDLPEALKDPANDLSPAMRKLLGELFDDLRQLEKRIADVTREIEAIADREDAARRLMTIPGIGALGATALLAAIGNGRQFQKARDLAAWLGLVPREYSTGGKQKLLGISKRGNRYVRKLLVHGARSCFRHLDRTKDRLGSWLDGLQARMHPNKAVVALAAKMARIVWVVLTKPGALYERRDPAFT

SEQ ID NO: 368726 - protein, 377 aa, unidentified
MATNRTVLRDQLTAKPGDLYMSFELGDKHWHISIGGDRRSVSHYIVEAGHTEEVADCIAKAAARLHTARVHSCYEAGRDGWWLHRWLTELGVDNIVVDPASIEVNRRARRAKTDRLDADKLLAMLVRHHSGERVWSVLREPSPSDEDARRAHRELQRLTHERIAHTNRISSLLVLHNLRPRIVIGGRDWPVWWNAHREQVPPTLRAELEREAARLKVVKEQVRAIEAACAKELAEGKQPLVAQLVRLRAIGAKGAWVLVKEVFGWRHFANRRELAGSLGLVPTPYASGDSEIEQGISKAGNRRVRALLVELAWSWSRLQPGSALTQWFNRRFARGGKRMRRVGIVALARRLAIALWRYLQTGEIPFGARLKPAGSGI

SEQ ID NO: 368727 - protein, 429 aa, unidentified
MQESTSPAPAEGVAAYIGIDWADQKHDVVLRSASEPAKVEHSRIVHEPDALMEWLGELQQRFAGKGKVLVALEQSRGALIYHLMGYEFVELYPINPAQLASYRETFSPSGAKDDRPDAELICELLYYHGDRLKAWKPDDELTRKLAFFNEGRRKAVDQRTQLANEIKSQLKVYFPLALQVLDNNSSTALAADLLLQWPALDSLQKQSAHKLRKFFYGHNCRNEQKLLERLELIKTAKPLTRDPAVIEPAALRVQLLAHQLKSLLPYIARYEKQIAELFDAHPDSFLFRDLPGAGTALGPRLLTAFGTNRERFDYPIELSSLIGIAPVRRASGKKTGKKPSVHFRHACPKFLRQSFHEFAECSIRYCSWAQGCYQAQRERGKGHHAAVRAVAFKWIRILFACWKQRLPYDPQRYLQTLQTRGSEYAKIAP

SEQ ID NO: 368728 - protein, 344 aa, unidentified
MYFIGVDHHKQGSVMAVIDEDGHELKVGRVSNRRESVGQFLKEYRPFTAVLEAGRSSYVMAELLKELGGEVKMANPLQVKAIAHARIKTDKRDSRTLAHLLRSNLIPEVYQREAWNRRAQRVMRMRAFWIAKKTELMNKIRTLLAQQREEVRLEVEKLSGALFSDKGLKYLENLLLEDKDKEILDELIRGYREIRAHIKTSDGTVRALYGEIEEAARIDTVPGFATTLSVLAAVEIADVKRFRRVEELHSYAGLIPSTHSSGGRTYHGHITKQGNAWLRWAVVEAVTGACQKDLELRVLYTRLAKRKSRNVAKIAVARRLLTIIYRVLTERRDYIPELKKSSAA

SEQ ID NO: 368729 - protein, 361 aa, unidentified
MTDICTNEANSTTERALVHTGVIIKLGLDVHAGQITVCRQIDGRIPQPGRRCSEEQLVELVKEHLGLGDQVYACYEAGPCGYGLYRRLTELGATVYVVAPQRWNPGGNRVKTDKKDARELCLRLDQYVRGNRDAFSVVRVPTPEQERRRAWCRQRGMLLKERQRCELRGHGLALTQGVRAPAGWWEPRVWLEFAPALPPWLRGHLQRWQRHAARLDEEVQDMTPMLELLSFGQQAPKGLGALTATLLDSEILDWSRFRNRRQPGSYTGLCPSEDSSGERRSQGSVSKHGNPRVRHLLVEAVWRMLAWQPHYKPFYAVRAATGRRGRKRAAVAAARQLAVDLWRIHTNRSTPEALGLLMVTL

SEQ ID NO: 368730 - protein, 349 aa, unidentified
MPKSNTAVVTIGIDPGKNTLHLVGLDARGEIVLREKVVRTKIVSRLANVPPCLIGIEVGMGTHYVTRELLALGHDVRQVPPVYAKPFRQTHKNDFRDAHAIAEAVQRPTTRCVPPKTDEQLDLQALHRVRYRLVGQRTAIINQIRCFLLEHGIAVRQRLHWLRHALPDILAQRTDVLSPRMVRILEDLAQDWRRLDDRIEAVSGEIDALSKNTEPYRHLMTIPGIGPIISSAVVAAIGDGAAFTRGRDFAAWLGLVPKQISTGDRTILGRITKRGNRYLRMLFLQAARVVLLRPRNWMQHSFGPWLAAAAQRLHHNVLATALANKLARIAWSVLVQHREYEARLSVAAT

SEQ ID NO: 368731 - protein, 464 aa, unidentified
MSQRKRGKQKRIQSQENLPVLKPNAAGIDIGATEIFVAVPPDRDVEPVRCFPTFTEDLHRLADWLRICHVDTVAMESTGVYWMRLFQILESRGFEVCLVNARYFHNVPGRKTDVSDCQWLRYLHAVGLLRGSFRPADEVCVLRSLLRHRDGLIQMAATHVLRMQKALDQMNLQIHHVISDITGLTGLKIIDAILEGERDPKVLADLRDGRIKASEETIKKSMVGDYRREHLFTLRQSLLAYRYYQQLVADCDKELEHQLSQFHDQAALKSQPLPPPKVRRRKIFNNAPDFDLRGHLFRIFGVDLTAVPGISVLTAHTILAEIGPDLSKFTSSGAFASWLGLCPDNDISGGKVLSAGTRRVNNRAALALRMAANALHQSKSWLGDFYRRMRSKMGAPKAITAAAHKLARIIFHLLTSRQPYDETVFAVCEKQSRTRAESKLRAQAKALGFQLVRPPVPSAQESVL

SEQ ID NO: 368732 - protein, 382 aa, unidentified
MQTIDTVNPTILLAIELSASTWLVAARVPGLEKPHLHRIDGGDTAALLALISSLQARAARRLDATISVVCCFEAGRDGFWLHRLLTAHGVVCHVLEPTSILVNRRARRAKTDRLDAEGMLRVLAAYLRGDHQACSMVRVPTPEEEDAKRTHREREKLVQERLRIENRIEALLFTQGIRKRPSLRSWERDLAVLRTGDGREIPRHLRAELDRLRRRLVMTSELIREVEAERDQAAKTKPQDQACHKIAALSRIRGIGENFAAVLTREVFYRSFDNRRQIASYVGITPMPYQSGGMDRDRRISRAGNPRARTTMIQLAWLWLRYQPGSELAEWFRERVGTLAGRTRRIAIVAMARKLLIALWRYAETGVIPAGAEIRAETTVAA

SEQ ID NO: 368733 - protein, 455 aa, unidentified
MPKQKRTRNARTLPVARVLEPNAAGIDIAATEVYVAVPAGRDPQPVRRFSTFTDDLHRLADWLQACRVQSVAMESTGVFWIPLFQILEDHGFRVCLVNARHVKNVPGRKTDVSDCQWLQYLHSVGLLRASHRPTQTICAVRSIWRHRESLVQMAAVHIQHMQKALDQMNLQLHHVISDITGTTGLAIISAVLDGERNPENLATLRDPRIVASRETIARALVGDYRVEHLFTLRQSLQAYRQYQQWIAACDSEIERQLQVLPSNLPDDPKPLSKPRDHHKPRRNEPRFDLRSQLYRVFGVDLTAVPGVSSLTAHTLLTEVGPDLRRFPNAAAFASWLGLCPDNRISGGRVLSVVTRKVKNRLTIALRMAAQSLHRSQSYLGQYFRRMRIRLGTPPAITAAAHKLARVLYHLITTRQPYEESTFAAMEERARQRQLLRLTKQAARFGFQLVPGRSVP

SEQ ID NO: 368734 - protein, 360 aa, unidentified
MKYIGCDFHPSFQQIAMLDTGTGETLDLKLKHDGDETRQFYESLKSQEVIVGIEASGNTYWFERLLSQLGHQLWMGDAAAIRRQDGRKQKHDRRDARLILKLMLSKDGFPKIWVPTVAERDLRQLLIHRRHLVRTRVRIKNQLQHIALNYGLQRKGKLWSREGMEFLRSLELEPWTRLRRDKLLEQLAQCDGDLKPLEMAVQKAADENVRAVRLQTHPGVGPVISLATVLTMGEVHRFEDSRKWISYLGLNPSEESSGQRRKLGGISKQGNPFLRYLLVEGASSAARGDKDLGRTYSRLKARKHHGVAKVAVARKLAVRLYWMERTQQPYPEVVRMQGSQSHSVAAVKAERLSRPPASHQ

SEQ ID NO: 368735 - protein, 337 aa, unidentified
MKFCGIDLHSNNSVVVVTDETDRVLVSRRCPNELTPIIALLDPHRDELAGVVVESTYNWYWLVDGLMAAGLNVKLANPVAMKRYDGLKHSDDKDDAVFLAHLLRLGILPTGYIHPPHERALRDLARKRIQLVRTRTQHILAVENIAARQFGHSFSCNEIKGFSAASVDRLGLPIDVALAMKANVVVIQALEAQIAELDARLLQQAKLRPEYLLLKTMPGVGEVLATIIMLETGDIDRFAEVGNFASYARCVKSAHYSNGKKKGEGNAKNGNAYLIWAFIEAANFARRFSDDAKRFFEKKKAKTNSVIATKALAHKLARASYYILKEKQPFDAKRCFA

SEQ ID NO: 368736 - protein, 354 aa, unidentified
MATKPPQVIGGVDTHRDLHVAAAIDPVGHLLGHRSFPATPAGYRALLAWLRGLGRLQRVGVEGTGAYGAGLLRHLRQAGVTVVEVDRPDRRTRRSKGKSDPLDAEAAARAALAGTATGTPKGRDGRVEAIRALRVARRGAMKARTAAGNQLGCLVVSAPEPLRGTLRALSGKELVVAAAGLRPGPDLTDAVAATKAALRRVAHRYQLLSQEIAELDQALELVVATTAPGLVALMGVGTDVAGQLLVTAGDNPNRLVNEAAFAHLCGVAPLPVNSGRTTGRHRLSRGGDRAANNALYTIVICRLRWDPRTRAYMQRRTKQGMSKLEVVRCLKRYVAREVHQILTAPQPPQRLDEP

SEQ ID NO: 368737 - protein, 325 aa, unidentified
MQGKDRSEQETKTQSTVGIDVCKLWLDIHILPSEEAFRVPNTKAGSKEIVRRLGRYDVQLIAIEATGKWHRDLHRNLVDHGYPVRVVNPLRARLFAEAMGLLAKTDQLDARMLAVFAASLTEARPPAPEIIEALKELVQARCSAVEEQTSLTNQFKSAATVFLRRQLKRRLTQIAKHIKALETESLKRINADPGLARRYDILVSIPGFGDVVAMTLLAWLSELGSCNDKQIATLCGLAPWPDDSSDRSGARHIRGGRQIIRNILYLAAITAKSFNQPMKAFFQRLTANGKAKKQALVAVARKLIVLANTLVRADRLWQTEAPKCA

SEQ ID NO: 368738 - protein, 310 aa, unidentified
MEQKLRALGIDIAKQVFHLVGMDAHGTIVVRKRLYRAQVLVFIAQLPPTCMGMEACGGAHYWARRFREHGHEVKLMAPQFVAPYRKANKNDLRDAEAIAEALTRPTMRFVPVKSVAQQELQALHRVRERLMKARTALINATRGLLLEYGIVVPQGATTFRKHVLEKWATEDAKLTPHSLALFQQLLEELATLEARVATYDAQLAQVAQTHPVCQRLMTIPGLGALTATALVAAVSGATQFKNGRQFAAWLGLVPRQHSTGGKSRLLGMSKHGDSYLRKLLVHGARSCLRWVGRKRDRRSQWVQSLMERRG

SEQ ID NO: 368739 - protein, 405 aa, unidentified
MQETTQHDAVDVFVGVDVGVDVGRGQHHAVALDRNGKRLYNKALPNDEVKLRALIAELKTHRRLLFVVDQPSTIGALPVAVARAEGVLVAYLPGLAMRRIADLHAGEAKTDARDAAIIAEAARSMPHTLRSLRLADEQLAELTMLRGFDDDLAAQVTQTSNRIRGLLTQIHPALERVLGPRLDHPAVLDLLERYPSPSALAAANEKTLANRLTKLAPRLGKNLAAEIVQVLNEQAVIVPGTQAATIVMPRLAQQLAALRKQRDEIAAEVERLVLAHPFWPVLTGMPGVGVRTAARRLTEAAQKAFATAAHLAAYAGLAPVTRRSGSSIRGEHPSRRGNKVLKRALFLSAFAALRDPVSRAYYSCKIQQGKRHNQALIALARRRCDVLFAMLRDGTIYPPKSAPNA

SEQ ID NO: 368740 - protein, 337 aa, unidentified
MKYCGIDLHSTNAVVAVIDDDDRLLYCKRLSNDLRQIVAALAPHQDELGGVVVEATFNWYWLVDGLMAAGFVVHLANTSAIKQYEGLKYAGDERDAVFLAHIFRLGLLPEGYISPPPLRALGDLARKRLQLVQDRTAHVLSIETLLARESNVRLNGEHVLRLNDESVRAFGLPYHVERSLMANLAVIRTLKAEIAEIEDILLREVTLSPEFQILKTAPGIGNILATTIMLETGTIARFDAVGNFSSYCRCVESKRVSNGRKKGKGNGKNGNRYLAWSFIEAAAISLRFCPQAKRFYERKKAKRMAVIAMKALAHKLARAAFYMMRDHKPFDVQRCFG

SEQ ID NO: 368741 - protein, 348 aa, unidentified
MKVTRIGLDLAKQVFQVHGVDEKGRKVLSRQLKRGQVEGFFRGLEGCLVGMEACAGAHHWARVLGGLGHEVRLMAPQHVKPYVKGSKNDANDAEGICEAVGRPNMRFVAMKTVEQQRLQSLHRVRRTLVRNRTAAVNEIRGLLGEYGIVVRVGVAKLRGRLPELLEEADNGLPMSFRPVLAGLKEDLEYLDRRIGEMDAAMVRAAQEDERARALMKLRGVGPVTATALVAGLGDGKQFRRGRQASAWVGIVPGQHSSGGKERLLGISKRGDEYLRTLLIHGARAVVNSCKGKTDRLSRWVQEVCARRNKNVAAVALANKTMRMAWALLSRGEQYDPDYEMNRRAAQAA

SEQ ID NO: 368742 - protein, 486 aa, unidentified
MKAKRATSRRARCGARKPIRAAKQMPVINPHAAGIDAGSVEHWVCVPEDSVPEGQDNVRVFGGFTADLDQLVEWLLACKVKTVAIEATGVYSLAPMDKIEAAGIEVVLTNARHCKNLPGRKTDLKDCEWIQQLHSYGLLNSSFRPTEDIRRLRALMRHRDNLTRSCGREVQHMQKALQEMNVHLHHAVSDLVGATGLRILDAILGGERDPEALVKLRDDKLCKKTTPEELKKALQGDWQQEQLFVLGQALETYRHLLKQMGQCDQELEKALAAVVIPPRQESEDPAPPNPKAKDAADSKPKKKRFAARGDKASRELKKDLVEELKRICGVDLTQITGLNILGVLIIISEIGLDMSRWRNAKAFCSWLGLCPGNKISGGKVLDSRTVHVVNRVSILLRSVAPSIGKTDTWLGIFHRRMRARLGPAGANTATARKLACLIYHLLRYKEEFIDVDHLIFVDKIRRQRLRRLKTLAEELGMQVVEQQKAA

SEQ ID NO: 368743 - protein, 353 aa, unidentified
MPIVAEHYTFVIGVDTHAASHSLALVVASTGAVIDQSVFANTPAALDRALTWIVHRIDGQSSLIVIEGVGSYGAGLADRVTARGLTVAEPSAMPAAQRRGVGKTDALDAVRIARSVLAVDTSRLRWPRATGPRVVLRVLVVAHEQMVAERTRSINALTALLRTIDLGLDMRKALSHSQFKVIAGWRDRREDSVVRTCRQEAIRLAKRIVALDGELLDNRKALDAAVADTVPKLCELPGVGSVVAASVLTAWSHPGRVRSEAAFAALAGTCPIPASSGNTLRYRLNRGGDRRLNRALTTVVIVRMRTHAPTKAYVARRRAEGRTTKEIMRSLKRYITRQLYRTLAATHPVAATP

SEQ ID NO: 368744 - protein, 358 aa, unidentified
MQTQSNKLDFSGQNIYVGFDVHLKSWKVTIMTEKLLHKTFSQSPNPELLYNYLRKNFPGGTYHSAYEAGFCGYWIHNKLKSFGINSIVVNPADIPTTDKEKVQKEDARDSRKIARTLRSGELKAIHVPSLKTLDDRSLMRTRSALVKDLVRNKNRTKSFLYFHGIELSESFSKQKAWSKCFIDWLGKIEMSEKSGKDALNAIVGTSINLRASVLQVTKQITELSKSKEYQEQVMLLKSIPGIGLLTAMTLLTELETINRFESFDNLSGFIGLVPSTHSSGDNDIVGDITRRGHSVLRSALIESAWIAARLDPALTKSYHDYCKRMEPNKAIVRIARKLLSRIRYVLKNKKNYVCAVVK

SEQ ID NO: 368745 - protein, 343 aa, unidentified
MHIASIGIDLGKTTFHLVALGERSKVLARKKFSRTQLLAHTANLSPSLIGLEACSGAHFLGSALREQGHDVRLIPAQFVKPYRKSNKNDFIDAEAIAEAVTKQNMRFVPIKTEEQLDVQAMHRVRDRLVQRRTALINEIRGFLLERGITFPVQPIHLRKNLPTVVEDAEQNLTPRLRWLLNRLWQEWKQTEIDIETVTDEIERISAEDERCRRLRQIPGFGPLVSTAMVAAIGNGAAFRRGRDFAAWVGVVPRQYSTGGKQKLFGISKRGNIYLRRMLIHGARAVLFRIKYDTAGLGQWVHRLRQRAPRHKAVVAIANKLARIAWAVLSSGKDYRHQTLQPAA

SEQ ID NO: 368746 - protein, 403 aa, unidentified
MTVRPLVWVGIDVGKTSHHACAVDETGKVLWNQKVSNEQRAIEQLIARAHKGADEARWAIDLTSPMALMLITVLLGAEQSVVYVPGHVVNTMTGAFRGEGKTDAKDARVIAETARMRSDLSEVAMPDELVVELAQLTGYRTDVMADWVRGVNRLRSLLGSIFPGLEAAFDYSNRTPLILVAHLCTPAEIRAAGIKGVTAYLGDNGGWPTAIAKTAATAVAAAKQQPLALPGEAGTAALVKRLAGKLLDLDHEIKDIDKTITERFRDHPYAHIIESLPGFGPGLGAEFVVVTGGDLASFATAGRLASYAGLVPVPRDSGRISGNLHRPKRYNRRLRRVFYLAALSSTRGDGPSRQFYDRKRGERLIHSQALLALARRLVDVLWALLRDGREFTPDKPTPATAAA

SEQ ID NO: 368747 - protein, 384 aa, unidentified
MAQPGWPPELGRRSVGSVPIEALRAVGRSKIAIGTSSGPEWLNELKVRITREGSTKMTKHTTICAGIDTGKRKLDVAIEGRCEQLQVDNTPEGHELLLAWLRQHRVKRVGIEASGGYEQPVVIELRRKRFVVVVFQPTQVRAYAKFQLQRAKNDKIDAALIASCTAAVRKIHAAPDPRLLPFAERLTMIDQIGEDIARLKNRIESCRNAMIKRLWQEDIARLEKREKAEFTVLVALIRKHRDLARRLELIHSVDGIGLPTAVAILVRLPEIGEITREQAVALAGLAPYDDDSGERVGVRHIEGGRKRLRRALYTAALAASFRWNRQLIELYQRLTAAGKEHKRALVACARKMLIFANTVVARGTPWCDEPPAVNASIAGASSVS

SEQ ID NO: 368748 - protein, 454 aa, unidentified
MRHKRAGRGGAVPRLECIEPNAAGIDIGATEIYVAVPPDRDPNPVRSFQTFTEDLEALAAWLLACRIRTVAMESTGVYWIPLFQILEARGIEVCLVNSRHVKHVPGRKSDVADCQWLQYLHSVGLLRASFRPQDAICRLRSLLRHREGLVEMAAEHVQHMQKALSQMNLQLHHVLSDLTGQSGLAILDAILAGERNPQALAERRDPRVKASPETIVKSLVGDYRREHLFTLRQSLQAYRHYQTLIAACDREMETYLQDLDSKIDVEQHPLGPESHPHKPRKNEFRFDLRTHLYRILGVDLTAVPGLNAITVHTALAEIGPDLSRFANVSAFTAWLGVSPDNKKSGGQVLSSKTRRTRNRVNRALRIAAQTLHRSQSYLGTYYRRMRARLGAPKAITATAHKLARILFHLLRTGEPYDESIFAQEEQRHRTRMENRLRRQAREFGYELVALPAQA

SEQ ID NO: 368749 - protein, 358 aa, unidentified
MKKIVVGIDISKEKIDASAIDVRASQLGVVKLDYQVFENRPMGFRRMLVWARRLVKGAGLEDVLFCCETTGGYDRCLCDYIYAKGLDIWREGALQIKRSMGVRKGKDDKADSLMIAEYAMRHMDKAVIYESPSKILRGLRALLLYRGNLVKEKTQMAVRLKELEATAERSEALNFILRDIRKVIRVLDKSIAESVKQIQKVYDSDASLKKSYDHITSVSGIGIVNATALIAYTGNFAAIRTANKAASYWGCAPFREQSGTSVHKKAYVRCYSSSLLKAYLTQAAECTIKEHGIYHDYYLRLKAAGKPYGVIVNNVRNKLIHLVFSLVADNKDYEQNHEYLRMQRKGKTETSAQLKKIN

SEQ ID NO: 368750 - protein, 354 aa, unidentified
MAKTTSTQIAVIGIDIGKNSFHVVGHDSRGAIILRQKWSRGQVEARLANMPRCLIGMEACVGAHHLARKLTALGHDARLMPAKYVRPYAKGQKNDFNDAEAIAEAVQRPTMKFVATKTADQLDLQALHRVRERLVSQRTGIINQIRAFMLERAIAVRQGIRFLRTELPIILASRTDVLSPRMLHTIEDLAGDWRRLDERIETLSREIEMIARQDAGCDRLMSVPGIGPIISSAVVAAIGSGDVFSKGRDFAAWLGLVPKQISTGDRTILGKISKRGNRYLRVLFVQAAWVVLVKPQSWERHGLKSWIEAAKKRLHHNVLAIALANKLARIAWAVLAKGRGFEATRTVNGSTQSA

SEQ ID NO: 368751 - protein, 343 aa, unidentified
MQIRSVGIDLGKTTFHLVALGDNGKVLLKKKFTQKQLIAFTANMQTCLIGMEACSGSHFLGRALRAQGHDVKLIPAQFVKPFVKSNKNDFIDAEAIAEAVDRENMRFVAIKTDDQLDLQALHRVRDRLMTRRTALINQIRAFLLERGIVFAKSPIRLREALPEVLENVNENLTPRMRNLVAMLWSEWKDLELQIVQMNDEVERIASSDAACRRLRQIPGIGPLVATAIVASIGNGAAFRKGREFAAWMGLLPKQHSTGGKARLYGISKRGNSYLRKILIHGARAVVLRSKRDRIAMGAWMTSLETRAPRNVLIVATAHKLARIAWAVLSSGQDYRAVPEALTV

SEQ ID NO: 368752 - protein, 342 aa, unidentified
MQRVYVGVDLGSSSFQQVGVNEPGMVVMKREFQTSAAHLVKAFSGLKGEIHVHLEAGELAPWAMEIIRPLVHRVVCSHPQSNAWIAKDADKCDRVDAYKLADLLRVNRFKEVHYAREQLRRDFKTLVQHYDELTQQQARLKTKVKARLRMQGVIVRGERVFSATGRQAALAAVESAAVRTAIMQLYQVLDQSLASQTEARLLMLRTAQALPEIKWFKTAPGVGPIGACRFSAYVHTPQRFSSTRKLWKYCRLSISHRSSNGKPLRRPRLDRSGCGRLKDVSRKAFEAALRTHGDNAFKRTYQRALQTTHDQTHARLTVQRKIVSTLRAMWINQTPYTDHLMP

SEQ ID NO: 368753 - protein, 397 aa, unidentified
MLMAAVMIGVDPHKGSHTAVVIGAAEEPLGELRVRASKTQVDELVAWAAAWPRRTWAVEGAGGLGRLLAQQLIAAGERVLDVPPKLAARVRLLEAGDTNKNDPNDALSVAVAALRSKASREVTADDYTAVLKVWSKRHRDLSRTRNQVACRLHAVLCELIPGGHSKEISAAQAAKILDQLAPSGAVALARAELAAEFLQDIRHLDGQLRDTRKKLAAAVRASGTTLTQVFGVGPVIAGTVIGDVGDVARFPGRDHFASYNGTAPVEVSSGNRKIHRLSLRGNRRINHAIHMAAITQLRHKHSEGRAYYDKKVAEGKPTRRRSGPSSPRSATPSSPASRPMPARPARAAREGNRGTALTPARPAHTPNASSSDQPLPDLTPPYGPAPPQARPHRRSRL

SEQ ID NO: 368754 - protein, 465 aa, unidentified
MTIHSVGIDFHQGQHRVRCLDDRAQPCDSFGFQTTSEGLATFEEHIFRDGSNPVIVFEPAGIPWLTVAAYLRSRYPDCRLVKAKMQKVAALRRYLRGPVKSDRIDALTLAKMPFIDPEQLEEVYLPSAEIHTLQRLTRQRKRLQSDIAGRKVRIEAIIDGYLPGIRKAFASPWSTQVRAFMRARLNPFAVVRDGEKALSAFLSKASSRDKGIRAESHQIFQACQAVADICKVAEPATTINEVFFVELQDEIARELRLMETEEAESESLESRISEIYHKLHPSNNLCTIPGVGEHTAPIFLAAIGDPARFRNQSAFANWTGAVPRSRQSSNMEAKGLRMTKAGPSIMRMALFQSGDIGRRWDPQMAAIYYKQMVSHGKNHKQALGAVMTHLGARVLKVLLEDRPYELRDIDGKSVTRDYAKELILTKYHVSEEIRRERRRRNSIIGKTEETATNRRNEAAKAPQPV

SEQ ID NO: 368755 - protein, 508 aa, unidentified
MKKKIDFVPIKDTTCGLDVHKDMIEACVILNYGAEVVQKTFSTLRSALFELRDWLASLNCINVLMESTSVYWMPVYEVLEETPAMDVGVGNAQKMKNVPGRAKTDKEDSLWIAKLCMFGLLLKSFVVGRKFRDLREYTRYHKKLVQEKARHTARIEKLLQMNGFKLSTVMSDIVGYSGKRVLHALAEKGTVSLNEIRELVSSRLQSTPEEIESAINGKFKASSQTLLKKMLKKLATLENEIGEIADDMNQMAAPYAHEINLLDSIPGLDIIASTYLIAEISNDLSSFETSRRFTAWAGLAPKDNMSAGKLKSSKTKKANQYVKTLMIECAWAASRTRNTRIARWYWSHQGKLGRKKAITATARKLLITYVYAVLKTGKPYDISLDTANNNPTGHEQKPEMAVKKIGKCINNQLSAVTGANNDNNSTVSETSNLDIMTVNASSFDTDNDQDRVSVPRKRGRPKKTIEVNTDLKQNPGPPSKADCIVTAMPKRRGRPKKIPIVIHDAEDI

SEQ ID NO: 368756 - protein, 373 aa, unidentified
MPRYSTAFGMDVHLRSTTVCALDAETGEAVTRRFRGNPWGEVAEWMSGFPGPSLAAYESGYLGFAPQRELSGLGVDCIVAAVSKVPRSAADLSSKNDRNDAARMAKAILSHDVTPVWVPSPEIEGLRDLAAAHDAATARLAAAKQRLLAFLARRGYVYGGTTPAGNPRKYWTYGFLRWLDGTHPADDGGIRALAALRNEVEAADETREALLAEYRAAVAAGPLSAEVEALQSIKGCGFALAAAFASEVGDFSRFRSGRQVTAYFGLAPKQRSSADSVRLGGISGAGNALVRKLAVEGSWCYAQAGHQPKLMPKGSGVPLEIRMHGRKGSERLLRRREEMIARGMPQAKANAATAAELVRWLWALGTMCREGAE

SEQ ID NO: 368757 - protein, 343 aa, unidentified
MEYGAIDLHLRRSQIRILDEDEGVVLDRRIDTTREALTQVFGARERMRILLESSTESEWVAQHLETLGHEVVVADPNYAPMYGSRSRKIKTDKRDAAALAIACRRGIYRAAHRASRAARTRRQQLRVRRHLVQVRTGLISLLRSTLRQEGLRLPSGSAERAVARLDRLGVPATVAAVVAPLRTTLADLTATLTAIDAAVEAQATGDATAQRLMTAPGVGPILSLTFTAVLDDPARFGGDAGRASAFLGLVPSEDSSAERHHKGHITKTGPGDLRALLVQASWVIWRGRSTAAHALRTWAQTVGARRGRRIAIVALARRLTRILYAMWRDQTPFAPPGRVAVAA

SEQ ID NO: 368758 - protein, 354 aa, unidentified
MTEYVGIDWAYRKAAWCAMSAGGAISAEGFTPADEDGLARLVLRLGTDVKACVEMMSGAVWVRDQLRRAGWQVEVADARRVKGIAPLACKTDRVDARVLAELCRRDLVPALWIPSLEERELRERLRRRMHLVRLRTSAMNRIYGLGTQWGLRLGADRLRRRKDRLELLARSGMPAVWQRSIEEALAVIELLDQRIAPLEAELAPFTRADPNVALLQTVPGIGDMLALTLAAEIADVSRFPSPGKLVGYAGMAPGVKQSGQSVRTGLPLSKAGSRTLRWAAVEAAQHAWRPSNPWHTLYSDLATRNDKNAAKSAVARKVLIASWHILSRQQPFKPSRPRRGASTVPASSASVLAA

SEQ ID NO: 368759 - protein, 365 aa, unidentified
MTEITRGEIVRVGVDLAKHVIQIHAVDQVGRTVTAKPLAREKFLAWCTLQLPPGCLIAMEACGGAHHWARRLQEMGFDARLIAGHFVGPYRMQGKSGKNDANDAAAICEAASRPSMRFVPIKTAQQQALLCVHRLREGYKEERTACINRIRGLLTEYGLVFAQSPEVLRLALPDTLEDASNDLPALARMALQRAHLQWAEIECHIAWCDERIAAHVRSDTQAKTAAQLCGIGPITASALVASVGDFTQFKTGAQFGAWLGLVPSQNSSGGRASLGRITKRGDDYLRTLLIQGAKSAVMSAHKRSDRISQWLVQLKERVGWQKAVVALANKNARIVWAVLAKGRIFDPNHVSIKPGEIVEAVVATA

SEQ ID NO: 368760 - protein, 398 aa, unidentified
MICVGIDVSKDKSTVAIMKIGGEVLAAPYDVIHTRESLNLLADRILELGDNVRVVMEVTGHYYLPVSTILVEKGFFVSVVNALIVKKFCSQDLRGAKTDEIDSLNIAEYGLVNWNKLTSVTPVDEDYAQLRMLSRQYHQMTLMAVKARVNLSNLLDKVMPGVTALFPKSKGKNKLENFVERYCHFEKILKMGKQRFVSDYCNWAKKQGYRMNERKANAVFALAQDGIPVIPNTAVTKLVVLETVRVLLETEKSRKAILSQMTVIVKTLPEYEVVRAMNGVGDVLAPRLIAEIGDIRRFENRNSLIAYAGIDVPPYKSGKFIATERHITKRGNKYLRHAGYEVMDSLNKNRTKHADDPVCDFILKKKSEGKKHKKALIAGLNKFLRIYFARVSEVYEKI

SEQ ID NO: 368761 - protein, 329 aa, unidentified
MSSSHTVTHVIGADISQREIVLAWAHPHRPSLTIANSRTGILAWLKALPEGCVIGMEATGRLHHLLADLAAARAHRVYVINPKHVSAYAKGVGQRGKTDALDATVIARYLDRERDGLHPYTTPSALQRTLRDLISQRAAVVRHRAALQQSIGATGNEVNRVLKRAHQAALQSLSTLLAEINKELKRALSAHPLLESKRKQLQTITGIGFVNSVALTRRFDRTPFAHSDAVVAAYGLDPRPKDSGTQVGRRRLTKQGNAQDRRLIYLAAQSASKTKLFSPLYRSLLAKGFSTTEAIVIIARKLLRIAFALWTTGQTFDPQKVGINTCQKP

SEQ ID NO: 368762 - protein, 408 aa, unidentified
MKLFVGIDVSSEKLDTCFLTSEDQILLEVSLPNNVVGASKIKEHISHFADLIRYDRIIIGMEATSIYSFHPSTFLSEDSELKSLGVEVVVMNPKAIHRFKGLFEEDKTDKIDAYRIADFLRFDRFNTSLIKEEQYMALQRLTRSRYQLIGQLTEMKQHFLENIYYKCNTLTKEIDTSVFGATMMDLVTDSMTLEDIANMSLEDLAAILQEKGRGRFSNPEKLAKSLSKAIRDSYRLGKVMQNSVDVILASYAMMIKTIKKQIKELDKAIQQLFEILPESKSLLSIPGIGPVYAAGIIAEIGQIQRFENEAKIAKYAGLYWKRKQSGNFESERTTMTKTGNHYLRYYLIEAANSLMRNEPVYREYYLKKYHEVPKHQHKRALVLTARKFVRMVDVLLRNHQLYTPERSV

SEQ ID NO: 368763 - protein, 347 aa, unidentified
MFAESVDVVIGVDTHRDSHALALVDAGLGVLVVEERVEANRAGYRRALKVASGCGQRRLWAVEGTGSYGAGLARYLQQRGERVLELERPARSGSRGRAKSDALDALRAARAALTGEPLAELRSGGRREALRVLLVSREASVAVRRRGLNQLRALVLTAPAELRERLLGLPKGELVNRCIALRPRPDQQPQLRGTLLALRSCGRQVKLASREAATLERELAALVQQLSPQLLNHYGVGPITAAQLLVSWSHPGRLRSEAAFARLAGAAPIPCSSGKTIRHRLDRGGDRQLNRALHTIVLARRRGDQRTIAYVQRRISEGKTEREAIRSLKRYNARSLYRLMEHTNRDA

SEQ ID NO: 368764 - protein, 357 aa, unidentified
MHEDKDIILVADYHAENIEFRWFNQATGEERTGKFPTSQTGILHLIGQATKELEPGGQVVWIMESTTGWARVKDLIGPRAKFLLANVLQMPLPPKARRRKTDKIDTGRIMREYLHGGLPLSFQPKVWWRRVRRVVDFRQDLVERQTAIKNWIGSLLHHETWQNRKNLWSACGLRRLRAMRLPPEDRMLVDLKLAQLEQLEQELVQVEAQMRQIYDAWPEAQWVDEVRGIGMVTAVSLLAHIGPIGRFPTAEDLISYAGLAPGMWQSDGTCHHGRIGGGGTDSHLRYLLIEATMWLRQIPRYRPTYDRVVKKRGKKIGRIVVARLLLRSLHKMLSARVRFNAMPRPTAKETATAGCSK

SEQ ID NO: 368765 - protein, 411 aa, unidentified
MNERKSWYAGVDWASRHHHVRLIDRDGRDLGERVFEHSGQGLTAMADWLMAASGAERPADIAVAIEVPHGPIVETLLERGFCLHALNPKQMDRFRDRYFPAGAKDDSRDGLVMASALRTDPHCFRPLAAADPVIVELREWSRIAEQLGEQRGRLASRLREQLWRYFPAFLDLDDALAAPWMIELWRAVPTPRKAKRVSNSTITAILKRHRIRRFDADKVLAILRQTPIAVAPGTAEAAQANITLLVQSIRLINQQIAQAHHQLDALPKHLADKDPEPGQIKQRDAIILASLPGLGRINRATLLAEATDALQRADYSALRALTGVAPVTRRSGRACSVSRRYACNKRLANAVYHWARTATQHDPISKAKYAALRARGKTHGHALRVVADRLLNVACVMLRNGTTFIKQSPST

SEQ ID NO: 368766 - protein, 343 aa, unidentified
MQITTIGLDLAKSVFQVHGVDAAGQAVVRKSLRRAQMLPSFAKLPPCLVGIEACGTSHYWARELIKLGHEVRLMPPAYVKPYVKRGKTDAADAEAVCEAVTRPTMRFVPVKSSEQQAALSMHRSRDLLVKQRTQLINMIRGVLAEFGVDIPKGLERALLMARQIVDGKAPEVPIEAAKIVTTLSQQALDIHVRLREIDRDLAVCLRGNDVARRLMTIPGIGPVGATALAASVTDPHQFRSGRQFAAWLGWTPLQKSSGGKERLGRITKMGDKYLRKLLVVGMTALVRREKQNPAVDPRLADLLARKPTRVATVAMANKTARIIWAIMARGETYRAGHRPKLAA

SEQ ID NO: 368767 - protein, 391 aa, unidentified
MAAQFEVIHPCCAGLDVHPATIWACARRLGPDHRVTESIRQFGTTTAELLGLADWLQGHGVRIVAMESTGVYWKPVFNVLEDRFPIVLANAQHLKKVPGRKTDVIDCQWIAKLLQCGLVRNSFVPPRSVRQLRDLTRRRTQLTRERASVVNRIQKVLEDADVKLAGVASDVMGASGRAMITAITRGTTDPEALADLARGSLRKKIPALKEALSGLVTDHHRFLLREALDQISAPDRLIRKLTAEVERALEPESFSTARQLLVTIPGVDLRAADVLIAEIGVDMSKFPTAGHLCSWAGLSPGNDQSGKRRRQAKTTKGSQWLRTTLVQVARAASHTKKTKLSAQFRRQGPRLGKKKASIALAHKILVIVHRMLKDHTAYQELPARPYPCPEA

SEQ ID NO: 368768 - protein, 371 aa, unidentified
MNSIVYVGMDVHKEQYTLCCYSYETDKVEYKQTIPSDYKLVLKYMEQVRSRYDGEVTFVCGYEAGCLGYSLYHQLKEHAVDCKILAPSTMGITNTHHVKTDKRDAANIAKCLAFHTYSEVYVPDNDDNDIKEYIRMRDDQKLYLKKVKQQILAFVLRQGKRFECGKTYWTIAHLKWLRTLELSALQRETLDEYLLTYEYLTEKINRFDERIEELASTERYEKKVKHMSCLRGIKTHTALSMIVEVGDFERFEKAPKFASFLGLVPSEDSSDTRVNRYSITKAGNSHLRRLLVEAAQSYTRGTIGHKSVALKQRQQGNPPEIVAYADKANERLRRRFYKMTLNKGVNRNVATTAIARELACFIWGMMTEHVS

SEQ ID NO: 368769 - protein, 391 aa, unidentified
MSMYFVGIDISKYKHDCCIISAADQQIVSKFTVKNDKDGFEHLLTTLNSLSNPEDIKIGFESTAHYALNLELFLENAHHSFMEVNPVLIKEYKKSTTLRRTKTDSVDCESIARWLMTVEYKPHSKGFYHSYSLKSLTRLRDRLIRQRSFYLVKITNVLDHTFPEFKPFFNERLSKTAIYLLENYGSAEKMAHMNSASYDKLRCASRGKFSIQQFLRLKELAANTVGVNNSIFDIELNSLLTLYNSLCKEIKTLEAEITKLIEEVHPHYMSIPGIGPISAAVIYAEYGDISNFLNPGQMLAFAGIEPGINDSGTESHGGRMVKHGSSQLRYVLLNACLPLIRFDITFATYYAKKRAEGKKHRVAITHVAKKLIRVIYALERQDVDFNVQKLR

SEQ ID NO: 368770 - protein, 340 aa, unidentified
MVPISSFPLTLIAKHNIRINMSFLITIGVDIAKFKFDVACLVAGKYKHKTFTNDEPGHVAFTAWFLALCGDVNPLICMEATGAYSFPLADFLVRQGHPVSLVNPAKIHAFAKSELSRAKTDKADAKLIARYALTMNPPLWTQPPANIRELQALVRRVEHLLEMIRMERNRQDTANAKITDSINTVLGILEAELQATRKAIHDHINNHPDLKQRGDLLATIPGIGDASIAHLLIALSQHHAFIHAKQVVAFAGLAPALRQSGQWSGNTHIAKNGDALLRKALYMPALCALRFNPLIRTFSERLKANGKNGKAIACAAMRKLIHIAFGVLKSGKPFDPNYAA

SEQ ID NO: 368771 - protein, 458 aa, unidentified
MGRNESKNKDRRTMSVLHPNAAAIDIGATMHMAAVNADRTPEPVRSFGTFTTDLHRLVDWFAECGVDTVVMESTSVYWIPIFELLDARGFAVFLVNARDAKHVPGRKTDVSDAQWLQRLHSFGLLRASFRPKGQIVELRAYLRQRERLLEYGASHIQHMQKALTEMNVQLHHVVSDITGVTGLRIIRAILGGERNPAVLARMRDRRCHATVETVEKALAGNYRAEHLFTLEQALALYDMYQQKAFACDARIEAVLKELSVRRGRGGGQLPAARQNRSRQQNSLLFDVRAALFALLGKDLTQINGLGPYLALKLIAECGDDLSAWPSAKHFTSWLCLAPSNKISGGKVLSSRTRRSGSRAAALLRLAAATVGRTDTALGAFYRRLSARIGKAKAVTATARKIAVLFYNAVQHGMEYVDPGASSYETRYRARVIDNLHRRAKAFGFALQPIDPTPGIAVS

SEQ ID NO: 368772 - protein, 310 aa, unidentified
MKSPVVGIDVGKYELVIYLNDDYHTVSNEESALKSWLKKYAAVLKKIDLIVFEPTGGYERTLKTCLEDNNLPYRRVHANHVRAYAKATGIAAKTDKIDAKILAEFAIRMEIKAKPEMQQYGALKALLTRREQLIGMRLQEKNRLETCEKLVGKWIAKNIEQLSKQIEQIEKAIDNEIDQDDGLKKLYQLYSSIPGVGKITSLQLIVDLPELLIEHDKTLAALVGLAPWNRDSGKMIGRRRTRGGRIRIRGLLYMAALVAARCNPELKAYYKKLKNKGKASKVALIAVAHKLLKILRSIAQRQTPWVAANE

SEQ ID NO: 368773 - protein, 339 aa, unidentified
MQVTTVGIDLAKHVFQVHGITKDGGVVFNRAIRRAQLIQFFTKLEPCLIGMEACGSSHYWARELTKLGHAVRLIPANYVKPYVKRGKSDANDAEAICEAVTRPTMRFVAPKSEEQQAVLFLHRARDLIVRQRTQLSNMLRSLLAEFGVIIPQGTGAAVKYAKGVLEGEKPALPEIAIDVLRQLSHQLVAMHLRFRWYEMRMRLHSKLDKRVMLLRTIPGVGPVTASAIVATVGDAKQFKNGRQFAAWLGLTPLNLSSGGKERLGRITKMGDRYIRRLLVTGMTARLRQMKVNPDRVDPWAIGLLERKPARLATVAMANKTARIVWAVLTKNEYYRPHSA

SEQ ID NO: 368774 - protein, 419 aa, unidentified
MKSIQTKKVKVVNDKTLIVTVDVSKDKHMGYSRCPDRTETKPFEFFNNGRGFNEFWNRISMVKKANNLEEIIVGFESTGPYAEPLIQFLKKRDVKLVQVNPMHTKRLKELQGNSPSKTDNKDPKVIADIIELGHALTVVVPEGAAAELRRLTQARERSMQRRTALLNQLQGLIFIIFPEFLQIMKDIKTKSAQYLIKHYCTPHGIEECGVESLTHTLRKISRGKLGKGRAEELFNAAKTSVGITEGQKSIVFEIKEILAYIEASERFIDEVEKEMTHNLEQISYSRFILSIKGIGEVTAAGIIGEVGDFSKFNTIGEIEKLAGLDLFEISSGKHKGSRRISKRGRSLLRKFMYFAALNVIRKGGILHKEYQAFVDRGKPKLKALIAIARRLLRIIFALVRNHSEFTVNYSKPSQLKMAA

SEQ ID NO: 368775 - protein, 457 aa, unidentified
MRTRSKRTPGIEEAHPFAGMSKVNSNAAGVDIGAVEIVACVAGDESTQIVKAFGNYTVDLQSIGKWLSEHKVKTVAMESTGVYWIPLFEELERQGFECLLISSRSLRRVPGRKSDITDAQWIQTLHNYGLLESSFRPQAELVALRTMLRHRGQLLEHRSPHIQHMQKALLQMNVQLSQALSDVTGDTGQAIIRAIVAGERDPHKLAAMRDRNCKKSEEEIGKALTGTWREEHLFIIKQSLELYDFYTRQIEVCDAEIDRMYALMRPDWKVDDLPPLPPKKRNSHSKNAPQNKEEIRKHLKRISGVDISMVDGFGVSLAQTVIMEIGTDMSKFPDEKHFCSWLGLAPKHEISGAKVLKNKTLKTRNRAGQAFRMAAQSVKQADCVFGALYRRLRARLGPAQATVATAHAIARVIYRMLKYQLEYEPLSINEYEKKYEEQQIKYMKKKASKLGFQLVPA

SEQ ID NO: 368776 - protein, 385 aa, unidentified
MQSMIEGQSHFQPFGLSYWGFEDLNKGVGSMTASYEYHIGVDYHKSYSHLVVQDSSGKTLRSGRVKNDRQSLGGFLERYRENSHAVVEATRNWMVMYDWLDDICDDVVLAHPLKVKAIADAKIKTDKIDATVLAHLLRADLVPEAWAPSEKSRDLRVALRERMFYVRLRTMTKNRIVTVFDRYPEQTAQLKKLGDLFGKTGRVQLAQVNVSEIDRIQIDRGLDFIGDIDVRIKQSEATIRAMTKANANVKLLKTIPGIGEFFARLIDAEIDDISRFRNPKKLAAYAGLVPSTYSSGGKTFHGKIIKQGNKWLRWAFVEAVTPAIASDVQLRARYEHLKIRGVNKARVAIARKLLTIAFQILRDQRAYERRGESTMEGTSTISRLS

SEQ ID NO: 368777 - protein, 401 aa, unidentified
MSKKNTRNALDTSLSYAVIGLDLAKADCAVAAVPCSDDDLGLIDRMDYESLFEQAEKLKPTLFAMEPCCGYSQISLRLQNMGHEVKVISGHAVQNWIATHKSNQKTDLNDATALAKLALYDHDLQPIRVKNVEECRIASVQAIRIQLRTQATKSLVCFKSLCQCWGIVIRRGSLNTKKMAEAVAAVEKLLGAEVASSLMILRDAYKFTMKQINALDKLLDALVEANEQARTMNTVLGIGTQTEARLALTTGDIKRFPMPRSYVAYFGLAPRNIITGHSGTPSPSKRGALKPVSSRGQGKVSRRGDRVARSFIIQGAATIYMLYCKDMLPECQLRRWLHEQIKRGKPYGKIIVSLAAKLLRIVWALLTYGEKFDSHKAGVPRSVLAAMEKPLKHDAAAESAA

SEQ ID NO: 368778 - protein, 419 aa, unidentified
MAKIDTNPTGYVLVAIDISKNRHDILIAAPGKKRRRRVTLMNTFEDYRRLIDLLRDYGCPVRIGFEATGNYHRTLVYQLAKAGFELQLISSVAIARTREALHNSWDKNDPKDAQVILHMLEIGVVQVFYDPLIAQTNDIQELSKTHDIVSRSKTQLWHRILTHYLPLYFPEADRFHRNSRTEWFLAFLEMFPSPHMISALSKEEFISQAWEVVGRKVEKKLLLSDIYETAKDSIGLPIAADSDAIRMFRMVLAEGRSLIRQRDTIEARADELLSNQEDYKLLRSIPGIGPISALTILAEAGDVRRFRHHRQFLKFCGMDLATIQSGMFRGRSKISKYGNARLRRMLWVAAHAAVLKRANSFRDKFERYISKDRHNPDLRRKALTAIAAKMARTVHAVIKSGAPYRPFFEGTSPGGKTSF

SEQ ID NO: 368779 - protein, 355 aa, unidentified
MDNTKYIGMDVHTETISIAVLNSAGKLVMESVIETKALTIIQFVQGLRGDLHVTLEEGTWAAWLYDLLRPHVNQVLVCDPRRNALLKVGNKSDRMDARKLAELLYMDKLNAVYHGEHGVRTLKELSRSYLAISSDLARVMTRLKAVYRSWAIPCAGKQIYAPRCRGEWLGKLSEAGVRRRAEIYYEQLDALRSLRQQVRRELLAESAKHKASKLLCEIPSIGPIRAAQLIAILQTPYRFRGKRQLWAYGGLAIETHSSADHRYVKGQLQPSKRQVSLRGLNRNHNHELKNIFKGAAIIAATKPGPLQEFYANLVAKGMRPEMARLTLARKIAAIILIVWKKGVSFDAEHLKPQTA

SEQ ID NO: 368780 - protein, 450 aa, unidentified
MRSTYAGVDWASEKHDVVIADETGEEILAATFAHDEAGVRGLCRTLVRHEVTLVAIERPDGLLVERLLDAGLRILPLHPNQVAATRDRFRASGGKSDRFDAFVLCELARTDHHRFRVLEPDSDQTKALRALTRAREDLVGTRTALVNQLRAELAGFWPGPLGLFTSLHSQISLAFLERYPGPADARGLGEQRLQAFLARQRYSGGQKPARLLAKLRRAPEARVGELELGVRRALVLSLVATIKTLNEQIRQLERQIATAIREHPDGPIFLSLFKKPNSVITAAELLAEIGDCRGRYPTRDTLAADAGQAAVAVESGKRKAACFRWACNKRLRQAFVTLADTSRHHNPWAQDLYAAALARGHDHPRAIRTLGRGWCRIVWRCWQDGVPYDPARHRALQRHVTVTIPTSSGPRPDTAATQRMAGAAVTPTAARRAERAALDGKPASAITLGG

SEQ ID NO: 368781 - protein, 342 aa, unidentified
MSQFYVGMDLHTSNLQICIMDQDGKAILEKKTSCCFTQILELLSSYGPDLKIAVESTYNWYWLVDGLMEAGYDVRLAHAYGLKLITGAKVKTDRRDARRLARYLRLDELPEAYIYPKEKRPYRDLLRRRMNLVQFRSAAYTSLRIQFRQYNCDTFSFDGLKGIDDDIIEGLTLPDPTKLYTKMTLQHIHLFSEHIKVLEREIKNSVKTEPEVELLKTSPGIHDILGMTIYYEAGDVHRFKSDRHFASYCRVVPPISSSGGSSSRGRGGKQGNPYLKWAFCQAATHAGRYYTDCRRFKERHARRRSGSLGRLKANNILAHKLATAAFFILRDGVPFDHSKMFN

SEQ ID NO: 368782 - protein, 380 aa, unidentified
MPTDRQPATSSEPATILISFELSQRSWVITLRQPGSSKLSRHTLAAADTTALTDLLRRQRRLAEQTHGGEVRILSIQEAGLDGFWLHRWLERQGIESHVVDAASIAAPRRKRRPKSDRIDGEVLLRVLAAWVRGEPRVCSMVAPPSPETEDDRRLTRERTYLLTDRVALTNRIGGLLASQGIRDYQPLRKDRRQALAALRTGDGRALPARLLAEIGRMLERLELLLAQIAAVEAERDALLAAADETSAPALLLRLRGIGPSFAGVLWLECFRRSFANRRQLACFGGLAPTPWRSGGIVREQGVKGGGQPRLRTTMLELAWLWLRHQPGSALSQWFQTRTAHAGKRERRIAIVALARKLLVALWRYVTDGLVPEGVVMKGA

SEQ ID NO: 368783 - protein, 323 aa, unidentified
MQGKATLAPNAPEHIHVGIDVCKDWLDVFLHPVGRCLRLSNDSLGLKRLKRELATFHVVRVVMEATGKYHRLAMRNLHDSGFCVAVTNPARARYFANALGILAKTDAIDARILALFSEVMDPRATIPCSRNLEELQELARARQGAVADKTALQNQLGEAITGFLRLELKRRIGTMDTHIARLEAEIVRRIQLDPVMARRVEILDSIPGVAEITACAVAIGMAEMGTCTNKEIALLVGLAPVACDSGDKSGKRHIKGGRGHVRTALYMAAVSAITWNPDLKIFYDRLIAKGKLKKVALTAVMRKLVTLANTLITENRIWTPIAP

SEQ ID NO: 368784 - protein, 454 aa, unidentified
MEKKKMSLQVINHYAAGIDVGSRTHVVAVDQNPENVRSFGVYTEDHHELIVYLNSHNITTVAMESTGSYWQTLFSVLQRSGFDVTLVSGSQTKNVKGKKTDVIDAIWIQKLHSLGLLSGSFLPNDIMQELRTYYNHRQHLIEQIARYTLKMQKALRLMNIRLDVAIRDITGKSGMTIIAAVLEGHRDPQHLASLVDIRTKKSKEEIAKSLCGTWRSELLFELKACLDLYRYFNQALKDCDDIIERLLIEYIPKRSVSAKQEKIFKGYNRKKAKNAPAFNVSKPAFQFFGTDLFAITGISHNTVLCLLTNLGDDIYKFPTAKSFASWLRLVPNNKISGGRILSSRVKKGKNPIATVLRQAANSIGNQKDHDLASFFKRIAFRKGRVAAITATARKIAIIIWNMIIKNEPYSSHKLLTDNENYKKKRLRNIQRNIFSLNLSQAELRYLFERNLSLI

SEQ ID NO: 368785 - protein, 391 aa, unidentified
MRTVFGIDVSKASSEVAILVNGERVHSYTMPNDIIGFSHLLKDLKTVSNPEIIFEATGVYSRRLQAFLEENSYDYTRLNPLEAKKQLDSLRVRKTDKIDAEKLASSQFVLNRKPTYVQEEVYQNLHDLSRFYQNLTEDIVRTKNRLHKVLQVAFPEIENLLSTPTGEQYWNLVSIFPTKHWVLELSEVELKETIRNSTSKRISENRVGNLAEKLVGLAKQSYSAISKTSPIIEEVKYNAQELIRLTNRREQILEQLIELAKPLPEYEILLSIPGIAETTATSVIGELGDIRRFKSAYQINVFIGIDLKHYESGDFLGQEHITKRGNPYARKILHKCIHNIASASHTNLFHISDFYEKRKRQSQTTSTKPHTIASIHRLIRTMYYLIMHNEL

SEQ ID NO: 368786 - protein, 388 aa, unidentified
MPAAETPVAYLGIDVGKSSHSACALDAGGGVAFRAELANRPDDIDRLLERAGSGALVVVDQKRNIGALVLARAHAHGNPCAYLPGYAEKQARGMFPGIAKTDAIDAEVIARTALGVPRALRPAPEEPEGTASLRILSSQREFASSARTRAKNRLRATLLEADPALEGAVDPSSRWQVSVLAEFGGAAGCSAAGWRRFSNAARRAGAPVAGARRLWEALLASSRSGRRLPAGEDVAVRILAREIASLDADIEELDSLVADSLAGDEVYKCLLTVPGIGPKTAAALVTSIDISAFRGHDELASYCGVAPSDRRSGSSIRSTSPQHGGNRQLKNLLIFSCNSLIGTDNRFGRYYGECRARGMRHGKALKAVARKRLKVIYAIMRDAVPYAA

SEQ ID NO: 368787 - protein, 344 aa, unidentified
MKYVGVDLHKKSISICVVVLEGRKRKVLARKRFACQDVDGIYQFFRELGTFQVVVEATASYEWFAGLVERLADRVVLAHPKKLRIIAESKYKTDKIDAWVLAEFLALDMIPEAYRPTPRQREHRALVRYRYYVQKRTVSVRNKMRHILANYNADVKELFTAQGLAYLGEQKVSAADRFVLNHLLEEWREHRRRLVEAEKQLETFAKEAPLAEQESRQVLATFPLAGPVTIDIVLSEVGDVKRIRSLKRAGSFAGLAPGFRESAGRRKEQGITKEGPRLLRWAMIQLAWRVVGRTAYWGGIFAKLEHRVGKKKAIVAVARHLAEAAYWMLTKGEVYRDPGSSRGA

SEQ ID NO: 368788 - protein, 344 aa, unidentified
MNSTTIAVDVAKSVFEVAVSIHPGQVHERHRLSREAFGRFLGAHPPATVLMEACGSAHYWARPAQSHGHRVVLVAPHVVRPYVVRNKTDRTDAKGLLEVFRNEDVQPVPVKSTTQQALAALHRLRSTWLATRTARLNTVRGLLREFGLIIPVGAHHVVPHVRAVLEDVDAGIPGLLRPPLAAAVEEIGELNRRIRAVERQLETAAADTLAVGHLRTIPGIGLLTATALVATVGDVARFPSARHFASYLGLTPREHSSGARRRLGAISKRGDTYLRMLLIHGARAVLWHAKAKAAASPDRLRIWALQLERLRGHNKAAVALANKLARIAWAVWRRGTPFAVLPAA

SEQ ID NO: 368789 - protein, 338 aa, unidentified
MEQQREYVGIDLHRKRSVIVRRSEAGETLSMTHIDNDPVILAAEVARAGEHPEVVLEACYGWYWAADVLAECGANVHLAHPLGNNWGNRRVKNDERDATDLVDLLRLGRLAESWIAPPALRELRELVRYRAKLVGFRTNCKEQVHAVLAKEGVRVSAADLFGPGGRRFLERCRLGQAYALRVGSLLKLIEVLDWEIARLAERVADELDDDAGYWTIQEIPGVGPTFASVFVVEIGDISRFPTPRHLSSWAGLTPVHRESDTKVQRGHISKQGSRLVRWAAVEAVARQSQPNPVTELRRRVADRRGKSIGRVAAARKLLTLVYWGLRDGEIRCLASEAG

SEQ ID NO: 368790 - protein, 406 aa, unidentified
MRVVHERCAGLDVHKSSVVACALLPEGRQLRTFGTLTWQLEQLAEWLCGLSVGVVAMESSGVYWKPVFNILEVAGLELLVVNARHIKAVPGRKTDVKDAEWIADLLRHGLLKPSFIPSRAERELRELTRYRRTLIEERAHEVQRLQKVLEGANIKLEDVISNVVGLNGRRFLNALIAGDYDPDTVAATANYGLQRKRELLAQALHGTLGTHQRFLLDQLLSHIDFLEQRVTALDQEVQQRSRPFEAAIARLDQIPGVGIRAAEEILAEIGTDMSRFPSSRHLASWAKVCPGNNESAGKRRSGYAGKGNRWLRSILVESAWCATRKKDSYFKVQYHRQAARRGRMRALLAVGHSLLTVIYHLLNDGVVYQDLGPNYFDQRDRSHITRQAVRRLERLGYRVSLTEGAA

SEQ ID NO: 368791 - protein, 425 aa, unidentified
MNTPDFAATIGLDWADQKHDLWIRPAEGTKGEHLQLEQTSDALHEWAAKLGERFGHRPVAIAIETSRGAVISALMAYDFIVFFPVNPKALKDYRAAFAVSGAKDDRTDAMLLEELVRLHQDKLRALEPDTELTRKLGGLTVNRRHLVDERTRLVNQLHSLLKTYYPLAETLLDGRMTTPMAAAFLARWPDHSTLQKAELQTLRAFFYKHNSRGAKKMEERLAALKPARALTQDQAIIDPARHLTTALAGLLKVLHQAIAVLDQDIAQTFDQHPDAALFRSLPGAGPAMAPRLLVAFGTRRERFASAAEVAQFYGIAPVVKQSGNTKTTHMRSRCPKFGRQTFHENAGCALHKEPWAKRYYEAQKGKPEGRHHMACRALAFKLIRIYYACWKQNTKYDGRRYLQALEKQGSPLHKKLQTPTKNAGE

SEQ ID NO: 368792 - protein, 403 aa, unidentified
MDVAVGIDVAKEFHWAVATRLDPGTGKAVAVLSRRVDNVPGQIAALAGELLDLAAPAGSVQVGIDMAGGIAKLLEVMLADAGLDIVHVPGLMVKNARRAARGGEHKSDPRDARVIADQVRSRDDLRPLARLGELDAQLGLLVSRRTDLVRDQTRRIARLRDLLCSIHPGLERVTDPTNKADLALLARYVTPAEIRRAGKARIVASLRRTGQYKAAILETLADSALAAAQAQTVCVPAEATAAAIVKDLAAECLAGRSKIAAVDAGITEVLSHHPDAALIASLPGMGAVLTAELLAVAGGLSRFTSGDHLAAAAGLAPALVQSGKVRYLQRPLTGDRALKRVFYQSAFCALPADPVSRAFYDRKRAEGKRHHQALIALARRRINVLYAMLRDRQPYQARPAKAA

SEQ ID NO: 368793 - protein, 333 aa, unidentified
MPRANSNLLDWDFMKSATTNEKIFVGVDVSKAALDVYRPDTKEGFKIDNSDEAIALLCSQLKKMKRNVMVVMEGTGGYEYLLLKHLAAHKLEAAVINPRRVRDFAKGIGLDAKTDPIDARVISKYAEVVVPKPMVTKSDHELKHVALVARRNQLLELVNQENNRLKQSWDDDAKQSIRDVLEMLKKQLKDIDSQLAKMIQADTENQRAIEVLQSVMGVGPVMISTVLAELPELGKLNRGEIAKLVGVAPINRDSGKKSGKRFIGGGRGQVRRVLYMATIVAIRHNPAIKAFYAHLKSKGKESKVAIVACMRKFITILNLLIKTDQLWEDKMSV

SEQ ID NO: 368794 - protein, 384 aa, unidentified
MNVGIDAHKRTCTVCVIEDGAVRESFAFPTTREGVSEFMERIPSLATVVIEASTTGKVISRMLTDKYLIHMVAPPERKRPIKTDLRDAERIVREDILQYLRRCYIPSAAIEELRFLVFQQIQVGRKIGRVKNQVHALLERNMVHDLDGFSDIFGVQGLRRMVEVQLPAQDRAALGRYLEELKLHAAHHRQLETELAKIAESDADALLLMSIPGIDFFTALAMKSRIGDIMRFPTKKHLCSYGAVVPGASNSGEYVSRHNRVKHGDMILKSALTCAVRGAVSAEKSSAVKRFYLKRLRRIGAQKPEVAAARKMACIVWKVLRTRQPYREEDKRLTARKRRILAWKAKRQESDPSDIRQLAEDLVGDVAVLERYPVDFEESGGRPV

SEQ ID NO: 368795 - protein, 351 aa, unidentified
MEVVHERCAGLDVHQHNVVACARTVASGRIEQEVRTFDTTTKGLLELSDWLSERGCTHAAMESTGVYWKPVWYVLESSFELVLANAMHIKNVPGRKTDVNDAMWIADLLAHGLIRGSFVPPTPVQELRDLTRTRKQLVREVAQHTQRIQKTLEDANIKLTGIISDVLGKSGRAMLEALIAGETDPEKLVALTSRRLKATRAELVEALRGRIREHHRFLLKLHLGQVDALRTAVREVEARVGETLQPFCDLAELLTTMPGVSDTVAHVILGEIGIDMSRFPSAAHLVSWAGLCPRSDESAGKRRSTRVRKGAPWLKTVLVQAAWAATRVKDSYLRAQFLRLKGNAGQCGDVN

SEQ ID NO: 368796 - protein, 348 aa, unidentified
MSKHAVPAGEVSGLLRRFAELRRKAAARTGRDLPIIVIQEAGLDGFWIHRVLQSEGIESHVVDAASILTSRRRRRAKTDRIDGETLVRTLMAYKRGEPRVCSMARAPTPQEEDRRRVCRERRTLMGERVSHVNRIKGLLSAQGVFGYEPLRKGRRERLEDLRTGDRRPLPVRLKAQIIRELDRLEVLLEQLKTVEAERDALLKPASDEAASPAAMLARLKGIGPETAAVLWSEGLFRQFDNRRQVAAYAGLAPTPWQSGSIDHEQGVSKAGNPRLRTAMVELAWLWLRNQPTSALSLWFHERVQRLGRQVRKTIIVALARKLLIALWRYTTAGVVIEGAVMKAAAAAN

SEQ ID NO: 368797 - protein, 343 aa, unidentified
MNEVITIGVDLAKNVFQVHGIDGLGAVIIGRQLRRSQMLPFFKKQPLCLVGMEACATAHHWARQLVALGHAVKLMPPKYVKPYVKRNKNDMADAEAICEAVTRPTMRFVEIKTRDQQSVLMLHRTRQLFVRQRTTLINALRAHLAEFGIVAGVGRNGLERLLKVIEDGEDDRVPAAARDCLLALRDQLEMVKGQVLDADRHILAWHRSSEVSQRLDDIPGVGPLIATALVASVPDPHVFKSGRDLAAWIGLVPKQNSTGGKDRLGHISKAGNRYLRMLLVVGALSVIRRAKQVGYTRRPWLTKLLQRRSTKIAAIALANKIARTAWAMMAHGTFYQEPQSEVV

SEQ ID NO: 368798 - protein, 385 aa, unidentified
MAEQIFKYSVGCDISKDAFNVCILEVSQDMQSKVKASHKFKNETKGFKEFDAWVKKHKRHDVPTGFYMEATGVYYENLAWYLFEQEYNVFVLLPYKTKHYLKSIGIKSKNDKIDAQGLAQMGSEQKHNPWRPHSKSIYALRALTRQHENVTKLKTSLQNQLHANEHSAVRNATVKKQLNATIRLLEKQLDELAGEISNLIDADEKLNQKYCQIESIRGISKLSWATIIAETSGFETFENQRQLVSYAGYDVVENQSGKHVGKTKISKKGNSRIRRILYMPSLVSVRLKEPALFNLYQRVHERTGIKMKGYVAVQKKLLVLVYHIWKNDKAFQSDYSKIFGEEESKDLFPFGFEETIKESSPDKRATQDEHSYELSSKVLFPLAQI

SEQ ID NO: 368799 - protein, 466 aa, unidentified
MIRYIGLDVHKETIEVCVLHGTGKVLARHKVPCQREAIQDFAQQQLTHEDKVVLEATTNTWAVVQLVQPFVQQVVVGNPLKIKAIAEAKIKTDKIDAEVLAQLLRCDYLPTVWHPDAATQQLRQLTAHRSTLIRDRSRIKNRVQSVLAQLLIEPPVTVLFTKTGIEWLRQVALPADDRLIINSELKILDQVEAELLVIDQRLSELAYPHEQVRLLMTLPGIGFAVAQALIAALGDPSRFRDGDHAASYLGLTPSTYQSARHCYHGHITKAGNSQARWMLTQAAQQAAHHPGPVGVFFRRLLRRKTRNVAIVATARKLVTIAFLMLKNNEPYRYAVPSTTEDKLQELRCQATGQRQKPRGPIKPKVRRPPGVRARITPPLQQVYALQGLPPAKLPSELADGEKKALKEKGVFRWTQTIQKPQEKLWVERHQAAKNSSEAPKTSSETAAKIRHDQNLIFSSQVPKSSK

SEQ ID NO: 368800 - protein, 408 aa, unidentified
MKDSRKRYIGLDVHKHYLIAVGVDDDLNVVLPVRRVEFSYLEAWLKKNLTKQDDVVLEMTTNTWQLYDELCAYAGSVLVVHPPHVALITRSQVMNDKIAASILARLLAKGLLVGVWVPPQEIRDLRGLVAQRKKMTGLATQAKNRLHAVLQRHHLLPPAGNPFHESQQHWWFTLPLGRLEKVNVQSDLETLRFAQAQQLRLTSIMEEIASEQEQVTRLLQLPGFGVVTAVTVWAAIGDIQRFKDAQHLVGYAGLGTKVHDSGTSSRSGRITKAGRRDLRLVLIEAAQVAANSHPHWKAELARLQPRLGRNKAIVAIARKLLVAVWYILAQHKTDRFVQPEAIAQKLLKFAYQLGKENRPAGQSAAQFVRQRLDALQLGQELTSIAWGSKKPIPLPPSANKVSDVPHTK

SEQ ID NO: 368801 - protein, 372 aa, unidentified
MAKSIRYVGLDVHADTIAVAICEGRGEGRSLGTIPNRPEPIRKLVKRLEPVSTLRVCYEAGPTGYALYWQLAGLGVKCEVVAPTLVPVKAGDRVKTDRRDAEKLARSYRSGDLTAVWVPDAAHEALRDVVRAREAAKKDELRAKHRLSKFLLRHGRRPPEGTKAWTEKYRRWLSSVRFEYGAQEATLLDYRTEVERAADRIERLEEAIDKAVEEAPAQMKAVIEALQALRGVAKITATTLVTEVGNFSRFVRPKLLMGYGGLVPSEHSSGQSKKQGAITKTGNAHLRRVLLEAAWTYRHRPNLCGRHKQRQEGISEDIKAISWKAQQRLNSRYWRLTSKGKNPGKAITAVARELVGFIWAVGVQAEREAAAA

SEQ ID NO: 368802 - protein, 422 aa, unidentified
MKTWNDMTHFAGFDWAKDHHDVLVLDGAGKIVSEFRFDHTAAGWTLCQEKLAQFPQVAIAVEAGHSAAIEKLVTLDYRVYPVHPRSSKSYRTRRLPSGTKTDRADCWALADALRLEGESWRVLTAPEPLVQQLRLLCRDEVALIEQRTALVNQLQQALYEYYPAALEAFGDWCAPSAWAFVERFPTPQSLVQAGKRKWQNFLHAHNLFHPEWNQKRMEIFAKADQFCGVEATIAAKSALAVATVKILQTLEAQLAGYRALITDCFKQHPDHALFASLPGAGPKLAPRLLGELAALKPLADTPQALQCLAGMAPVSYQSGKVSVVYLRHQCNRFLRATVHLWVDLSRHYCDWARVYYETHRKKGQSHACALRCLGMRWLKIIAAMIRNQTPYDAAIHTRNQLQHGSWVLQLQPIQVVKKKGGD

SEQ ID NO: 368803 - protein, 350 aa, unidentified
MMEITTVAVDLAKDVFQVALANRSGRVVDRQRLTRRQFERFVETLPTETDVIMESCGTSHYWGRRMQSRSMRVRLLPVQYVRPYVRRNKTDRADTDALLEAARCGDIRSVPVKTVEQQTLQALHRVRTQWQTARVARINAIRGLLAEHGHAIPVGARTVLRRVTAILTDPDAAVPDVLRQTIALVVDEVHGLEEKIAGMDRNLKQIARVHPVATRLQTIPGVGVLTATALIGAVGHIHAFRRGREFASWLGLTPRESSTGARRYLGRISKRGDVHLRCLLTHGARAVLRVALQLADRTPDRLTRLQQWAVSIATHRGRHKAVIAVANKLARIVWAVWHYDVAFEAQPRVA

SEQ ID NO: 368804 - protein, 371 aa, unidentified
MTSIIYVGMDVHTTNYTLCCYSVENDTVFATVDLEPDYMNIVKYLNRVERNHGGDCHFVCGYEAGSLGYSLYHQMTGQGFECVIMAPSTMAVTRKKKGIKTDKRDASNIAKCLAYNTYNHVYVPTGEDNSVKEYIRMRNDTKDTLKRIKQQTLAFCTRHGKRFTEGSSKWTQKHLEWLRKLDFGDELLNETLREYLTSYRQTTDKVELFDKRIAELASTERYDERVKRLSCLIGIKTHTALATIVETGDFKRFPTPQHYASYLGLVPGEDSSGSSVQRTGITKAGNSHIRKLLVESAQCYSRGRVGVKSKDLKKRQSGVDPEVVAYADRANDRLRRKYYRIMFRSKHNIAVTAVARELACFVWGMMTDNIA

SEQ ID NO: 368805 - protein, 482 aa, unidentified
MKKKNIYVNQSQELLTLFEEAGNGAKVMCVPIDYAKKDHVVMFCNGYGHILRKPFSIKNSPEGIEYLTEQVTRSCSHRRIDPKHVFFGGEDVGSYAENFVSTLRSGGWIVAGVNAHDAKEQRVNIQASTDRLDLMGIASMLLNRRGNCSPAQSGIYRNLRTVVRHRRKLVVMSTEVKNRMHTVVDRLFPGFLDEKKSGICSFSESSLYLMENRFSPHQIRRRKKQKLIEILHRYGTSNPESTAAKLQEYAARVLNTPDEYISTLQLSLTQHVKHFRCLQDSINQLEHEIAVWLAQTQGAFLTTVRGIGIVLAAGVSAEIGNPHEQEPLNNLVSYTGIIPRVKQTGGPEGKTYTGKVAKRCNRILKDYIVQSGNHMGLHGPEDLMADYKRREAAGQHADFGIGRRYLRMGMCLMRTSQIYMPQRLRNTEVKPEERAGYYLMTWPSLRGKWNKTGALEAAFEKDRPLGRWRNMVQELYEIKLKL

SEQ ID NO: 368806 - protein, 388 aa, unidentified
MPQSNDLSRSFTALNQDNTLIVVIEMGQSSWLVAGMVPGVERQPLKKLDPEEDQLLKLINRWRHEALQAAHAIERVVVAYEAGRDGFWLARWLRERGVEAYVMHASSIAVSREHRRAKTDRLDTELLMRAFLGWLRGERRHCSMAAIPTIEEEDAKRPNREHEKLVGDRTRIVNRMKSTLSRFGIRGFKPTLRKADEKLGELRTAEGTLLPENTRAELRRDMTRLRIVREQLKEIEQQRLRKLEAAAPAKKGPHAMVGLIARVTGIGIETADMLVNEILSRHLRDSKAVARYAGLTGSPDESGKRRREKGLARAGNARVRRGMIQLAWRFLRFQKDSVLAQWFRAPAADGRSGTRKTMIVALARKLLIALWGMATSGEIPEGVTFRAA

SEQ ID NO: 368807 - protein, 316 aa, unidentified
MQAVTTIGLDIAKSVFQVHGVDAAGQVLIRRQLKRRAVLAFFQKLPVCLVGIEACASSHYWSRELQALGHSVRLMPPAYVKPYVKRQKNDMADAEAICEAVARANMRFVPTKTPAQQSCLMLHRTRHLFIRQQTAVINSIRAHLAEFGIVAPVGRKGVTELLHIVADPSDKRVPEVARACLAALGNQLLSIKEQIVEFDRMIMVWHRSNETSKRLHYIPGVGPMLATALVASVAHPRTFRSGRNFSAWIGLVPKQHSSGGKDRLGSISKQGDRYLRSLFVAPTKVAAIALANKLARMAWAMMAKGERYRQPVALAA

SEQ ID NO: 368808 - protein, 471 aa, unidentified
MNNHRRRPGKHRRHRPGKPRTSPSVLERINPNVAGIDCGSAEHFVAVPPDRDPCPVQSFRTFTGDLVRLADWLVACGVMSVAMEATGVYWIPVYDILEARGLNVLLVNARHIKNVPGRKSDVSDCEWLRELHSVGLLRGSFRPTATIVALRTYLRHRQTMIEDASTYIQRMQKALVQMNVQLPLVVTDITGVTGMSILRAIVGGQRDPERLAECRDPRCQASKAEIIEALTGHYQADHLFVLQQNLALYDACQQQIAACDRAIEAHVQILVATVEPPSTPLPPARARTGLKNEPAFEIRSPLHQLTGGVDLSQIEGIAPYSALKLLSEIGTDMTRWSTEKHFTAWLTLAPKNRISGGRLLSSKTQSSANRAAQILRMAAMSLGKTQTALGAFYRRLALRIGKPQAITATARKLAVLVYRALKGELVYRDPGADAYAAKQRTRIVRHLRQRAGSFGFDLVNRETGEIVSAVS

SEQ ID NO: 368809 - protein, 306 aa, unidentified
MKEYSIFIGLDVHKDTIDIALVEEDRKSAVRYYGTIGSDLADLEKAVRKIKKAHPGVTLHFVYEAGPCGYGLYRYLTKAGHECVVVAPSMIPKRSGNRVKTDRRDAMMLAGLHRAAELTPVYVPKDEDEAMRDLVRARQDAVKAGRVAKQQLKSFLLRHGIKFSRLADWKQSYMTWLAGLTMPNPAQQIVLQEYINTVKDCTDRIARFTVQIKEVLPSWELNPVVMALQAMRGVSLLVAVTAAAELGDLKRFARPSQLMSYLGLVPSEHSSGDSRRDRGHNQGRQRPCKESPGRGGPNLPTSCAHQ

SEQ ID NO: 368810 - protein, 347 aa, unidentified
MRFYTNQHKFYCGIDLHARSMYVCILSQDGEILLHRNMKAAPEPFLKAVAPYRDGLVVAVECIFTWYWLADLCADEGIPFVLGHALYMKAIHGGKAKNDKIDSQKIAALLRGGMLPQAYVYPAAMRATRDLLRRRTHLMRKRAELLAHVQNTNSQYNLPEIGKKIAYKANRAGVAERFAEAAVQKTIEVDLALITYYDELLKDLELSLLKTAKHHDANTLYLLQTVPGIGKILSLVLLYEIHRIDRFPSVQAFASYARLVKCSKESGGKRLGTSGKKIGNAHLKWAFSEAATLFLRNNPQGQKLLARLEKKHDKGKALSILAHKLGRAVYFMLKRKVAFDMEMFLQT

SEQ ID NO: 368811 - protein, 317 aa, unidentified
MKDSLIFVGIDVSKAQLDVAIRPTAETLSVANDKAGIKALVKRLAKIQPALVVLESTGGLERQLISALVSAEIAVVRANPRQVRDFAKATGQLAKTDSIDAAILAHYAQAVRPQLRPLPDAVTVELRALSARRRQLIEMIVMEKNHLVTAAKAVAKDITEHIGELEQKLQGVDTDIDGLIEQSPIWKEHEDILRSAPAIGPVTSRTLLAELPELGTLDRKQISSLVGLAPFNRDSGTLKGRRCIWGGRASVRCALYMAALVATRYNPVIRDFYKRLKTKGKPFKVALIACMRKLLTILNAMIKHKSRWSETYSLQIP

SEQ ID NO: 368812 - protein, 388 aa, unidentified
MSPSFDASKSLTTLDQDSTLVAVIEMSQTKWLIAATVPRFERNPLKKLDADPDSVLRLLRRWRSEAIQAGREVRRIVVAYEAGRDGFWLARWLQARAVEAYAIHPSSVAVSREHRRAKTDRLDTELLMRAFLGWLRGEKRHCSMAAIPTINEEEARRPNRERDNFVRERTRIINRIKAILARFGIRAFKPNLRKAAEKLEALHTAEGMPLPERSRAELRRNLGRLHLLREQIHEIEQERLRQLSVVPDTEKGPLAMVRLLARIIGVGIETADMLVNEILSRGLRDRRAVARYVGLTGAPDESGQRRREKGLARAGNARVRYGMILLAWRFLQYQKDSALAHWFWARTADGRGGTRKTMIVALARKLLIAFWRLVTTGEVPKGVALRPA

SEQ ID NO: 368813 - protein, 373 aa, unidentified
MRARMIKRVMALKNDIMEKRLKQSLGIDVSKLGLSLSLGFLTDKLGKEFISHPDVPNDLSGYKEVLKWLKTSVDGTVDLVVVMEATGVYHQGIAHYLYSHGHAVSVMQSGRVKRYAQSLDQRSKTDALDSRMLSMLGLERSLRPWRPPSEELRELKALSRERSSLLKDKVMETNRQGAIDSGVHGNTKALKRHRDRLKLLNGQIAMIEEEMKEIVSKNEVLGRKIGFMMSIPGISFISAATVVGETLGFESITSAKQLTSYAGYDVVLRESGSFKGKTRISKKGNSHIRAVMHMPSMTCVRCNPTLKRFYNRLKPKKAKPLVALIAVQRKLLILMYTLWKSEKFYDEAYETKKQQKHKALAAQDNNLIDQLVS

SEQ ID NO: 368814 - protein, 348 aa, unidentified
MNQRYEKSRQYVGIDLHRRRSVIVRLDGEGEVLECVQIENSVPALIEEVGKAGVGAPVAIEVTYGWYWAVDALRAAGFAVTLAHPRGVASMQGRRAKTDKLDAKELADLLRLDRLATAWIAPPEIRELRELVRYRHRLVGERSATKASIHAVLGKCGVIPEIADIFGPVGTKMLDALVLPEPYGSRVASQRRIMAVLSAEIAGVEVETARRLKDNAEYRALLTIGGVGPVMAAIFVAEIGDVHRFATADQLACWAGLTTRVDSSDRHTRYGHVSKQGSRLLRWAAVEGCQRAREPYLAGKRREIIERRGRRAQHIATVATARHMIKVVYYTMRDGHARCLDAPTPVAS

SEQ ID NO: 368815 - protein, 324 aa, unidentified
MELYGGIDIHKENLAGCIMDKDGNIKREHTFPSSKKALEKFLCNIPSSDITIAIEACGMWRGIHKILTELGYEVKLANPKKTHDIAGSKKMDKIDAKTLADLTRTHYLPEVWIPDEQTLQFRDITRHKANLTRLRTQVQGKIRGYLLRKGAKFSKLSKEETLSTLAKEDPDIQNLVHVYQCLKQEEREVMRRIKRISQNKKETTMLMSMPGIAEFSSLMILAEIGDIKRFPHAKELVSYAGLCSGIYQTGTTERTVHNTAVNKWLKWILYECSGRAMMLDPRFQEYYNKIKEKKGFKTARRAIARKMLTIIYYMLTREEPYRAS

SEQ ID NO: 368816 - protein, 342 aa, unidentified
MKDSIYDHYIAIDWSVKNMAIARMTKKSNKITTIDVPSDVVELQTYLKNLRGTKILAIEETSTSQWLYTELEGFVEKILICDPYRNRLLGEGAKTDKIDAAKLVHLLKAGLMKVVYHCAEKFIYIRRVVSGYEDMVKAGVRLKNQRYALLRTCGKSGKEKDINVGDQGEQFVLECLDRQIKAYEEEKNGFGKEFVRLARKHPEIKHQKSLPGIGTINAVKIVSRVVSPYRFADKGHYLSYTGLVKLEKISGGRSYGKKNPRYCRQLKSVYKSGVLAAIGGNNPINDYYEHLIREKNYPAHNARNSACRRLATLSLGVFRSGKKYQPYRRDRVKGNKEIPSDL

SEQ ID NO: 368817 - protein, 407 aa, unidentified
MTRYYLGVDWADTEHAVWVGNEAGEEVMARSVEHTPAGLGEFGRWLYERQAEGIELWAAIEKPEGRVVDFLLDHGVVVYPVNPKALDRARDRFRMSGAKSDGFDARVLAEFLRTDHPHLTPLMPSSARAQELKLLTRDYQRLVRQQTRLVNQLTATLKEYYPRPLECFEELTSAGAREFLRSSPTPEALATLTPKAWQRWARAQHVSQARPVELWEALRAPQLSVPAHVVRAKARLVRVLVDELETVVRAVNEYRKAVDDFFTAMPEAEWARSLPAGQSGTTVPTLWAELGDAPGRWQGLRHLQAQAGAVPVTERSGKHQFVHFRFACNTHLRYAVHLLAFLSLRQSEWARAYYQRYRARGHTHHQAVRALGAKWLKIIFVMWDRQVPYNENDHLAMIARQQLRQVA

SEQ ID NO: 368818 - protein, 344 aa, unidentified
MEKPSYFIGVDMSSETFTASVGTYPWRVVGSPESFENSAEGFGNLLEWLQKHGYKPDESIVCMEATGVYGQPLAYYLVAHNYFVAVEPPLKVKRAFPTHGHKNDITDSENLAEYAYRFFDELHLWQPPDNVLKQVKTLLKTREQLTRNLTAYKNTLKVLKREVVRTPTAEKMYEGLIGELKSLIGKIDEEIRSLMGKHPFFNPMLNLLLSIPGVGLQLASYVIVITQGGKREPKSRELAAYIGICPYEHSSGKSVYRRPHSKKNGSGSIRKLLYLSSLSLRTHEYYFKEYFLRKALQGKPKRLLINNISNKLLRIICAVMRSGRPYIPGYMSLNPVALRVKKCA

SEQ ID NO: 368819 - protein, 388 aa, unidentified
MIYVGIDIAKLNHYASAIDSDGVVLIEPFEFLNDNAGFYTLLSKLNSFELDDIIIGLESTAHYGNNLVSFLVTKGLHVCVINPIQTATLRKNNIRKTKTDKVDTLVIAKAVALMDHPRFVTLYDIALMQLKNLGRFRRKLVKQRSRTKIQLTAYLDQVFPELQYFFKSGIHQKTVYAILKEAPSATRIASMHLTHLKNLLVSNSHGHFKKETALELRVLAQKSVGTADRSLSIQITQSIAQIELLDSQIDAVESEMKDIVTSLDSVIMTIPGIGPINGGMILGEIGDINRFSKPRKLLAFAGLDPSVYQSGNFIAKKTKMSKRGSSALRYALMNAAHNIVKYNQTFKEYYDSKRAEGRGHYNALGHCAGKLVRIIYKMLKDDVEFNLD

SEQ ID NO: 368820 - protein, 417 aa, unidentified
MTEFAACLGIDWADKKHDLCLFDTTTGKKTKQVLPHTPLAIAEYFTNLRARYPGQQIAVGLEQSRGPLLFALLQYDFLVIYPINPTTLAKYREAFSPSRAKDDPTDADYAAELLMQHSDRLKAWHPDDDQTRTLRYLVEHRRRLIGDRTRISNRMTSLLKCYFPQLLSWFPDLSTVLVCDFLLRWPALERLHGVKRTTLLNFFRAHHSVRSDTLEKRLSAIKDSVPLTTDRAIIDSSVLMISALAAQLKTTIHAVKQFDLEIEKLCAAHPDFPLFQSLPGAGDVYASRLLAVMGTQRDRWTTAQELACLSGIAPVMERSGQSVWIRWRYFCPKFMRQSFHEYAGESVKHSFWARAYYEQQIAKGKSRQAAVRALAYKWIRIIWKCWQTRKPYNEVKYLEGLRKKGSPLLSYAAKNAA

SEQ ID NO: 368821 - protein, 702 aa, unidentified
MNDLALHPSGLGSRTSDACLFGLSLCSGAGGFDLGLTIAIPGYRAVGYVERETFAAATLVARMEDAALDQAVVWDDVGTFDGRPWRGVVDILSAGYPCQPFSVAGKRLGTEDPRHLWPHVARIIGECEPPFVFLENVAHHLRLGFPEVASGLVGMGYKLAAGIFTAAEVGAPHRRERLFILAIREGDELADPARLLWDPVEWREPDGDDAAVADAPRQRQREPADEADAIAGSGSTWDEPRDDGCAVADTANRQFPQPGWRAERGEGSRPACAGLADADGERRLQTERGQPQDGGSDPCQPSLDDANCAGSQGRGDDIGEHAGERPAWPPDGVDAALPRRQRHVPWLWCLVPQEEKEASMEKAIIVGVDLAKHSFQLHGASEDGAVLFRKKLSRPQFHRFMSEQPRCTVVMEACGGAHYWARELVRLGHGARLISARYVKPFIKRQKNDAADAEAIVEAATRPTMRFVEVKSAEQQARAVVFRTREQLLKQRTELVNALRSHVYEFGYVAPQGIHNLRRIAEILDDENTDIPPLARETCQDILTQIGSQTERIDALMKRIGELSRTADTTRRLQTMPGIGPIGALAIETFAPPMETFGCGRNFAAWLGLVPRQNSTGGKQRLGRTSKMGQQDIRRLLIIGAMAVVRWTSQKGARPGTWMARMLATKPRMLVAVALANKMARGIWAMLTRKEDYRDPGQLMTS

SEQ ID NO: 368822 - protein, 416 aa, unidentified
MEIYPNTRAIQRYIALDIHREYVLAGGMNASQEWVLSPHKIEMGKFREWARKNLSGTDAVVIETTTNVWDIYDIVQPLVGHAVVAHAGAVRQIAEARVKTDREDVKRLIRLLIAGIVPEVWVPPQHVRELRGLVAYRQQLVKTGSMIRNRLHSLLHRHNLCLPEEGLADREWWTQQEKICALEKLQIRQELSMLQQIETHKAEVDHELGRQSLGETWGKAAVRLMQLPGMGIVVAMTVLSAIGDIHRFESADKLVGYSGLGAGVHDSGKEHIEKRITKSGRKELRWAMVEAAWRAVRMSPYWKEQYEKFLKRMRRPNQAIVVVARKLLVAVWHVLSKDETDEHATEEDLAYKMLLWSWSLSEEARQGLTHKQFAKYALMRLGVQTDLTRFVRGKVPRRIASREEVLVRMAELGLNG

SEQ ID NO: 368823 - protein, 409 aa, unidentified
MRIIGMDIHRVFAEAVVLEDGEIKRLGRIGMTRDQLEDFARTLLPTDHVVVEATGNATAVTEILAPHVARVAVANPLQVHLIAKAKIKTDAIDARVLAKLYGAGFLPEVWIPDAATLARRRQVTRRRQLVRQRVRLKSIVQSVLHANLIPPCPFADLFGGKGRAWLRAQYLPDDEREAVERHVEEYDRLSEALKGVERDIARAALADTNVTRLMTIPGVDMVVAVGLMAAIGRIDRFDRPDKLVAYIGLNPSVHQSGIGPAHHGRITKRGRSDARHLLVEAAWQTVRGPGPLHAFYERVRGKRGNHIAAVAVARKLVVIIWHLLTKAEDYSWVRPSLHAKKIRDLELRAGYPPRRGQKGASYDYNIPQRRRDERNRAQQAEGAYRRMTTGWRRSGPRSESTGATNEERQ

SEQ ID NO: 368824 - protein, 331 aa, unidentified
MDNERNILWKKNMATSEDAIDAAVRDISIDPKEIQAAIEPVSGWGWYGDQLEARGFAVRLVDVYKSKLIAGTKLKNDKVDSKILADMMRSDFLPEAYRAPKETRDMREFMRSRAFLVRLRVRIRNRIHMMLQKHGIICPWTDLFGKSGLMWLKEQRLGDVYLRELESLLVLFGELSLPVKERDARCVELITRSKEAKLLMTIPGIGVVTSLTMLAEIGDYARFPSPEKLASFAGLVSSSNSSGEKLRFGHITHRGSVWLRTALVESTGKVSKKWGYLHDFYWKLRERKGNKIARVALARKMLTLSWHLITKNQSFNPRRTDSVKTEIPELS

SEQ ID NO: 368825 - protein, 412 aa, unidentified
MELLHGRCCGLDVHKETVVACLRLVSNGKVTTEVRTFQTTTAELLRLSEWLATNDCTHVAMEATGVYWKPVWHILDDGEFELVLANAAHVKNVPGRKTDVNDAMWLAELLAHGLIRASFVPDTQTQEMRNLLRTRKQLVREQSSHVLRVQKTLEDANIKLDSVLSDLMGKSGRAMIEALIAGETNPVKLAGLADRRVKASPEELREALRGRVTKHHRFLLRLHLNQIDALDAAMATLDAQVEANLGPFRTAVDLIMSVPGIKNLGAQAIVSEIGIDMSRFPSDAHLISWAGICPRNDESAGKRRSNRLRKGAPWLKTTLVQCAWAAVKKKNSYLQAQFHRIKARRGPNKAIMAVAASILTAIYHMLKDGTMYQDLGRDHFDRRSTDQQKKSLVKRLADLGYAVEIKPLAATA

SEQ ID NO: 368826 - protein, 357 aa, unidentified
MCILTANGEKIEDVFGTLTPELDRLRDTLVSHGVGKVAMESTSIYWVPIWRILECDFDVKLVNPYFIRQLPGRKTDIKDAQWIATVLQKELIKGSYIPDSKIQELRQYSRRIFHLTRRKQQAESAIDLTLQRCNIRLSNYVSDIGCKSMRKVVNALICGETDSEVLALLVHKRIRNKHCHEVIKSSLTGIVSSSDRDMLKMSLEEVELYDRQLLECKEKMRIICEGHYAEELEILQTAPGIKEESAMRIIAEIGVDMKAFLTASALVGWAGLRPRNDQSAGKIKGRKTLHGNKYLRVMLTQCAWGACRTQTSKFYSRYHTLKKRMNHNKALMANARKLLVVIWNLLAKKQPYMPLVN

SEQ ID NO: 368827 - protein, 384 aa, unidentified
MTKHNILFIGLDTHKVSTEVAHVEDQRGAKPVHYGKIKTTKAAITKLARQYQSKYPQATLHFVYEAGPCGYWIYRLLTSLGHCCYVVAPSLIPKKPGDKVKTDKRDALKLAKLIKDEELTPIYVPEPEDEAIRDLSRARETAMKDLKDAKYQLKALFLRNNITCKVNDNWSNQHLRWLTELVLPHPSQQIVLQEMIQIITERIQREKRLANELFHQVKSWRYYPVVKALQAIRGVRLLIATGLVAELGDLRRFDHPRKLMAYLGLVSKEHSSGDKRRLGSITKCGNSRARRLLVQGAHTYKHNAKISTELQKRQEGLPKEINDIAWQAQLRLCRRYNRLLSRGKHRNVVVIAIAREMAAYIWAIAREVVISPVNSRLRVSRVPA

SEQ ID NO: 368828 - protein, 392 aa, unidentified
MYIVGIDIGKNHHEASIVSPEGKQIGRSLRFATTHKGADSLMSFIFKNIGNSPCVFGMEATGHYWYPIYSFLKAKGYTICVINPIQSDSLRKMYIRQTKNDSIDSFLIAEVIRFGQFGTTSMADENILAMRQLCRYRDSVISSRTEIKLRIGTIMEQIFPEYEKQFSSLWVSTSMGILEKYLTPENIENAPIDELFEIIKDKSHNRLTKAKAISIKEAAADTFGIKIAQDAFSFQLKQLIDRMNFLDKQIEALDIEIMKYYEQFDCYLHTIPGIGMIATATILAEIGDIHRFKSSSALVAFAGIDPTVRQSGEFSSTHNHMSKRGSPYLRHAIFLAATTCSFHNSPLNAYYKKKRDQGKHHLTATGAVARKLTTVIYAVLRDSKPYEPKKFC

SEQ ID NO: 368829 - protein, 329 aa, unidentified
MQSEVHVGIDVSKFTLDVFILEVRSHRRFKNDSNDFPAILQWIEKCTKYQSAFICFEHTGVYSMALAAFLESQHIVFAMVSPLEIKRSMGIVRGKNDVVDSKRIAEYASRFRDKIVMTKLPAKDITRLHFLLTLRDKTARTLTGYIAAVNEVQRGIGHEELPELFASYDAIITALKSEIKKIEAAIKHIINTNPDLKTSFKLITSLKGVSLIVGTYMIVYTCNFTKFATWRKFACYCGIAPFGHQSGTSVKGPAQVSPIANKQLKRLLHLAAVSAASHDPELREYYIRRQSEGKSKMSTLNIIRNKIVARAFAIVKRGTPYVNIKQYAT

SEQ ID NO: 368830 - protein, 347 aa, unidentified
MNYIGVDCHISSLDFAVVNEKGTTTKRQRVNTGVKELIGFIKSVPKPRKVIIEEGSLANWLLETCTGYGEKLIVTDPKKNRWIGRAGTKNDAVDAEKLAQLARGGYIKEIHHPIGGRRRFRELVLSYHDTVKSQTRIKNKVKAKFRENGIRCMGDTVYSARYRKEWKQRLPKDKVVHIIIDGLWRQLDQVEEVLEEILGQIRKHGRGYSEIKRFKKIPGIGTVHAATVSAIVEDPHRFANKKKLWMYAGFGLAERESGGKVYSRKLTRNYNRHLKNALKQAAHAAIIAKDNQFRRQYLRLTMEKGIVSHRAKLSVARSMLATLYGIWKSGEAYDPEIDKRRLEAGKT

SEQ ID NO: 368831 - protein, 341 aa, unidentified
MNKVNGNEVLYIGADVHERETQLAIFEPGGTLLQEKRIPTKDLQSYVHSLPAKEKHLALESLGFIYPLYDKLRQVPGCEVVVANPKRLRQISDSKQKHDRADAKVLGNLLRTNYLKRSHMAEVETREKRFLINDRVKYGVRRSELRGSIRWLLKRRGIEIEQDPFSREGRRELREKVQLQEIDIRLQELELVESIIEKLDRQITHVVFGDEKAKLLDTLPGIAPYTALFLSSAFDDMDRFPDSKHACAYLGLVPSIHQSGDVVVTGHITRDGNKFLRRNLVECARVAVRKDPHLKAFYLKLKRTRGERKALIAVARKMVAYAYWMLKRNQTYEELAPWTHT

SEQ ID NO: 368832 - protein, 413 aa, unidentified
MNVLHPRCCGLDVDKSSISACILLREGGRVQKHQRRFGTMTQELQELAEWLRQFDVTEVAMESSGVYWKPVWNILEGQFTIVLANAQHIKNVPGRKTDQKDAEWIAQLLQYGLLRASYVPCEIIRDLRDLTRMRASLSQEASRISSRIQKVLEDANVKLASVATNVLGKSGRAMLQDIITGEDNPEQLASLALGHLRVKIPQLQLALEGKIRFHHRFLLRRLLDQVQFVEHEIALLDERLEDIGRQRPDLAHAVARWDTIPGIDRVAAWALLAEIGDNMGQFPTAGHLASWAALCPGNHESAGKRLRGTTRQGSPWLCRMACQCAWAAARTKNTYLSSQFRRLAARRGKKRAIIAVAHTLIVIGYHLQKNQSNYDDLGGNYFDHIHSDGLKRYLVKRLQQLGHKVTLEPIETA

SEQ ID NO: 368833 - protein, 383 aa, unidentified
MDRKQGTLDRDKSVPVSVLYVAFELANSTWKLAFSDGSKLRPVTVTAGDLAQVRGAITGAKRHFGMGDEVHTVSCYEAGRDGFWLHRYLYSCGIDNVVVDSASLEVNRRLRRTKTDRVDAVKLLSMLVRYHGGEKHLWRVVRVPSREDEDARNLHRELEALKRERTRYRNRIHGILIQQGLRVRNPSTKKFVQALELMRTWDGRELPPEMKVRLVRVHGRLRLVEEQISCLVKEKTLRLKAETDRMAQVTQLLRLPGIGPVSSWTFVMEFFGWRRFRNRREVAALAGLTPTPYDSGKRLREQGISKAGNRRVRTLAIEIAWAWLRFQPRSKLSLWFLERFAGGGSRMRRIGIVALARRLLIDLWRFLEYGVVPEGAQARPSAV

SEQ ID NO: 368834 - protein, 435 aa, unidentified
MEQIHASNSREAVNQNCAGIDVHKEKINVTIARTEGKKVRYYYQVFNSIQSDLQKMLAWLKENECTVVGMESTGKFWLPVYNVLENHVKINLYNAKHIKNVPGKKTDKKDSQWIARITRHELIGCSFIPDAHTRGTRDLVRMRKVKVEERTRYRQQMHDILTSAGIKIANYMSDIFGTSGRFLLNCIAEGIVVNHIMLKEKMHGPIKQKIDKVFEAMQGDVENHHRFLLKMLIEDEHRISKEIDQIEQKLDELALNSEERREVHRRLIEVPGFSERSALLLIGEIGIDLRTFKDAKHFASWCGLAPGLKESAGKNLSGRIRVRQRYLRSLLVEVAFAATRCSESYFNSKFRQLIRRKSVQKSIIAIARKLANVVYLIIAKGEIYEDLGYDYVPLDAQARDFNNLKRVVLKYGKDAALAYLEQISEIPKREDTNNV

SEQ ID NO: 368835 - protein, 477 aa, unidentified
MKNKRNTKHPHKASQQSAQRRQGKRAATSVRLELRQLKLDAAGIDIGSQEHYVAVPADRDPEPVRTFGSFTPDLHEMAAWLKQCNIKTVAMESTGVYWIPVFQILESHGFEVILVNPRFAKNVSGRPTDVGDAQWLQQLHTYGLLPASFRPDDPTCVLRSYWRQRAELVQCASRHVLHMQKALTQMNVSLHFAIADITGVTGMRILNKILQGQRDPKTLAQLRDPRVKCSEETLVKALTGDFRAEHLFALKQAFDLYLIYQEKIAECDQQIAGHMATLESKLAPDTPPMPPSTKGKSKPRRNEPKFDLRGELHRITGVDLTQIDGLDVSTIQTVISEIGADMSRFPTEKHLGSWLGLSPHPQITGGKLVSSKTRKVVNPAADALRMAAQALTKCDSALGAFYRRLRSRIGPAKANTATAYKLARLIYRGIKYGQTYVDEGARYYDERYRKHILANLVRRAKQMGCILLETETGEILA

SEQ ID NO: 368836 - protein, 441 aa, unidentified
MAMRKRDDDLVFPNAAGIDVGGSSHWVAVPRHCCDEPVREFGAMTDDLHTLADWLLACGVDAVALESTGVYWIPVFEVLEQRGLKVWLVDARQMKYVPGRKSDVQDCQWLQKLMSLGFLRAAFRPTDEVCVVRAVARQRDVLLAEQASWVQRMQKALVQMNIQLTEVLTDVMGMTGQAIIRAIVAGERDPKTLARYRNARVKASETEIAKALTGNWRDEHLFVLRQALSMDDDIARHLGECDAKLQGLLSELGSAQVDLGKTPRAGSKLRAQFDTRQILANWAGVDLTRINGLGLSAVMTILSEVGPDLSRFANVKHFCSWLGLSPGTKISGGKVLSAKTRRSANRVRQALKMAAMSLSHSDCALGAFYRRLSGRMDKPRANTATAHKLARMVYFMLTRGEAFVDQGQQRYEDQQRERSIATLKRRAAALGFQIHPNPVPA

SEQ ID NO: 368837 - protein, 317 aa, unidentified
MTSSLDVYVGIDVSKKQLDLAFEPDNGAKQFSNDDVGIAELVAQLKSPIPRLVVLEATGGLELLVTAALAVAGVPVVVVNPRQVRDFAKAIGRLAKTDQLDARVLALFAKAVQPEPRPVRDAENQALEDFVARRRQIVEMITAEKNRLSMSRRATAQDIEVHIRWLEKRLTKVDSDLHDRLKQSPVWRAKDELLRSVPGVGPVLSVTLLASVPELGKLNGKQIAALVGVAPLNRDSGGRRGTRAIWGGRADVRRALYMASVAAIRCNPVIRDFWQRLRNAGKKPKLALVACMRKLLVTLNAMIRSGAPWRTCQPQIA

SEQ ID NO: 368838 - protein, 371 aa, unidentified
MIRSWTDSRRDWKPVAASVVGPRMSLVLRSFLPHPNSCLGTSPYQQGRDTKMAQRSFCGIDVAKDRLDVMVLPEELCWSVANDAAGWAELVAKLRGLRIAASGIEASGGYERGVVRALLAAGMSVRQINPFKLRQFAKACGVLAKNDRLDARMIALFVATLPTRSAQRYAPVERLAELVTARRQLSDDKVAAENASRLFEDAALRRLYGGRIARLAADIALLDKRLAEILAGDAMLARRYALLVSMPGVGPVLAVTLLALLPELGQMNRKQVAALVGVAPYDFDSGRLKGMRCIWGGRAPVRRVLYMAALIGCRCNPQLRAFHDRLAAAGKKVKVVLVAVMRKIITILNAMLRDNVPWVDHSIGQHILPAA

SEQ ID NO: 368839 - protein, 415 aa, unidentified
MQDILEICCGLDVHKDTVVACLLKGSITDTPSKEIRTFSTLLPNLNTLRTWLEEEQCNHIAMESTGVYWQPIYAVLEDLFNSTVTLIVTNARHMKNVPGKKTDIKDSEWIATLLRAGLLKSSFIPTEEIRELRDFTRYRKSIIADITSQKNRVEKHLQSCGFKLSSFLSDIFGVSGRAIIDHLSERGVINPSKIQEYVKGRAKAKTEDIKIAVNGKMTEHQKDFLKVLLERLDEDCKHLYTLDLKIESALENFKAPTQLIDEIPGINITAAATIIAEIGVDMSKFKTAQHISSWAGLSPGNNESAGKRKSTRITKGNTYLKTVLCEVAWSITRVKSSYLSSWFWKLKQRRGAKKAVIALARKILVIIYTMLKENTSFNEERFKILSKKQQEKRKNRLLLEAKKLGLTIIAPSKLA

SEQ ID NO: 368840 - protein, 349 aa, unidentified
MAQISMIGLDLAKNVFQLHGIDASGKVVLRRQLRRHQMEKFFAALPPGVVVGMEACSGAHHWGRVLERLGHEVRMMPPAYVKPYVKRNKNDGRDAEGICEATGRPTMRFVPVKSLESQAVLVLHRTRRLLVRQRTMSANAFRSALAEFGIVAAQGLKGLRSLMEVLEDPASAIPERARLPLAVLARQWQALNADVCKLETEIVRAARTDQVARRLMAIPGLGPLGATATLAAVPDAHLFKTARDFAAWLGLTPRQFGTGGKDRSGGISKQGDRALRTLLTLGATAYLRHERRRGAKDPWLRALLARRPFKVAAVAYAAKMARIIWAMLVTGEPYRKGGQRHSAPIAVAA

SEQ ID NO: 368841 - protein, 337 aa, unidentified
MEQQQQYVGIDLHRRRSVIVRRNEAGQTLDTVRIDNHPVALAAELAKAGEHPEVILEATYGWYWAADVLEECGAKVHLAHPLGNNWGHWRVKNDERDATDLVDLLRLGRLAEAWIAPPPLRELRELIRYRGKLVHLRTSLKSQVHAVLAKEGVTVPMSDLFGVGGQVLLDEVRLADAYRVRVESLRKLIEHVNREITMLEAQTAPYFAGDLGYHAVQAIPGVGPVLAAIFVAEIGDISRFTSARHLCSWAGLTPTHHESDEKVRRGHITKQGSRLVRWAAVEAVARQRADTPIRRHHHSVGERRGTQIGRVAAARKLLILVYYGLRDGEIRCLAGTG

SEQ ID NO: 368842 - protein, 428 aa, unidentified
MGDGMASGGRDAGAVTSALFVMGEAPGAIVAGFDVHRRQITVDALDTATGEVWRGQIESTPAAVEEWVAGFPGRVVHVAVEACTGWLFVCRALERSGAFVHLAEPVETSALRGRKRRAKTDRADAKWLRQLLYEGRLPESWAPPEHVRQWRSRARLRNTLVAERTSWTQRIRATLYHHGIAGAPDELRTLAGRRFLAALELPVDAQERITLALEIIDLLDAQLAELERDLRALARHQAGCQALMTQYGMGEISALVTLCELGDVTRLHASRQAVRLAGIDIGVHRSDRHAQLGKLTRQGSAPLRWALFEAAQSASHKGSPDYRDYHALKNRGLSHTRACLTIARKLARRSYHLLRALGPAALDPPDQRSDQAHPSPMRSQRAASSRSYRGTHAQRGGPSKTERPQSLQRNDRSTIKSPAATTRSRGPR

SEQ ID NO: 368843 - protein, 398 aa, unidentified
MSRIWAGIDCGKTHHHCVVVDAEGRRLLSRRVANDETELLTLLGDVLGLAEEDYATWAVDMTGGEPGLLIALLVNHDQELLYVPGRVVNRASDAYRGEGKTDARDAHVIADQARMRRDLQPVRPGDETTVELKLLTSYRIDLVADRTRTVNRLRSTLTGMFPALERALDVTNIGPLLLLTGYQTPAALRRVGAKRLETWLRNRKVRGAQSLAAAAVEAAGRQHTAVIGEKAIAKMVHTLAKEVMTLNDKIRETDKLIEGRFHEHELADVITSLPGIGPLLGAEFVASTGGDLEAFPTADRLAAFAGLAPAPHDSGKSSGNLHRPQRYHRRLQRVFYTSALISIRSDPNSRRFYDRKRAEGKRHTQAVLALARRRVNVLWALIRDRRCYQVTPPVTLAA

SEQ ID NO: 368844 - protein, 342 aa, unidentified
MEHYAGIDVSLECSSVCVVDGNGKIVREAKVASEPQALIAWFGSLGFGLERIGLEAGPLSQWLFAAMKAAGLAVELLETRHVRKAFEAMPVKSDRNDARGIAQLMRLGWFRPVHCKSMSAQETRSLLTARKLVQSKLHDVENSLRGILRGFGLKVGKTTGQKFAGRIEELVASHPHLQMIAKALLAVRAVLRTEFAAFEKQTRRMVRSDMQARLLTSIPAVGPIVALTYASAIDDPARFKSSKQAGAHFGLTPKKHQSGETDYTGRISKIGDASVRTALYEAANVMLTKPVKGCSQLKSWAMRIKRRAGTNKAKVALARRLAVIMHRMLADGTPFNAAAAAA

SEQ ID NO: 368845 - protein, 437 aa, unidentified
MEEAGDEPLFCERAAGIDIGKAVVSVTIRVPSDIRRGGRAQETREFGTTRRQLLELADWLRCWGVERAGMESTSDYWKPVYFLLEREGFDCLLYHSSQVKALPGRPKTDKLDSAWLAKVTERGSLAGSFVPPEDIRRLRTHTRYRRRLIQARTAEKQRCEKLLEDAHLKLSSVISDIHGASGRDMLRAIIAGQRNPRALADLARGVMRRKTALLEEALDCSFFTGEHAFVLQMMLDEIDHFTTRVAVLDEKIAALCEPWERQIAQLGTIPGFGITTAQELIAEIGADMSVFPTAGHLCSWARVAPRVTESGGKRKGKSATGRGNPYVGGTLGDAAAAATRTQTFLGAKYRRLCRHMPKKKAQGAIMRTQLCIAHALLSDSEAEYRDLGAGYYEQRAGASRQARNHVRSLERLGYKVTIEHAPEADPETGELITRTAS

SEQ ID NO: 368846 - protein, 338 aa, unidentified
MIVIGVDVHKQSLTAVAVDEAGRMLAEKRVAAANQELLEWGSGLGRERLWAIEDCRQLTRALERELIAVDEQLVRVPPKLMAPERRAGRQRGKSDPIDALAVARAALREPRLSRPRSDEQPFRELKLLVDHRDDLVDERRRAQQRLRWHLHQLDPSLLVPAKALDRPVHLDRVGRWLARRPGEVQVRVARELVVRCRQLTRTILELDCELERRTTETAPALLELPGCGTITAAKLLAEIGPVDRFQTDAQLARHGGVAPLEASSGRVQRHRLDRGGNRQRNCALYRIAITQARYHPAARAYLERKQAEGKSRREAIRCLKRQLARVIFNTLKASPALT

SEQ ID NO: 368847 - protein, 330 aa, unidentified
MKNYEEAVGIDVSKKTLDAYCYQAEVHKAFANDLSGYKSMIKWVLSLSKTRDVFYCFENTGYYSLKLALYLHSKEIVYVEESPLKIKRSSGVVKEKTDRLDACLIARYAWLYREELEASTVKSSFHLELGRLLALRDQLVRNNAGLKGTLKEMQVLLSSPTTDAGCTSLVRSIAYLQKQIKGIEVRITDIISADVAMSRNYELLSSLKGVGLVVACQLLYHTGNFTRFSSWRAFSSYCGTAPFEYQSGTSIHRRKQCHYLGDRKMKSLLSMASVSAIQHDSELRLYYKRKLAEGKDKMIAINNVRNKLIARAFAVVKRGTPYVVLQQHAA

SEQ ID NO: 368848 - protein, 344 aa, unidentified
MKITTVGIDLAKNVFQIHAVDERGKTVLKKQLKRDQVAAFFANLPPCLIGMEACGSAHHWARKLDGFGHTLRLMAPQFVRPYVKTNKNDAADAEAICEAVARPNMRFVPIKNVEQQSVLSLHRVRQGFVKARTAQGNQIRGLLGEFGLIIPQGIANIAKRVPELIEDAANELTGSFRLLVKRLMDHLNELDKQVGELELQIKTWHRQSDASCKLEKIPGIGPITVSALVATIGTAKNFDDGRQLAAWLGVVPKQHSTGGKSKLLGISKRGDSYLRTLLIHGARSVIFRAQQKVDKTSWLHKLLDRRNPNVAAVALANKNARVVWALLANDREFRSDYTPAVAAA

SEQ ID NO: 368849 - protein, 351 aa, unidentified
MRLAHINSKYVCGVDLHGQSKYICVMNKEGETLLHKNMKNDFNSFINSVARFMPDISVGVESMHSYYWLADACIDNNIPFFLGHPYYMKSIHGGKTKNDKIDSKKIADLMRSNHFPVGFIYPKHMRATRDLLRRRIRFMKIRAEAYAHIQTIFRQLCMNISPKDVKNKKERRLLIDKVDDLQIKSSIEMNLNLIDFFDVQLGNVEKQIREMAKYHDRTSLNILLTVPGIGDMMSLVILYEIGDINRFPSQQDFSSYARLVKCERSSANKKFKGGFQKIGNPYLKWAFGEIIIHAPTFSSYIKDFYDRLIARTGKPKARAIITHKFGVAVFNMLKHKEVFNEKRFVQFNMNQ

SEQ ID NO: 368850 - protein, 347 aa, unidentified
MIIIGCDLHTRCEQIAMLDTETGEIEERRLEHESGEARKFYAGLKEPALVGIEATGYTRWFAEMLAELGHELVVGEAGKIRAKETRKQKHDRRDAEHLLNLRVRGDFPKIWLPSAEERDVRVLLEHRHQLVELRTRAQNGLQAIALSYGLRRRGRLWSERGQEELKKLPLREGMGRRRGDLVQLVRQLDVWIKELDQRVEQEVARREDAQRLMTHPGVGPQTALATVLVLGPVERFPDDRHLTSYLGLIPQEDSSAGRQRFGHLTKQGNRLLRWLLVEAAQTASRCDPRLRRAYRRLAFRKGAALAKVAVARKLAIRLYIMLRDKIDYQEFCRRGSHAGMLGQVALA

SEQ ID NO: 368851 - protein, 329 aa, unidentified
MNSSLPLAPVLGVDIAKGTFDVALLLPNDQIYNKHFANTPSGFAGLLGWLERRGMKRLHACMEATGSYGQALATFLHHAGHLVSMVNPKQVRAFAQSELARNKHDKLDAGVIARFCRAHRPRPWSPPRPEIVELQALVRRLEALQQMRQQELNRLDCGVQPSVRNSIDEHVQFLDGQITKTKEAIKEHMDQHPKLRANRDLLVSIKAIGQSTAALLLAEIPDIEQFAQARQVAAFIGLTPLNRSSGSSVRGKARLSKIGSARIRKALYMPALVAIKYNPVVRELAGRLANNGKVPMVIIGAAMRKLVHLAYGVLKTGRPFDPQHAYASS

SEQ ID NO: 368852 - protein, 419 aa, unidentified
MLNVGIDWGEKTLNTFSILNEEKVFVKEGQVERSVAGALNLIDQIKEFQTDPDKVRIGIDRKNDVLTRVLHSKGYQVFPLNPLSAERARKIYWPSGKKDDYTDSKVHALMIANDYQMWEPLKEENKRNKQIQSLLQTRNSLARMQAQNRQRLGSILSEATPVISELCKNLRLCWVKDFLNTWPLHQDFHKAHGNRLNAFLNNHRVSDSTRKQIRSAWQKQPYEHDRETAECYRLRIQTLMDTISCLEEKIDRIEDKISKLSAEHKDREIFSSLPTNSENTIAALCTAFGPDRDQSYSWRNYSAFFGTSPITEESGKSKTVHMRQSRDSVIYKALMDFADSTSRQEDCWAHTYYGRKRREGKSHYHALRCLASRWVKILHTMWKKRTKYDEDFHRRRRQERGSMGSAKPTEVGKKENLSA

SEQ ID NO: 368853 - protein, 338 aa, unidentified
MNEITTIGLDLAKNVFHVVCCDKNGKIVKKKMLKRSQMLSYFANLPACLVGMEACGSAHHWARELSKLGHQVKLIPPQYVKPYVRGNKNDYNDALAIAEAVVNPEMRFVAVKTPEQQDVQAVYRLRERRIADRTALCNQLRGLLAEYGLILTKGVNVVRKRLPELMEDAENGLSDRFRRLLAQSYRELRELDEHIDFYTQEMVRESQQSEACQRLQTIPGYGPIVASVFHSVVGSGEAYRRGRDVSASIGLVPRQHTTGGKVVLLNISKRGDRYLRSLLVHGARAVVIQAVKKDDRLSRWINKVRAERGYNKATVALANKMARIGWAVLAHKSVYQPA

SEQ ID NO: 368854 - protein, 356 aa, unidentified
MSEKLNSKIAVIGIDIGKNSFHIVGQDRRGALVLRQKWSRGQVEARLANLPPCLIGMEACTGAHHLSRKLQALGHDARLMPAKYVRPYCKGDKNDYRDAEAIAEAVQRPTMKFVATKTADQLDLQALHRVRERLVSQRTGIINQIRAFLLEREIAVRQGLRFLRAELPDILAKRTDVLSPRMLRIIEDLSGDWRRLDERIEGLSSEIEALARQDQGCARLMSVPGIGPLISSAIVAAIGTGDPFSKGRDFGAWLGLVPKQMSTGDRTILGSISRRGNRYLRTLFVQAAWVVLVKVGPKQWERYGLKSWIEAAKKRLHHNVLAIALANKLARIAWAVLHNGRTFEYVKTNATASRSA

SEQ ID NO: 368855 - protein, 322 aa, unidentified
MAMLSFGGIDVSKDRLDVVVLPEEECSSVPNDAAGWAELVERLRGFSITAIGIEPSGGYERGAMRALLAAGMPVRQVNPFKLRQFARASGVLAKNDPLDARMIASFVTIMPTRPVQRQIPAAERLAEMLAIRRQLSAEKVAAENASRLLEDAMLQRLSHRRIVRLAADIDLLDKRMVQIVATDDALVHRYRLLASMPGVGAVLACTLIALLPELGRMSRKQVAALVGVAPYAFESGTLKGRRCIWGGRAHIRQVLYMAAMSASNWNPVLKAFHDRLTAAGKLPKVVIVAVMRKMITMLNAMVRDDVVWADRLSGRHVLPTAR

SEQ ID NO: 368856 - protein, 427 aa, unidentified
MNYTQNRKIAQVTETTLVVGVDIGSQWHYARAFDWRGIEITKKAFRFSNDLDGYTAFEKWVRETAKNSAKMEVLIGCEPTGHYWYTFARYVGLHGMKLAFVNPYHVKQSKEMDDNSPRKTDEKDPKTIAKLVTEGRYSFPYLPEGIYAELREAVSVRDQIVKAMNAAANRIQRWLTIYFPEYLKVYKVFDSVSGLTMLWQAPLPEDVVKLGADGIVALWHEKKLRAVGKKRAQTLIEAAKSSIGMPGGNCAKMDLHLLLEDYFTKKEQLERITAVLQEELLKVLNSEKLLAVKGIGIITVAGFLAEVGDLRRFTSPKQIQKLAGLEPKENSSGKHKGRTSISKRGRRKLRRLLFQAVLPLIRSNEDFREVYTYYSTRKDNPLKGTQAVIAVGCKLIRIFYVLLSHGADYSSTRFRADILRPGQAKAA

SEQ ID NO: 368857 - protein, 364 aa, unidentified
MKEQKSKTRFVGIDLGKRTYCMAVVGKGRKVAMSNGTTYSSGRQGLYKKLRPGDKVALESCSLAFIMAKEMEAAVGCKVYVLNPGRLSIIYKSMKKTDKEDALKLAHILEDFAEERLPVVSVPSDKDMYRRKILANSRRAQNNRTRLINLLHALFVAQGITTKARKDLAAEGVRKEAIKELAGIERDEAEYLEQCLDLCEKRIEKLDQMMAEESYGDEEIERLQSIPGVGPKVAFAFVSHVGAGRFENSGQLSNYLGLVPRVYMSGDTVRYGPITKRGNSYVRALLVQGAWALVRSKTGGKLKELYGHMTIEKSKNKKKAIVAVARQLAEMMHAMMRDKTWYARRKFKPGKEAAAELAQLAVSA

SEQ ID NO: 368858 - protein, 364 aa, unidentified
MYDSTRTVTVGLDVHARSIRLAAVRADELLEERTLPYDEEAVERLLRRWPAGRCCYEAGPTGFGLYRHLVERGIDCQVVAPGLVPQRPGDRVKTDSRDARKLARLLAGELLTAIHVPSRELEAARDLVRAREDGRLDRMRDRHRLSKFCLRHGRRLPTSSWTVMRRKWLSEQRFEFAAEQITFDSYVHAVDLVDRRIEQLERAIRETSEREPWCALVARLRCLRGVDTLTALGLVAEIGDFNRFKNAEELMGFVGLVPSEHSSGETRRQGSITKVGNSHARRLLVESAWHARRRPKVGYELARRQRGRDAVVVERAWRCQQRLYQRWQRMAGRGKPQQKIVVACARELAGFVWAIATEQPLRNS

SEQ ID NO: 368859 - protein, 427 aa, unidentified
MKDKLKLITESTLIVGIDVAKHIHWAQVTDFRGNVLCKPIKIENSFEGLQHFLLSIKEIFMDLRCNKILIGFEPSGHYWKNLAYFLENEEEIMLLGVNPFHVKQIKELDDNTQTKSDKKDALVIARLIRDGRFFEIYMPEEKYAELRVLRRYREQASIAKKRLICNIKVLLDEYFPEYEKVGYEITASSTKIILRTTPFPSDLNSRNAEEVYSAWKSFSGKNTRISRSKASQLKMVATNSIGITVGIEAARIGLNGMLDQMDIIDASIDKYDAEMERIMSELNISAYLTSVPGVGNVTAAAFIAETGDLSRFEDWKQVRKMAGLNLVEQSSGMHKGKTNISKRGRPGLRRIIYIIGDKGMLVSPEMMMYYQYLRHRPTNQLKHQQAVLAVGLKLMRVMFHIAKTHELYSPEKVLGEIRLNQIESISA

SEQ ID NO: 368860 - protein, 337 aa, unidentified
MKYSAIDLHSNNSVVVVSDEADRVLVRRRVPNDAAAILALLAGHREELVGVVVESTYNWYWLVDALQAAGYRVHLANTAAIKRYEGLKHSGDEDDAAYLAHLLRLGILPSGYICPPAARAVRDLARKRMQLVRNRTAQVLSVENLLSRQTGAGMRSRVVQRLTAQAVEGFGFDQDVQRAMCANVAVIKTLNREIDKLEQRLHQCVRLRPEFRLLTSVPGIGQTLATLIMLEVGTIERFAAVGNFASYARCVDSARISNGKKKGQGNVKNGNAYLAWAFVEAANFAQRYCAEARRFYERKKARTNGIVATKALAHKLARACYHMLKEQKPFDVKRCFA

SEQ ID NO: 368861 - protein, 411 aa, unidentified
MEVINKRCCGLDVHKEIVVACLMIREGGKVHKEVRTFLTMTVDLVVLHDWLKAHQVTHVAMESTGIDWRPVFNLLEEDFTVVLVNAAHIKTVPGRKTDVKDCEWIADLLSHGLLRGSFIPPEPIRDLRDLTRYRKSLTDERVREVNRLQKFLEAANIKLSSVANDVMGASGRAMLEALTAGSTDPQILSELAKGRLRKKLPELRKALEGRFRPHHRFMVGEILTHIDFLDEAIERISQEVSCRIVPFSKMVEVMDLVPGINQRTAEGVLSEIGVDMNCFPTDGHAASWAGLCPGNNESAGKRKSGKTRKGDRWLRRYLIEAAWAATRKKGSYLSALYHRLVVRRGKKKAIAAVAHRLLVIIYHMLKDQASYRELGSDHFNKLNAAYVQRHHVRRLESLGFKVVLEPVSKAA

SEQ ID NO: 368862 - protein, 410 aa, unidentified
MPVFCGIDWAEDHYDLALVDQAGVVLTERRINDDSNGYQLLLALLAEHGDDQVEPIPVAIETPRGLVVACLRRTGRQVYAINPLSVARYRERHSVARTKSDRIDAQLLANILRTDRAAHRPLPADSELAQAVAVLARAQQDAVWNRQQVANQLRSLLREYYPAFLEAFQDRRPGGLAHPDACAVLAIAPTPTQAARLTRPQLQAALRRAGRQRGITAVSVRLQAIFRRTWLHQLLLVENAMGRQSLALLKQLEAAAQAADDLAEATRVVFQQHPQVAIFTSFPGLGELPAARLLAEIGDDSTRFADARGLKAYAGAAPVTRASGKRLVVLHRKVKNQRLASVGYLWTFAALRLSTGARAHYDRRRVAGDRHTAAQRHLFNRFLGCLYYCLQTGQTYAEDQAFPAAHPIAA

SEQ ID NO: 368863 - protein, 412 aa, unidentified
MKQQAERAAGLDVHRDNVVAATRVNEPGGEVAVTKKRFPTTRRGVRELAAFLSEAGVTRVAMEATGVYWKTIYYALEGLFDELWLCNAQHVKNVPGRKTDLGDAEWLADVAAHGMVRPSFVPPPEIRELRELTRYRKTQVDARAREIQRLEKTLQDAGIKLTSVASAVWSVSSRKIIEALIAGERNPAVLASLVLGKLRPKIAQLEEALDGHFGPHHAIVCRQVIEHIDFLDGSIAALSEEITARLIPFEAAVTLVCSITGIAELSAQAIVAEIGVDMSRFPTAGHLCAWAGVAPASHESAGKRRPAGTRHGSTWLKRVLIEVARAASRTKGSYFSAQYSRIARRRGPNKAAVAVANSILAVIWHVLTNGCIYEDPGADYFERRHDPAVEAKRLQARIEALGFDVTLTLKAA

SEQ ID NO: 368864 - protein, 319 aa, unidentified
MLDTRIYDTRTFIGIDVSKDHLDVAFAGQAKVWRVGNDDKGIAALGRRLAAREDPHVVCEATGGYTRLLSRELTRLAIAFSQVNPRQVRDFARASGRLAKTDAIDAAVILQFAQKMQPPATPPLSADQIRLTDLVRRRRQIVDMAVMEKQRAAHPDEPDILASVQRHLDFLAEEIADIDRRIASQIAADRALARRVELLRTIPGIGATVAATLVAELPELGHVGKKQIAALVGVAPMNRDSGLKRGEAHIAGGRLSVRCALYMATLSAIRCNPDIKAYYRRLREDGKAPKVAIVAAMRKMTITANVILEQDRPWTNKQP

SEQ ID NO: 368865 - protein, 436 aa, unidentified
MFKVAIRSPGEKPWTRKTEILEYRTFYGVLQQMAADLRKRGVTHVVMEASGVYAEPVYYALAEQDFTEIAVINPAHARALKGHKTDAKDCARLAELFECGLLRGSYIPSAEQKEVRDLTRYRMKTVQARTSEIQRLGKALESAGIKLGSVASSITGTGATAMIEALIDGERRGPVLADLAIGRMRAAGKLTDLSMALAGRFTEHHALLCRLHLDRIAVFDDAVDGLDGRIAAGTARWPREAGLLKSVPGFGDVVTGAWLGEIGPAPHQWFSRHEKLASWVTLCPGNNISAKKRKHGRTGDAGTYIKPLLIQAAWSAIRVRGRLQARYNRLVRRFGGDKNPAAKKKAITAIAHTLLKIAYQVLKSGTPYQDLGADFYTRRNSPEERQKYLERQLQKLHPGCTITITISPPEAALTPGAYRTPISFSMGAAADSAPRP

SEQ ID NO: 368866 - protein, 347 aa, unidentified
MTEAYDGRQVVGIDLHRQRSVIVRMTEDGRKLETVRITNSPAALRAVIARAGKNPKVVIEATYGWYWAVDVLEEAGAEVHLAHPLGVRAFSYRRVKNDERDAADLADLLRMGRLPEAWIAPPEIRELRELTRYRHKLVKARTSVKDQVHGVLAKLGIPVAHSDIFGVHGQAWLDELKLPQPYAGKVASLRQLAGGLTAEIGLLEQVLGDLLAGHEGYAAIQQLPGIGPVLAAVIVAEIGDIRRFPGPGQLASWAGLTPRHYESDTKVIRGHITKQGSRMLRWAVTEAIQRQPAGTRPRQVRDGIIARRGKEAKNIAKVAAARELLTLVFYGMRDGHVRRALQRGQAA

SEQ ID NO: 368867 - protein, 421 aa, unidentified
MGKLIERCAGIDIGKRFLVCCVMTGAAHEEPRSETRRFDTTVPGLERLRNWLNEERVTDVVMESTGSYWIPVFNLLEGHVTVVLANPEEVKNRKGHKADRKDAGHLADLLRHNHVKSSYIPAQPVRQLRDLTRRRVQLTQDATRERNRVQKLLEQVNVKIGSVLTDVFGVSGLHMLLALLDGRAGPEEVAGLARGSAKRKTPQLIEALEGNRMSDHVRFLIRGCLRHLACLEEEVEELDAEILRRMQLSTFQKAFTLLQTIPGVGQLSAATILVETGPDLDSFPTIEQMASWAGLCPGNRESAGIQKGPQTTHGNPYLCTALVQCAWAATRKRDSVFRSRFQRLAPRRGEKRAIIAVAHHMLVVLYCMLKRGVPFFGAEDAPKQRRRERRAHHHLRCLRRLGFSVDIRLSSESTPPDTISR

SEQ ID NO: 368868 - protein, 354 aa, unidentified
MNATQVFEKRKIAVAIGIDLAKDHCDVVAYNADNKICFSKANMSFPKLMEWLANAHPAVVLMESCKGCHVRARDIADLGHDTRLVKGADVKALRNVCQKNDIRDADYIVRLLYVPGTKFVFVKNQRQQSLQFLQNEYKSFQELRIQVGNQIHAGLEEFGCPAPKSKKFIQSRMMAHLEKNAELIPDEVMSSFLRRRDMWLNLFEQEEEAKKRMEEIAKTDDDAKRIMTVPGVGAQTAVGMLVHIGGDIGRFKNSGQFAASIGLVPKQNSTGGNTTLNGITKCGPKRLRANLVQCGQVILMHADKLKGNFGDWVRKMRDSGKKRGVIACAIAAKLARIIYRLMKDKVDYTPVPSR

SEQ ID NO: 368869 - protein, 383 aa, unidentified
MKNVYASVVSSGVDVHYEFSKAALVDARGRVVRLERLEHRDREALLEHLSRWPAGMTAVLEASFGWGWLSDLMEEAGLKVRLSNCYKVEQMRKARGEVKTNDKDAALLAPLPREATNWWEVWRAPKEVRDRREWMRHRMDLVSLQTQTKCRIHAVFHRHGIFHDFSDLFGGGGRKFLLALCEGKDPQSRYLTGGALEALRGEWVLLLHLRQELAAIAVRLRKELERCQEARWLISVPGFGLILAHVVLAEVGEVERFASAKALASYSLLAPRARDTGESPPADRSPLGRHLGKRGNRTLKWAFIEAAHGAVRSGGPWRAIFDRATHGGRKDRGRGYIKVARALVDVVYAVLRDQRMYQQQRPSHPATRPGTGRPYRPMVVAQR

SEQ ID NO: 368870 - protein, 346 aa, unidentified
MDKLDFSGVEVGAEELVVSLEREGQRKALKTFANQPPGHQAIVRHLRCPGRNVRVCLESTGVYGLDLALALARAGFQVMVANPRAVRHFATALMLRSKNDRLDALVLLEFAMRMPFQAWVPPRPAALQLHAVGRRLEALTQMQAAEKSRWHAAQATDTTPPALRRDLERSLRSIRRALVRLSGEAVKIIERDPALKLRFDLLVSVHGSIAATSAIQILAELAVVSEGLDARQHVAYAGLDPRECSSGTSVHKKVRISKAGNAHLRRALYMPALVAIRRQPHLRAYYQHLRDRGKLKMVALIAVMRKLLHAIYGMFKHQQPFDGSKVYRLPGPHTSPPLNSAQEVAA

SEQ ID NO: 368871 - protein, 433 aa, unidentified
MTVCPYDLILGLDRSDKKADLCLLDVRTGQRRTVTIDTAPEALWEWLLELRQAYPEARVGLCLEQPAVHLISFLETYAWITLHPINPLTLQKYREAFVTSRAKDDAKDAEYLADLLLSHHAKLPVWAPEDSATRAVQQLGFHRRAVVDERTALTNRLQALLKQYFPQALVLCGEDLWRPLATAFLLKWPSLGAAQTAKAATLKPFYYLHGSRSQKLIEQRLALLERAVPVTDEVAVIASFVLRVQLICRQLQALHRTLGEFDQQLAAAYAAHPDRELFASLPGAGPVLGPRLLGSVGSQRERFGHSAAQLQCYTGIAPVTKRSGGSGRIHRRYLCPKFHRQSFHEYAKESILWSRWAAAYYLQQRSKGAAHHTAVRGLAFKWQRIIWRCWQDHQPYDEARYEAALRQRHSPLVSLFDRIELGKSPWKNPAKKN

SEQ ID NO: 368872 - protein, 465 aa, unidentified
MTPHKDSFPDPCPPAPTLPQPSVLSEALQVCHPHAAGIDIGEAEHWVAVPPGCDPQPVRRFGTFTVDLDALADWLIDCGVTTVAMESTGVYWIPLFELLEARGVQVLLIDPRQAKRAPGRPKTDRLDCQWLQRLHAYGLLAGAFRPDDQVCVLRAYLRHRQMLLTYAAHHIQHMHKALQQMNLKLTQVVSDLTGATGMAIIKAIMAGERNPQHLAKLRNPHCHHDEDDIAKALQGTWRAEHLFALRQAVELYEFYHQQLALCDQQIKTHLETFRDKSAGQPLPPKARRHKKTNEPRFDARTPLYHMAGVDLTTIEGIEEGTALVILSEIGTDMHRWPSVKHFCSWLGLCPQHKISGGKVLSRRVRPGAHRVTVALRLAARSLHHSQSALGAFFRRMKARLGTPKAITATAHKLARLVYRLLKHGSAYVQQGLDAYEAQYHERKVKTMAKQAKALGYTLVPLVAQG

SEQ ID NO: 368873 - protein, 354 aa, unidentified
MNNITFSNSSFFVGIDTHLKSWKVTIRNSGLELKTFSMNPSPDELYKYLTTHYPEGTYFIVYEAGFCGFWPQRKFNELGVNCIIVNPADVPSSGKEKVVKTDPNDSRKLARELENGSLKAIYVPDINHEQLRSLMRLRFRLVQNQTRIKNRIKMLLYNYGIIIPKEHITNPRWSGYFIHWLKSIKLNSTAGQFTLDNLLLQLDQTREHLKQVLKQLRQESKQENISSVISSLVSVPGVAFITAMSLYTELIDIKRFNNFDHLASFVGLVPSVHSSGETDYTKGLTFRHNKFLRPLIVEAAWTAVKTDPALTFKYKELIKTMAKQKAIIRIAKKLLRRIRHVWINQDRYVKALVA

SEQ ID NO: 368874 - protein, 398 aa, unidentified
MTESSDYESVQVFIGVDVGKDTHHAVAINRSGKRLFDKALPNDENKLRSLISDLKQHGQILLVVDQPATIGALPVAVARSEGVLVGYLPGLAMRRIADLHAGEAKTDARDAAIIAEAARTLPHALRTLKLADEQIAELSMLCGFDDDLAAQTTQASNRIRGLLTQIRPALERVLGPRLDHPAVLDLLQRYPSPEKLASLGEKKLAAQLCKLAPRLGKRLAADIAQALAEQTVVVPGTNAAAVVLPRLALQLITLRKQRDEVALEVEQRVLAHPLYPVLTSMPGVGVRTAARLLTEVACRAFASAAHLAAYAGLAPVTRRSGSSIRGEHPSRRGNKALKRALFLSAFATLRDPISRAYYTRKMSQGKRHNQALIALARRRCDVLFAMMRDGTFYTPQAS

SEQ ID NO: 368875 - protein, 328 aa, unidentified
MGQASPASLGIDVAKATFEAALLVDGMMLQRSFAMTVAGFDALHTGMSKQGVERVHVCLEAPGAYGAALALSLHEAGHVVVVSLVNPARIAAYAKSRLTRTKTDQADAALIAHVCYTQHPLAWTPPLAEVRELQARVRRVEMLQEMAQQEVNRLQSGLHSPLVRASMEATLTFLRQEIATMQRLVQEQVEQSADLRHKQHLLCSIPGAGRWTAARGLAESDQVRTSVSARQLAAYAGLTPRERTSGTSVRHQPRLAKTGNSRLRRALYLSAIVAMRHNPAVRALAERLRVRSKRPMVIVGVAMRKLLHLIYGVLMADKPFNATRTMPA

SEQ ID NO: 368876 - protein, 421 aa, unidentified
MGKLIERCAGIDIGKRFLVCCVMTGAAHEEPRSETRRFDTTVPGLKRLRNWLNEERVTDVVMESTGSYWIPVFNLLEGHVRVVLANPEEVKNRKGHKTDRKDAGHLADLLRHNHVKSSYIPAEPVRQLRDLTRRRVQLTQDATRERNRVQKLLEQVNVKIGSVLTDVFGVSGLHMLLALLDGRAAPEEIAGLARGSAKRKTPQLIEAIEGNRMSDHVRFLIRGCLRHLACLEEEVEELDAEILRRMQLSTFQKAFTLLQTIPGVGQLSAATILAETGPDLDAFPTVEQMASWAGLCPGNRESAGIQKGPQTTHGNPYLCTALVQCAWAATRKRDSVFRSRFQRLAPRRGEKRAIIAVAHHMLIILYCMLKRGVPFLGAEHAPKQRRRKGRAHHHLRCLRRLGFSVEIRLSSESTPPDIISR

SEQ ID NO: 368877 - protein, 315 aa, unidentified
MANVDIGIDVSRDRLDVAVEPGGEAWQTTNDLPGIAGLVERLLALQPTTVILEATGGFELPLTGALLAACLPVVVVNPRQVRDFARATGQLAKTDAIDARVLARFGGAVRPELRPLPDEATQELAALVARRRQLVEMLTAEKNRLRLAARAVRRDIQQHIRWLERRLSDLDGDLAQQVRSSPNWRERDDLLQSVPGIGPVSSVTFLAQLPELGRLNRKEIAALVGVAPLNRDSGTLRGRRVVWGGRSHVRAALYMATLTATRHNPVIRSFYTRLLAAGKPKKVALVACMRRLLTVLNAISRDRATWQPLPFQDSC

SEQ ID NO: 368878 - protein, 355 aa, unidentified
MKILAIDMGWSNSVSCLFDCSTGEVQYQTLITGKEPFARLLKEMNPEQVVIEAGPMAGWVKDLCEQMKLKLLVLNTNDEPWRWRNVKKKTDRKDAFKLTQVAALRQGSGVHVPEHAVRQWRQLIYYRQTLVDEMVSIKNRLRAVLLQEDLHLPSGQKAWEAQSWQKLSAMAKELEECGKDDLWRGMVKLELRRLEELAAHLGSVEKKLDGLAREDERVKRLKQVPGVGTRTAELVVALIDDPKRFGRGRKLSSYAGLSPRKHQSGKMDRDGHISRCGNGLLRKLLVQAAWSGKRNSLRMSRIYERVRKNTPKRTKQAIVAVARHLLVWLWAMLRDGSSWQVGHQPPPQKELSAVT

SEQ ID NO: 368879 - protein, 374 aa, unidentified
MNTIYIGVDFHARQQTICYLKTETGELVISELKHQNKEEVRAFYSQFQGPVVVGLEASGYSPWFEALLEKLGCEVWLGDATEIRRRARWRQKNDRRDAELIWDLMNHNEFPRLHRPAVQSREVLRMLRYRQKLTKLRTMSKNSLQALALQAGLAKGSRLFTKAGKQELLKAEMSPVMQWQCAHWWQLLEPLDQQLLETISWFKAQSKDDVCITRLRSHPGIGLLTSLCILHTLQPVSRFRNQRKVAAYAGFDPVERSSAERKFFLGISKAGSRVLRYLLVEAAHTAIRKDEDLKRFYKRLAERRGRPKAKVAVARKLLIRAYIMLRDEIDYAEFRRRAVAARLARRGQRPNVPEVLIGQPASAAGQELTHFSEK

SEQ ID NO: 368880 - protein, 436 aa, unidentified
MRQKKNAFPVIHPNAAGIDISSKEHYVAVNPAITQQAIRSFGAFTDELEQMVGWLKDCKVDTVAMEATGIYWISLFLLLQDAGFEVVLVNARHVKNVSGKKTDISDAEWIRQLHSCGLLSASFQPDTFTRTLRTYMRHRKNLLDMSATHIRMMHKALEQMNIKLQHVIADITGKSGQAIIGAIINGCTDTDTLVGLLDHRIKATHEEVRRSLNGIWKPEHLFELQQSFELYHFYQQKIIDCDKRIEEQLLEKSNMTAAQKKHIKGNKSDLSFDAAGMLQQITGTDITALFGINNNTATELFSEVGFDMSKWPTAKHFTSWLNLAPNNKISGGKLLSSKIPKKKNRAGQVFKMAAYAIQRSKNWLSAFYHRIKARSGPAKAITATARKIATIFYKMIKYKETFKPIPLNHYQESLQTTQIKRLEKQAKKLGLQLKPI

SEQ ID NO: 368881 - protein, 350 aa, unidentified
MNATTVAVDLAKNVFEVAVADARWKIIERARLTRAQFERWFDNRKVDRVVMEACGSAHYWGRTLRARGIEVRLLPAQYVRAYVKRNKTDAADAQALLEAARANDIRPVAVKSIEQQALQALHRTRSGWMSTRTRRINTLRGFCREFGLVVPEGAATGLACMARYLADDRSGLPELLRPSMRLILEEIRLMEARIGQLEQALSEISKHSSACQVLQSVPGIGLLTSTAMVAAVADPRSFDSGRRYSSFLGLTPREYSSGNTRYLGRISKRGDRYIRMLLTHGARSVLRAATVAHRAGRPIDRLKRWALAVQARTNHNKAACALANKLARIAWAVWVKQEKYQSASIEALSV

SEQ ID NO: 368882 - protein, 349 aa, unidentified
MASLPAVAPQVTVGVDSHKDVHVAAAVDQVGRVLGTTWVPTTTRGAAQLLRWATHLGAVQRFGIEGTGSFAAGLSRWLQQQGYQVVEVNRPNRQARRRRGKSDPVDAEAAARAVLAGEATTAAKAANGTVEMLRVLRVARRSAIKARGQAANQLHSLLVTAPDPLRQQLRGLPLARLVQVAAAVRPGPLTDPLTATKFALRELARRYQLLTAELDRLDAQLAALAPKAAPSLLTRRGVGAQVASALLVVAGDNPGRLRSEAAFSMLCGSSPLEASSGKTVRHRLNRGGDRDANNALWTIAMTRLSCDERTQRYLARRTAEGKSKREIIRCLKRYIAREIYRDITAAVGS

SEQ ID NO: 368883 - protein, 352 aa, unidentified
MIIIGVDFHPEFQQIASVDTDTGEYQEKRLAHREEAENFYRALAGKKVRVGMEASGHARWFERLLAELQFELWIGDAAEIRSKRVRKQKTDRQDARLILQLLLEDRFPQIWVPSWENRDLRQLLWHRHRMVQARTRIMNQLQAVALNEGLRCKKRLWRERGRQQLESFRLAPWASRRRRDLLELLDRLNPTIAELTQAIEQEAEKCPPAQRLRTHPGVGALTALGFVLIIGEAERFSCGKQVASYLGLVPLEDSSGNRRRLGHITKQGSSILRFLLVEAAQVTVRSLPQWRRKYFHLAMRRGRKIAKVAMARKLAVSLYWMWRKRWNYEQLTKFGSHAGQPGNRHGVQSNTE

SEQ ID NO: 368884 - protein, 332 aa, unidentified
MVAGTHGSLNKAGSTKMTQISTTAGIDTSKAKLDIAVHGRVGHWQVDNTLVGWRRLAAELSGTGVTRVGIEASGGYECGVVGYLRDKGFVVLVLQPLQVKAYARLHLRRAKNDKIDAVLIAACAAMIDQARIDPDQRLAKLAQHLTFVEQIEEDIARFKVRLEHVGDRRHRRIVVTDITRLKARRAAELARIVTALRAHDDLAHRLDLVLSVPGIGERTAIALIVRMPELGRVSREQAAALAGLAPFDDDSGKHKGERHIAGGRRRLRRSLFAAALPAAFHWNKALIELYARLIARGKAHNEALIACARKLLVYANTVVQRGTPWTERPAAA

SEQ ID NO: 368885 - protein, 371 aa, unidentified
MKQQSKSSKITVGLDLGDRRHRFCALDERGEVVEEGSICNERDSLRKLAGRYHGALGVMEAGAHSPWISRFLEALGWRVVVSNPRKVRAIYQHERKSDQRDALMLARIGRMDLALLYPVRHGTAEAQQDLLRIKLRDSLVRARVAVINSVRFTLKSLGYTVRNPSSARFHKVVMEEVPESVREMITPSVQALAELTARIKMLELEINTLAQMKYPQSAQLQQIPGVGPITALYFVLKIEDPNRFAHVRDVGAYAGLCPRRDQSGESDPQLRISKRGDAYLRRLLVSAAHYILGPFGPQSALRAYGLMLAADGTAQAKKRATVAVARKLAVLLLSLWKSQQPYQPFPGARLNGQQEDRRSGTIALHRMEATD

SEQ ID NO: 368886 - protein, 370 aa, unidentified
MSIKRILVNTIDTDLEYEVIGIDLAKNCVSAILLTTDGEIFGIDRLDYQELEKSAQELSPTIFAMEPCTEMNYMVQKLEDWGHHCIVISGKNVKDYVESHFSNQKTDLNDAQALAFLTKDTQLRTVKAKDPEQLKYASLTTLREQYVKQYRQTMVSLKGICQVWGLSISKGISGKARLKDMIENHAAFPAELRTALVGMVAHAQAVQKDLKSVTKILEELAKKDKACQLIQTVPGLGTICSCRLRATVGDIQRFKHPKDFPAYYGLVPRSMATGHNEKKGKITHRGDKTMRSLMVQGAGIVINQATKGNLHSKQLTKWILKKQKEKMPWGKLVCAVAAKLLRIVRAILISGKPYDPKIAGVAKCSLPKAS

SEQ ID NO: 368887 - protein, 391 aa, unidentified
MIFVGIDVAKDTHYAAVSDDSGAVLVKPFAFQNNAEGFCLLLKKLSEFDRSKLLIGLESTGIYSENLICFLYESGFRLAVINPIQTATLRKTAIRKTKTDKVDTMLIIKSLMVNSYRLYSQRDADSLKLRTLCRFRQNLKKSKARLKIQLAGYVNLVFPEFGKFFKSGIHIAASYALLKKYSSPKEIAALRTSTLCILLSKASHGRFGKDTAEALKSLALSSVGVKNPYISIQIAQTIAQIELLEQQIKDLNSAIEEAMESINSVLMTVPGIGAVNAACILGEIGDIKRFSKPCKLLAYAGLDPTVRQSGQFTAKSTRMSKRGSALLRYALINSAWQLTLNDTTFKAYYDLKRSQGLNHYGALGHVAHKLTRVIFKLLTSDTPFNPAKLVA

SEQ ID NO: 368888 - protein, 345 aa, unidentified
MKTTHSIRGRAKIMSTFVGIDIGATAFEVVVRHNDKNSDAKSYKQTHQDHEKLAARLIKLYPACVVMEATGVYYLNLAVVLYNSGLKVSVINPNSFNHFAKLKLSNSKTDAIDAALLAEYAQRMSPCLWTAPDPKYLSLRDTGRQINRLVGRRTEAKNNLRALKAKDTTYQVLIDDEQEGIEYLDSRIDRLRNLALEMIQEDEFLSQKLENLTAAIGIGVNSAIMIICELELLPKHLKSAQVSRFAGLDVRLTQSGTSINKPGRLSKAGNAYLRTALYMPALSAAIHDPNAKTFYQSLILRGKKKMQALCAVMRKMLTGIWACLQTNTPFESSKLFSEEHKKACA

SEQ ID NO: 368889 - protein, 409 aa, unidentified
MKHVIAFDVSKGKSTIVIYNEDRQCEFEGELHHTRFDFEQLHQHIEKMTALDGQPPEIVFEATGVYSKPVEEFLRDHGYTYYRMNPLEASLQMASMRRHKTDSSDAHELAKTHFKVERETTYVQDTYYEQMRAITRYYDEVDKEIILLRSRMHAILHGSFPELEQLITPSSALFLNFVQLYPHPALLLAHSKTIIKNRLKSNTRKKLSLERAEKKAIVLLEAAENSYPSIKPTDIRCIQVSDYARRIADLMETKDKLVKQMVTMSEDKKEYKVLLSIPGIGDTTACRLIGELGDIRRFQNAKQINAYAGIDIMRYQSGNTQYRDRINKRGNKKLRKILYFMVCTMLMAKGKGEENHFVDYYYKLKTQPQKKHHEVAIVACMNKFLKVAFHLITHGILYDYESALPALKS

SEQ ID NO: 368890 - protein, 397 aa, unidentified
MDYDVVIGLDVGKAAHHACALDRGGKRLVDREITNTESSLRAIFTSMAAQGRVLVVVDQLHSIGALPVAVAQAMGVAVAYLPGLSMRRLADLHPGNAKTDARDAYVIAHAALTMPHTLRTLDVPSEAQADLAMLLGYDDDLAAQVTAAINRLRGLLVQIHPSLEKALGDNVAHAGVLHLLIKAGGPDGLRTMGKARIDTALRKYAPRIHERLATEIWDGLAAQTVIVPGTSAAAKVLPGLAAQILQLRDQRKEIAKDVEKVLDAHPLAEILTSMPGVGVKIAARLLAEIGGDVTAFPTAAHLAAYAGLTPVTKRSGTSIRGEHPNRGGNKRLKNAMFMAAFTSLRADPASRTYYDRKRAQGKKHNAALICLARRKTDVLFAMIRDHQPYTPSQPSAA

SEQ ID NO: 368891 - protein, 370 aa, unidentified
MENIIYIGIDVHKESFSLCALHGTTGEIVGEARCASNVSLVKKFVEKLKTKYGEDIKIKAGYEAGCLGYSLHNLLEQNGIDCDILAPTTMYSSSKNKMVKNDRFDAKMIALNLANGTYKEVYVPEEEDVAVKEYIRMLGDFKTSLKKIKQQIKAFLLRHGYIYEGKSSWTIAYMKWLKNLDLQGLFKETLDEYLLQYDVLVDKIERFSLRVEELSHSERYEEPVGKLRCLKGIDTTSAMTVHVEIADFTRFPTAKAFMAYVGLTPSESSSGEKISRSSITKQGNSTVRSTLVECANSLVKGTIGLKSKRVKARQKDQRSDVISYADRAVERLQRKYHRMMYQGKPRNVAITAIARELGCFIWGLETGKIH

SEQ ID NO: 368892 - protein, 364 aa, unidentified
MDASPTALVCQSGGVVTTEQEASVSEVSMIGLDLAKHVFQAHGADASGKVVFRKRLRRGRVLEFFAGKPACVVAMEACSSAHHWARELARLGHIVRLIPPAYVKPFVKRQKNDTADAEAICEAAQRPTMRFVAVKSEAAQANAVVFRARDLLVRQRTQAINALRGHLGEYGLVVAKGPGHIVKLVDHVENPNSDVPEAARLVLRTLVDALRFLSERIDHLDREIARRAREDDEVRRLTSIPGVGPITATALAALAPPADAFKKGRDFAAWVGLTPSQHSTGGKQKLGTTSKMGERTLRRLLIIGASSVVRKAVRQGTAAGSWLGRMLARKPRMLVIVALANKMARIAWAVQAKGEVYRAPAVVV

SEQ ID NO: 368893 - protein, 359 aa, unidentified
MQTRSQSLDFNGQNIYAGFDVHLKSWSVTIMTDEITHKTFSQPPEPEVLHQYLQRNFPGGTYLSAYEAGFCGYWIHHKLLRLGIHSIVVNPADIPTTNKEKVQKDDKRDSRKIAKALRSGDLIPIYVPSAKTIEDRCLVRTRSMLVRDSTRNKNRIKSFLHFHGIKILAAFENSRTHWTKRFINWLEAIEMKEDSSKLTLSLLVSECKKLRGTILTVTRSIRELSQTEAYIKHEKLIRTVPGIGPITAITFLTEIETITRFSNNNQLHSFVGIVPSTNSSGENEIIGDITPRGHSILRSAIIESAWIAIRHDPALMKAYHDYCKRMESNKAIVRIAKKLLNRISFVLKNMQPYSLSVVK

SEQ ID NO: 368894 - protein, 322 aa, unidentified
MSRNFIGVDVSQDYLDALVRPTAVRRRFANDSEGIAELLAWVQPYGAERIVFESTGPYQKAAVGALLAAGLPVVVVNARQVRDFAKAMNHLAKTDKIDAAVIAHFGEVATTTVRPLESQETCDLRELYDRRGQLVRMLVMEKNQRHAATVGQASAKVLKNIDEHLDYLKGQIRDLEQRMDRIIESSATFQARNEILQTITGIGPQVSRTLLAHLPELGRFSRQTIAALVGLAPFNDDSGMRSGPRHIRGGRAKVRIGLYQAAIAAIRHCPNMKAFYANLKARGKASRVAIIAVARKLLVLANALIRDMAPYRERQTPFAKNA

SEQ ID NO: 368895 - protein, 379 aa, unidentified
MTTLGMPAAFPAVHAVEAAAEPRVVVLGVDTHKDVHVAAVLDHLGGLLSSGEFPATAAGYRHLLDWARQCGTVLRAGVECTGSYGAGLARYLATQQVSVVEVNQPDRSTRRRRGKTDAIDAEAAARAALSGIARALPKSGDGQVEALRMLRLAKNSAVKARTQALNQLKAVLVNAPSALREELEPLSTALLLRRCAELADTREGNPAADTAVFTLRLLAQRVVQLRQEATELERRMTIAIRATAPSLLEQLGIGPDSAAALLITAGDNPERLGSEASFAALCGVSPVEKSSGKSQRRRLNRGGDRQANAALHRIVVTRMRQDERTRLYLERRTAEGKGKREVMRCLKRYAAREVYHLIRADMITRHQQPDTSATLMTAA

SEQ ID NO: 368896 - protein, 343 aa, unidentified
MEHYAGIDVSLERSSVCVVDSSGRIIREIKVASEPEALVGLFAGLGVAVTRIGLEAGPLSQWLHAGLTGAGFEAVLLETRHVKAALSAMVVKTDRKDARGIAQLLRMGWYRPVHCKSPPAQEIRALLVGRKLLQGKLLDVELSIRGILRGFGLKLGEVSKGRFAARVRELVAGQPMLERVVEPMLRAREALRAEYQVLHRAVLAIVREDAACRRLMGVPGVGALVAITFTSAVDDPARFRRSRAVGAHFGLTPKKYQSGETDVTGGISKVGDAMVRTALYEAANVMLTRAGRFSTLKRWALGVAQRRGMRRAKVALARKLATVLHRLWVDRSEFRFGKEVAAA

SEQ ID NO: 368897 - protein, 346 aa, unidentified
MKNSTFAVLGIDLGKNSVHAFGTSSSGVPVLRRRLSRPKLLEMLANAPRSLIGMEACPGSNYLARQIQQLGHDVRLIPAQYVKPYLKTNKNDYLDAEAIAEAVTRPTMRFVPPKTIEQLDVQTMHRIRDRMVCQRTALIAQIRSFLLEYGVVMATGVAAFKRDLPGKLAEHANNISPRLQVLVARLLDELQQLEARVEQISSEIEQYAAGNDTARRLMGVPGIGPLGATAFLAAVGDARRFKRGRDLAAWLGLVPRQHSTGGKNTLLSISKQGNSYLRKLLVHGARSCVLHLNRQRDRIGSWLDQLEQRTHRNKAIIALANKLARIAWALLTRPEQTYRRSAVPAL

SEQ ID NO: 368898 - protein, 463 aa, unidentified
MARNNKGKKNKKHVRSLKAIQPDAAGIDLGSREHWVAGPPLEDNTPNVQRFGTTTPELLRLADWLKEQKVKTVAMESTGVYWIPLFEILDSRGFEVILANARQVSHVPGRKTDMLDCQWLQLLHACGLLRGSFRPSDDICRLRALFRERNTMIDQRSDWVRRMQKSLDQMNVCVHHAVSDITGVTGMAIIRAIVDGERDPRTLAQMRDRRCQKSEEQIAEELTGNWRPEHLFNLRQALKMYDQFCQIVTEYDTEIFAYIKTLQPGVDDDQTAPPPASKSKARNIAKKGQEPMRQALYQLTGFDMTIINGIGVDTASVVLSELGFDYSAFPDEGHFVSFLRLAPNLSISAGKKVPSKLKGTTTSRVATALRMAALALRNSKTALGAFYRRISRRKGASVAVFATARKLAQIIYRFVCHGQAYIDIGAKAYEAQFNNRQLKYYTKALKDMGYKVKPLAAATALAA

SEQ ID NO: 368899 - protein, 347 aa, unidentified
MAEVTTIGLDLAKRVFQVHGVDAAGALVVRRTLRRQQVLAFFAKLPACLIGIEACATAHYWAREFARLGHDVRLIPPAYAKAYVRRNKNDPADAAAICEAVSRPSMRFVTIKTEAQQAAAGIHKVRDLLIKQRTMLINTLRGLMAEFGIIVAEGPHHVSELVAILADPADARIPAPLHHGLMAIVEIWRGLEQRIERVEKQIVDWGRANATYRHLITIPGYGPILSSAMTAMVVNPAGFTSARHFAASLGLVPRQDGTGGKVKLGPISKRGNGYLRRLLVNGAMSVLCSRRAKDDAWLVKLLQRKVRKVVACALANKLARIGWALMMRQQDYRRPRQDQPCPEPAGA

SEQ ID NO: 368900 - protein, 419 aa, unidentified
MTQENVLTKVIIGVDPHKLSATIEVVDRHEKLLGSGRFSTDQAGYAAMRTYVKSWPERVWAVEGSNGAGRPLAQRLLEAGEHVVDVPAKLAARVRLFDTGHNRKTDARDAHSIAVVAVRTTTLRVLRADGELEALRMLSDRREELTRLRVQIINRLHRLLAELVPGTAKKDLTALQAKAILASVRPRDIAGKTRRRLAADELADLVAVEAKMKKATAELKVLAKARGSRLMDLRGVGPVVAARTLADVGDIARFADRNRFASWTGTAPLDASSGEQNRHRLSRAGNRRMNHMIHIAAISQIRLDTEGRAYYRRKLAAGKTKLEALRCLKRRISDALYRQLVADAERARLARTTEPSDPVGAAGTGPGGHCGATQESSAVDLPPHIDTSDQPLPGPAKPTLQPPYSARKTSGSRTESATR

SEQ ID NO: 368901 - protein, 443 aa, unidentified
MKSLIQTLTATAAIDLGATFHMAALNPELSEAPIQEFGVDTGSLRQMAAWLLRHKVGHVAIEATGVYWMPVYEVLESFGLRVMLVDGRKSMSLPGRTKTDVLDAAWLEKLLRHGMLSPAFVPEADLIALRTYRRLRGQYVEKASSEIQRMQKALQQMNVRLDRAVTDVTGVTGMAIIRAIVSGERNPRKLASFRKHGVKKNEQEIALALDGHFQEHYIFTLGIALSEYDHLMERLRQIDEKIETELARLSAQSAPKEDYVATKAKARRKNQPFFDLRSYLTSLVGSAVLNIPGVDASTVLTVIGECGLDMSCWPTENHFVSWLGLCPMHRITGGKVKRSKSKRVRNDAATAFRLAAQSLSRSSSALGCMLGRISRRRGMPKAITALARMLAILYYRAVRYQKPYEDIGKDAYEERYRQQTLRRISKTAEKLGFQLVPVNLNAA

SEQ ID NO: 368902 - protein, 316 aa, unidentified
METTNPDTQATTYVGLDVAKDRLDYTLDGRRCAHVPNLAAGFKSLIAQLRKITHPRVICEATGGYERALVTALLRENIAVCVVNPGRVRAFAKAEGLLAKTDRLDALLLKRFGEKMQPRRHAPMDQAALALRELLDYRSQITEQRVAVQNRLELAGPILRERLEHQLEFLKQQLAEANRLIRDHIAREKNLRTKAERLQQLKGVGPVLAAVLLAHLPELGQLNSRKLAALVGVAPFAHESGHTKRCRHVRGGRSNVRSVLYMAAVTAVRSNPVLAAFYQRLVANGKAKMTALVAVMRKMLHVLNKLIVDPNFALVG

SEQ ID NO: 368903 - protein, 311 aa, unidentified
MSSIATHYVGVDVAQDFLVLCGAPTAQVANQPAALSPWLQELRRVHPSAHLICEATGRYHQALQVVAAQAGVPLSVLNPRQARDFARSLGRLEKTDAVDATVLQRLGQSLQPAATPLACATLRQLQDLLVVRQALVEEQTAWANRQALLSAPAARLCRQRLRTLLKEVARTEEQIASLLAQPEACALQDRLQTLCLVCGIGERTGWVLVAWLAELGQCNRRQIAKLAGLAPLNRDSGRFRGERHIAHGRAPVRRALYQAARVAAQHNEHLRPFYQRLRAAGKPAKLAYVAVARKLLVFLNRLLADAPPLFT

SEQ ID NO: 368904 - protein, 387 aa, unidentified
MRVAAHRAEAPSAICVDLGAIFVSLELSRSKWLITSLSPGGGEKMSKHIVAGGDVAGMLSCFAELKRKAQARTGRCLPIIVIQEAGLDGFWIHRVLQAEGIESHVVDPASIATSRRRRRAKTDKLDGEALLRALLAYKRGEPRVCAMLRAPTPEEEDRRRIVRERKALTNERIRHVNRVKGLLFGQGVSGYEPLRSDRRKRLEELKTGDGRSLSPNLKAQISRELDRIELLLTHIKDVEEARDTMLESAQAVAPAPKLLLNLKGIGPEFAAVLWSEGLSRHFDNRRQVAAYAGLAPTPWQSGIVDHEQGVSKSGNPRLRSTLIELSWLWVRHQPQSALTIWFKERMKQNGGRFKKSTIVALARKLLIAIWKYVNAGVVIEGAALKAA

SEQ ID NO: 368905 - protein, 320 aa, unidentified
MDVVVGIDIAKAKFDVALLRPEGTVRRKSCANTPAGFRELSAWLDRHDAGRVHAALEATGTYGTALAEYLYDAGHTVSVLNPVVIHAFAQSQLSRAKTDRADAALIARFCALHRPAPWTPLPREVRELQGLVRRLEALHEMRTQETNRAVAGQVVPAVQASIDTVVKTLTKEIAAVQRQIRDHFTQHPGLRSQRDLLTSIPGIGDATAAVLIAELFDKRYGSARQAAAFAGVVPRVWESGTLRARGRLVKIGPGRLRKALYFPALAALRCNPTMLALKARLTAAGKPKMVIVGAAMRKLIHLAYGVLKSGREYEATYARS

SEQ ID NO: 368906 - protein, 517 aa, unidentified
MHAKDRGAESGIAKATGETLRSIDGREAMAPQGAKTVWNGPSARVYIRRLAGGSVANTLHALGGWAMVQDITLWVGADVHKNTIAICVLRGDSQVNETQEFASDSETVRRVFKKLANSGHLRVAYEAGPCGYTLRRQLEAMGISCEVIAPSLIPKKAGDRVKNDRRDAIKIARMFRAGELTTIRVPTEKEEAARDLLRCREDLMQDLQRERQRLLKFLLRQGIVWRETMNWTDKHWKWLRQLRFDDVLSQRGFDEYLALVDTRVGRLKDLDREIEVLAEKEPWKEQVDRLKCLRGIRTLTAMIILTEVQDFRRFESPRQLMNFLGLTPGLHESGSKSHTLAITKTGNEHVRRVLVEAAWQYTRRPQWPRALDKRCDGQSPAIKREAKEAQDRLSFRYRHLRDKGKKPTVAVVAVAREMLGFIWAIMVKHVNPNERKASPPRQQALTPGQTKMPPSARKTRPAPKPVPIAKETPSPSTPTQRSKGPNRPRPNPSSKPPSASVPSNIEIHCNATLSLRG

SEQ ID NO: 368907 - protein, 343 aa, unidentified
MEYYVGLDVSLKQTSICVVDQSGSVVREGVVDSDPEAISVYVRSKAPGAVRIGLETGPTSTWLWTELKRLGLPVICIDARHAKAVLKMQINKSDRNDAIGIARIMQTGWFKEVHVKDIDSHSVRALLASRALLVKIKRDLENHVRGLLKNLGLVIGRAKFNVFAVRAEELIEGRPELIATIRPLLEARTAVEQQVSELDRKVMKLARHDAQVRRFMTVPGVGPITALAFKATIDDPARFARSRSVGAYVGLTCRRHASGEVDWSGRISKCGDAMLRSYLFEAAGVLLTRVPKWSAVKAWGVKLVKRNGLRKAKVAVARKLAVILHRMWIDGTEFNWSKKEIAA

SEQ ID NO: 368908 - protein, 391 aa, unidentified
MDQTARGEIVRVGVDLAKRVIQVHAVDSSGRVVVAKALTRERFIAWCAQLPPKVLVAMESCGGAHHWARKLAAMGLQPRLIAGHFVSPYRMEGKRGKNDANDAAAVCEAASRPSMRFVPIKTVDQQALLAVHRLREGYKEERTACVNRIRGLLTEFGFVFAQSPDALRLALPEVMEDAINELPAIARLALQRAQLQWLELDGHIAWCDERIAVHVRNDEQARVAVKLCGIGPVTASALVATVGDFRQFKTGAQFGSWLGLVPTQNSSGGKVSLGCITKRGDNYLRTLLIQGGKSAVMTAHKRQDRISRWLVQLLARVGWQKAAVAMANKNARILWAVLAKGRRFDPPPHLHQTRWACHGRPDPGRVVKAAKGKAKAPACSRRCITGQTGSR

SEQ ID NO: 368909 - protein, 465 aa, unidentified
MTLLAQLGQALPERYYLGLDVGYREHVAVVISLQTFVRGKDRWQHARSLHFESTSSGLAKLQCYLDRFSPDPQRFLGLCEPTGGYYGVVVFEYLQSKGYPMFWLENATTRHMRQQIFGDLPKTDEVDSRVMARIGYLHEAVGEEFTLRPVQLTRADDTDLLALCRLSWKLTVMINRAQNQLAQVLAAVFPELKTFFKDSVATIAPVSLIAAYRTPAELAAAAAAEVATVLHRAGAHQHAQRVAELQELAAHSAGVLPNQGRAWRLEWLTDFLQENLRDQAALDKRIAQLVTARSDYPLLATIPYSGPGTIGTILAATGSIARFGNYRQYVAYSGYFAGLEKSQTIDHTRMSKKGNRDLRRALFLIAAPLCWFDKGANPYKTLYERKKAEGRAWYKAMPFACAALARHIYHCLKSGEAYDVNKTFAASQLPPAAKQATQDLGAEIDGQFELMAAYLDSSVAEPSLV

SEQ ID NO: 368910 - protein, 331 aa, unidentified
MKFRAFIGIDVSKSTIDVHLRNAGKHTVFSNDLEGFEAMIEWLMDILGQVTPDEMLFGMEHTGLYSELLIDFLNGHNFPFTVLPGLELKKSLGIRRGKSDKADSRDIAEYIYEKREKVQLFIMPSKNLKSLRRLASYRERMVKERTAYKTRLGEYQKIHGKEDFEVYAQSHKQIIACLNKEIKVMEAEMQRLIKEDLEMSRQYQLVKSIKGIGPQTAIMMIVLTKAFTAFPEWRRFASYAGIAPFPNQSGTYMGKTKTSKLANKRIKALLTMCAGVAVQYNPEMRLYYEKRVSQGKNKMSTMNIIRNKLVSRIFAVIERGTPYVETMKYAA

SEQ ID NO: 368911 - protein, 415 aa, unidentified
MALKIVYKICCGIDVHKTFVVACIASTNDKGVTSYESRRFSTYTSGLKTLLQWLLEHNCKDVCMESTGKYWIPVYNILEKDCSIILAHPKYVKAIRGKKTDKKDAKWIADLFKHDLVAGSFMPPAGIRQLRDLMRYRFKLTCFKSSEKNRLQNCLTVSNIQLGNVVSDTFGKSAQAILDKILENPEDTSFDLEPLVFKSLKKKLPELRDSIDGYITPEQAGKLKVIKSHYENLEARKAELEELILALATPYQQELAILQTAPGISSDFTAIGIISEIGTNMEAFPSAKHLCSWAGLTPTNNESAGKKKSVRVSKAGCYIKPLSVQCANAVVKSSKHPEIRNRYLRFKKRRGHKKAIIAIARMLLTALYHMLKNGENYNAELYRKSDLPPVDREITVEQAILIARNQGYKIKSATA

SEQ ID NO: 368912 - protein, 357 aa, unidentified
MVEGSWVGLDVHARKVVAGVLDAGSGELSTVRVAAGGDATVAWLRTLPGPVRVAYEAGPTGYGLARACAAAGIACTVAAPSKINRPAGDRVKTDRRDAERLARLLRLGELVAVRVPEPHEEAARDLVRAREDLRGDLMRVRHRLSKLLLRHGLVYDARAWTLAHDAWLRRQRFESRPLALAFDDCYAAVVQTRARREALDAAIAELAAEPPFAEVVGRLCCLRGVSTLTALGLTVELGDWTRFRPQSLGPFLGLTPSEDSSGERRRLGGITKTGNTHARRLLVEAAWHQRRPPRPSAALERRRHGQPAAVRARADQSARRLHARWQALEARGKRRTIVAVAVARELAAHCWALATME

SEQ ID NO: 368913 - protein, 353 aa, unidentified
MKYVGIDWAYRKAQWCALSPGSQIASEGQIPADRDGLARLVLELGDEVKACLEMMSGALWVRDQLVDCGWQVEVADARKVKTVAPLAAKTDKVDARLLAELSRRELVPALWLPSLDERALRERLRRRMHLVRLRTSAKARIAGLQTQWGVRVSLQRLRRADGMALLERAGVPEVWRRSVSECLSVIGFLDARIAPLDAELRPLAHADPRAVLLDTIPGVAELLALTIAVEIGEVSRFSSPARLVSYGRLAPRVHQSGQARPHSGPLSKSGSRLLAWAAVEAAQQAWRETNPWHDLYADVARRSGNKNSAKAAVARKILIAAWYMLSRNQPFKPAPRCTRGTSVPASSRLALAA

SEQ ID NO: 368914 - protein, 347 aa, unidentified
MRFYTGQHTHYCGIDLHAATMYVCILDAAGEIRVHRNVKSSPEALLAIIAPYRDGLVVAAECTFTWSWLADLCAEENIRFVLGHALAMKAIHGGKAKNDKIDSHKIAVLLRGGMLPQAYVYPAAMRATRDLLRRRLHFVRKRGQLLAHIQNTIHPYNLDPFGKRIAYPANREGLLEHFPDPAVRKSVEVDLALVERYDTLIADLELTIVQHAKRHDADAFHRLRSVPGIGKILALTLLYEIHDVTRFDRVQQLASYARLVKCAHESAGKKLGSGGAKQGNVHLKWAFSEAAVLYLRHGVDGKKLLARLERKHGKGKALSILAHKLGRAVYYILARGSVFSHEKFANA

SEQ ID NO: 368915 - protein, 316 aa, unidentified
MQSALCIGVDVAKDNVVVACSRASFATRTVPNKPASLKAFLRSLPAQSSIAMEATGSYHQGLADLAHQQGLRVYVLNPRDLYHYAKGVGLRAKTDRVDAAVIARFLANEGSRLRAYQPPTAEQRKIDQLLRRRSKIVTLKTALQLTCSDAPSLRVESAKLLKSFAALLKKIDQQLATLQQAMPERVQQLERLRSIPGVGPLTACWLANLLDRVPFAHSDALVAFTGMDPRPCDSGQKRGQRRLSKRGPAEGRRLLFNAAMAASRCEAWKQTYERYRERGWTTTEAIMILARKMLRIALAMHKTQKSFDAQFIGKTA

SEQ ID NO: 368916 - protein, 387 aa, unidentified
MKKDSIAKLQTKLSKGKKNQVQARRAAKQRLTVGLDLGDRSSRYCILDEAGEKVSEDKLPTSKPGLNAVFGKMAASRIALEVGTHSPWVSRHLAALGHEVIVANPRKVKPITQSVKKNDRMDAEQLARLARVDPKLLSPIQHRGPEAQADLAVIRARAALVDVRTELINTARGLAKPMGERLKKCDADYVSEALADGLSEATQNAVRPLLKSVEEINKQIDAYDRKIQEIGKRYPETMLLKQVHGVGTLIALTYILTLEDAQRFTRSRDVGPYLGLTRKLRDSGDSEPELGISKAGDGLLRRLLVQGAHCILREGSPDSDLKAWGTAKLQQQGERKKGGKKRKKKAVVAVARKLAVLLHRLWVTGEVYDPHYQRKAVEAARGKAKAA

SEQ ID NO: 368917 - protein, 374 aa, unidentified
MSTMEWSEELLFVGDDWAEEHHDVELQDETGRVLGRAKLPEGVAGIARLHAMIGEHLGEDDDAKVVVGIETDRGPWVQALIAAGYQIYAINPLQVARYRERRSVSGAKSDPADAHVICDMVRTDRHQLRPVAGDRVEAEAVKVVTRAHKTLIWERTRHMLRLRHALREFFPAALAAFDDLTAKDALELLGAAPDPASVLPGAEDADECVAVGADVGGMRKPRMEEQVEAHFGEHPDAEVYLSQPGLGVLLGARVLAEFGDDKQRYADARARKNYAGTSPITRQSGKRKLVLARYVHNDRLVDALGLQAFSALRSSPGARAYYDQLRARGTGHRAALRQLGNRLVGILHGCLKTSTNYHEDKAWAPAKQDQQIAA

SEQ ID NO: 368918 - protein, 315 aa, unidentified
MDILGIDVGKDYIDCELLGEKHAKKRVHNTVRGFEQLQSWLRNRKVRKVHACMEATGGWSEELAYYLQERGHVVSIVNPMQIHAFGQSELSRAKTDKADAALIARFCKAMQPSTWEAPTPAERRLRQLVRRRRALIEMRTQELNRLEAPGIESVEKSIRDMIAMLDNQISELEADIKKTIDDDDDLKGKRDLIESIDGIGPTTSATLLAETPHIEKFESAKALTAFAGVCPQIQQSGRSVSKSRTTNIGNRAIRKVLYMAALAALRSNAVIKAFADRLRERGKRNMEIIVATMRKLLVLVFGVLKTRRPFDPNWA

SEQ ID NO: 368919 - protein, 459 aa, unidentified
MGRGTTSGAKIKNRPEKRKHSRVLDQINHNAAGIDAGSEYHYVAVPEDRVSPSVRKFATTTAGLYELADWLAEAGVDTVAVEATGVYCVPLLEVLEARGVEVVLAKPSSLKSVNDRQKTDMLDCQWIQLLHTFGLLRGSHRPAEMVATYRTYNRQRQMLIQQASTAIEHMKKALTSMNVRVELAVSDVTGKTGMAIIRAILKGQRDPGELAKMRDPRCGNSEEQIAEALFGKYTDDHLFELDQAVRTWDHFQVLIAECNAKLEEQGEKFEKKADRKDIPAPRRIEHVRKNVLTFDARSLFFELLGQDLTQIDGISTGTVSAFLAEVGTDVEAFESAKHFASWLRLSPGSNQSGGRNRSGKNRPTTNRLSTALRIAAQTLSRSRSSLGAFYRRKRAQLGADKAVTAAAHKLARMIYFTLKEQRHYVDPGPDHYTEQHRDRILKAMEKRAKQLGYQLVKAA

SEQ ID NO: 368920 - protein, 343 aa, unidentified
MHGVTTIGLDIAKSVFQVHGIDAIGKVVIRRQLKRRYVLAFFQKLVPCLVGIEACASSHHWSRALTALGHTVRLMPPAYVKPYVKRQKNDAADAEAICEAVTRANMRFVDTKTAEQQGCLMLHRTRHLLIRQQTAVINAIRAHLAEFGVVAPVGRRGVEELLDIATASSEERVPEVARACVGALGVQLRLLKAQILEFDRQIMAWHRSNETSKRLDEIPGVGPALATALVASVADPKAFRSGRNFSAWIGLVPKQHSSGGKDRLGSISKQGDRYLRSLFTAGALAVIRYAKIHGTRHRPWLAALLARRPTKVAAIALANKIARMAWAMMVKGERYKEPATLAV

SEQ ID NO: 368921 - protein, 477 aa, unidentified
MFVAVVAVASVVPVSLLVSMVRRVATRTVDCCLEHERQTSKFCLGPPRVERVNRCDNDGRKSIMEIVHSRCAGMDVSKRDAKVCVRVAGRGRRQTVERVRTWGSTTNAVLALREHLINEQVSLVVMEATGDYWKPFYYLLEDAGFEVMLVNARQVKNLPGRKSDVSDAAWLAQLGAHGLVRGSFVPPAPIRQLRDLTRARTAMTRERGREIQRLEKLLEDAGIKLSSVASDITCVSGRLMLQGLIDGQHDPAVLADLAKRRLRAKIPELTEALTGRFSAHHAFLTGMYLDAIDQRSRQIAELTARIEVVIEPFRSFCDLIGTIPGIGQRSAEVIVAETGADMSIFPTAAHLASWAGCCPGSNESAGRVKSTATRPGNPYLKAALGAAALSIANTHGTYLAAKYRRIAAHRGPKKALVAIEHTILIAIWNMANTGALYDDPGADYYTRRDPERTRRNAVTQLQQLGYQVTLTTNAATA

SEQ ID NO: 368922 - protein, 355 aa, unidentified
MDREKYIAMDVHQASISVAVRDAAGKLIVESVIETKAATILAFIRGIQGSLWITFEEGTSAAWLYDLLKPHVTKVIVCDPRKNALLNAGNKNDRVDARKLSDLLRAGLLTPVYHGESGVRTLRELCRGYLTINKDLTRVMNRLKALYRSWAIPCAGDKVYSPRHRNIWLEKLSEAGVRRRAEQLYQQLDALVQIRREARRELLAESQKHPATPLLRQIPRLGPIRVALLIALIQTPHRFRTKRQLWAYCGLALQTRASGEYRFTGGKPQHSKRLPALRGLNVNHNHDLKNVFKSAATHVSTSTDPLGDFYRSLLAKGMKPTMARLTLARKMAAIVLSVWKKGARFDPGELKQQAA

SEQ ID NO: 368923 - protein, 338 aa, unidentified
METYAGIDLHSSNNFIGVINDKDKILYGKRHANRLDDVLRALDPFKDSLQGVVVESTFNWYWLVDGLQEHGFPVHLANPSAIQQYEGLKHTDDQWDSFWLAHMQRLGILPEGYIYPKEHRAVRDLLRRRLLFVRHSTAHILSLQSMISRNLGFKMSNNEIKKLKPADIESLFDCSNLVFMANNSLAAIEFLKKITKGIEKKVKSQVKMRKEFEMLLTIPGIGNILGLTINLEVGDIGRFPKVGDYSSYCRCVGSKRLSNGKKKGENNKKNGNKYLAWAYVEAAQFARRYCVKAQSFYQSKEAKTKPVVAIKALSNKLSKASYYIMRDQVAFDEEKLFG

SEQ ID NO: 368924 - protein, 351 aa, unidentified
MSHKLNSAIAVIGIDIGKNSFHVVGHDKRGAIMLRQKWSRGQVEARLANLPPCLIGMEACVGAHHLSRKLQMLGHDARLMPAKYVRPYSKGQKNDFRDAEAITEAVQRPTMKFVATKTAEQLDLQALHRVRERLVTQRTGIINQIRAFLLERGVAVRQGLRFLRAELPRILAAPCDALSPRMLRVIEDLAGDWRRLDERIEGLSSEIEALARQDKGCERLMTVPGIGPIISSAMVAAIGTGDAFSKGRDFGAWLGLVPKQISTGDRTILGSISKRGNRYLRALFVQAAWVVLVKVGPKHWERYGLRSWIEAAKKRLHHNVLAVALANKLARIAWSVLAHGRTFEVSKIQAA

SEQ ID NO: 368925 - protein, 387 aa, unidentified
MYFVGIDISKYKHDCFICTETGEVIESNFSFPNTSDGFEQLLNLLKSIDNFKEIRIGFESTGHYGMNLKLFLEKNNYSFMEFNPKLVKEFISGQTLRKTKTDKKDAYQITKYLISVDYKPHPKQFYHKYSLKSLSRMREKLVKQRSYYEVALTNVLDHIFPEYKSFFNNTFSASSIFILSKYKSPDKIKNMKDYDSIRKISRGKFTSAQFFLLKDLAKNTIGTSNEIFELELETLLILRSQIEVEIKKLESNIEEIIKELNPPILSIKGIGYILGAGIVSEYGDVSRFKSADAMVAFAGIEPSICQSGTESHTGHMVKHGSGHLRYYLLNAADCIFLHEPIFTEFYYKKRNEGKSHRVALNHVAKKLIRIIYKLETENITFDSSKVK

SEQ ID NO: 368926 - protein, 385 aa, unidentified
MASTRMPEAVIGLDVGKSSHWACVATRDGEVLLSAPVANREGDLDSLFGRFPDALVVVDQSRNIGALALARARAAGMSAAYLPGLAAHGAARLFAGDAKTDERDAMVIAKTALGIPDALLPVGDPGPTVAAARALAAQRNFLTCENTRNKNRLRSILLESCPDFEALVDLSDGPQLRLMASLGGAWSVADAGPRRAAALTRGAARGKIEALVRSTASSTRPDAAAVAAEDRAVKLLARRISENSAEIEAITAEISALLEGDDTYRCLLTVPGIGPKTASELAISIDIEDFPSHDRLASYCGLAPRNRQSGTSISSVTASRQGNKRLKNLLIFSCNCLTRTEGRWGDYYTRCRERGMPHGKALKALARKRLKVIYAVMRDRVPYAA

SEQ ID NO: 368927 - protein, 423 aa, unidentified
MDVLYERVAGLDVHKDTVVACVRVSTGGQSQRECQTFATTTEGLIALAAWLEESRCTHVAMEATGVYWMPVWKILGHGDFELIVANAAHIKNVPGRKTDMNDATWIADLQACGLIKASFVPPEETQELRSLTRTRKQLVREQTRHAQRIQKTLAEANIRLDSVLSDPMGASGRRIIEAMIAGVRQPSKLAELASKQIKATPKELYDALHGRLTDHHRFLLELHLRQWDGLDAAIRNIDHEIGQRIDRMDAQIGTGKAPFRVLINLLDTAPGVNTVAAPAILSEIGCDMSRFPTAGHLLGWAGMCPGHNESAGKRKSSRLRKGAPWLKTMLIQCAWAAKRKKGSYYRAQFFRLQSKRGPQKAICAVAASLLTAIYHMLKHGIEHRDLGADHFDRRPTELHAKRLVAQLAKLGFNVQLQPIAQAA

SEQ ID NO: 368928 - protein, 406 aa, unidentified
MVCGVDWGSERHQVCLLDARGTTVGEREFAHSGEGLAELGNWLLSMASGASTVAVAIEVPHGPVVDALIDRGFVVYAINPKQLDRLRDRFSVAGAKDDRRDAYVQADGLRTDRRLFRRLQVVDPRLIELRAWSRLAEELRAERVRLSNRVHHQLWRYYPQMQKLTNDLAAPWFLELWAIASTPAKAGRLRKSTVERLLKRHRIRRMDAETVLRILREPAIRVAEGVAEAASIHMRSLVARLRIVNRELREAERKLDELCTAISEIEQTSGEGLQRRDVAILRSMPGIGRINLGTLLSEASGPLSRRDYEGLRTLSGAAPVTKRSGKSLIVVRRYAAHVRLRDTVYHWARVATQRDPKCRARYTALRKRGHSHGRALRGVADRLIALACLLLQRQTLFDPYFGRPTT

SEQ ID NO: 368929 - protein, 462 aa, unidentified
MENNAEPVFDEIRHNVAGIDLAGHSDHYVCGPRKEDGSYEIVAFGTTTSELHRMLGWLQERNVVSVAMESTSVYWIPLYDLLESNGIEAILVDPREVSMVPGRKSDVKDSQWLQKLHSCGLLRGAFRPSDEVVAVRSILREKETVVAMRTQSIQQMQKSLDQMNIRVHHAVSDIDGMTGLAIIGAIVNGERNPATLASLRDKRCKKSKAEIAEYLTGTWRDEHLFNLKQAYETLLFLNIKITEYDSKISEMFVTIANNSDASDNPSSPPSLPERKLTAKERKNTMSKAILQKFIKFDMTIIPGIDYDTAAIIISEIGNKFDRFPNEHHFASYIGLAPSLGKSAGKNIRQKRKCKNTSRVGRALRMAAASLWRSKSALGAYFRSVASRSDKKTAIKATARRIAHMIYRGVRYGVEYIDCGAEAYKNYLRQKGLKTIEKLAKIHNYNMEELKLAITSYNSKLKL

SEQ ID NO: 368930 - protein, 333 aa, unidentified
MACQVYCIGIDVSTAHLDTFNLPGKSGVHRRLSNTPESHAELAAALTDLCGSGNDVLVVMEASGGCERELHHALAGAGVPTAIVNPKRVRDFARSHGWLAKTDRVDAKVLHAFGQSHRPRPTALPDPVRAELKEMIAYRDQVVAEITARSLQRRHLRSAVLIERAEAARKSLRQEAETLALQIDMMMYTDETLGRRADLLRSFTGVGPQTAAVLVGHMPELGTLTDGEVASLAGLAPFARDSGSLRGVRTIYGGRGRVRQALFHATRAGLRWNPVLRAFYDRLRERGKPGKVALVACMRKMLVILNALLKAGQEWAPGHKHEKTGRTAGPASA

SEQ ID NO: 368931 - protein, 360 aa, unidentified
MCHRVIVRDESHEGAVHMQISTIGLDIAKNVFQVHGVDAAGKTVITRQLRRGQVIGYFEQLPPCLVGMEACATAHHWARELTELGHTVRLMPASYVKAYVKRSKHDAADAAAVCEAVTRPSMRFVPVKTIDQQAALMLHRCRDLLIRQRTQLINALRAHLAELGMIAAQGKDGVKDLVAIITDAVRATVLPEPMRQALQALVKQLAALQQQIGELERSIHAQHRASDPSRRLETIPGIGVLGATAIAATITDPTAFKSGRECAAWIGLVPRQNSTGGKERLGGISKQGDRYLRRLLVIGATAVIRHARTHPDKHPWVTRLLAKKPYKVVAVALANKMARIAWAILAKGETYRAPALVAAA

SEQ ID NO: 368932 - protein, 400 aa, unidentified
MSDAGGIDVYLGLDVGKGEHHGTALTPAGKKVFDKPLPNTEPRLRELFEKLQSRHGTVLVVVDQPASIGALPLAVARDAGCRVAYLPGLTMRRIADLYPGESKTDARDAAVIADAARTMPHTLRDLAPDDETVAELNMIVGFDDDLAGEVTRTKNRLRGLLTQIHPSLERVLGPRLEHPAVLFLLERHGSPAQLRKAGRRRLISLLRTKAPRMAERLVEDIFDALDEQSVVVPGTDAAALIIPSLAASLAAVLGQRRLLAARIEELLEAHPLSQVLTSMPGIGVRTAARILIDVGDGSGFATAGHLAAYAGLAPATRRSGSSIRGEHPARRGNKQLKRAFYLAAFASLSQPASRAYYDRKRREGKHHVAAIVCLARRRIDVLFAMLRDGTFYEPPKINTV

SEQ ID NO: 368933 - protein, 393 aa, unidentified
MLYLGIDQHRKQLTVNLRDEDGRVLIARQVSTDWQRVRAFCEQVRQRAQTAGGFKSVVEVCGFNDWLVKMLRDEFGCADVVLVQPASRSRKKTDRRDAAKLSELLWINRQPLERGEKPRGLRRVVLPSPEEAENRQLTMFRKRLGECRTKTLNKIQLILMRHNLQQECPTRTRHSQGARRWLEQLQLPEIDRLEMNLLLEQWTLWDQQLAEVEKKIVERHAKHADAQQIATIPGARDYTALALASRVSGIDRFPRSSSLANYWGITPGCRNSGEATQRLGSITKEGSALARFLLGQLVLHVLRKDRSMKDWYLRIKRRRGAKIARVAVMRRLATIIWHMLHDRRSYQEVREQEKKARGTPRGVAGTFEESPQRRLAAVERRTAKRAKTESLNV

SEQ ID NO: 368934 - protein, 347 aa, unidentified
MTIVEAVRGVTGGVDTHLDVHVAAALDPLGGLLGTESFSTDLAGYKALLGWLESFGDVSKIGIEGTGSYGSGLSRYLRRVGVEVIEVDRPNREERRRSGKSDPLDAVEAARAALSGRASGRPKSRDGAVEAIRVLVVAKRSARQARVKALIQMRHLSYSAPEQLRCHLKGLSVCALVAEGTKLRPTRSADPVTAATKASLSSLARRIETLGRELAELDARIEVLLVATVPELLRCFGVGPDTAAALVMAAGDNPERLQSEAAWAHLCGVSPIPTGSGKKGGKVRAHEGGDRQANSALWRIVMVRIAHDPRTQVYFERRLKEGMTKPEVIRILKRYVAREVYRHLPRH

SEQ ID NO: 368935 - protein, 402 aa, unidentified
MIAGRMWAGVDVGKEHHWVAVVDDTGAVVLSRKVANDESQIRELVADVDALAEQVSWTVDLTTAYASLLLTVLADAGKPVRYLAGRQVWQASATYRGGEAKTDAKDARVIADQSRMRGTDLPVLHPDDDLITELRMLTTHRSDLVADRTRTINRLRQQLVAVCPALERVAQLTQDRGWVVLLARYQRPKAIRQSGVTRVTRVLADAAVRNAATIAAAAVAAAKTQKVRLPGEEVAAGLIADLAREVIALDDRIKATDADIAGRFRRHPLAEVITSMPGMGFRLGAEFLATVGDTALIGSADQLAAWAGLAPVPRDSGKRTQRLHTPKRYSRRLRRVMYMSALTAIRCDPASREYYQRKRDQGKRPIPATICLARRRTNVLYALIRDNRVWQPDSPPITTSAA

SEQ ID NO: 368936 - protein, 407 aa, unidentified
MNDSGKRYIGLDVHKHYLIALGVDERLEVVMAARRVELSNLESWMKKNLTQQDEVVLEMTTNTWQLYDELVEYAGSVTVVHPPHVALITRSQVMNDKIAASILARLLAKGLLVGIWVPPQEVRELRGLVAQRQKMTRLATQAKNRLHAVIQRHHLKPPAGNPFAKMNNVWWASLSLGKLEKMNLQSDLETLQFAEKQEVRLQEEMTSVAAENEEIGRLLHISGFGVITAVTVYAAIGDIGRFAEAKKLVGYAGLGARVHDSGLTTRTGKITKAGRRDLRVALVEAAHVAANSHPHWKAELARLEPRLGYNKAIVAIARKLLVTVWHVLARKVADRFAEPEKVSKKMLHIAYEVGKENRAGKSAAQFARERMDALGMGQELTSIPWGSKKPIPLPPSKLKERSDVPNR

SEQ ID NO: 368937 - protein, 336 aa, unidentified
MINNIFYGLDIAKMVFHVFTINKDEIVKKQLSRSQLLKFFAQQARGVVGIEACGSAHHWARELEKLGYQVKLLDAKHVKAYLKGNKNDFNDAEAIYDAVTQVNCREVGKKTIEQQDIQLIHSFRQELMKHKKALVNQIRAHLRERGIIISVGMSKFHQQLPELLENETNYLSQISIRSIRAHYEQVKQLELLIRENDLEIEQLCRANELSQRLVEIQGIGVMTATILVSDIGKSRTYNKSRDYAASLGLVPRQYSTGGKPRLLGISKRGNAYIRTLLVHGARAVLKNIKDKKDKLSCWCRALIERRGFNVAAVALANKNARIVWAMATYGTNYEKP

SEQ ID NO: 368938 - protein, 321 aa, unidentified
MQGKAHVDAMAAVYVGIDVCKARLDVYLHPCGERFAVANDAGGRRRLRRRLDKLAVALVVIEATSKYHRAVHRHLDAAAIRVAVVNPLRARLFAEASGIFAKTDAIDARTLALMGARLDPARTPPVSRIVEALDELVRARSAAIDERVALANRRDNTATPFLRIELARRIRALDTHVRRIEARISHLVAQDPHMAARHAILRLIPGIGPVNAATLCAGLNELGRVDAKQVAALAGLAPFATDSGPKNGQRHIRGGRPHIRKALYMAALSACRFNPDLKRFHASLIANGKPPKVAITAVMRKLLVLANSLVAQNRPWIPRPA

SEQ ID NO: 368939 - protein, 371 aa, unidentified
MVKLTRTMNKCHSNTELSSHEETRCQFNGGPGAIKLGIDVHQDFYVVVEQVGATNPKPPQRFQKQAFVHWAAKLKSQATEVYAVYEACGFGFSLQRKLSALSIKCYVVCPQKLDEQNRRVKTDGLDAKALCLKLDRFVQGNRDALAIVRVPSEEEEQARAIHRQREQLVKARKQLEAQGRSLMVNHGLEPVQNWWKPRTFAALAMPQWMKELLANSQPILVALQQKIAALTVQLQSAASPNQPRGLGKMTSVVIDREIGDWNRFNNRRQVASYTGLCPGEYSSGNTRLQSCVTKHGNPRLRAALVELAWRLVRFQPDYHPVRKWRQILAKGALATGAARKKAIVAVARQLAVDLWRIKTGRLRAEELGLIN

SEQ ID NO: 368940 - protein, 332 aa, unidentified
MNMHPQGGVASSEVRPNAGIDVSKQHLDACVGRDARRVPNDAQGWDELTAMLQAAKVDLVVVEATGGYERGLVCALQGAGIAVARVNPRQARDFAKSMGVLAKTDQVDARTLRAFADVLSRHEQRERYITPMLEQARAQLAELMTRRRQLVDMRVAEHNRLEHAGAVAARSIRSVIKLLDKQLAALDAGIDDHMNRHFGHQRELLDSVKGVGPVTILTMTAALPELGQLKRRQISKLVGVAPLANDSGQRQGKRRIWGGRGEVRCVLYMAATVAMRHNPVIRAFYERLLAAGKPKKVAIVACMRKLLTILNAMLRDQALWDAARHVAPAQSA

SEQ ID NO: 368941 - protein, 337 aa, unidentified
MEHFAGLDVSMEETHICVVNQDGAVVQQMKVASTPVDIEGGLAAAPACRRVVFETGRMAPMLYHGLKERGVPIVCVESRQAHQALKSLATHKTDRNDARGLAQLARTGFFKPVHVKSLPAHAVRSLIIARKKLVGQRVTLDNQIRGLAVVFGVRLPRALSPAFIAKALEASEGITGLSAAMRGLAAARTAVLSAVTAIDRDMKKLARASDACRRLMTVPGVGYITALAFTAAVDDPSRFRRSREIGAYFGLVPRRYQSGEIDYTGSISKNGDRRVRTLLYEAANVLLTRYKRPLKLKDWAVAIAKRSTMRKARVALARRLAIIMHAMLRNGTEFNPA

SEQ ID NO: 368942 - protein, 369 aa, unidentified
MADYREAFVAFDVAKIKHAVAVADSGRAGEVRFLGEIENRPVTIERTIRKLAKRYDRLHVCFEAGPTGYGLYRQVGDLGHDCMVVAPALIPKRSGERIKTNRRDAVTLARLHRAGELSAVWVPDIVHEAVRDLVRARQAGAEDLRRKRQQLLSFLLRHGRIYDAGGHWTLAHRRWLARQAFEHQAAQIVFQETSDAIADAAQRLHRLDEQLAAIVETWSMKPVVEAYQAMRGVSFLVAVIFAAEIGDVRRFETPPQLMAFLGLVPGERSTGDTVRRSGLTLAGNRRARRALVEAAWTYRYPARVSEPLRARLEGLPKAVRDIAWKAQVRLCARYRRLAAAGKKPPVIAAAIAREMAAFLWAIGREVAPS

SEQ ID NO: 368943 - protein, 360 aa, unidentified
MEVGQEVVLHPVVGGVDTHKDLHVAAVVDELDRVLGTRCFATTRQGYRQMLAWMRSFGQLRCVGIEATGTYGAGLLRSMQNAGVEVLEVTAPDKPDRRKRGKNDDLDAQNAAHAAFAGKRTVTPRSRDGMIESLRVLKACRKTAVVARRIALQMIQNTIVCAPDGLREALRQMTRMQLVRTLAAWRPDLTDYRNVDSAYRISLKSLGRRYVELHDEIADLDVMIAAIVDELAPNLVARNSIGHAGAAQLLLTAGDNPERLHSEAGFAALCGVSPVPASSGKTTRHRLNRGGDRAANSALHIIAIGRLRTDPRTKAYMAKRVAEGHSKLEVIRCLKRYIAREVFTLISHRQKEINQARITA

SEQ ID NO: 368944 - protein, 343 aa, unidentified
MNEVTTIGIDLAKSVFQVHGVDASGATVIRRQLRRGQVLPFFRKQPPCLIGMEACATSHHWAREIIALGHEVKLMPPRYVKPYVKRNKNDAADAEAICEAVTRPTMRFVAVKSTERQSVLMVHRTRELLVRQRTMLVNALRAHMAEFGVVARIGLPQVKKLLAVIADGDDDRIPTLARTCLEGLVRQLLSLEREINDAEKRIHAWHRTNEDSRRLETTPGIGPITASALASSVTDPHIFKSGRMMAAWIGLVPRQNSTGGKQRLGRISKQGDQYLRWLLVAGAMTVIRHAKRRGTTDPWLARLIATKPTKLAAVALANKNARIAWALLRHGGNYRRPASATAP

SEQ ID NO: 368945 - protein, 341 aa, unidentified
MFILGIDVGKSHLHCRLLKSTEQGTQKQSTTKLGNIQIFQNTEEGRLRLTQWLEGYQALGNTTHAVMEATGVYSQQIAHTLHSLSCKVSVVNAAKIKFFAMSNLRRGKTDSMDAELIAQYGLTMKPAPWTPTRLELEHLRALLSEREGIIGLITMEKGRHHAFAHHQQPCKKALERCETRQKLLKEQLDSVELDIKDIIKADPILKGQVGLLTSVPGVGRLTAATLLAETHHLEDLQNAGQWASFAGLSPVPRQSGQMMGRSSISKVGNPRIRKILYMSAVTVTRMDNEQGEFYRRLVGSGKPKKVALIALARKILRVCFAVLRSGEPYTKGHRSQLALPA

SEQ ID NO: 368946 - protein, 353 aa, unidentified
MVPPVNNRSGAFGTAAAVTHDRTVARLSIVRTRQVTVTKIICGVDVSSTSLDAFVGPSGPAHSFRNTAEGIAELAAFCRQQSVDLVAMEASGGYEKQAFALLWAGGVPVALLNPRAVRDFAKGMGLLEKTDCIDARVIAWFAAVKGSMSNAPASAEQQRLKALVTRLRQLTELQAAQRNQRLLVSEATVLELIAELLKVVAWQIRMLEAEIAALLASDPLWQKLDQALRSIKGVADRTVARVMAEMPEIGTLSNQAVSKLAGLAPLAHDSGKREGKRLVRGGRRNVRAILFVVAGVVRRHDPDFAAFHQRLSAAGKPRKVIRIALAHKLLVRLNARARDARKAFAGASVCQSA

SEQ ID NO: 368947 - protein, 423 aa, unidentified
MISAVLERCAGIDVGKKWIAVCVLTGPANGEAQVERRKYQTTNQSLEQMCAWLVECGCTHVAMESTGEYWRPIYNVLEEATDIEIILANSQQVKGLRGHKTDPQDAHWLAHLLRHGMIRPSYIPPLPIRQLRDLTRRRKQLVRNGAQERNRIQKILEDANIKLGNVLSDVFGLSGQLMLDKLLDGDATPAEIAELAQRSAKKKIPQIRASLEGHRMNALHRRLIDLSLNHMAFLEEQISTLDGAIVQHIQAQGLDKPYQLLQTIPGVKEEAAASLLAEFGPDMQVFGSTKKMSSWAGVAPGNNESAGKKKRAPALRGNPWARTTLTESAWSASRKKESEFQNAYQRWKPKLGHKRAIVAVAHSLAETVFEVLSTGQPYTGAGASPMPDSQAAQLIRHHTRRIKTLRQRLHPQPPPPQPQPAMQ

SEQ ID NO: 368948 - protein, 373 aa, unidentified
MKKNITETPKMSRTKRLSRGQLSGSLTVGIDLGDRTSRYCVLNQAGDVVEARAVATTRKDLTRVFGALRHSRLALEVGTHSPWVSRHLQALGHEVIVANPRRTRLIAESDNKHDRVDAETLARLARADAKLLVPIRHRGEQAQADLAVIRVRAALVEARTRAINTARGLTKSFGERLRKCDAQSVDERLAEDLPPAVQTVVAPLLAQTRELNARIREHEETIQKIARERYPETALLTAVHGVGVLTALTFILTIDDRSRFARSRDVGAYLGMRPRRRQSSGSDPALGISKAGDRYLRKLLVQGAHVILGRHGADSDLRRFGRKLAERGGKGANKKARVAVARKLAVLLHHLWVTGEVYEPVHHTRTAPVAAAA

SEQ ID NO: 368949 - protein, 422 aa, unidentified
MVLKGVPMALKIVYQICCGIDVHKTFVVACIASTNKQGVTTYKRHRFSTFTQGLKELFQWLLDNHCKDVCMESTGKYWIPIYNVLEKDCNIVLAHPKYVKAIRGKKTDKKDAKWIADLFKHDLVAGSFMPPADIRQLRDLMRYRFKLTCFMSSEKNRLQNCLTVSNIQLASVVSDTFGKSSQRILDKILENPDDTSFDIEPLIHGSMKKKLPELELAIDGFITPEQAGKLKVIKKHFEDLESRKAELEELILALASPYQQELDLILTAPSFKNTFTAIGIISEIGVNMEAFPSAKHLCSWAGLTPTNNESAGKKKSVRVSKAGCYIKPLLVQCANSVVKSEKHPEIRNRYLRLRKRRGHKKAIIAIARMLLTALYNMLKNKEPYNAELYRKSDILPVNREITVEQAILMAQFQGYKIKSAAE

SEQ ID NO: 368950 - protein, 404 aa, unidentified
MLDIEGVGVFLGMDVGKTAHHGHGLTPAGKKVFDKPMPNSEPKLRAVFDKLKAKFGTVLVIVDQPASIGALPLTVARDAGCEVAYLPGLAMRRIADLYPGEAKTDAKDAAVIADAARTMPHTLRSLELTDEITAELTVLTGFDQDLAAEATRTSNRIRGLLTQFHPSLERVLGPRLDHPAVTWLLERYGSPAALRKAGRRRLVEVIRPKAPRMAARLIDDVFDALDEQTVVVPGTGTLDVVIPSLARSLAAVHEQRRALETQISTLLEAHPLHPVLTSMPGVGVRTAAVLLVTVGDGTGFPSAAHLASYAGLAPTTRSSGTSIHGEHAPRGGNRQLKRAMFLSAFACMNADPASRTYYDRQRSRGKTHTQALLRLARQRISVLFAMLRDGTFYEPRTTTNTLAT

SEQ ID NO: 368951 - protein, 366 aa, unidentified
MIVIGTDTHKQSHTAAALDGATGGVIAEQTARAKRRSFEDLLLWARQLGPERVWAIEDCRHVSGALERFLLAHGEQVVRVPPKLTAGARSSARERGKSDSIDAVSIARAAIREGLDTLPVAQLAGPELDVRLLVDHRERLIAQRTQLSNDLRWSMHDMWPEFDVPARALTASGWQERVASRLARAEQSARVRIARDELRRIRELTRTINALEGELATLIATLAPRLLAEPGCGVLTAAKLIGEIAGISRFATEAQFARITGTAPIAASSGRTERHRLDRGGNRQLNCALHRLAVTRGRMDPDTSGYLARKQAEGKSRREALRSLKRHLARRIWLVLQPPGRDTPPTRHRPAVTIHCNTPYGSFSLT

SEQ ID NO: 368952 - protein, 385 aa, unidentified
MSKLNHTDTPAAAEYATVYVAFELSKANWHLGVILPGSQKLSRFRIDGGDLAALSVHLAKWRAKAATAGKPVRIVSCYEAGYDGHWLHRWLTNQGVINYEIDPASIQVNRRARRPKTDRIDLEQLMSTLLRYLRGEPRVCSMVRVPSPEDEDRRRVSRERDRLLKERSGHTNRITGLLHAQGIRDAKPFQRGFIASLESMRTGDGRALPPKLKEEIVREHQRLCLVQQHLIALEAKSRAEIRAPARGSVEGKINHLVDLRGIGVVGGRKLMHEVFYRAFDNRRQVGSFFGLTNSAYDSGTSHRDQGISKAGNRRARTLAVELAWLWLRYQPESELSRWFHARVGHLKGRIRRIAIVALARKLMVALWRYITTGVVPTGAVSRQSI

SEQ ID NO: 368953 - protein, 391 aa, unidentified
MIYIGIDVAKDKHDCFIINSDSEVLFKAFTIANNLDGFNDLYQKMESVMDDVTKVKVGLEATGHYSYNLLGYLIDKGLPTYVINPLHTNLYRKSLSLRQTKTDKVDARTIASMLMSDVNLKSYSDTSYHNEELKSLTRYRFDKVKERAKLKTSVSRLVCILFPELEKLVPTLHMASVYALLYEFPGAKHVATAHLTRLTNLLSESSKGRYGKDTAITFRDAARASIGSNMTAKSLELKHTIKLIQELDSEIDEIENEIKIIMDEINSPILSIPGINYRMGAMIIAEIGDFNRFDSPDKILAYAGFSSSTYQSGQLDGAYAHMEKRGSRYLRYALYNATKYVCHWDPTFAAYLAKKRAEGKHYNVAISHAVKKLVRVIYHLEKTKQQYIKAA

SEQ ID NO: 368954 - protein, 343 aa, unidentified
MKEITTIGLDTAKSVFLVHGVDTNDEVVVRRQLKRRQVLPFFAKLSPCLIGIEACAASHHWSRELTKLGHTVRLMPPLYVKPYVKSQKNDQTDAEAICEAVVRPNMRFVPTKSRDQQAILMLHRTRTLLVRQRTATINAIRSHLAEFGIVSGVGRNGVEALLKVISDEQDERVPAAARDCLIVLGRQLEMLRRQAAELDAKIMACHRNNELSRRLEEIPGVGPRVATALVASIADPKSFRSGRQMAAWIGLVPKQNSSGGKDRLGGITKAGDRYLRSLLMVGALSIIKRVQKLGYTHRPWLAKLMARRPAKVAAIALANKIVRMAWAMMVRGEAYREPVALTA

SEQ ID NO: 368955 - protein, 346 aa, unidentified
MTHSTTVGVDLAKNVIQVSVVSPRGKELLNRSLTRRKFAEFLGKQKPALVAFEACATSHYWARAAERHDHVARIIPAKFVAPFRQGHKTDSNDALAVAEAARRPSIKEAPMKTVEQQGLQAIHRSRQLLIQESTALSNHLRGLLMEFGVVIPQGFASLLRAVPEVLEDGDNELPDLYRPTLHRLYTRLLELREDIEVMTKEVEVLVKQHPICSRLTALEGIGPIGALLLYATMGSGIAFSGSREFAAYLGLAPRQYSSGGKTNIVGLSKKIGNCRLRSILILGARAYTYRLKEPKSAKDRWLKNAIDRNGHSRAAIALANKNVRTAWAMVTQGTEYQRRGQLKVAA

SEQ ID NO: 368956 - protein, 409 aa, unidentified
MFSTHAVPGSTFIGTPSWLACAWPRPGGVIRFVETFATTTAELERLSEWLAGHGVTAVAMEATGVYWKPVWAVLAGHFELVLANAHHVKAVPGRKTDVNDATWLADLLAHGLIRPSFVPSMSEQALRDLTRARKQLTREKASHVQRIDKTLQAANIKLGSVFSNIMGQSGRALLEALAAGESNPEQLAGLVRTKIRASHAQVVEAVRGRLAAHQRLLLRLYLTQVDALDAAIAAIDHELGERLKPVQETVRRLTTMPGLSPLSAAVVISEIGLDMSRFPSAAHLISWAGLCPKNDESAGKRRSTRLRPGAPWLKAVLVQSAWCAVRVKASYLHALFQRLKARRGPRKAIVAVAAAMLTAIYHMLKRGAAYHDLGPDHFQRTERSRLAARLARKLGELGFDVTLTQRAAA

SEQ ID NO: 368957 - protein, 339 aa, unidentified
MKVMIGIDPHKASHTAVAIARDEDQIAGFKVRATSRQVEHLLRWAEPFEKRIWAIESVGGLGYLLAQQLVAKGEEVLDVPATLASRIRVLATGRSNKNDPNDAHSIAIAALRAPGLRLVEPADHGEVLRLLSKRNSDLGRQRSRVICRLHSLFAELSPGGIAKEMYVSDAEELLAKVRPESPAQQMRYDLVLELLDDVRRLDEQIKTSHRRIRLAVRASGTSVTEVYGVGPIHAAEVIGYSGDVRRFTNRDAYASYNGTAPIERSSGGRIVHRLSQRGNRKVNHALHMVAVTQIRNPGTEGRVYFERKVSEGKTKKEALRSLKRQISNAVYRQLVLDAG

SEQ ID NO: 368958 - protein, 487 aa, unidentified
MSVVTGHVCDIGEAAKAAIPFERVSITTYPNRCGIPNEMMEEGMAQRKRTVLELAHPNAAGIDIGSASHFVAVSPDRDDEPVREFKSFTEDLEELADWLVCCGVDTVAMESTGVYWIPLYEILEARGFAVNLVNARHVKNVSGRKSDVLDCQWLQQLMSYGLLSGTFRPTDEICMLRAVSRQRDMLQASQGRHIQHMQKALTQMNVQLANVISDIVGETGQKIVRGIIAGERDGHVLAKMKNTRIRASEEKIAKSLQGNWREEHLFALKQAMVLYDNYGILLTECDAKLESMLATLVGDDDSEPGRGRRASNSKNAPQFDVRTYLFRLCGVDLTRINGINPTTALKVIAEVGPDMTRFKSAKHFASWLGLCPGTKISGGKVLSGASKRTTNRAAQSLRLAAAALHKSQSALGAYFRRLAARLDRAKAITAVAHKLARLIYTMLTKGEEYTDQGQDYYEERYRQRVMHHLARRAEKLGMQLVPAPQST

SEQ ID NO: 368959 - protein, 315 aa, unidentified
MKTYAGIDLHSSNSYIGIIDEQNQKLYGKRIPNELDRILSALEPFKKELSGVVVESTYNWYWLVDGLKDNGYKLHLANPSAIKQYEGLKHTDDKWDSFWLAHILRLGILPEGYIYPKEERPLRDLLRRRLLLVRQRTTHILSLQSMINRNLGMRISGNAIKKLKEADAEKLFDQTHLLLAAKNSISVIRFLKEKISIIEKEALSLLKPHHGFNYLQTIPGIGNILALTIMLEVGDIDRFPAVGNYSSYCRCVKSERFSNGKKKGNGNRKNGNKYLAWAYVEAANFAIRYCPYSKKFYQRKKGQNKRNSWHQGIKQ

SEQ ID NO: 368960 - protein, 316 aa, unidentified
MAQEQVVVGIDVAKEKVDVAIRRGAECCFANDPQGHRQLRAWLKEHAVGQAVMEASGGYERSWARLLRAAGLEVVIVDPKRVRHFAKSAGQLAKNDPIDARMIAWFGEAFEHRGKPEDAAREELDQLVTARRGLSRLKEKIDNWGEHEQPKAVQRAYQALLKEITRQQARLEAFIVDRIEQSEHFAERAEIIQSVPGLAGNSAAALLALLPELGQVDRQAASALLGVAPFDDDSGKRHGHRHIQGGRRKLRCLLFTPILGAATQHNPVLKDYYRRLIAKGKEHKVALVACMRKLICILNTMLQRREKWDPARHALA

SEQ ID NO: 368961 - protein, 334 aa, unidentified
MIGLDIAKNVFEVHGRNAAGEVVLRRTVKRASMEKRFGELSPALIGMEACGSAHHWARVLGKLGHEVRLMPPAYVKPFVKRNKSDAIDALACCKAVVDPDMRFVPVKTVDQQAALSLHRSRELLVRQRTQLGNALRAVLSEFGIVAGQGKAGLAQLVEQLRAGTLELPEDALFSATIFADQLAAADAAAAALERRIKAQAKADPTARMLQTAPTVGPMIAHAVRAVLPDPARFQCARDFAAFLGLAPSNSGTGGKMRTGHITKKGDPTLRRLLVLGATSWVRRVSRCLDKASPWLRGMLARRPRKVVAVALAARTARILWAMLTHNQPYRAANA

SEQ ID NO: 368962 - protein, 343 aa, unidentified
MEIKALGIDLGKNWFHLHGIDKRGKPVLQKKVSREKLPIVIANLPGCLIGMEACAGAHFWARCFQQMGHEVKLIAPQFVKPYVKSNKNDQADAAAISEAVTRSHMRFVPIKSSAQQEILAIHRVRERLVRVKTALTNEIRGLLLEQGITIPQGVSKFEQFLANLLDPEIEELSPLFKGLLGELVEEFKLAKGRVKRLEERLQRLGKEDKAVQRLMTIPGVGPIGASALVGSIGDIRQFKNGRELSAWLGLVPRQHSTGGKPRLLGISKRGDLYLRTLLIHGARAVIRWISQREKPVSSLEKWVLDIIERRGINRAIVALANKIGRMIWALLAKEENYRMHATV

SEQ ID NO: 368963 - protein, 285 aa, unidentified
MLSFCGIDVSKDRLDVMVLPEEQCCSVPNDARGWAALVERLRNFSIAAIGLEASGGYERGVARALLAAGISVRQVNPFKLRQFARASGVLAKNDPLDARMIASFVGIMPTRPAQRPTPAAEQLAEMLAVRRQLSAEKVAAENASRLLEDAMLQRLSRRRIRRLAADIELLAERLVEIVTSKVALAHRYRLLTSMPGVGPVLACTLIALLPELGGMTRKQVAALVGVAPYAFESGALKGRRCIWGGRANVRQALYMAAMSASNWNTNNLKPSHARHASQVFRVLAC

SEQ ID NO: 368964 - protein, 459 aa, unidentified
MSRKHKKAKRAGQGGAVPSLSCIEPNAAGIDVGATEIFVAVPQDRDPGPVRSFETFTEDLHRLKSWLQHCGITTVAMESTGVYWIPLFQILERAGLEVCLVNAQHVKHVPGRKSDVIDCQWLQYLHSVGLLRASFRPEERICAIRSLLRHRDSLVQMAAAHVQHMQKALTQMNLQLHHVLSDITGQSGLAILDAILAGERNPAVLAQLRHARVQASQEVITKSLVGDYQREHLFTLRQSLQAYRYYQSLITTCDQEIAEQLQHLDSRTPPDASPLPPEPYPHRPRKNEFRFDMRSELYRIYGTDLTAIPSLNALTGYTVLAEVGTDGSKFRNGDAFASWTCLCPQNKKSGGKILSAHTRRSANRVNRALRLAAQTLERSTSYLGTYYRKMRARHGAPAAITAAAHKLARIIFHLVTTGQAYDESLFAAEEQRQRKRLENKLKRSAQQLGYQLIPLGQTA

SEQ ID NO: 368965 - protein, 460 aa, unidentified
MSKKTAKAAKQKNIVEMPLVNPYSAGIDVGDTEHVVAIPEGLDKERVKKFGTMTCDLEAIISWLKTCGIVTVAMESTGVYWKPLFSMLVRHGFEVHLVNSKHVKNVTGRKTDEDDAMWIQKLHSCGLLKSSYLPDDEQEALRTLVRHRKTLIQDMSRFINRMQKSLELMNIKFHTVISDITGKTGKAVIEAILAGERRAENFLPLIGSRIKADHETIQKSLQGNWRDEHLFTLKQNYDFYQMYQQQIVICDMQIEKQLQQYEASRNEGEIQTIKTNKKESFISAVKKKKKDKNHPKFNVRGYLERIHGVDVLAIYGLSDTGGLELLTETGIDLSKWENELHFVSWLNLCPNNKISGGKLISSKLTKKKPNTASQAFRNAANAVQKSDHWLGDYFRRMKAKGGNKYAIVATANKIATIYYKMVRYKEQFKPIDFEQYQQKYKKAKIAYLERKLNLLKQQVA

SEQ ID NO: 368966 - protein, 397 aa, unidentified
MYIVGIDIAKRKHEAAVIDGEGAVIIKPFSFTNNCSGYNRLLAMLTKAKLPLDEVSFAMEATGHYWLALFTRLQKEGFRVQVINPVQTNSIRSFYIRQAKTDPRDALLIAEVIRFGHFSESSLHPENIYELRELCRGRHAIVSMQADVKRKVVALLDQVFPEYETAFTNLFSDTSMAILQTCPTPKELSEMPLEELCHLIEVSSRKRFRMVKAQELQELARNSFGFAMAGDVFSTMIRLYAKHLDFLKQQVREMDRKIAEIMDTLDTPITTITGIGPTLGAYILSEIGDISRFSSAAKLAAYAGIDPTMRQSGEYNGVRNRMSKRGSPYLRHAIWLAASSAVIHDPALKLYFQKKRDEGKPYMASVGHACRKMVSIIYAVMRDNKAYTPYIPNEISA

SEQ ID NO: 368967 - protein, 347 aa, unidentified
MKEQNNRSEFTIGLDLGERRHRFCALNGKGEVVEEGTLGNDRASLARLMARYRGALAVMEAGAHSPWISRYLERLGWEVIVSNPRKVRAIYQHERKSDQRDALMLARIGRMDRALLYPVRHGSEEAQQDLLRFKLRDSLVRARVALINSVRFSLKSLGYAVSNPSSERFHKVAMETLPEVVREMIAPSVQALAELSARIAVLEREIRVLARTKYPQTLWLQQVPGVGAITALYFVLKIEDPKRFKKVRDVGAYTGLCPRRDQSGESDPQLRISKRGDAYLRRLLVSAAQYILGPFGPRSALREYGLRLAADGTTRAKKRAVVAVARKLCVLLLSLWKNQTPYQPYPA

SEQ ID NO: 368968 - protein, 314 aa, unidentified
MTGFVGIDVAKAELVVTSRPTLTRWSVANTARGIEALVAQLRELAPALIVLEATGGYEREVTAALVAAGLRAVVVNPRQVRAFAKATGQLAKTDRIDADVLALFAERMQPAWRPLAEEATTDLAAVLLRRRQLSDMLTAERNRLGVARRPVRASLKKHITYLERELRGTESELRTLIEDSPVWRVHDELLQSAPAIGTVTSQTLLAELPELGQLTHKQITALVGVAPMANDSGRLRGPRAICGGRARVRQVLYMAALVATRRNPVIRRFYQRLLAAGKAKKVALVACMRKLLLILNAMMRDQRPWAATIEASPA

SEQ ID NO: 368969 - protein, 367 aa, unidentified
MKKVSTAARKQSRNFSQQKLTIGLDLGDRSSCYCVLDETGSIVLEQRVATTPKALPAAFGAMPRSRIALETGMHSPWVSRLLSGLGHEVIVAHARNVRLIGESRRKDDRLDAQTLARLARIDPELLSPVKHRSAKAQADLTVIRARAGLVRARTALVNTARGLAKSYGERLRGCNVRNMNPEKAEGLSPELRAALQPLLAGLESLSEQIREYNERIENLAQESYPQVALLKQIKGVGTLIALTFLLTLEDPHRFRKSRDVGCYLGLQPGRRNSGQSEPQMHISKEGDPYLRTLLVQGAQHILGPFGPDCDLRRWGLKLAERGGKSGKKRAIIATARKLAVLLHHLWVSGEVYDPLHNSSRVAIAAAA

SEQ ID NO: 368970 - protein, 349 aa, unidentified
MDRTTYGLDIAKNVMQLHWIEAETGEIGRKKLARAKLTAYFAELQPVRIVMEACGSAHHWARVFTGLGHQVELLPAAQVRPFVRSNKDDAADARAIWLAAQHSDIRRVPQKSVEQQGVLALHRTRSHWISVRTATVNSLRGLLYEFGVVLRGGRKAGLKALAEQRAAIDEQIPATMRALVDGQLQTLAQIGERIDALERQIAALQQQLTGARELDQVPGIGVLGSTALAATLGDAKAWRSGREFSASLGLVPAHAGTGGKVRVGHLSKRGDPYLRTLLIHGARSVIEHAKDKPKWLEQLLARRPVNVALVALANKMARTAWALVAHGRTYQRDWQSARPGSAAAQAAGT

SEQ ID NO: 368971 - protein, 310 aa, unidentified
MDRYIGIDVSKAMLDIATLPDGESWTVTNDDQGLAELLPRLVALAPTLVVLEATGGFELLAALTLAKAGLPVAVVNPRQVRDFARALGRLAKTDALDAGLLATFGERVRPEPRPLPDEAALHLESLVTRRRQLVDMLTAEKNRLGFARGPVKRDISQHIRWLEKRLADVDGDLQDAVTASPLYHAKAALLRTVPGVGPVTTVTLLATLPELGRLSRHQIAALVGVAPMNRDSGTMRGKRMVWGGRAPVRAALYMATLVGIKHNPALRTFYDRLRAAGKPFKVAVTACMRKLLTILNAMLRQNRRWDPQVA

SEQ ID NO: 368972 - protein, 336 aa, unidentified
MYVGLDVHSRSSFCVVMDRDGELVAQAKLENNVPAFTDFFSRFDEPMEVAMEATTDAHFIASVLGKLGLTVRLAHPRKLRLIAESSSKTDRHDAYLLADMLRMGRLPEAYLADAEMTQLRELSRGRQSLVKARTRIKNQISALLRRHGCKSPVKDKFSKLGREWMAGLQLPRISAMVLDTQLATMDTISAHIAEYDDELAEAAGHDERIQRLQQVPGIGKVFAPMIVAEIGSIMRFPSKIRFVAYCGLAPIVRQSAEKTYRGSLRHDCNHWLRFAFIEAAHSCQRSAGVYGDFYRQKAQERDESVAATATARRLCRLVFAMLWSEREYRADYEQVA

SEQ ID NO: 368973 - protein, 341 aa, unidentified
MQITTIGLDIAKNVFQVHGIDAAEKVVVRKQLRRGQVMAFFKSLVPCLIGMEACATAHYWARELTKLGHQVRLMPAKDVKAYVKRNKNDSADAEAICEAVRRPTMRFVPVKSAEQQARLMQHRARDLLMRQRTQLINALRAHLAELGIAAAQGREGVKELLAIVAQDGDTRLPVDAHASLMVLAAQLQAVQTMIGSIEKRIVVQHRSSEESKRLKTIPGIGIIGATTIAALVPDPKVFRSGRNFAAWVGIVPREDSTGGKQKLGPISKQGDRYLRRILVVGACAVLRRARQQPEKYPWLTQLLARRPFKVVAVALANKMARIAWALLAKGGTYRAPQLAAA

SEQ ID NO: 368974 - protein, 366 aa, unidentified
MNDSTSGTVSVGLDVHAASIRLAAVRGDELLEERTLAYDHEALERELERWPGARVCYEAGPTGFGLHRHLSAAGIACDVVAPGLVPMRPGDRVKTDPRDARKLARLHAGGLLEPICVPSVELEAVRDLVRAREAARIDRMRDRHRLGKLLLRHQRPMPFQSWGAGRRKWLGEQSFDQPAQQLAFATYLQTLDLVDRRVEALDRQLEEVAAAGPWAELVAQLRCVRGIDTLTALGLVAEVGAFDRFAGAEAFMSFVGLVPSERSSGEKRRQGSITKAGNAHARRLLVEAAWHCRRRPKVSYELSRRQRDQDPAVLERAWAAQQRLHRRFHRMAGRGKPQQKIVVACARELAGFVWAIATDQPLRKGA

SEQ ID NO: 368975 - protein, 430 aa, unidentified
MKSNTQNAKIEAITEKTLVLGIDVGSETHYARAFDYRGIEYSKKPFKFSNTEVGFATFKEWILDLKERHEKDKVVPGMEPTGHYWFNLGKFLQDNEMKPMLVNPHHVKKSKELDDNNPTKNDRKDPKVIAGLVREGRYMIPYLPDGVYADLRTASNIRFQLQAELTRIQNRISRWFNIYFPEYKTVYGKPDAKSGMLILKAAPLPEDILTLGIDGVNQIWRDAKLRAVGKARAKTLIEAAEHSIGSKEGTMSARMEIRMLLEDYESKNMRLQEVMVLIEELVKEIPMAEKLLEIKGVGIRTVSGFLAEVGDISRFNNPKELQKLAGLAVVENSSGKHKGKTTISRRGRKRLRYLLFEVAMSLVAKNPEFRELHNYYTTRRLNPLKKMQSLMAIAAKLIRVFYAMLTKGVDYDPKKMISDIKRPTVYLQAA

SEQ ID NO: 368976 - protein, 348 aa, unidentified
MIWIGVDAHKRLHEAVAISESGVVGSRRIHNDPPQWAQLLEWATQWPQRVWAVEGAWYLGRGLAQFLAEHGEEVHEVNGRWTAQRRRGMRRPGKSDRLDAHSVAQLLREERATLPRVYAEDDELASVQLWSRLEAELTEDRTRLLNRLHDLLLLCDPRYATALPDLTTQAGIAAARAYVAPGARAVAREREQAVRVTAEQVALLDAQIRDLRRKLERASKSSFRALRAIEGVGALTACTIVAELGAPRPGFGDEQLAALAGVAPLEASSAGVTRHRVNRGGNRRLNLALHRIVLTQARMYEPARAYLARRRAEGRTDREARRALKRLLCRRIIQAWRACFDQPLAAAA

SEQ ID NO: 368977 - protein, 336 aa, unidentified
MEQRYVGIDLHRRRSVIVHKDAAGTILSTVQLDNDDAAGFSAELAKAGERPEVVLEATYGWYWLADLLEEHGARVHLAHPLGNNWGHRRVKDDKRDAEDLVDLLRLGRLAEAYVAPPPVRELRELVRYRAKLVALRSGLKAQVHAVLAKEGVAVQVSDLFGLAGTRLLETTPLGRSYRLRVDSLRDLIVTFGEQIEMLEGEIEDFLCGEKGYLAIQQITGVGRVLASVFCAEIGDVTRFLGPEKLCCWAGLTPLHRESDMKVQRGHITKQGSRLVRWAAIEAAQRHHDGPLQATFTRIAERRDSTKIARVALARKILTFVYYGLRDGEIRCLAPAG

SEQ ID NO: 368978 - protein, 343 aa, unidentified
MNPTTVGIDLAKSVFQVHGVDQHGKTVLRKQLKRAQVAVFFANLPACVIGMEACGSAHFWARKLQTLGHEVRVMPPQFVKPYVKTNKNDAADAEAICEAVARPSMRFVPIKNVDQQAVLSLHRVRQGFIKARTAQANQIRGLLAEFGLVVPKGLAHVSRAVPDLIEDATNELPTPFRMLIDRLVDHLKELDRQVREIELQVKLWHRDSQLSRKLERIPGIGPITASALVATVGDGKCFQNGRQMAAWMGLVPAQSSSGGKSTLLSISKRGDNYLRTLLIHGARSVVRVAKAKPGASWLHKLIGRRNPNVAAVALANKNARIVWALLARDRDYCAGYGRAQPAA

SEQ ID NO: 368979 - protein, 383 aa, unidentified
MRIVCGLDVHKDSVFVCILNEKGEKFESKYGVLTPELEELHQLLLTHEVKEVTMESTSIYWHPIWRVLGDIECLKLVNPYFIKQLPGRKSDVRDAAWIAECTMKDLIRGSFVPDATVQRMRQYNRRIFDLNKEKVYKLTKLDALLHRCNIRISNYVSSIDSKSYKEVVRLLSEGIVDAERLMEAIHGRTVNRVGKDVIKAALTGIVNEVDIDLIRLYREELQIDDKHLKECQNKLTEICRNEFPKEFENLQTIPGVKERSATSILSELGADMKMFLTASALVSWCGLKPRNEESAGKIKSRRITHGNKYIRKTMIECAWGASRTQDCFYSNFSYIQTKVRRKNAMKVKVAIARKMLVAIWLVLGENVPYYDYKKPKAIADGNS

SEQ ID NO: 368980 - protein, 417 aa, unidentified
MGRCHVETLIRRCAGLDVHKASVVACVRLIDENGELLSFTQSFGTTTSDLLKLNDWLMSYSVTIVGMESTGVYWKPVYTLLETEFECWLLNAQHLRNVPGRKTDVADAAWIAQLVAHGLVRPSFVPPKEIRELRELTRYRKTVIQERSREAQRLHKSLEGAGIKLSCVASDILGVSGRDMLQGLIAGTHDPDVLAELARGRLRKKLPALRKALTGWFSPTHRIIVGELLAHLEYLDESIGRLSDDITAMIAPFVAEIDLLDTIPGVNRRTAEAVLAEIGPDMSRFPSSGTLASWAGMCPGNNESAGKRFSGKTRKGSKWLRTALVESAEAAARTKGTYLAAQYARIKGRHGHNKAIVAVAHSILVIAYHILQRGQPYNELGGDYFIERQNKDAYQRRLVKQLERMGYDVTLEAKPAA

SEQ ID NO: 368981 - protein, 310 aa, unidentified
MLSFCGIDVSKDCLDVVVLPEGWFFSVSNDTAGWAELVARLRPLTVSAIGLEPSGGYERGIIRALLAAGLSVRRINPNKLRQFARARGVLAKNDRLDARLIAEYVAIMPTRVVQRDAAVERLAEIVTMRRQLCDEHVAAENQAAHLEDAMLRRLSKRRQTRLEADIRLLDKRLAEMVAANGALAQRYELLTSMPGVGPVLAFTLIALLPELGKMSRKQIAALVGLAPYDFDSGKLKGHRSIYGGRMPVRNVLYMAALSASRYSPALKTFHKRLAAADKKSKVIIVAVMRKMITTLNAMLRDNAAWQPRSV

SEQ ID NO: 368982 - protein, 436 aa, unidentified
MRGCRCSMIMGFTKPIEHFNPQRKKVITMNTLYVGIDVSSKSNVVYLMLPNGDKHSNFSVANSHEGSTLLVKKIYSALTSHSLDTVLIGLEATSVYGDNLVYFLREDATLAPFNRKIHVLNPKQVKKFHDTYNDLPKNDYVDSFVIADCLRFGRINKEVYMGEYRYKALQNLTRARFFAVQNLVKEKQRFMNVLFKKYSTMTQEKVFSDAFSTTALAVYDEFESAEALANMDLHELTDFIIEKGKNRFPDPDAVAKAIQKAARSSYRLPKTVNDSVNQVLSISITSMKALESQIKEFDKAIKALMELLPNVLISIPSIGPVYSAGIMAEIGDINRFDNQASLAKYAGLAWKQHQSGGFEAEVTRLIPSGNRFLKYYLCEAAFSLVRCDKEYSDFYHLKYKEVNRYQHKRALALTARKFVRLVFRLLKDNRLYCPAK

SEQ ID NO: 368983 - protein, 353 aa, unidentified
MTSTKYIGMDVHKESISIAVRNDAGKIVMECVIETKANSILDFIHGLRGELQVTFEEGTWATWLYDLLKPHVTKLVVCDPRKNTRQGNKNDQIDARELADRLYMNKLSSVYHGGAGVRTLKELARSYLTISKDLARVMSRVKAIYRSWGIPCAGKQVYAPRHRADWLAKITEVGVLRRAEFYYQQLDALRSLRHEVRRDLLAESKKHKATKLLCQIPSIGPIRAALLIALIQTPNRFRTKRPLWKYSGFAIETHSSADYRSVKGQLQKAKKQVSVRGLNRDCNHDLKNLFKSAATIASVKPGPFQEFYAALVAKGMRPEMARLTLARKIATIVLIVWKKGVSFDAQYLKPQTA

SEQ ID NO: 368984 - protein, 341 aa, unidentified
MKNKSFIGIDISKNVIDASIFCEGTPIKDFPHAVFNNSRKGFGEMCTWLKKNHVVLSNCLFGMEFTGSYSMELEKFLYARNYQFCMLSTHVVKHYPMGSKDKSDKIDSAKIADFLYRYNGTECVKPYKMPDKTMQRLKTLMNERKFLVEQRTCFMNRRQLCSTKEDAQLYDGYIRKLGHDIENIELEEQKLLATDDSLLTTYKNLLTIPGIGFVNAINVIVITRNFTAFETARQYASYVGVAPHFRTSGTSVKWRPRPSARCDGQAKADLSMAATVVVQYDAELQSFYNRKLGGKQDSDTKRKALNAVKFKLVLRMFAIGKQNRKWEPLDSKSSNEKLAIS

SEQ ID NO: 368985 - protein, 339 aa, unidentified
MYYTGIDLHKKTSFITTINERGQVVKKNNLKNIPSLILKYFDDLAANTRIVIESMSSWYWLYDLLTGKGMDVIISNPAKTKAIASAKIKNDKVDSHMLAQLLRADLIPESYVSSMDTRKLKELLRHRNRLVRDTVRMKNRIHALLMKNNLQQPCSDLFGKKGLSFLYSDIDLPDYHCEQLKTYLSLYESIKTEVDHLTKRIYAMAKTSPVANLLTTIPGIGPLVAMVIVSEVEDIERFPSYQNLSSYAGLVPSLDSSGSKERMGRITKQGSSYLRTALVESAQVIARLKNCRLNIFFRRRIVRSGYAKAVTATAHKILQIVYYVWKNQTPYLEEYNVCG

SEQ ID NO: 368986 - protein, 395 aa, unidentified
MANDSTQVSAPLFVGMDVHQETVALAVAAGDGSEPRFLGSVPNTPQKLRKRLLAIGPIDQLRCCYEAGPTGYSTWRLLNDWGIACTVVAPSLIPKKPGDRIKTDRRDAEQLARLHRMGDLTAVWVPTPAHEALRDLCRAREAAKRDLGRARHRRLKLLARHGQHGPIGTGRWTRAYRAWLRELRLEHPDHQYVLEEHRQQFAEAEARLARVTARVKTTVQEGPFTALLQALQCLKGVGPITAVTWVAELGDLTRFRRPRMLMGYSGLTPTEYSSGGRVQRGHITKCGNSHVRFVTIESAWHARWAQQPVSRALRKRREGQPQAIVHIAERAQKRTGQRYRALLKRGKTSGQAATAVARELLGFVWAIGQVVAQTAAAAGTPAPSATVDSETAAAA

SEQ ID NO: 368987 - protein, 359 aa, unidentified
MHTQVTKDAFRGQKIFVGLDVHKKDFKVSVMAGGVLYKTFTSPPDGQKVLNFLRDNFPGAEYYSAYEAGFSGFWLHKQLVELGVNSMVVNPADIPTTDKERRQKEDQRDSRKLAKDLQAGQLHAIYVPSEKTLQDRILMRGRQTIAKEIRRSKQRIKSLLYFQGIKYPDKFAQESSHWSNNFIRWLESLIFENESGKQGLQIHIETLKHHRALQLQSTRQIRALARSDYYREQAESLISIPGIGMLTALYFLTEVVTITRFENFNHLCSFVGVVPSTDSSGDNDVTTGITPRKNSYLRSLLIESSWVAIRNDPALMSSYLQHCKRMPSTKAIVRIAKKLLNRIVHVLRQNEKYKKNIVK

SEQ ID NO: 368988 - protein, 334 aa, unidentified
METRYFLGIDISKKSFDAALTTDGKHFHQVQVENLSKAIESFFKNLKRQLTSFSNLIVCLEHTGIYCQPLLDYLVKHDIKVCVEPALQIKQSQGITRGKTDQVDATRIAVYAVKNRENLTFWRPQRHCIQKLKALLAVRERLVKTKVQLEVPVNECIDFIEPSIRKEVIKHCRKTVLSLKTEIKQIERVIESLINEDAKLTEQCALVTSVPGIGKITALNVIVSTNEFTKIRDAKKLACFAGVAPFEYRSGSSVRGKTRVSKMANMTLKRLFHLAAMSAIQCCDELKDFYHRKIAQGKNKMSVINAVRNKLISRIYACINNKRSYQKEYQTVLV

SEQ ID NO: 368989 - protein, 400 aa, unidentified
MDKDRIVAGLDVHKDTIYLCVIDNTEVVIFAKVYGTLTPDLELMCSEMVSHGVTEAAMESTSTYWVPVWNALCESMSLKLVNPYFIKQLPGRKSDVKDAHWIAECLLKNLIRGSFVPDKRVQDMRKYNRRIFDLNEDLTYNSNKQDAALQRCGFRLSNYVSRVNGKSYQKCVRAIITGITDPEELVKLIHGKTLRKYGRNIIKDAVTGDFHQADICLLKQYAELIEVIERQIEECRNALIAMCQEHFPKQFKRLQSIPGVKERAASAIIAETGADMKSFEKATNLVGWCGLKPRNDISNNKVKSNRTTHGNRFLRQILIEISWVASRTRNCFFSNFSYVQCTQRHKNKMKIQVAIARKLLVAVWHMLTKDEDFIDVYLKRLEKQAEWQNDIQALESLLVG

SEQ ID NO: 368990 - protein, 351 aa, unidentified
MYIVGVDYHPSFQHIAFLDQETGECGDRRLHHSDGEAEKFYRELRQKGVSVRVGLEATGYSRWFERLLSELGIEVWIGNAAEIKAKRVRKQKTDRQDAQLLLKLLEENRFPRIWVPSPENRDLRQLLWHRHRLVQMRTRIMNQLQALAMNEGQRWKHRLWSAQGRAVLEKFPLAPWASRRRQDLLELLDRLTPTIDELTIVVEQQARKYPEVQRLMTHPGVGPLTALAFVLIIGTPGRFRRGKQIGSYLGLIPSEDSSGGRQRLGHISKQGNALLRFLLVEAAQAAVRCNQDWRQKYWHLAMRREKSIAKVALGRQMAVRLYWMWRKGWDYAQLVECGSHAGQLATGHGVH

SEQ ID NO: 368991 - protein, 317 aa, unidentified
MAVLGIDISKSDFHACLIDENRIGRRSFPNSQTGFSQLSKWLTNRKVVTVFACMEATGSYWEALALYLFEAGHEVSVVNPSRTKAYANSEILRAKTDSIDAAMIARFAQAQRPPLWQPPAPESRVLQALVRHLEHLKTIHGQQVVRLETPGLPLQVTASIEAVIADLRREITEIERAIRDHIDRHPGLKVRHDLLTSIKGIGDTTASLILAELPALDRLRSTKAVAAYAGLSPRALQSGTSIRGRGSICRTGNSRLRKAFFYPALTAIRYNPQLKAFADRLTLAGKPRMVVVTAVMRKLLVLAYAVLKSGRQFDPSF

SEQ ID NO: 368992 - protein, 342 aa, unidentified
MLYVGIDIAKNKHDVTALNVPGKTVLKPLTFSNNKAGFELLDLSLRQLNQDCLIALEDTGHYAFNLLNFLHEQGYKVYTYTPLLIKEFAKSLSLRKTKTDKKDAHGIALKLLSDPNREQFQHDNRQVELKILARHIHRLKKKQSDWKVQYTRCLDIIFPELDKIVGKHSEYTYQLLTRYPNPQKRLEAGFDKLIEIKRLTASKIQDILSVAPRSIGTTSPAREFEIIEIIKHYKRLIDKAETCVNDLMAEFNSVITTVTGIGGRLGAVILAEIRNIHAFDNPAQLQAFAGLDSSIYQSGQIDLAGRMIKRGSPHLRWALIQAAKACARFSPAFKAYLKTKLE

SEQ ID NO: 368993 - protein, 348 aa, unidentified
MTQFSRIGLDTSKAVFTLHCVDAAEKVLLRINLRRAQLIPFFKKHAATVVAMEACGGSHHWARKLTALGHQVRLIPAQYVKPYLKRGKNDRNDAEAICEAAGRPGMRCVLAKTEDQQAQAMVMKVRTTLIDQRTQLINALRGHAAEFGVIAAKGISKIPPLLAAIAAETTIPAIAREMMALLGRQIEHLDSQITELEARFAAMHQANALSQLLATAPGIGPIIALTFAIEVDVSAFETGRHLAAWLGLTPQEHSTGGKQHMGGISRAGNERLRSLLVEGAMSVITAVERHGSKLATPWLLAMLARRPRKVVAVALANKMARMIWAMMTRREAYRRPAAGAGCRPAVVS

SEQ ID NO: 368994 - protein, 347 aa, unidentified
MPFAGVDAHKRYSRVVVKDETGSILCRASLQNDVAAFQGFFSNINGPTKAVLEAGRDWGVIYDLLEAIGVEPVLANPLKTRAIAEARIKTDTVDATILADLLRADLIPVVHVPPKEVRAQKNLLRQRLWLVELKTRIKNRIHNIIDRNHAGPPPAADLFGKAGRRFMDQLHLPSPDDRLLKAHLELLDLAQNQIGRSEEWIDEALSQRPELAIMRTLPGFGKVLAAVVALEVDDVRRFHHPSKLCAYAGLVPTTYASGGKVRHGRLLPSCNRWLRWAFVEAAWAAQRCSAYCHAYFERIKRREGANCAVSALARRLCEITWHCLTDSRAYEERVMMPTRTELARPPS

SEQ ID NO: 368995 - protein, 409 aa, unidentified
MLFVGDDWAEDHHDVEIVDQSGRRLVRRRLPEGVAGVAELHALIADHLDPDADADQVVVGIETDRGPWVQALLAVGYVVYAVNPLQAARYRERHGNAGAKSDPGDAHVLAELVRLDRAHHRPIAGDSAVAEHVKVVARAHQSMIWSRQRQTNTLRSMLREYYPGALAAFDDLAGRDALAVLAIAATPGQGRRLRVAQVARTLRAAGRQRNADTVAARIVEVLRGEQLEAHPGVVDAYAASARALVAVIAELARQCEVLQGQVKAGFGRHPDVEIYRSQPGLADVLGARVLAEYGDDPTRYADARARKNYSGMAPVTRASGKARVVLARHARNRRLADALYQQAFSALSSSAGARAYYDAHRARGHTHHQALRALANRLAGILHGCLRRKKLYDEATAWPTIENSAASAA

SEQ ID NO: 368996 - protein, 343 aa, unidentified
MQMITTIGLDIAKSVFQVHGVDAAGEVVIRRQLKRRYVLAFFQKLPSCLVGIEACASSHHWSRELQALGHTVRLMPPAYVKPYVKRQKNDMADAEAICEAVTRANMRFVPTKTPEQQSCLMLHRTRHLFIRQQTAVINSIRAHLAEFGIIAPVGRKGVTELLHVVADPSDKRVPEVARACLAALGTQLLRLKQQILEFDRMIMAWHRSNQTSKRLHYIPGVGPILATALVASVADPRTFRSGRNFSAWIGLVPKQHSSGGKDRLGSISKQGDRYLRSLFVAGALAVIRYAKVHGTKHRPWLTALLGRRPTKVAAIALANKIARMAWAMMAKGERYKQPVALAA

SEQ ID NO: 368997 - protein, 370 aa, unidentified
MSACYEGQQFVGIDLHRRRTVLVRMTSAGERLCAMVRFPSTPEALRREMAPALSPTGPTPQVVLEATYGWYWAVETLQQLGAQVHLAHPLGIKGFTTRRVKNDERDAVDLADLLRMGRLPEAHIAPEPVRALRELVRHRAKLSRWRASMKTSIHAVLAKRGVPVPMSDLFGVEGTALLDALCAVTSAVSGPRLEPEYAARVRSLRGLLATLEGEIAEFDRRIAAALAGHPGYRTIQQISGIGPVFAAVFIAEIGDVARFATADKLTCWAGLTPRHRESDTTVHRGRVTKQGSTLVRWAAVEAVQRSSEPAVAGIRTRIGERRGRPGQRTGRNIAKVAAARVLLKLVYYGLRDGQIRALGSTRPPATSTAA

SEQ ID NO: 368998 - protein, 352 aa, unidentified
MNRFIGLDGHSSSCTFAVLSEKGKTLRTDVVETNGQSLVEYLRLIPGRLHLCLEEGTQSQWLFELLAPHTHEIAVVSGEKNQGDKSDERDALGLAERMRTGALGAKIFKAPLAFTSLRDLARIYGMVTGDVVRTKNRIKSFYRSRGVQPTAGKAVYAVGRREEELKRLKGGTRQSVQLLCRELDILEGIKADAQQALVAEAHKHAIAKVMETAPGLGPVRVAQLLAIVVSPHRFRTSRQFWAYCGLAIVMRSSSDWVQQPNSQWMKAPVTRTRGLNRNFNRTAKAVFKGAATTVITQLPKNQLYRDYRRLLKEKVKPNLAKLTIARRIAAITLAMWKNKEAYDPAKYQKKAA

SEQ ID NO: 368999 - protein, 365 aa, unidentified
MSHYKIGCDAHRRYSQFAILDHEGHFLQQVRVNHMPDAIRDFLEDYPPGTPVALESVGNWYWIVDEIEAAGCIPLMAHAAKAKVMMGNVNKTDKLDARGLATLLHVGSLPTVWLPPHEIRDERELHRTRMAFSKMRTALKNRMHSTLAKYAQSLDTDSDIFAPKWRPELTKACRALPPETQRCMHQHLVALDHIQGQIQELEMRIQQRVEITPNIQLLKTLPGVANILAIVIEHEMGSVDRFPSSAHFASYAGTVPTVKSSGGKTHYGRLRKQSNQYLKWAFIEAANVVVRQRRHPNWRTKHVTILYERIRQRKGHSVAVGAVARHLSEAAFWMRRKQEPYKDPARKVVTRGKGQREPNMVKVKP

SEQ ID NO: 369000 - protein, 366 aa, unidentified
MDAIYIGVDFHSRQQTICYLKTETGELVITELKHQDKERIRAFYQQFQGPVIVGLEASGYSPWFEALLEELACEVWLGDATEIRRRARWRYKDDRRDAELIWDLMVHQEFPRLHQPLPQSREILRMLRYRQKLIKVRTMTKNSLQAIAMQAGLAKGRQLFTATGQAEFKAVAMSPVLQYQRDHWFELLKPLNQELLETMKWFQAAAKGEAAISRLRTHPGIGLLTALCLQHTLQPVSRFRNQRKVVAYAGFDPMVRRSADSAIQLGISKAGSRLLRYLVVEAVHTAIRYDEDLKRFYQRVAERRGRPKAKVAAARKLLIRAYIMMRDEIDYAEFKRRAVAARLARRSQGPPSVPEVLIGQSASPGA

SEQ ID NO: 369001 - protein, 472 aa, unidentified
MAQAARRPGKNQHSKRRSRQAHAAPLKQMNLNAAGIDVGADCHWVAVPRDRDEQPVQRFGAFTADLYALAEWLRQCQIETVVMESTGVYWIALFEVLEERGFDVKLVDAHYARQVPGRKTDVEDCQWLQELHTYGLLRGAFRPEDQVCVLRSYLRQRSMLVAMASRAVQHMQKALEQMNLKLTEVVSDINGKTGMEILHAILAGERDPQRLASHRDRRCKHDQATIAKALEGHWRAEHLFALQQALEQYEFLQQQLQACEQQIDACLQTFVTHVEVEPSQPTPARKRRARQRQAPSFDVHKYLNAMTGVDLTQIDGIDALTALKVISEIGLDMTRWPTGKHFASWLGLCPGNKLSGGKRYRMRSKPTANRAASALRLAAQGLVNSHSALGAYYRRMRARLGAPKAITATAHKLARLVYSMLRYGTAYVDAGQQAYEQKYRDRVLTNLQRKAKAFGYQLVHVENLDGGVASTL

SEQ ID NO: 369002 - protein, 520 aa, unidentified
MSPTRSRKHPSARRPAPSVGKPRGVLHPRVQQVGPEHFGIVCVDCAKARSKYLLADFYGRVLLPPTIVAHTRPDLDAAVAQVRQAFATHQLRDGLVAIERTGRYHRLVQRTFAAAGFETRILHPFVTKQYRQPVDPGNKTDDTDLAAIHRATVTGCALLEATRDEAWTTLLLLVRHRRDLVRKGAALNCQIRDHLEAALPGFAACFDKLWDSPIPWHLLGHYATARQLHEAGVTAICQSLRQAGIRFQRRTVQAVFDWASQAAPGDVAAAQHLRIGLALYDDRHRKTLEIQALERDIAGRLVQTPYVLLLSFPGVNVVSAADFAGEAGPIEHYANAKALTGRAGLRPARYQSDRVDQANGPLIRHCNHALRAAILGVADNLVVCNHHFQALATRWAAQGKDARHTRVKVALRFCRIAFQIVAGRQVFRHPGLQGRHYILDKLTAFHREHDTPMPDVLGDLQAALGQVPPPEHAAEARPLQEELRRIQDGRRRGPQLLGDILPIVLARLGVGVVQSTASGE

SEQ ID NO: 369003 - protein, 433 aa, unidentified
MHDAADEPLFAERVAGLDIAKAGVEVTIRVPSDSQAGRRQQETRTFATTRTELLDLAGWLRCWGVTKAGMEATGDYWKPVFFLLESRGLDCELYNAAQVKALPGRPKTDRADSIWIARITERGMISSSFVPPEPIRRLRTHTRYRRHLVQARTAEKQRVEKLLEDGHLKLSSVITDIHGVSGRDMLSALAAGQRDPRALAQMARGAMRGKIARLEEALECSFFTDDHAAVLALMLTTIDHYTTQITELTGRIQALAEPYLHQIAQLDAIPGIGEVCAQDIIAETGADMTVFPTAPHLVSWARCSPQVRQSAGKRKGSNATGRGNPYLGAALGEAAISTSRTQTFLGARYRRLTRRMPKKKALVATSNSMLTVIHALLSDPAATYTDLGPDYYEQRMHARRQARNHVKSLERLGYKVTIEAINPETGELLAATA

SEQ ID NO: 369004 - protein, 359 aa, unidentified
MLYLGIDQHRKQLTVNLRNEEGDVVLKRQVSTQWGRVQKFFEELEQQAELEGGFMAIVELCGFNDWLLQMLALYGCRETVLIQPQKKSRKKTDRRDASALSQSLWVNRHRVLGGARAQGVRRIHLPPHEEQENRQLTALRKRTVALRTQSINKVHHILLKHNLQQECPTKGIKTKKARKWLIELPLGDIDRLEMNQLLARWELWDSQIAEIEKKIEERQRRHKTAPVVATIPGANAFSSLGLASRIGSIDRFPRPGSLANYWGLTPGCRNSGEATDRLGSITKDGSPMARFILSQWVVHVLRRDSSMKAWHARIKKRRGSKIARVAVMRRLATIVWHMVKNNEPYHIGGLPKQRQKKAA

SEQ ID NO: 369005 - protein, 324 aa, unidentified
MYLGLDVSKNTLDCCLNKDGFFYACKISNNEKGFQKLKVWLDGHGCDETLHCCCEATGNYYEAAAEYLAAHYKMSVENPRKIKAYAVSELKRSKNDKQDAKTIAEFCEEKSRKLKVWKPKNQTEKELQSITRYIARLKQQKASETVKRQTASDNIKDLINETIDYLGSKIKEAESRLKTYINQNPELKQKAANLTTIPRIGIQTAAIIMAALSGNNDFKTAKQFTAYLGLDPAEYKSGTSVKGKDRISKVGDCITRAALFSPALVAYRIGTFPRLVANMRQNGKHIMQILTAIMRKLAVVAYTLHKTGTTFEKQRHTKIQQKAA

SEQ ID NO: 369006 - protein, 352 aa, unidentified
MKKLVKQVLGIDVAQDELVVCLGKMYDDWTPDLVAHKTFANTTKGYSTLLDWVGKLTDAGIPTGYVMEATGVYHESFAYFLHDQGLNVHIILPNKISNYARTLNVKTVTDKTASEAIAMFGLERKLDTWEPPKGIYRQLQQLTRERGQLIDESVVIRNQLHAEKAGANPHKKSIGRAGKRLELIGKQLKEITEELEELIHTDIETQTIILLICSIPGIGLLTAATILGETNGFELIRNKKQLASYAGLDVREKQSGTSVKGKPSISKKGNRHLRKAMHLPALVAIRHDERFKAIFARLVSRHGIKMKAAVAVQRKLLEMVYTVFKTKKKYDKEHLKNEQAKKESEVMDAMEG

SEQ ID NO: 369007 - protein, 344 aa, unidentified
MDNHTQYSGFAGVDLAKKVMQIHFVTEDGEITDKSTKRAEFLDFFRNRGKCLIGMEACGSSQDWARKLEAMGHEVHLMSPKAVKPFVSGQKNDHNDAIGIYKAMFNGVSRVPVKSTEIRDLQTLRRIRSQVTKDKVKEINHVRGLLAEYGIVMGKSLKAFNKDISSALESLKERGDVSPLVAEELRTTVEAIKTKIKRQKKLDQEIEQLARGCKSYENFLKTPGVGPVTAAMLCVLLCDPSIFANGRQFAAYIGLAPRSRGSGGKNYVIGIPSKFNCDCESRAVFVECAQAIARCKNKSPWVEGILRRKPKKVALIAIANKLARQVWAMANKGESFKQMEILTA

SEQ ID NO: 369008 - protein, 349 aa, unidentified
MPKVKHQNAAVYGIDLGKNTFHVVGMDKAGAPVQRAKFSRKTIFKFFEEAPSALIGMEACPGSQWLARKLSAMGHRVRIIPAQFVKPFVKSNKNDTLDAEAIAEAVIRPTMRFVKIRNEDQVDMQALHRVRSRLVSSRTQLINQMRALCIEYGVAIRNGAGVFKVDLPRVVADENNDLSVGMRRILTDLFDDLKALEVRTAQVTREIEAHAAQDDVARRLMTIPGIGPMGATALLAAVGDGKQFAKARDLASWLGLVPRQHSTGGKPTLLGISKRGNPYVRRLMIHGARACMIHLKAVRDRFGAWIEKLKLRMHPNKVVVALANKIARIAWVILTKPGALYERVDPAYS

SEQ ID NO: 369009 - protein, 433 aa, unidentified
MTNPDAAGIDVGGAMHYVAVREDVAEQPVRQFGCVTGQLQQMIEWLHSCGVKVVAMESTGVYWIPVYEMLERAGFEVLLVNARHVKGLPGRKSDVQDCQWLQQLLMYGLLKGAFRPSDAVCGWRSLCRQRARRIKEQARYVQHMQKALVQMNIQLGTVISDVAGVTGQKIVRAIVQGERDPHELAAYRDCRIKASEEEIAASLLGNWRDEHLFELKQALQAYDFCGQLLAECDQEIERVMLGLAEHEGRLDKGPRRSKNRNAPKFDVRQRLYEICGVDLTRIDGIDASTALVVLSEIGADMSRFKTVKHFTSWLGLCPGTKISGGKELGSATKRSANRARQALKLAAAALRSSKSSLGAYYRRMCARMDKGKAVTAAAHKLARYIYTMLTRGQEYVDQGQQYYEERYRERVLRQMTRRAGELGFRLVPAEAGA

SEQ ID NO: 369010 - protein, 385 aa, unidentified
MPNQNDLSRSLVVLEQNNTIIAVIEMSLNYWLIAGIVPGVDRHPLKKLSVDEKALLQLLHRWRDEAARAGYVITRIAVAFEAGRDGFWLARWLRAQGIEVHVIHPTSVAVSREHRRAKTDRLDTELLKRAFLGWLRGEPEHCRMAAIPTLQEEDAKRPTRERENLVGERTRIINRMKACLVRFGLRNFKPTLRKAPERLNQLRTPEGDLLPPNTAAELRRDMARLQFIIGQINEIEAARLQRLEQAPVEGSTAMVRLVARVIGVGIETADMLVHEILSRDLRDRRAVARYAGLTGAPDESGSKRREKGLAKSGNARVRRGMIQLAWRFLLHQKDSALSRWYRTRTASAGIKRKTMIVALARKLLIALWRLVTTGEVPTGVVMRAA

SEQ ID NO: 369011 - protein, 410 aa, unidentified
MSLPSVSSITRFFGVDLHKNFLFIAAVNSLQEIILKPTKIYLKDWPDWARDHLLPTDVVAVESTTNTWDFYDGIVSLVAAVQIANAGKLPWINKARVKTDKLDSLKLAKLCAASLIPQVWVPPMHIREARCLLAHRRRLVGIQTMTRNRLQSLLHRHMLELPAGEPFSNRNLPWWDSIPVSPVEKILLRHYLDILNHLKPLIEQLDAQIVSLSDSPEWRDLMTFAIQIPGIGVILGMTILSALGDISRFESPKKAVGYSGLGASVHASGETFRQGRITKAGRRDLRTALIEAAWAAVNSDPYWKQEFDRLSQRLVPCKAIVAIARRLLVVLWHVLSKRQSYRHIADEKIASKMMLWSEKVRKHDRQAAATRLFVRRRLMTLGVGKNLSRFTYGNKSRVLVSEEEALASLS

SEQ ID NO: 369012 - protein, 423 aa, unidentified
MEVIHKRVAGLDVHKATVVACVRLMSNRKVSRDCRTFATTTEGLLALLAWVTECRCTHVAMEATGVYWTPVWKILSEGGFELIVANAAHIKQVPGRKTDMNDAMWIADLLACGLIRASFVPDEEIQELRSLMRTRKQLVRDQTRYVQRIQKTLAEANIRLDTVISDTLGVSGRRMIEAMIAGVRNPHQLAALAHRGIKASPKELYDALHGRLTDHHRFLLQLYLAQWDAADAAIQHVDREVDGRIERMDAAAEDGQVPFRQLILLLCSIPGVSVLSATTILAEIGRDMSRFPTAGHLVAWAGLCPGQNESAGKRKSSRLRKGAPWLKTMLVQCAWAAKRQKNSYYAAQFHRLKGRRGPQKAICAVAASILTAVYHMLNNGTFHQDLGADYFDRRSPEAKARRLVAQLSRLGFEVQLQPLAQAA

SEQ ID NO: 369013 - protein, 422 aa, unidentified
MLEQTQDEQEIIARVAALDIGKAELVCCVRVPDPTGGSRRVQEVKSYSTMTRSLQVMADRLMDLGVTRIVMEATSDYWKPPFYLLEAHGFDVWLVNARDVKNLPGRPKTDRLDAVWLCKVAERQMLRPSFIPPVPIRRLRDLTRYRIALVSDRNREKNRVEKLLEDSQIKLSVVASDIFGVSGRQMLAALIAGQRNPQVLAQMARTRMRTKIPQLEEAFVGHFTDHHGFLLTKMLARIDALDSDIADLDTQIEAHVAPFADAVARLDEIPGVGATAAAVIIAEVGVDMTRFPTPAHLSSWARFAPGVKESAGRKKGTGSTGHGDRYLARILGEAAVGASKTDTFLGERYRRIARRRGKKKAVVGVGRSILVIVWYLLSDPETRYHDLGSGYYDSRVNPERKKRNHIRQLEALGYKVTLQPAA

SEQ ID NO: 369014 - protein, 344 aa, unidentified
MDTIGIDLHKRESQVCMLTDAGDVIERRIVTSRERFTAVLGERAPARILLEASTESEWVAQYLESLGHTVIIADPNYAPMYATRSRRVKTDRRDARTLAEALRLDAYRVAHRLSAERRHVRAELAVREALVRTRTRYIALAKALVRRDGLRVAACESHLVAQRITALALSDTLASELLPLFEILAPINVQIAAADRRITALMETDAAVALLQSAPSIGPITAAAIVATIDDVTRFTSAHQFEAFLGLVPGERSSGEKRRVGRITKAGNTRARYLLVEAGWRILRSKAAETAALRAWALGIAERRGKRIAVVALARRLAGILYAMWRDNRAYDASQLRTPRKQAA

SEQ ID NO: 369015 - protein, 373 aa, unidentified
MSSDNVVLVGLDVHKDSIMVAYSVGFGNVENLGKISPRATDIDRLCKRMQSKASQVMFVYEAGPCGYGLHRQLTGKGHQCMVCAPSLIPRKPGERVKTDRRDAARLVRSLRAGDLSPVHVPTIEDEAYRDLVRAWGAAKQDLKQARQRLKAFLLVHDVRYTGRADWGPAHRRWISGYSFDLPWQQIAFEEHRRTIEDRLTQCARLETTLREAAPQWRFYPVVEALQALRGVQFTTAIGMMAELGDLSRFDHPRQLMAWLGVTPSENSSGQRRQLGSITKAGNSYARRLLIEAAWSYRHPAKVSPAIQKRHDGLPKAIIDRAWDAQLRLCKRYRKLTARGKHRNVAVVAIARELAGFIWDIARMTPITAAVQAA

SEQ ID NO: 369016 - protein, 340 aa, unidentified
MSLYGGIDLHANNSVVVLLNDQDQVIYQKRLPNALSTILEAFAPYSSEIEGFVVESTYNWYWLVDGLMEAGYRVHLANPAAIQQYSGLKYTNDHSDARWLAHLLRLGVLPQGYIYPKAERAVRDLLRKRAHLVRQHTANVLSVQNIMVRNTGARLSIKRIRELTQPELKGLLPEVDQILAVTSSLAVLDCLSHQIKTLEQTVQKRLKHTPAYMQLLTVDGIGAILAQTITLESGDMGRFPTVGHYASYCRCVDSTKLSNGKRKGQGNVKNGNPYLGWAYMEAAQFALRFNARAQRFYQRKLAKTNNNTILARKAVAHKLSRACYYIMRDLVPFDAMKAFG

SEQ ID NO: 369017 - protein, 346 aa, unidentified
MNITIVGIDLAKNVFQVHGVDEWGKVSLKKQMKRAQVLPFFANLPPCLIGMEACGSAHYWARKLEPLGHTVKLMAPQFVKPYVKTNKHDAADAEAICEAVSRPSMRFVPIKTGEQQAVLSLHRAREGFVKARTAQANQIRGLLAEYGIIIPQGIDHIAQRLPAILEDDENDLPGVFRQLLERLGGHLKELDRQVDELNAQIQRWHRENAASRKLAQIPGIGPLTASALVASIGDARSFENGRQLAAWLGLVPRQHATGGKPTLLGISKRGDSYLRTLLIHGARAVIRVSERQLEKADSWLTRLMGRRNQNVVAVALANKNARIVWALLAHNREYQPDPVPAVAAGA

SEQ ID NO: 369018 - protein, 354 aa, unidentified
MAKTREAAVAVIGIDIGKYSFHVVGLDRRGAIVLRQKWSRGQVEARLANMPSCLIGMEACVGAHHLSRRLKALGHDARLMPAKYVRPYSKGQKNDFRDAEAIAEAVQRPTMKFVATKTAEQLDLQALHRVRERLVSQRTGIINQIRAFLLERGIAVRQGRLSLRAALPHLLAAPPEIVSPRMLHLIEDLAGDWRRLDERIRALSDEIEAIARQDVGCERLMSVPGVGPIVSSAMVAAIGAGDAFAKGRDFAAWLGLVPKQISTGDRTILGSISKRGNRYLRVLFVQAAWVVLVKRKSRERLGLDRWLEAAKKRLHRNVLAIALANKLARIAWSVLAQGRNFEVGRFAEAHGQTA

SEQ ID NO: 369019 - protein, 311 aa, unidentified
MTDDTIGIDISKVTLDIHRLSDGKMMSFSNCPAGFKALSKFCAKTRVTRVIYEATGAYHCGLERALGVYLPLVKVNPLQARRFAQAQGVRVKTDAVDARMLAVMGNAFALEPDETATKIQHDLKELRSFRSGLVKDRTSIISRMKTQTLAVTRRQSKARLAQVDKQIAEINAEVDRLIHSNGTLAHSMKILRSIPGIGAVCAATILIEMPEIGSMDRKQVASLTGLAPMTRQSGQWRGKSFIQGGRKVVRGALYMPALVAMRHNPDLSVKYQAMIKAGKPPKVALTALMRKLIELANTLIKADRNWVKKGA

SEQ ID NO: 369020 - protein, 326 aa, unidentified
MQMEKTGVVGIDISKATFDVMWEGEHRNFSNNSKGYKILVKWLKKGTPRAVCMEETGQWSKNLAKYLYGEGIRVYVVNPYRIKRYRDYYLHMNKTDKTDAGLIGEFCEKEEKKLRLWEPPTEAEEHLQSVKRRLDALQKMRDQENNRLKSGENDELVLDDIRAHLKYLDEEIKRYTKLMQQAIKADPVLKRKQKLLESIPGIGALTAARILVEVRGIEDFGDASQIAAYAGLNPSRFVSGTSVNKKGKISKQGKAILRKNLYFPAVVATSYNPIVIELKNRMTATGHVPMEIIIAAMNKLLHIAYGVLKSGVPFDPNYGKQFSFTP

SEQ ID NO: 369021 - protein, 312 aa, unidentified
MEKLSYGGIDVSKDRLDVVVLPEERFFSVSNDAAGWAELVARIRPLAVSAIGIEPSGGYERGIIRALLAAGLSVRRINPNKLRQFARARGVLAKNDRLDARLIAEYVAIMPTRVVQRDEAVEKLAEVVTMRRQLRDEHVTVENQAAHIEDAMLRRLNKRRLTRLEADTRLLDKRLAEMVATNAALAQRYELLTSMPGVGPVLAFTLIALLPELGQMSRKQIAALVGLAPYDFDSGKLRGHRSIYGGRMPVRNVLYMAALSGCRYNPALKAFHKRLAAADKKSKVVIVAVMRKMITTLNAMLRDNVEWQPKSA

SEQ ID NO: 369022 - protein, 349 aa, unidentified
MVILGIDAHKRTHTVVAIDDTGRELDTKTTLATTTEVHLELVRWADRFGAERRWAVEDCRHLSRRLEADLLAAGEGIVRVLPKLMAHARDAARTYGKSAPIDALAVARAALREPGLPVARLDGPSRELRLLVDHREDLVRDRTAHINRLRWHLHELDPSWDPAPRSLVRYKTLDALLARLEGVEGMVARIARDLVARIRELTVQANALGREILALVCSLAPALLELPGVAGLTAAKIVAEVADVRRFRSKDAFARHNGTAPLPVWSSNRVRHRLSRTGNRQLNAAIHRIAVTQKRCHEGAKSYLERRMANGNTKTEALRALKRKLSDVVYRALLADAASASSARFGEAA

SEQ ID NO: 369023 - protein, 391 aa, unidentified
MSMYFVGIDISKYKHDCCIISAADQQIVSKFTVKNDKDGFEHLLTTLNSLSNPEDIKIGFESTAHYALNLELFLENAHHSFMEVNPVLIKEYKKSTTLRRTKTDSVDCESIARWLMTVEYKPHSKGFYHSYSLKSLTRLRDRLIRQRSFYLVKITNVLDHTFPEFKPFFNERLSKTAIYLLENYGSAEKMAHMNSASYDKLRCASRGKFSIQQFLHLKELAANTVGVNNSIFDIELNSLLTLYNSLCKEIKTLEAEITKLIEEVHPHYMSIPGIGPISAAVIYAEYGDISNFSNPGQMLAFAGIEPGINDSGTESHGGRMVKHGSSQLRYVLLNACLPLIRFDITFATYYAKKRAEGKKHRVAITHVAKKLIRVIYALERQDVDFNVQKLR

SEQ ID NO: 369024 - protein, 337 aa, unidentified
MKYSGIDLHSNNNVIVVSDETDRILCKRRVPNELKTVLAVFEPHRAELAGVVVEATYNWYWLVDGLQAAGYRVYLANTSAIKQYEGLKHSNDDSDATHLAHLLRLGIVPTGYIYPREERALRDLARKRLQLNRSRTAHILAVENIVARQTGGRMSGSAVKQLTVEELEKLGQLEDVTLAMSANVAVIQTLTAQIEKLEARLLKQVKPRAEFKLLITVPGIGEVLATIIMLETGTIERFAQVGNFASYARCVDSKRLSNGKKKGEGNVKNGNKYLAWAFIEAANFARRFCPEAKRFYERKKAHTNTIVATKALAHKLARACYHMLKDQVPFDVKRCFS

SEQ ID NO: 369025 - protein, 385 aa, unidentified
MKGPIVSIDVSKGKSDYQAFKDLNVKYTGSRSIKHNKEGFDEIVNLVREMEKKLETEVCVVYEATGVYHRVLKKVLEDNNIKQFIINPLLSAKTRKNDSLRSPKTDKLDPKSIAKTYYSHSLHNSHKQETIYHELRELSRYYEDILVHIRKDKVAFRAQLDIVFPGYDTLYDDLYGPVALAIIEKYPHPEMLQKKKINTVSKVIQNKTCHRQAVSDTMADKAIEYSKTIYSGCDKDDIEVLILQRFIKKLNEDMAEAERTIGEMIKLAQELPDFNIIKSIPGIGDNLAARIIAELGDMTRFKKKNELVAFAGLDPRISESGQNDGDHMHITKKGNKRLRCLLYLAVTCSIRLKRDDNSIKDFYIKKKQQSNPMCSKAAKTACAVN

SEQ ID NO: 369026 - protein, 339 aa, unidentified
MQKHNLVAIDLAKNVFQVCGMSRHQKVTFNKQLRRHELVEFMLHQPPVAVAMEACYSSHYWARCFEAMGHTVKLLPAQHVAPFVRGNKSDHNDAVAIAEAARRPNIRPVPIKTVGQQDIQALHRLRERYVANRTGLINQTRGLLSEYGIIAPLGHKAFCRLLRETSQPTATQLSPLLKVQMNQIADEYYGLTDRIAELTDTLAQTARKNPLCQLLMTLPGIGVINTTAIVSAIGNGSQFSSGRDLAVWLGLTPRQSGSGEKFKSSGITRRGNRYLRKQLIHGARAALSRCKKKTDQLSRWVNQLVARRGVPKATVALAARLARLIWVLLQRQQVYKAMP

SEQ ID NO: 369027 - protein, 344 aa, unidentified
MDVMIGVDPHKGSHTATMIDRGQRELRRITVRAGRRQVVELLEWADGVSPRTWAVECAGGMGYLLAQQLVAAGETVLDVPATLASRVRVLGTGQSTKTDSNDARSVAVAALHAPALAVVRRADHVTVCRLLAKHHTDVARWRTKQCCRLHALVAELVPGGIGTEVVVNQARSLLEGINPDDVAAIERQRQAVELVADIERLDAALGDSRAPITTAVAASQTSLTEIFGIGPIIAAMLIGYSGDPLRFTTAARFASYTGTAPIEFSSGGRITHRLSRRGNRRLNHALHCAAIVQIRYHHSPGRAYYDRKLAEGHTPREAIRALKRRLSDVVWRHLIADARRAATT

SEQ ID NO: 369028 - protein, 343 aa, unidentified
MQITTIGLDLAKSVFQVHGIDATGQVVVRKSLRRSQMLPFFAKLPSCLVGMEACGTSHHWARKLIQLGHEVRLMPPAYVKPYVKRGKTDAADAEAVCEAVTRPTMRFVPVKSSEQQAALSIHRTRDLLVKQRTQLINMIRGLLAEFGVDIPKGLERALLMARQIVDGTAPDVPIEAAKIVGTLSQQALDTHVRLREIDRDLAIWLRDNDVARRLMTIPGIGPIGATALAASVTDPHQFRSGRQFAAWLGLTPLQKSSGGKERLGRITKMGDKYLRKLLVVGMTALVRRARQNPEGDPRLADLLARKPTRVATVAMANKTARIVWAIMTRGETYHAGHRPALAA

SEQ ID NO: 369029 - protein, 379 aa, unidentified
MEVFIKNCAGLDVHSETIVACVLKGRHENEVYQETETFPTLTKDLFRLLKGLESHEVTHIAMESTGVYWKPVFNILEDFFDITLANAQRIKNVPGRKTDVSDAEWIAKLLRHGLIEKSFVPPVEIRELRDLTRLRKKWIGHLTSEKNRIQKVLESSNVKLSTVISDVFGASGRKLLKRLIKQGYVDEADVEKNIHGRLAPKKQLITDSLFGTLNEHQIFLIRQSWRHIEYLESLVLEIEERINQLLQNYHEELQLLMTIPGIKKDTAAVIIAEIGVNMNQFPTSQHLASWAGVSPGNHESAEKRKSTRSIKGNPHIKSAMCEAAWAVSRSRNRWLANKYWSLAARRGKKKALVAISHRMLRIIYSMLLNKEPYKEPQLV

SEQ ID NO: 369030 - protein, 427 aa, unidentified
MNYTQNQKISQITPKTLIIGIDVAKDKHVARAQDDRGFEFGKRLIFDNSFHGFVTLLSWAERHMKSHDKSDVIYGVEPTGHFWLNLAYFLKAQSIDIVLVNPMHVKKSKELDDNSPTKNDTKDARVIAQLIKDGRYSVPNLLEGIYAELREGVKLRDQLIKQLITIEGRIQNHIQRYFPEFFNVFGDWEGKAAQCTLKLFPFPEDISQMTPEEVLQSWKPFVQRGVGIKRATKLVETAQKSIGITVGLTFAKREIQSLLDQHELFKTQLNELDEELELLVMTIPGAEEMIAIPGLGPVTVATFFAEVGDIKNYNHPQQLVNLAGLSLKEHSSGKYKGQSRICKRGRKRLRKALYLAIRPLVAHNPTFKTLHHHYTHRPERPLKKQQSLIALCCKLLRVLFVIGQKQCPFDPTKLTQGLSKSERLEVA

SEQ ID NO: 369031 - protein, 392 aa, unidentified
MIYVGIDVAKDKHDCFIMGTGGEVLHDVFVVSNNMDGFNNLYQKIRAASESFENIKVGLEATGHYSYNLLGFLIDKGFAPFVINPLHSTLFRKSLSLRKTKTDKVDARTIAAMLASDLDFKPYTDTAYHNEELKSLVRYRFDKVKERAKLKSSIARLVNILFPELEKLVPTLHIASVYALLKEFPGAHHIANAHLTRLKNLLFVASKGHYCDDTAVLFRDEARSSIGSIMPAKSLELQHTIKLIVEFDVAIDDIESRIKAIMNEIGSPILTIPGISYRMGAMILAEIGDISRFDSSDKILAYAGLSPSTYQSGQLISSYSHMEKRGSRYLRYAIFNAAKFVCHWEPSFAAYLAKKRAEGKHYNVAVSHAAKKLVRLIYALEKSRQHFISAAA

SEQ ID NO: 369032 - protein, 346 aa, unidentified
MRMRISVLGVDLGKNVCSLVGFDASGAVVLRRRAKRETLIALAAKLPPCVVAMEACCGAHHLGRVFAAHGHDVRLMSPEYVRPYVKAQKNDDRDAEGVAEAATRPTMRFVELKSQEQLDMQTLHRSRDRLVGERTALINQLRAILLERGIVAPQGKRKLEQFLVGLMDEQGGAGLSPRMIMLVTDARIQWSELDRRITAFDAEFVRWTKENEDARRLATIPGVGATIASALIAAVGKAETFERGRDLAAWLGLVPRQFTTGGKTKLLGISKRGNKYLRKLLIHGARAALPYVAERDTPLGRWAKALLSRAHPNVVVVAFANKLARIAWAVLRRGEPFAAKGAPLAA

SEQ ID NO: 369033 - protein, 412 aa, unidentified
MQIIHPCCCGLDVHTKTVVACLIKQGKKQVRTFSTMTADLLAMSDWMVAEGCTHVAIESTGVYWKPVFNLLEGVLEVILVNARHVKAVPGRKTDVRDCEWLADLLRHGLLKASFIPPLYIREIRELTRYRQTLVKEQTAIANRVQKLIESANIKLGQVATDVLGVSGRQMLRALADGEQDTEKIADFARGQLKKKKGELQRALEGRLTSAQRFVLGELLKRIDELAAAIVRVNEELREEVSRSTDPFVAEAVSLLETIPGIGQRIAETIISEIGVDMSRFPTDGHLASWAGMCPGNNESAGKRLSGKTNKGSTYLRDALIQAAWAATHTKQTYLAAQFRRLVRVKGKKRALIAVGHSILVIIYHVLKQRASYKELGGDYFDKQNTEKLRARLIRKLESLGVRVTVEMMADAA

SEQ ID NO: 369034 - protein, 418 aa, unidentified
MLKTLHVGIDVSHNRHSVCLLDDAGTPLGRPRTVANNRPGAAELIAQVQAVATDYDQVLIGMEATGLYWWHLYRALATAAELAPVPSRLVVFNPRLIQGFREAYSAMEKTDPDDAFLIAERLRFGHLPDYPPPDPRYFSLQRLTRYRFHLIHALVRAKAHALSVLFLAASEYERTEPFADPFGATSVAVLTQYPSLDALAAVSLEDLAGFVAHQSRNHFPDPTQPARLLQQVAADSFRLDDAAVEPIHFVLTSALAHIQFLTHQLKPLDRRITQELDRFPNTLLSVPGIGPVYAAGLVAEIGDVTRFPDDDALAKYAGLWWPRHQSGDFEATDRSLSKAGNAYLRYYLCEAVTPLRMHNADYQSFYERKFKETPKHPHKRACVLTARKLVRLVYALLRTNQLYAQPTALSPKKQPRQP

SEQ ID NO: 369035 - protein, 347 aa, unidentified
MQFYTRQHRHYCGVDLHARTMYVCVLDQAGNVLVSKDIASAPEPFLELIAPYREDLAVAAECMFTWYWLADLCAREGLAFVLGHALYMRAIHGGKAKNDRIDAHKIAALLRGGMMPQAYVYPHQMRATRDLMRRRNYFMRQRAELLSHITNTNHQYNLPALGVRPARPAERSGLAEHFTEVPVRKSVEVDLSLVEHYDRQLLPLERYLESNAQAQDPVALAIVRSVHGMGKVLGLSILYEIHDIGRFSRVQQFLSYCRLVKPTKESGGKILGHSGKKIGNAHLKWAFSEAAVCFLRANKPAQALRARLMAKHGKGKSLAIIAAKLARAVYFMLRRSEAFDTERFFAH

SEQ ID NO: 369036 - protein, 416 aa, unidentified
MKYARTVLPTEPANGLTCGIDWARDDHAVSVVDSRGKEVLRSTIDHSAMGLQTLLSILTRTGVEEVAIERPDGPVVDVLLDAGITVVVISPNQLKNLRSRYGSAGNKDDRFDAYVLADTLRTDRIRLRPLVPDGPATVALRTSCRARKELIGHRVSMANQLREHLNRAFPGAVGMFAELDSPISLAFLTRFDCQDRADWLTPKRLGTWLAKVGYTGGKSPAILHARLTAAPRGVTGEHGTAHAHITHALVATLSVLVEQIKALSEQIADQLATHADAHIFTSLPRSGKIRAAKLLAEVGDCRGRFPTPEALACLAGVAPSTRQSGTMRSVGFRWSCDKHLRDAVTDFAADSRRANPWAQDLYRRARARGHDHPHAVRILARAWLYVIWHCWQHGVGYDPAQHRALQALLHDEQPAA

SEQ ID NO: 369037 - protein, 421 aa, unidentified
MRGLRTKRVRTVKEGTLIVAVDVGMTSNTGYCTTIDGRDTKVFRFGNTREGFDKLWSMVVAMRNKFECTEVTLGYESTGPYAEPLFHYLTSKPVRIVQVNPMHTKKMKELNDNSPLKTDDKDPRVIADIIRLGHALSVVIPEGDAAYLRRLNNARERHIGEHTALLNQLQQLVFLIFPEFKAVFRDIAVKTARHILTNYTTPERIGTLNKDKLGEEVRKRSMGKFRVKEAELLIGLAKDTIGLKEGTAGIVLDIRHILMQLHTLDGFVEEVETEMEKTLGRIPFSTRILSMKGFGIVTVAGLIGEVGDFSKFRTQSEIMKLAGFDLYEISSGRRKGQRRITKRGRSLLRKILYNAAIATIRKDGIMYTQYAKLIARGMVRTSAVIVIAKKLLRIIHAMARDDRDYIRNYESPKRVVIRKAA

SEQ ID NO: 369038 - protein, 396 aa, unidentified
MVMVGIDVGGRSHAVARCRDGHGKADREVFRVSQSRAGFAALDSWLERQAEPVSLVTMESSGHYWMPLASHLRRRDVPVAVVNPLAAKYFARSRLARTKSDPADARSLAEMAMRDTPAARDPLAGAELRQAARFAMTLVEEQARVCQRLIRLVELGFPELGELFDDPTCLTAREVLRIAPTARAAARRRTSTLANANAGPGHRRLGSARAERLHAAAAASIAVPELDAEVAFEVGLLLDQFDLLERQIEAADARVASLIDSATARRLQTIPGVGPAIAATLLAEIGDIGRFTDFDQLLAFAGVHPAERSSGRKGANPETAWHMSKAGNSHLRAAAYRMAVVGIQHNPLIAAHYARKRAAGKSKMNALGHCMRKALSLVWGVWRNGQDFDPTWGTET

SEQ ID NO: 369039 - protein, 444 aa, unidentified
MKTTSASPRGAVPNVAAWIGLDWADQQHVGCLYDVASGQQEAFSLESSAEAIPLWLAQLRQRYGGRRVAIVLEQRRGALIHALLGCEFVILYPINPQSLAKYRQAYFSSGAKSDAADAPLLMELVRHRPDRFHPWQPDDPETRSLQLLTQARRRWVDQQTALTNQLTQLLKGYYPQALELAGDLSSPGACQFLKRWPTLAALQQARPSQIRKHYQRYGRPTAAELDGRLERIRQAQPLTQDPAVLLHGSLMLRALVDQLLPLFDTLREFERQIAALFAQHPDRPLFEHLPGAGKVLAPRLLAAFGTQRERWQQAAEVLTYWGVAPVTEQSGRSRWVHWRLACPKFLRQSWHEFAAHSRRHCGWAQAFYQQLRAHGKGHHAALRALAYKWIRILFRCWQTRTPYDEQVYLKSLEQKNSPLLAAIQALSSSSAPSKAVRGSLVKNL

SEQ ID NO: 369040 - protein, 355 aa, unidentified
MNTLGIDVGKKKCRAALKDERGDIIREFFFSNDNEGISTLIRSASHYGKCTAVLESTGNMWIRIHDTLEENGIDAILANPYKTRIIAEAKIKSDKLDARILADLLRADLVYESYVPAREFREKRSLVRHRISLVRNRTMLENKVHSLLDKYDYKSELADIFGKSGIIWLRTLNVSTIDKLIMNTTLAAIENINLQIDTISKELAMYGWDSDDVKILLSITGIDVFSAMLIVVEIVDVKRFCTPWKLVSYAGLAPSTRESSGKTKTGRISKQGSPWLRWILVQCAMTAVRYDQRLKSFYERLKSRKGSAKAIVATAKEILVIIWYMLTRRELYRHMNKKRYEQKLSRIKKIKESAV

SEQ ID NO: 369041 - protein, 328 aa, unidentified
MRHFIGCDAHKKYSVFVAIDETGNVKPAVRVNHDRELYRGFLRGLPAGSEIAVETIGNWYWIVDEMEEAGHRPRLAHARKAKLMMGEIDKTDKLDGRGLATLLRNGTLPEVWIASREVRDQRELLRLRMTLVGMEIRLKNRVHAILAKYAIQLEEVRKVIRQHMELLESTEQQRKIAEERLKSIVKERADVNLLMTLPGVGWILGTVIAFEIGDIDRFSRAPEIASYAGTVPRVHSSGGKTRYGRVHPDVNRYLKWAFVEAANVIVMHQKRLGDVHVVRLYKRLRQRKGHGRAVTAVARHLAEAAFWVLKKQQPYQQPQGCRVSSTHR

SEQ ID NO: 369042 - protein, 400 aa, unidentified
MQQQLLVGVDVGCRNHHVAIAGAGKIVSRFEITHDVHGFARFFAEIVLHTKRQKATSVLVGMEGMNGYARPLDQLVRKRGYQLINVNNLKLARFKEIFAAPAKTDRIDAEQIVSLMMMAPLMEQVKDSLQIVPELSDIEMQIKRLCRRRRQLVQEKVIVQNRMQADLQAVCPGFLDTVKQVDALYVLRFLSFRSDLRQLARLKPQTIESIYGIGKVTAKKLARWQANATFGMEIAWVGPMIVEDAKRILELKSKIDELEVSMKKLVEQSKLARLLLSIPGFGIVCAAEIAGEIGTVSRFESEAGLALYLGMAPLDNSSGKYKGTKAARQVNKRAKAAMMTAMGHHRQITAESKAYYEKKRAEGKTYNQALRSLGRHIVRVIWRMVQDNRVYQYKNDNQAV

SEQ ID NO: 369043 - protein, 404 aa, unidentified
MRLFVAIDVSSEKLDVCFLDSHDTVLKEICLSNDVNGANAIKEDVLHFHQLYNYEKIVIGMESTSVYSFHPSMFLTEDKDLRALDVEVVVQNPKAIHRYKKLFEEDKTDKIDAFRIADFLRIGRYNKFLIKEEKYVALQRLTRSRYQLVHQQTECKQHFLENLYYKCNTLSKELNTSVFGATMMEILSDSLSLDEIAEMDLEALATLLQKKGKGRFSDPEDLAKTIKKAIRDSYRLGKVVQDSVDVVLATYARLIQTLKKQIKEIEKSITAFFEATPEARYLTSVPGIGVVYAAGIIAEVGQIERFENEAQLAKYTGLYWKKSQSGNFESERRPMTRMGNQYLRYYMVEAANSVQLREATYRAYYLKKYDEVPKYKHKRALVLTARKLVRLVDVLLRNHQLYMP

SEQ ID NO: 369044 - protein, 337 aa, unidentified
MELKRIAIDTSKHVFTLHGVDERERPILQRNLKREQVEAFFAKQPPTEVVMEACGGAHHWGRFLGQLGHRVRLIPAQYVKPFVKRAKNDRADAEAISEAASRPTMPSVPVKSAQQQADAMILKHREMLTGQRTQAINALRGHATEFGVIAAKGIAQVDALLDKLASEKAIPEAARAMFARMAEHIAALDDRIAALNKDLASLHANHPLSQRLAKVPGIGPVTAVTLSLTVSAEHFESGRHFAAWLGLTPKEHSTGGKPRLGRISKAGHERLRSLLVVGATAVIRHVRPDRPGAWAWLVKLLERKPRKLAAVALANKMARIVWAMMARGEDYRLPATA

SEQ ID NO: 369045 - protein, 313 aa, unidentified
MNENPCYVDIDVSKESLEVALRPSGKWQTFPNADEGVARLVQLLRTEAPALIVLEATGKYELRVARALAEEGLLFNIINPRQSRAFAKATGILAKTDRIDALMLARFAEVLQPEARSLKTEETEALGELVTRRRQVVEMITAEKNRQGTASKRVRRDIQAHIRWLEKRLEDLNDEIDDLIRKSPLWREKDKLLQSASGVGPVLVSTLLGALPELGTLNRKQIAALVGVAPFNRESGRHRGKRTILGGRGPVRSVLYMGTLAAIRANAVIRAFYQRLVQAGKPRKVAITACMRKLLVILNTMLKNGTCWKYQPA

SEQ ID NO: 369046 - protein, 318 aa, unidentified
MEKDFVGIDVSKDSLDIAAFNANKKLHFSNDEAGITQIIKAFDEMAPALVVMEATGGYETPLVYALNKVGIPCAVVNPREVRDFARATKKLAKTDSIDAQVLAHFAAAIKPEPRPLSDEEGRELGAILTRRRQVVEMLTAEKNRMHTARKPVKEEIKEHIAYLEKRLARIESNLSGRIQESPVKKMKYQLLRSVPGVGPTLSITLLVDLPELGNLNRRQIAALVGVAPLNRDSGTLRGKRRVWGGRSQVRAALYMASLVATRHNPVIKRFYTRLCEAGKAKKVALVACMRKLLTILNAMLKHCVSWHFGEPVLVSNVH

SEQ ID NO: 369047 - protein, 377 aa, unidentified
MREKLRFLGLDVHAETIAVAVAEPDGEVRSLGTIANREDSIRKFIKKLGSPEHLRACYEAGPTGFVLYWQLTQLGVECAVIAPTLVPKKPGDRVKTDRRDALKLARSHRSGDLTAVWVPDEDSEALRDLVRQREAAKQDQLRARHRLTKFLLRTGQRPPLGLKAWTERWMRWLAQVRYTQPAQEVTRLDCMNEVEHMTARVKRLEEAILEVVKLAPEPMQELIRGLQALRGVAHISAVTIASELGNISSRFPSARKLMGYCGVFPSEDSSGKRIRRGGITKCGNAHLRRIVVESAWCYRHLPRVGEKLRKRHQGVPAEITEIAWKAQNRLHKRYRTMINAGKDQRKVMTAVARELLGFIWAIGIKAEAAACKQQLAA

SEQ ID NO: 369048 - protein, 317 aa, unidentified
MEAPLIFVGIDVSKAQLDVAIRPSAQSLSVTNDRAGIKSLIKHLKKLRPQLVVLEATGGLERQVLSALIAGEIPVVMANPRHIRDFAKSIGQLAKTDRIDASVIAHYAEAVRPKPRPLPDEASLELRALSARRRQVLDMIVAEKNRLATASKVVKKRITAHIAYLEQELNDADQDLDRFIEKNAAWKENQQILCSTPSIGPVSSPTLLVELPELGALDRKKISALVGVAAFPRDSATLKGRRTIWGGRASVRSALFMATVVATRFNPVIRDFYKRLKAKGKPSKVCLVACMHKLLTILNAMIKNKIRWSENFTRQTT

SEQ ID NO: 369049 - protein, 341 aa, unidentified
MKEVTIIGVDLAKNVFQLHGAAADGSVVFRKKLTRVQFHKFMSGHPACIVAMEACGSAHYWAREVAQMGHDSRLIAPRYVKPFVKRHKNDTADAEAIVEATLRPTMRFVDPKTPEQQGGAVLFRTRAQFIRQRTEAINALRAHLYEFGYIAPTGVQYVKQLALIVEDDSSDLPSLVRFACREVIDQITRLTERLAVLDKEISRLSGQGETARRLRTMPGVGPITALAIETFAPVMENFRCGRDFAAWLGLVPLQRSTGGKQILGKTSKMGQRDIRRLLIVGAMAVVGWAGRRGAAEGTWLAKMLARKPRMLVAIALANKMARGLWAMLTKNEEYRGPVMVG

SEQ ID NO: 369050 - protein, 304 aa, unidentified
MRAKQLHNRTFCKQFKNSADGFRLLAAWLASLQITRIHACLEATGTYGEAIALFLHERGHLVSIVNPLRIKGYAQSNMQRNKTDRLDARLIADFCLTQEPDEWQPPSEAVKPLQSLVRRMEVLEGMRQSEENRLANAGLEIKPSIERMITLIKDEIRELERQIKQHFDRNPDLKEQSELLQTIPGIGERTANLLLSEIEFDRYDSARAIAAQAGVTPRKKQSGTSLKQTGLSKLGNARIRRALYFPAIVARQHNGIVKEFAKRLKKNGKTPMQIVCAAMRKLLHIAFGVLKHKRPFDASLAFSA

SEQ ID NO: 369051 - protein, 343 aa, unidentified
MKKKSGCTARVDRVGEPRQGNGHCRLQRDVKELMAELVSKLSQKLELPGEQASDGRDPQEGVPGPNRGRLTVGVDLGDRWSSYCILGLEGETLAEGQLGTTPEDFAEFFQSMAAARVVMEVGTHSAWASDVVASCGHEALVANPRQMEGPKRRKRKNDRIDAHKLARVGRMDPQSLFTIKHRSAEVRRDLVAVRARDAVVTMRRDVINTLRGLVKGMGARLPRCSSRSFSKKIGGALPAEVSETLEPLVGLVETLSVCIKAYDDRIEKLATERYPQTDLLRQVKGVGPLTALTYVLTLEDPKRFAKSRDVGAYLGLVPKQEDSGDSQPQLRITKMGDMMLRCW

SEQ ID NO: 369052 - protein, 409 aa, unidentified
MDVLYERCCGLDLHKRSVTACRMIPRADGRPSKETRTFGTMTADLLVLGDWLEQGGVTHIAMESTGVYWKPLWNLFEDRFTLLLVNAAHVKVVPGRKRDVGDAEWLTDLLRHGLLRPSFVPDRPARELRELTRYRSAVVRERTAEVNRLQKTLEGANIKLASVVSDVTGVSARAMLGELVAGQEDASAVSALAQGQLRRKLPELEQALTGRMSAHQRFMLAQHLAHIDALDAQIAAVGEEIAERVRPFEPQLVALDSIPGIGRWSAEVILAEIGTDMGRFPTAGHLASWAGMCPGHDERAGKQRSGKTRKGSPWLRVTLTEAAYAAGRGNGTYLSARYHRLIGRRGKKKAAIAVGRTILELCYQVLSTGQLYDDQRLLVRPPSLPLTAEERLVRQLERLGHRVTLEPAA

SEQ ID NO: 369053 - protein, 409 aa, unidentified
MPWIEGGIDMDERQQFRWFLGIDVSKETFDACCIASHGDRLFNLSASMDRKGFEELIKQLSTLSIPRESLLMGMESTACYHINLYSFLISLGYSVMVINPLLISNFVKLQLRKTKTDKKDASVIAQFLLLNRDSLSQTILSSDISDLRDLSRQRESLVDQMSSTKSEIKRLLTITFPELEQIAGVFTKSMLRLLCQYPSAASIKQAKRSKIARILIPGSYGKQTGESVDRIVKAAQVSVGTSSATKEIILRQKASLLIQLEEHLQELTDILMELCQGKIQGDMDILTSMKGIGEKSAMNFLIEIGGDIKQFESHKKVIAMAGLDPALYQSGKIDRKGKISKRGNRHLRRVIWLMTTKVIQFNQRFKQYYLKRTKDGLPYKKAVLATAHKLIRVMFAMLRDKTLFDPRMN

SEQ ID NO: 369054 - protein, 389 aa, unidentified
MKIFVGIDIAKLNHFAAAISSDGEILIEPFKFTNDADGFQLLVSKLESFDKNSIIIGLESTAHYGDNLVRYLVAEFYQVCVLNPIKTCQMRKNNVRKTKTDKVDTFVIAKTLMMQDDLRFITFFDLDMMDLKALGRFRQKTIKQRTRLKIQLTTYVDQVFPEIQYFFKSGLHQNAVYALLKEAPSPKEIASMHMTHLANLLKVNSHGHFTKEQAKELRVLAQKSVGANDSAISIQITQTIQQIELLDSQLEKIEAEMTDIMKFNDSVIMTIPGIGYINGGMILGEIGDIHRFSNPNKLLAFAGLDPSVYQSGNFQAKTTRMSKRGSRVLRYALVNAAWNVVRNNATFKAYYDAKRAEGRSHYNALGHCAGKLVRVIWKMLTDEVEFNLE

SEQ ID NO: 369055 - protein, 426 aa, unidentified
MSIVAHIHPYVVGVDTHARYHVYSVLASATGELLGSQKFPTTEAGIKRAMRWVVSRTHSHDDTLWVIEGTSSYGAVLTGKVLARNFSVAEAPRVDSQHRYGTRKSDELDCARIVRATLGLPVDKLRRPRLGRGVRQAIRILVASRELLAGERTRNVNALTALVRSNPLGIDARCTLSSTQIKHIASWRMRDEDIEIRVARAEAKRLARQILDLDCELGANERDLAGLVQISEAAPLLQEKGFGAVSAAKCLTAWSHYGRIRTEAEFASLAGVNPIPASSGNTVRHRLNRGGDRKLNSALHMVAIVKMTHDEVARAEKIRPSGLRVSFVTAPVGAGRLESMKKFSKHTPEQIVVKLDKARSLKESGSTVAEVCRELGISEATYHRWQRQYGDMTRSEDGGSRSCRKKTRSSSGCLGRLNSKSRCLGS

SEQ ID NO: 369056 - protein, 432 aa, unidentified
MKYKLKQKQNQRITRITESTLVVGADIAKKIHVARAVDFRGIELGKDCVFHNDQEGLTKLATWMKELGQAHGKTDIVFGIEPTGHYWFPLAAFLQAQDIQVVVVNPLHVNKTKELEDNSQTKSDYKDAKVIADLIRNGKYSDPKLPTKEYAELRILMNLREKLSASLTQVKGRIGNWFDRFFPEYTSVFKVWEGKASLMTMRAFPLPSDIVNKGARDVLAHWKTDVKRGVGIKRAEKLVAAASASIGLTEGSMAARVELSTLLGQYDLFSNQLEEIMGKVLEILEHIPGTKQMLSIPGIGAITVAGFLAEVGDLNNYDHGQQIIRLAGLNLKENSSGKRKGKTGISKRGRSRLRALLFRAVMPMVAKNEEFKALHKHYTTRSQNPLKKKQSLIALCGKLIRVLHTLGTKQREYNAIDVMGPVKQYQIQQEAA

SEQ ID NO: 369057 - protein, 352 aa, unidentified
MEVVHVRCAGLDVSKKDAKVCVRIAGAGRRKTTETVTTWSAMTNQVLALREHLVAEQVTCVVMEATGNYWKPFYYLLEDLPGVEVELVNARHVKNLPGRKSDVSDATWLAQLGAHGLVRASFVPPEPIRHLRDLTRARTAITRERGRETQRLEKLLEDAGIKLSAVASDITGVSGRLMLAALIDGQRDPAVLADLAKRRLRSKIPALTEALTGRFNEHHAFLARVHLTLIDQHTAAIEEITSRIEVVIEPFQGFRDLISTIPGISTLTADVIIAETGADMTRFPTAGHLASWAGTTPGSNESAGRVKSTKTRPDPATPTSKVPSAPRRCRLPRVRTPTSVPGTAASPHDAGR

SEQ ID NO: 369058 - protein, 379 aa, unidentified
MRHVCGLDVHKDSVFVCILNEKGVVFQEKFGVLTPELERMVGVIMEHGVTEVGMESTSVYWMPVWRVIDPYVEQKLVNPYFIRQLPGKKSDVKDAEWIATCILKGLVRGSYVPEERIQRLRQYDRRIFDLNDDIVHKLTRLDAALQRCNIRLSNYVSTTDCKSYGDVVDAIARGETSPDALLRCVHGRIVNRHGADVIRSALTGVITPVEEDVIRQLREEIELARRHRDECQRRMDGLCSEWFPEQYANLQTIPGVKARSATAIIAELGTDMSSFEDAAHLVSWAGLRPRNDESAGRIKARGITHGNKYLRKTLIECAWGASRTRGCFYSRFSHHQTVVRRKSRMKVQVAIARKMLSAIWFILHDGVAYRDFEGDANAA

SEQ ID NO: 369059 - protein, 342 aa, unidentified
MEEVVVVGIDLAKSVFQVHGVDAHGKVVLRQRLSRARLLPFFMKLPACLIGMETCASANHWARELIALGHEVRLMPPHYVKPYVKRSKNDASDAEAICEAVTRPTMRFVGVKSPEQQSVLVLHRTRLILTRQRTQIGNAIRAHLAEFGIVAPVGRQGLDRLFAVITDPSDTRVPVAARACLSMLADQYRLVLAHLLETDRAIRTDSRSTELGRRLQEIPGVGPLVASALVASVPDPRIFRSGRSLSAWLGLVPRQNSSGGKERLGGITKAGDTYLRRMLFVGAMAVIRHAERHGTKRPWLAKLLTRRHPRVAAIALANKIGRIAWALMTSGERYQEPALAVA

SEQ ID NO: 369060 - protein, 311 aa, unidentified
MFVGIDVSKAKLDIQVLPSGQAWTVSNESADVATLVARLAALKPTLIVLEATGGLERRALAQLLAAKLPAVAVNPRQVRDFAKATGHLAKTDILDARILALFAERIRPEVRHAPDEETQELDALMVRRRQVVDMITAEKNRLAAAPPSKRVVRAIRKTIACLEKQLDEIDSDINGAIRNSPAWREKDDLLLGVPGVGKVLSRTLLAHAPEIGTLTRKQMGVLIGVAPLNCDSGTYHGRRRIWGGRARVRAVLYMATLSAIRCNPVIAAFHARLVAAGKLPKVAIVACMHKLLTILNAMLRSNSPWRVEVSP

SEQ ID NO: 369061 - protein, 418 aa, unidentified
MVLFVGDDWAEDHHDVEVLDDSGRRLAKARLPEGMTGMSRLHELIAEHLDEDSISSETGTLAAGEVVVGIETDRGPWVRALIAAGYEVFAINPMSAARYRERHSTSGAKSDPGDAHVLAEIVRLDRAHHRPVAGDSAQVEGLKLVARSHQSLIWERTRHLQRLRQALREFFPAALEALAVGKLELADPDALELLERARDPDRGARLSRAKIAAILTRGRRREIDAKTEAIQAALRAPALRQPAAIEAAYATIAASQVRLIVGLNSQIPALEEVVAQDFGQHPDAEIYLSQPGLGNVLGARVLAEFGDDPQRYRDHKARRNYAGTSPITRASGRKTLVLARYARNRRLGDATHQWAFCALSASPGARAYYDQLRARGAGHHAALRQLGNRLVGILHGCLKTRTHYDETTAWAHRQTAAA

SEQ ID NO: 369062 - protein, 379 aa, unidentified
MDVHRDFIVACIAATDAQGATTYERRRFSTFSASLRMCRDWLIDNNCFDVCMESTGRYWFPTHNILEKSEQKFNIVVTHPKYVKAIKGKKTDKRDAKWIADIFKHDMINGSFIPPADIRQLRDLVRYRLKLTSYTTGEKNRAQNRLAVSNIKLDDVFTDVFGKSAKAITSRLLERPCEPFDVAPFVDRRCKTPIEEIQLAVDGVMCANQAEKIRIIRSHMGSLELCKANLESEILAVAEKYLSQINLVLTVPGIQTFSAIAVIGEIGVDMSVFETSRHLCSWAGLAPQNDQSAGKKKTTRISRAGVYIKPLLVQCALAAVKSNDHLEVRNRYQAIKKRRGHKKAIIAIARMLLTAIYNILKKDEPYNAELYRQSDKPPV

SEQ ID NO: 369063 - protein, 426 aa, unidentified
MRVMYERVAGIDVHKDMIKVGIRTPGHRAWTRTCEVLEYRTFYGVLQAMAADLRKRGVTHVVMEASGVYTEPVYYALMERDFEQVAVINPAHAKALKGHKTDAKDALRLAELSGCGLLRGSYIPSQALKDLRDLTRYRIKTVQARTSEIQRLAKALESAGIKLYSVVSDLTGKSAGLMIEALIDGERRGQVLADLAIGRMRTAGKLADLSQALAGRFTDHHAVLCRLHLDRIALFNTAVTGLEEKIAAKAAPYQREAGLLKSVPGFGDAVACAWLAEIGPAPQEYFASHEKLASWVTLCPGNHMSAGKRKHGRTGDAGTYIKPMLVQAAWSAIKAQGRLQAKYHKLVRRFGGPRNPGAVKKAIVAIAHTLLKIAYQVLSSGKPYEDLGADFYARRESPDQRRAYLLRQLEKLSPGCTITITPAEAA

SEQ ID NO: 369064 - protein, 393 aa, unidentified
MSFKILKNNCCGLDVHKTWIFACIGITDSNKRTVYKQARFSSFTKGLQELCHWLAKYDCTDVCMESTGKYWIPVFNILEKNNIWVTLSHPKYTKPQKGNKTDRKDAKWICDLYMCGMVKPSFIPPADIRELRDLVRYRFKLTCMITGEKNRAHNCLTVSNLKLDDVFSDIFGRCKTPIEEIQAAVDGAVSKEQAVKLRQCLNHIDELEMHKSEIEREIFRLSDKYEDILTLIRTVPGFDKNPMTAIQVLSEIGGDMSVFPTAKNLVSWAGCCPHNDQSNHKIKSTRISRAGSYFKPVLVQVANALIKSKKHPEFSTRYRRIKARRGHKKAIIAICRMILTAIWHILTDLKPYTAKGFLEPRPVSKEKVLTASQALNLLKQRGYVIKDEPIFIS

SEQ ID NO: 369065 - protein, 328 aa, unidentified
MKYIGIDISKATFTVAYSSDKSAKVSEFRNTPADIRKFVRTLPAKEECHLVMEATGPYSMTALYLLTKEGYTVSMENPLKVKNFAKAMLTVTKTDRADARLIALYGERMQPEPYKVPAESLMLLKQKRTVIRQLRKQHTANRNLIQSLEVLPIVDKSAKHAVETIVVQLEKQLKYLEKDLSEVTEKEFSKQLKLLTSIKGIGIALATSLIIATGGFSNFDNSKQLCRYLGLSPTYEQSGTSVNRHGHINKNGDPHLRGMLFIAAMPASRYNTACKETYTRLRANGKSGKVALIAVANKLVRQAFAVVRSGNYYEDGFVSTRPKEYAKV

SEQ ID NO: 369066 - protein, 347 aa, unidentified
MAAQITGGVDTHLDVHVVAALDQLGGLVGVESFPTTPAGYRALLGWLGSHGEVVVVGVEGTGSYGAGLARHLQREAVAVVEVDRPNRQRRRRQGKSDPHDAVTAARAAQAGDALGAAKLRDGNVEAIRVLRVVRGGAKRDRTRAINQMRALISTAPDDLRQQLRGLTIPKLVRRAAAFRPSARSDVGSATRVALRTLARRVLELDSEVAGLDDILEPLVAATAPELVAQVGVGTDTAGALLVAAGENTSRLRTERSFARLCGAAPLDASSGKQQRHRLSRAGDRQANSALWRIVISRLSHDPDTRRYLQRRLADGKTKTEAIRCLKRYIAREVYNHLPRPHLTLDSP

SEQ ID NO: 369067 - protein, 320 aa, unidentified
MMAQNDQIVVGIDVAKDKVDACIRTLSQRHAFPNAAQGHRKIIAWLHKHKVSKAVMEASGGYERDWARVLRRAGIEVRIVDPKRVRSFALSAGRLAKNDAIDAEMIAWFAETFSAAPSQIHDAAHEELVALVKARKHLLDLQTRLKSQNEHAAPDAIQKAHARVLKSLATEITRLEAAISAKVKATPEFADRAEIIESVPGFAETTSATLIAGMPELGSVSKQIAAALLGAAPYDDDSGKRRGERHIKGGRRWVRNAIYMPCLGAATQNNPVLKAFYQRLIAKGKEPKVALVACMRKLIIILNTMIARRQKWDPSRYALN

SEQ ID NO: 369068 - protein, 519 aa, unidentified
MEHRVLGVDLGIQAPSVAVVADTDGAILGKAVRFELGVDELERVEAIALAEAKEGTKLHVVMEQTYPTSEYVSAFFLSRGHEVSFAKPNQVKEFRKCLSPKVKTDEVDAYVMARLPWLDPKQLNRTYVAAPAVQELKMQVRQRASMVKQLVNLKNQLIAYANAVWPGISRAFGDLDSAHARSFLREQRPRSVSELQVDELAVVLKSRGQIKQDYAQRLAGKLLALAQRALGLHQLVPEEQIDSSREHTIELIGMVEELELRLQAKEKRLDQAYVRCDPERELTSIPGIAEMTAPTIFSYFGEPKRFASTRKAQGFVGLFPETDASGVSDRKGTFITKQGPALLRRDLFLAADHFRRHDPRGAQLYYDLMVHRGKHHTSAVVTIANRMLIPRVLAVLREQRPYEFRDLDGKTITKAEARELAAQWKVTEEVRKRLRNTKTQQRREASPSVTSEPKAPRNGRPSRQADSNAETLSVTKEQFGRLVLQSLEQMLNTGENPEEIRLHLQQEAARFFQKGLDVD

SEQ ID NO: 369069 - protein, 341 aa, unidentified
MKQEMHVLGIDIAKRVFHAVGMDDRGKIVSRKRLSRYDLMPFIAKLPPVLIGIEACGGAHYWARRFREHGHEVKLMAPQFVKPYVKSNKNDSRDAEAIAEAVTRPTMRFVPIKDVDQQDIQALHRVRERLIGERTALINEVHGLMHEYGIVMPKGVSKFRQAVVEKLESAKDKLTALSQEMFWKLGEEFAALEKQLASYQEKREALATTHPACRRLMTIPGIGPLTATALVAAVSDASAFKNGRQCAAWLGLVPRQHATGGKERLLGISKRGDSSLRKLLVHGARTTIRWVGRQTDRRSQWMRQLVERRGKNRTAVAVANKNARIVWALLTSHQDYQLATG

SEQ ID NO: 369070 - protein, 470 aa, unidentified
MELMSKVCCIGLDCHKNFSSVTARDAGSRVVFRRRLDHRDRGLLRQSLASWPTGTPVILEGTFGWGWMSDELRDAGLDPHLCSGRKVAGWREARGMPKSNKRDADLISELWFQQPRWWEVWCAGPEVRDMRELLRYRMSLVGMQTMIKNQIHATLHRHGLCPDFADLFGVAGRAWLSSLIQEPEQEPGNLLRENARQTLRGHLQMLDQIRKRIAAATVQFRRELKVHPAAKRLMTLPGVSTVLGYTIAAEIGQIERFASSRHLSRYSLLAPMSDDSGEPVAGAPVNRHVGKQGRLTLKWAWIAAARNAVRRQGPLKDQFDRYTDNGKQNRNRGYIAVAHRMCQIGYVLWKKDVDYQPTPPPRPGSPAWREMHNREMQMLETRTPGQQSPPSNPARRSSGKTPLRKTPNPPPGNIFCGEKTKQEERKSANQSKRHNELSRPGTGQPHAAMAAETTLRQGHPCQSDLRQTSG

SEQ ID NO: 369071 - protein, 410 aa, unidentified
MVKENFIYVGIDLHKETHTAVMIDCYNQKLGEITFPNRPAAFPKLVTKVKKCNTDGKEVVYGLENAYGYGRALAVWLIDKGYLVKDVNTAISHRQAKHRGAMYRKSDSDDAKAIALATLNMLDKLPDACPNDAYWSLGQLVHRRDNIMKQRTRLVNQLHEQLCIAYPSYKQFFNDISRPTALYFWEHYPSRKYLKGKSVEDLRAELVPVSHNRCSTKNCEKILDAVASDKVKNNAYQDARDMVTLSIVSDLQHYDSQLAEVDKMLEQMYKMLGCTLTTIPGVNVITAVKILAEIGDIKRFSNANKLAQFAGIAPLHLSSSGKGKDVATKQGNRRLQATIYFLAIQMVQVSSKGTPRNSVVRAYYEKRKAEGKTSQQALICISRRLISIIYGMLKHGTEYRMPVVESAGEK

SEQ ID NO: 369072 - protein, 416 aa, unidentified
MKQTQNTRGYERYFAIDTHREYHLVGGQNEDQEWVVNPRRVSIEKFSEWAQKNIRAGDIVVLETTTNVWDTYDIVSPLAGRVLVANAAAVGEIAVARVKTDTKDIERLLKLLFGGIVPEVWVPPAHVRELRAFISYRNRLVKMATMIRNRLNSLLHKHSLMLPEEGILNQAWWDAQASISALEKMQIRQELGLLDEIKKLQIAVNEELEKQSTGELWGKQALQLMQLPGVGVIVAMTVLSAIGDITRFEDAKHLVGYAGIGAGVHDSGKTHKEKHITKKGRKELRWIMVEAAWRAVRMSPYWKEQYEKHLRRMRKPTQAIVAIARKLLVAIWHVLTKEETDIHASEDDLAYKMLLLSWSLNDNVRMGLSYKQFAKYALMKLGIENDITRFVRREVPRRLAPREEVLTRMAELGIAQ

SEQ ID NO: 369073 - protein, 347 aa, unidentified
MKITTVGFDLAKNVFQVHGVDEHGKVVLKKQLRRQQVAEFFAQLPSCLIGMEACGSAHYWARRLQGLGHTVRLISPQFVKPYVKTNKNDAADAEAICEAVARPNMRFVPVKNVAQQGVLALHRVRQGFVKARTAQANQIRGLLGEFGVVIPQGIAQLFAKMPEVLEDATNELPDSVRALMLRVLEHLKELARQAKEIEAQIAAWHRDNELSSKLAAIPGIGLLSASALAATVGNAKNFSSGRQLAAWLGLVPRQSSSGGKSVLLGMSKRGDAYLRTLLIHGARAVIHRTRQNPDGSTWVHKLIGRRNVNVAAVALANKNARIAWALLAHDRQYRSDYRAPGMIALSK

SEQ ID NO: 369074 - protein, 337 aa, unidentified
MNYSGIDLHSNNSVVVVTDEADRVLVEKRMPNNLAAIVALLAPYRDELAGVVVESTYNWYWLVDGLQAAGYRVHLANTTAIKHYEGLKHSGDEADAAHLAHLLRLGILRTAHIYPREQRGARDLARKRMQLTRSRTQHILAVENIVARETAASIKSNDVKRLTVEGVSALGLRDDVTLAVQSNIAVIQTLNEQIDKLETRLQERVRPCPGYALLTSTPGIGQTLATVILLETGAIERFREVGNYASYARCVDSIRISNGKKKGEGNAKNGNVYLAWAFVEAAHFAQRYCSEAKRFFEKKRAKTNNAVATKALAHKLARACYHMLKEKQPFDVKRCFA

SEQ ID NO: 369075 - protein, 420 aa, unidentified
MGMLNQVGETMHYQEKFIYVGVDLHKETHTAVIINCWHQKLGEIQFANKPSAFPELIKAVKKHSKGLTPVYGLEDVGGHGRSLAVYLNEQNQSVKEVNAALAHSLRLSRPIVHKSDSWDAECIANTLLANLNTLPDANPQDLYWTIGQLVLRRRALVKAMSALTNQLHGQLTCAYPSYKQFFSEVDGKTALIFWEKYPSPHHLDKVSQEELTAFLRECSNNACSTSKAQQILELIKKDGDTKRGYQNSRDFLVRSIVRDIQFKKQEIARVEAELKTVMSELDYKLESMPGISTVTAAELVTEIGDVRRFSSANKLARHAGIAPVSFGSGGKSKTIKSKQGNKELHSIIYFLAVRQIGVDRTTKRPRNEAFYNYYTRKVAEGKTKGQALICVMRRLVNIIYGMMKNKTEYMLPAIPEKEAV

SEQ ID NO: 369076 - protein, 416 aa, unidentified
MLIAGCDIGSETHYIRAIDVRGRELSSGAFEFGNTSEGFANARAWVLALAAKNDKKQIVLGLEPTGHYWFALAVWMISNGVSVVQVNPYAIKQSKEIEDNSQLKDDRKDPKLIANLVKDGNYGMPYLPEKVYADMRRLSMFRDQLNEDRIRNINRLHRELKIYFPEYMDAFGKIDGAFTLEVLKVSAIPTDITVLGAEGMKNIWHNAKLRGRSYSRANEIVSYAEKSVGLTDGTGVGREAVKWYAEQILRLDEQLSEIESALHEKCREIPYAENILAINGVGENILAGILAEMGDISRFDDVKEIQKLSGMGLVACSSGKHKGQTKISHRGRKRLRYWLFQAAKSAVSHADEFKQLHEYYTTRINNQLKKMQSLVVIACKILRVIYTILKTGTTYDPQKLLKDIKHPTASQAPMAA

SEQ ID NO: 369077 - protein, 347 aa, unidentified
MVTIGIDPHKASHTAVALDPNGEMLGELRVVADASMLRRLRKWASSWPQRVWAIEGAAGLGRLLAHQLVAAGERVVDVPSALAARARVLASGHGRKTAGIDARSVAVVAQHRGDLLAVAADDHTAVLRLLSDRRDELTGERRRTINRLHRVLRDMHPGGAPRQLSADRAARLLTSIRPASAVDLERKAIARQLIADVRRIDRALLENRRRCEQAIAASGSTLTEIFGISDVLAAKILGHTGDITRFASADHYASYTGTAPVEASSGEQTRHRLSRAGNRSLNHALHIAARVQTMHPGPGRTYYQRKRAEHKTSTEALRSLKRQLAKIVYRQLRHDHLGRPFIDSELT

SEQ ID NO: 369078 - protein, 420 aa, unidentified
MKAYNVDNFAVLIGIDWADKKHDICEHPTGTNKYHYTVIKHTPEALHEWAMDIKQRYPEQKIAIVCELKKGPLIYALAKYDHLTLFTVNPCAVAKYRQAFTPSGAKDDPSDAFVQVEILTLHMDKLSVIEPESAAMRTLSQLVEYRRSLVQDSVDLSNKITATLKNYYPQVLEWFKEKDTYIFCDFIQKWPSLTAVKKARKQTLLDFFESHNSHYSTVNNARLDSIKNSMPLTLDEGVIVPNQILVELLITQFKVLLKGIEKLDKAIKSAYKAQQDKKIFDSLPGAGPQLAPRLLVAFGSNRARYNDAAELQKYAGIAPIIERSGQKMWTHWRYSCPTFLRQTFVEWAGFSIRYSFWAKAYYEQQKAKGKPHNSIIRSLAFKWIRIVFRCWKTNTLYDESTYLAALKRRGSPLLKFAINS

SEQ ID NO: 369079 - protein, 338 aa, unidentified
MKLYSGIDLHSNNSVVVVIDEQDRVVYERRHPNDLGAILSALSPYAETLEGIAVESTFNWYWLVDGLMEAGFQVHLANTARMQEYGGLKYTDDHHDARWLAHMLRLGILPQGYIYPAQERAVRDLLRKRGQLVRQRTVQILSIQNLLSRNLGQQFSGNRIKQLDEQALSELLPVAEQHLAGGANLAVMRALDGQIEHLEQEIKARVKPRPALKWLKTVAGIGDILGWTILLEAGDIARFAHVGNYASYCRCVESKRLSNGKKKGENNRKNGNKYLAWAYVEAANFAIRYHDPVKGFYQRKKAKTNGVVAIKAVAHKLARASYYVMRDRVAFDIHRAFS

SEQ ID NO: 369080 - protein, 357 aa, unidentified
MRSYKLTIDKSKLQGGGRIYVGIDLHKIQWHVTIRSEEVELFNGSIPGKWEALKKLLDRYPGYQKQAVYEAGYFGFWLHDRLVDYGADCVVTPPSLVPQEYGNHVKTDRRDSRKLAHLLAKGFLKRVWVPSPEERYERQVIRRRRQLIGDRVRTQNRIKAELRFYGVDLPSPTGQWSKAYVKILRQLRFDNRWMQESFERLLEEYQFLTQQIERQTKVLRELAETAQYQDRMKILRSTPGIGLISAMEYLLELQDMKRFRRGNQLAAYVGLTPSQYSSGEHVRMGRITAIGKNDLRGTLVEVAWRLIAKDPAMREKYERIKARAGSKRAIIAIARTTLLRTRRMLLDRQPYVVGLAA

SEQ ID NO: 369081 - protein, 340 aa, unidentified
MTITTIGIDLAKNVFAVHGVDQNGKTVLVKSRVTRAALPGLIASLPPCVIGMEVCSGAHYWARLFLQYGHEPRLMAAKFVSPYRMAGKSGKNDAADAQAICEAVRRPHMRFVPVKDESQQAMQCLHRTRQGFIEEKTATYNRLRGLISEFGVIAPQSTDALRRMVSALKSSLPLQVQQCVDDLLEHVDRIEANITEYDRILSRIAKTDHRSQRLMKLKGVGPTTACALVACIGNAHDFKNGRQLAAWLGLTPSQYSSGGKSKLGRITKAGDSYLRTLLVQGARSVLIGAEKRTDSFSRWVCSLVERRGYWRAVVAIAAKNARLCWASLHYGDDFRLYSAS

SEQ ID NO: 369082 - protein, 322 aa, unidentified
MKGRPMFFGVDVSKRWLEVAEAGKEETTRFSNDTAGCDAILEKVRGATLVVMEATGRYEARLATHLAAHRIPIAVVNPRQTRDFARSTGKLAKTDGVDARVLAMYAQRIEPPETVLKDQAVLELEALLMRRRQLVDNRTAELNRREHATGEVLKSVEHHIVWLNTEIKKTDSEMGKRLRDSSLWNARIKLLRTAPGIGTVGSCSMVACVPELGTLTGKRIAALVGLAPFNDDSGARTGVRHIRGGRAEPRMVLYMATLTAIRVSPVFKEFYERLVRRGKNKKVALIACMRKLLEILNAMVRTNAKWNPNLAAPKDSIAPLLG

SEQ ID NO: 369083 - protein, 347 aa, unidentified
MVTLGADAHKRSHSLVAVDDMGRKLGAHTVPATSAGHLAALRWAQQWCRRRWAVEDCRHVTRGLERDLLSAGEVVLRVPPHAAAAGRSSLREHGKSDAIDALAVARTALREADLPEAHLDDHCREIKLLLDHREDLVGERTRIQNRLQWLLHELEPGFQVASGSLSRRPAIKRVETLLDGRHGVVAELARELTARTAQLNSRIDELEQQLAGMMPALSPGLLALPGCGVLTAAKLLGETADVRRFRSRAAFAMHNGTAPIPASSGNQQRHRLNRGGNRQLNAALHRIAVSQIRRAGRSHDYFQRRLAGGNTKREAYRALRRRLSDEVFRLMLTDQRAQVTGVQAPAA

SEQ ID NO: 369084 - protein, 323 aa, unidentified
MSWQTIGIDVSKAKLDVCLLGETGETAYQQVANTAAGYELLQTWLQQHSPQPLAVCLEATGIYSQPPAQYLHQRHYPVSVVNPTPVKAFAAALMKRHKTDKSDALVLARYAAHFKPPLWSPATLSQSRIHDLKRLADDLQTDRTRVKNRLEGTPAGSPARPYLQDQLTYLETQLSHVQAELQKQLDGDQGKQHQCHLLTSIIGIGLTSALQLLAELPDLTHFASADALVAYAGLCPRQQQSGSQTAHSWLSKQGSAALRKALYFPALTAKQHNPHLRRFAQRLSDSGKAKMTVVAAVMRKLLVLIYAILKSGHPYDPNYQFAA

SEQ ID NO: 369085 - protein, 398 aa, unidentified
MKVCGLDVHKDSIFCAVHNGKKPGEVKEYSTLTASIVDMADYLHSQGVERIAMESTGIYWIPVWNILEERGFELMLVNPFLIKQMPGRKSDVKDAQWIALLLHKGMLRSSLVPCQKIRELRVYGRKYRKLQGRTTSVVQEMDRVLVMCNIRLGSFVSDITGKSFQRVVASIAGGIDAPEELLVHVHPRIRNRHGDTIREALQGYICQHHRFTLSLLVEEYNLLEAQSEQCLKMMKALCLADYPGEMELLKTHPGVNEVAAMLFIAESGGDMKAFENSGKFSGWTGLRPRNDESAGKYKSTATTKGNKFVRTLLVQMAWAAIRTKGSHYKEKFARLAIRKSRKKALIAIARKIGTVLWNMLDKQQKYRPELLPVYDPVKLTSKIAYHDREMQRLQSMLS

SEQ ID NO: 369086 - protein, 400 aa, unidentified
MNDNDDIGVFLGLDVGKTNHHGHGLTPAGKKVFDKQLPNTEPKLREVFEKLKAKFGTVLVIVDQPASIGALPLTVARDAGCKVAYLPGLSMRRIADLYPGEAKTDARDAAVIADAARTLPHTLRSLETTDEITAELTVLVGFDQDLAAEATRTSNRIRGLLTQFHPSLERVLGPRLDHTAVTWLLERYGSPAALRKAGRRKLVEVIRPKAPRMAQRLIDDVFDALDEQTVVVPGTGTLDIVIPPLARSLGSVHEQRRATEAQITLLLEDHPLSKVLTSLPGVGVRTAATLLVTVGDGTSFPTAAHLASYAGLAPTTKSSGTSIHGEHAPRGGNRQLKRAMFLSAFAALHDPASRTYYDKCRARGKTHTQALLRLARQRINVLFAMLRDGTFYEPRTPRLA

SEQ ID NO: 369087 - protein, 386 aa, unidentified
MSQADDLSRSLTAFDQDSTLIAVIEMSLTSWLIAGVIPGVSRAALKKLEAGEDGVVRLLNRWRDEATKVGRHITRVVVAFEAGRDGFWLARWLRARGIEAYVIHAASVAVSREHRRAKTDRLDTEMLKRAFLGWLRGEAEHCQMAAVPTPEEEDARRPNRERDCLVRERTRIVNRMKGALVRWGIRAFNPKLRKAAERLDDLVTPEGQALPPNTLAELRRDLARLALLREQIETIERIRLDRLDQAASEGPHAMVRLIAQVVGVGIETADMLVHEILSRQLRDQKALARYAGLTGSPDESGRRRREKGLARAGNGRVRRGMIQLAWRFLRFQADSALAKWYQARTQTAPNTRKKMIVALARKLLIALWRLATTGTVPDGIALRATA

SEQ ID NO: 369088 - protein, 358 aa, unidentified
MSDATKGALPMIAGLDLGDRQSHLCLLDVESGEVLEESRIPTSSKAFRLRFDSQQPLKITLEAGTHSPWVSRLLEECGHEVLVANPRKLRLIYGGKHKTDRLDAEKLARMARLDPKLLYPLKHRGEDSQAHLALIRSREALVGSRTQLVNHVRGVVKSFGARLPKCSTASFPNKVAGQIPESLKEALEPVLETISLLTQQIKDYNRRLEQLAQEHYPETALLRQVQGVGTLTALAFVLTLEDPSRFEKSRAVGAHLGLVPGTDSSGEHDTEKRISKEGDGLMRRLLVSSAHYILGPFADDSDLRRHGEKIAGRGGKNAKKRAVVAVARKLSVLLHHLWDTGELYEPLYNARRAGKEAA

SEQ ID NO: 369089 - protein, 340 aa, unidentified
MGEITTVGLDLAKHVFQLHGVDAEGATVLRKQLRRAQMLGFFGKLPRCLVGLEACATAHYWARELCALGHEVRLMPAQYVKAYVKRNKNDAADAEAICEAVVRPTMRFVPVKTADQQAAVLLHRGRERLVRQRTMLANALRAHLAEFGVIAPQGLRNVGKLIAIVRDEGDERLPDLARQVLQVLATQIEHVEVAVATLEKQLMAWHKSNPVSQRLATIPGIGPIIATAIAAMVAEPSGFRSGREFAAWLGLVPRQNSTGGKTRLGGISKRGNQYLRRLLINGASANLLRSKATNADPWVIGLRRRRPSMVVAVALANKTARIAWAVMHRQENYQRTVLAA

SEQ ID NO: 369090 - protein, 304 aa, unidentified
MDSVKYIGMDVHKESISLAVMNGAGKIVMECVIETKASMILQFIDGLRGDVQVTFEEGTSAAWLYDLLKPHVTKLVVCDPRKNASMREGNQNDKIDARRLAELLRLNHLNPVYHGEHGLRSLKELVRSYLTITKDVGRVMSRVKAIYRSWAIPCTGKQVYTPRHRAEWLGKITEPGVRRRAEFYYQQLDALRTVRQEVRRELLAEGKKHQAWKRLCQIPSIGPIRSAVLLGILQTPHRFRTKRQLWTYSGFGIETQSSADHRRVDSGQQCTDGSDVQNSKSKMEFHRELQLASRVCRVGVAEKR

SEQ ID NO: 369091 - protein, 367 aa, unidentified
MKKVSTIAARASRNISQPTLIIGFDLGDRNSWYCVLDESGQIQREQRVRTNAKALREVFGEMPRSRIALETGTHSPWISRLLSELGHQVIVANARKVRLIGESRKKDDRLDAQTLARLARIDPGLLCPVKHRSAQAQADLTVIRARAGLVRSRTALVNTARSLAKSYGQRLHGCNVRNMNPEKAESLSPELQAALEPLLNAIESLSERIVEYDDRIENLAQQNYPQVALLKQIKGVGTLIALTFLLTLEDPHRFRKSRDVGCYLGLQPGRRNSGQSEPQMHISKEGDPYLRTLLVQGAQHILGPFGVDCDLRRWGLKLAERGGRNAKKRAIVATARKLAVLLHHLWVSGEVYEPLHNSRRVIGAAAA

SEQ ID NO: 369092 - protein, 429 aa, unidentified
MIMGFTKPIEHFNLQRKKVITMNTLYVGIDVSSKSNVVYLMLPNGDKHSNFSVANSHEGSTLLVKKIYSALTSHSLDTVLIGLEATSVYGDNLVYFLREDATLAPFNRKIHVLNPKQVKKFHDTYNDLPKNDYVDSFVIADCLRFGRINKEVYMGDYRYKALQNLTRARFFAVQNLVKEKQRFMNVLFKKYSTMTQEKVFSDAFSTTALAVYDEFESAEALANMDLHELTDFIIEKGKNRFPDPDAVAKAIQKAARSSYRLPKTVNDSVNQVLSISITSMKALESQIKKFDKAIKALMELLPNVLISIPGIGPVYSAGIMAEIGDINRFDNQASLAKYAGLAWKQHQSGGFEAEVTRLIPSGNRFLKYYLCEAAFSLVRCDKKYSDFYHLKYKEVNRCQHKRALALTAHKFVRLVFRLLKDNRLYCPAK

SEQ ID NO: 369093 - protein, 424 aa, unidentified
MNLTQNDRLKQVTSDTLIVGVDVGSQTHFCRAFDWRGFELSRRVFKFSNTGMGFLTFLRWTEELMNKTEMKKVIVGCEPTGCYWLTFQKFLQDHDIQLVTVNPFTVNRSMELDDNSPEKSDLKDPKTIALLVKDGRFSTSYLPSGVYAEIREASVCRDQIMKQHVRLSNQIQGWIQKFFPEYLECYADWDSTSGLMLLREAPLPQDILKIGAGGINQIWRNAKVRAAGIKRAQTLVEAAQNSVGLEAGEAARLEIWVLVNDYILKAEQLKRLDEYLEEKVKEVPNVEKLLAIKGVGMSTVIGFIAEVGDIGRFTDPKQIQKLAGLEIVKKSSGKKKGQPRISKRGRRKLRRTMYESARALMIWNPVFQDVFLYYRNRTKNPLGGMQAKIAVACKAIRIFYVVLQTGCAFDEEKFRKDIIRPEAA

SEQ ID NO: 369094 - protein, 407 aa, unidentified
MDQHVVIAGVDTHKDTHHAAVITATGQHLGAAEFPTTPAGYRALAAFIAGFGTLVKVGVEGTGSYGAGLTRYLTGAGVTVIEVLRPSRQVRRMHGKSDEIDAYAAAETALAGTNCSVPKDRDGRVEAIRVVTTARRSAVAATTDATLQIRDVLVTAPDAIRSKYRALHGKPLIAALATIRPHDPDDVVGAHTLTAMRAIARRVQQLRTEIDVHDRTLADLVARVSPALIQAKGVGIVSAADLLIAAGDNPDRITGEAAFAALCGTSPVPASSGKITRHRLNRGGNRNANCALHRIAIVRLHTDPRTRTYAASRSAAGKTSKEILRCLKRAIAREVYHLLTDPPQPVNTSQLRPLRQAIGLTIETAARDLHWSMATVSHIERGHSSHRAAITAYRDYLTSQQTAGCAI

SEQ ID NO: 369095 - protein, 354 aa, unidentified
MSQTPSTAIAVIGIDIGKNSFHVVGHDTRGTIVLRQKWSRGQVEARLANMPPCLIGMEACVGAHHLSRRLASLGHDARLMPAKYVRPYSKGPKNDFNDAEAIAEAVQRPTMKFVATKTAEQLDLQALHRVRERLVSQRTGIINQIRAFMLERGIAVRQGIGFLRTELPVILATRTDALSPRILRVIEELAGDWRRLDQRIDSLSGEIDALARQDQACSRLMTVPGIGPIISSAMVAAIGTGDVFSKGRDFGAWLGLVPKQISTGDRTILGKISRRGNRYLRVLFVQAAWVVLVRIKNWERYGLRSWIEAAKKRLHHNVLAIALANKLARIAWAVLAKGRAFELTRTNDAGVRPA

SEQ ID NO: 369096 - protein, 397 aa, unidentified
MYIVGIDIAKRKHEAAVTDGEGTVIIKPFSFTNNCSGYNRLLAMLTKAKLPLDEVSFAMEATGHYWLALFTRLQKEGFRVQVINPVQTNSIRSFYIRQAKTDPRDALLIAEVIRFGHFSESTLHPENIYELRELCRGRHAIVSMQADVKRKVVALLDQVFPEYETAFTNLFGDTSMAILQTCPTPKELSEMPLEELCHLIEVSSHKRFRMAKAQELQALARNSFGFAMAGDVFSTMIRLYAKHLDFLKQQVREMDCKIAEIMETLDTPITTITGIGPTLGAYILSEIGDISRFSSAAKLAAYAGIDPTMRQSGEYNGVRNRMSKRGSPYLRHAIWLAASSAVLHDPALKLYFQKKRDEGKPYMASVGHACRKMVSIIYAVMRDNKAYTPCIPNEISA

SEQ ID NO: 369097 - protein, 411 aa, unidentified
MQVVHGRCCGLDVHKKTVVACVLLTEADGTMQQQTRTFGTMTADLLALSDWLGGLGVTAVALESTGVYWKPVFNLLEEGRTIILVNPQHIKALPGRKTDVKDSAWLADLLRHGLVQASFIPPAPVRELRELMRYRKTLAQERAQEVNRLHKVLEGANIKLAGVATDILGASGRAMLSALTDGEQDADALAELARGRLRAKLPQLRQALLGRVRPHQRILIGRILAHIAFLEESLAALQAEMESYLAPFDEAITLLMTIPGVSAVAAGALVAEIGDDMTRFPSAKHLASWAGVCPGNKQSGGKRLSGRTTKGNVWLRGILGEVAWAAARTRGTYFHAQFHRLARRRGKQKAIVAVAHSILTVIYCMLHDRVPYREIGVDYFDTLDTARIERHHVHRLEQLGYTVTLQPKAAA

SEQ ID NO: 369098 - protein, 266 aa, unidentified
MSSEKYIGLDVHQATISVAVMDSQGKVVIESILETKASTLLEFFAGLRGSLFVTFEEGTWAAWLYDLLKPHVTEVLVCNPRKIPLLKQGNKSDKIDARKLAERLRLHDLKPVYHGENGIRMLRELARSYLTVVKDLSRVMNRLKALYRSWAIPCAGRDVYYRRHRSEWLDKIPEAGTRRRAEQLYQQLDLLQRLRQQARRELLAESRKHAITAKLRKIPSLGPIRCALAVALIQTPHRFRSKRQLWTYSGLGLETRDSGEYHFVKG

SEQ ID NO: 369099 - protein, 318 aa, unidentified
MENISQWIGIDISKATLDVYLRPLGKAMKVANTKEDISKLVETLKSYTVNLIVLEATGGLETELVIQLQEADLPVALINPRQGRDFAKATGKLAKTDAIDAQILAHFGEAMQPQILAVESEESRQLGDLISRRRQLVEMRTAEKNRRERARGKALSDIEAHLEYLDNCLEKLNQEIEELTQANQEWLEKVNLLKTVPGIGQVISTTLVSDLPELGQLTAKQISRLVGVAPINHDSGQHKGKRMIQGGRAQIRATLYMGAVVAMRHNPVIKTFYERLVGRGKSKKLALTACVRKILVILNAMVRQNQPWQLADNLPPCS

SEQ ID NO: 369100 - protein, 347 aa, unidentified
MREVCTIGLDIAKNKFQVHGEDKLGKKVFNKQLSRSGVLPFFANLPVCLVGLEACGGAHYWAREIRKLGHDVRLIPPRQVKPFVINNKTDAVDAQAICEVVRRPTTRFVQIKTVEQQHLAGLHRVRERYVGNRTALVNQIRGLLQEEGVILPQGINHIRKELPAILADQKTRLIVASRSLFENLLTELRMWDEKIEEIEGRLKLMAKADANCTRLLKIPGVGLLTATAIVAHFCDAKQFKNGRQFAACLGLTPREHSSGGKQKLLGISKRGNTYIRKLLIQGARMLCIWWGRTIATPDQWRKLWLQQVIHRRGKFVAAVGQANKTARIIWNILARGVEYSTGMPQQI

SEQ ID NO: 369101 - protein, 421 aa, unidentified
MKEKVRIVGFDCGEDEHSAVLLDASGEFDKRIGVVNGRRQIQEGLAALLLEVGPESQLVVVVESKRSHGRIVADVATELGCELWQVNTVALNHFRDLEGQPRKDDEWDAYLGARMVYLRMGGCREVIETTEEERTLSRLTRIHSRVTEDRKRYVARLRAVLLELAPEMLHAKWKGPRPDSKAMLYLLERWPGFEGLERAQLRSIEKILRQCRYGSKVSDVAKLIRKAAQKISMAAAERSSLTMELDLLVRQIRLCDESTAKVYAEITGCVERHPLGQKLLEMDGIGPVIAGVLVSELFPVARVAAEPRSATYSGVTPLARKSGKSLDHDRLAQGVNKRVLHALYTSAVVAIKHSAVDRAYYQKKLRDYAGHPKPHVAAFIALSRQRHKLIYKLMTTDARYDKEILVASHLERIERDRVAAA

SEQ ID NO: 369102 - protein, 340 aa, unidentified
MGEVTTIGLDLAKHVFQVHGVDAEGATVLRKQLRRAQVLAFFSRLPPCLVGLEACATAHYWARELRALGHEARLMPAQYVKAYIKRNKHDAADAEAICEAIGRPTMRFVPVKTADQQAAVLLHRGRERLVRQRTGLVNALRGHLAEFGVIAPQGLRNVGKLIAIIRDEGDARLPDLARQVLQVLAAQIEQLEAAVAAIEKQLMAWHKSNPVSQRLASVPGIGPIIATALAATVVEPSGFRSGREFAAWLGLVPRQNSSGGKHRLGGISKRGNQYLRRLLINGASANLLRSKATKADPWVIGLRRRRPPLVVAVALANKTARIAWAVMHRHENYQRVAAAA

SEQ ID NO: 369103 - protein, 318 aa, unidentified
MLIHYIDIAKRNFVIAVSSLSKTKTETNNPKGIAHTIEYLKKHKVALVVTESTGGLEIPAAKAIRRAGIAVIIANPRQTHQFAQSQPLTKTDAKDAKMPAFFAQMTAQKEDSQTMPYQPPTEAEEVLEALVNRRNQPADMRTAEKNRLHQVHETQVGSVKQLIAHFDRLIDELDKQIDDHTHTHFDGKAQVAEQIKGIGSITTATLMVMLPELGRLSHKRIAGLAGIAPHPRESGETKFKSRCFGGKSAVRKALYMATVAATRFEPLIRDFYQRLLSEGKPYKVAVTACMRKLLTISNARMRDYFAENDTAENGIRTA

SEQ ID NO: 369104 - protein, 359 aa, unidentified
MQRNKISFKGQKIYIGIDVHAKTWEICVLTESGYKERHPQQASAKTLFDFLKKHFPDGEYHAVYESGFSGFSTYYALKEYGINCVVTHAADVPTTQYEEVMKTDKVDAAKLARSLRAGDIRPIYIREKENIDDRSVIRIRKTIQKQLSGYKARVKHLLHCNGVEIPERFARPGTHWSKAFIKWLKEDVVLLSSSRLSLDLLVKQVETIRQTLLDATKSIRKLAQTDRYRNNYELLISIPGIGVSVAMCILTEIYDVKRFRNENQFASYLGLIPTCHSSGEKTASGEKTFRGNKHLGPMIIEAAWIAIYRDYGLGMAYARYKQSMKPQEAIVKIARKMSNIIFSVLKNSRKYEPYRWDKE

SEQ ID NO: 369105 - protein, 348 aa, unidentified
MRFYTSTHQYYCGIDLHTRVMYLCIIRDDGEIVLHRNMKAEPESLLKAIEPYRPDLVIGVECIFTWYWIADLCAEEGIPFVLGHALYMKAIHGGKAKNDRIDSAKIAALLKGGTFPMAYVYPRKMRATRDLLRRRNYLVRKRADLISHIQNTNSQYNNDRFGRCNIAHKCRREEVLGHFEDPEVLMSMKVDFALIDQLTVQIRAMEKHVLDNAKYHDPQSLHLIRSIYGIGKIISLTILYEIGDIDRFPRVQEFASYSRLVKCSRESAGKRYGTSGSKIGNVHLKWAFSEAAVLFLRCNPEGLKYKKHLEKKHGKAKALSILAHKLGRTVYFILKRRQVFDMRKFLCA

SEQ ID NO: 369106 - protein, 349 aa, unidentified
MVAEVVDYVVGVDTHRDEHTLALVEATTGAVLAQRTVASNGRGYAQALRFAQEQAEGARLWALEGAGHYGAGLARYLSQRGETVLEVGRTPRSKRRLRGKDDRLDAVRAARAALGSEPLPRPRSGERREALRLLLLARRSAVDVRREALVQLRSVIVTAPDRLREELRGLPVGRLLERCSRLRRSTTATPDEAAVRLVLRTLARRIEAASGEADELEGEILVHVRALAPELLDEPGVGPIVAAQLLVAWSHPGRVRSEAAFARLAGVAPLPASSGQTNRHRLSRGGDRQLNRALHTVVLHRRQHDPATRDYIARRVAEGKSRREATRLLKRYLARQLYRLLQNQEPLMA

SEQ ID NO: 369107 - protein, 370 aa, unidentified
MTTTAPNVTVIGGVDTHKHTHYAAAIDDQGRLLGHCEFPATDPGYQALLRWMRAHGEVRSIGVESTGSFGATLTRALTKAGVTVVEVNRPNRVARRMDGKSDRLDAEQVARSVLGSTATAVPKSKSGIVEVIRTLRVTRSGAVKSRTQAFNTLWGVMIGAPSPLRDELVVLTKKTLVNRCLRLRPETSNLLSLVAEPERMLIAGTKTSLRDLAQRWKALDDEVKTLNKQIEALVKHAAPELLELPGVGVEIAGQFLITAGDNPDRIHSEAAFAKLCGVAPQPASSGRTTGRHRLSRSGDRAANSALYIVTIVRMRHHQPTRDYFERRTAEGRTKREIIRCVKRYIAREIHQNLPPAVRLQPAPDTTQQAA

SEQ ID NO: 369108 - protein, 402 aa, unidentified
MIGMVTVGVDPHRQVFTASALDERGRALGHQHFENTLAGHASALVWARGLGSVDRVGIEGASGLGRPLAEYLVSQGIEVRDVPPHKTSLRQRGRHEGKSDRLDAHRVAIETQTNDRLARAFKHSQAAPPDRVHDEIALWHNARTSLRKIRVQLIGELDAMIQALPEALRTQLPARSTVRARINALARLDTNEIINPVDRLRLDLIAHRVTMLREVLAQDKTAEAELAQLVQQIGSTLPGIPGIATRAAAEILLEVGDVRRFTEAGFARFNGTAPIPASSGEGGGSLVRHRLNRGGNRRLNAAIHRAAMIQLRCEPRARELHDQALRGGHTRREAMRILKRHLSNVIYRTMLRDVPIRSRPGGCDTAPPATGVKDGRRPPEGPVLDPGEDGAIMAGPGAGHTP

SEQ ID NO: 369109 - protein, 390 aa, unidentified
MIFVGIDVAKDKHDCYIISSDGEVLNDVFTIQNNMDGFEDLFFKIKTASKDLGKVKVGLEATGHYSCNLLGFLKKRGLTTILLNPLYTSQCRKSISLRKTKTDKVDARTIASMIMSDVSLKPYSNILYHNEDLKSLTRYRFNKVSERSKLKQSVSRLLNILFPELEKLVSTVHLKAIYTLLSEFPGATYIASANLKHLTSLLERASKGHFSKDKAAEIREAARRSIGSHFSAKSLELKHTIKLISELSAQIREIEAEIKKIMDAINSPVLSIPGISYATGSMIVAEIGDFARFDSPDKLLAFAGCSPTTYQSGQIYSSHASMEKRGSKYLRWALINAARFVCNWEPTFAAYLEKKRSEGKHYYVALSHAAKKLVRLIFHLETTGERFIPS

SEQ ID NO: 369110 - protein, 347 aa, unidentified
MKYVSTIGLDLAKHVFQVHGADIAGSPLFNRKLRRGEVLRFFEKLPSCLVGMEACGGAHYWAREIANLGHDVRLIPPAYVKPFVKRGKTDAADAEAISEAVIRKTMRFVPIKTAEQQADAMVLKTRALLVQQRTQSVNALRAHLAELGIIAAGGLPSVAVLMTIVREGEDTRLPAAARFALMAVADQIDTLADQIFKLERAIVTEAKRDEDMRRLTTIPGVGAITAATIKALVPDPGGFKSARHFAAWVGLTPRPHSSGGKERLGGISKMGNPELRVLLVLGATAVLRIARNDDRARPWLKALLARRPFKVAAVALANKMARIIWALLNKGGIYHRPEPLSIAAVAR

SEQ ID NO: 369111 - protein, 368 aa, unidentified
MRIIGCDLHARQQTLAMLDTTTGEVVKITLKHEGDSVREFYSRLPRPVRVGIEATGSMQWFLNLMEELEIECLVGHPAEIRAAEPRKQKHDRRDADLILKLLTENRFPAIWPPSKELQDLRSLLRHRHQWVRMRTRIQNALQSIALANGLRRGPSLWNRDGQSRIASLPLAPHTAYRRSELQAMYEKFEAEIEKLNQRVQEQACGRPGARLLMTHPGVGPVTALATDVFLGDPARFADSKALASYAGMIPREYSSGGRQRLGGLSKQGNPLLRFLWGEAGAHAVRRDPELQRFYRRKLVQKGLGKASVAVARKLGIRLWIMLRDQIEYHEFCRRGQKQQKSSGACAGMPETRYGAKSHWPVDKATRLP

SEQ ID NO: 369112 - protein, 399 aa, unidentified
MSPMMKPQHNKHTLSEELLYIGLDVHAQTVSIAIAGESGEVRNYGSVSSCLSTLEKTMCRIRNAHPGAELRVCYEAGPTGFVIARRFAQLGIDCAVVAPSLIPNRSGDRVKTDPRDAMKLARLHRAGELTSVNVPDACDEAMRGLCRARTDAVQDLRRSRAQLKAFLLRNGYRYSGKSAWTEAHRRYLRELVLPHGAQRVVLEDSLRAITTAEERIQRLEDQMEALLESWPMKPVVEAMMALRGFQTVSAMVIVSELGGAWRFEHPRQLMAYLGLVPTENSSGGRRRQGAISKAGNSHARWLLIEAAQHYRLTPKISKELSKRQEPLSKEIKECSWKAQTRLHSRMMKLYARGKPPNKVIVAVARELAGFVWAIFRFDGAPDEASPGRAASPMISTTTN

SEQ ID NO: 369113 - protein, 439 aa, unidentified
MRKIRENAAGIDIGAKKVFVYIEGQKVKSFYTFTEDFDILCQYLLKHNVKTVAMEATGVYWSILYEILEEAGIDTWLVDGRQTKQVPGRKTDVKDCQWIQELHSLGLLNRCFVAKDDVKELRSYNRLREDHIRSASMHVNHMQKALTEMNIRLKEVLSQIHGISGMKIIEAILNGERNKTILLNMCDPRIIKNKKKEVLKSLNGRYTNTGIFALRQAFDGYNFYQGQIKQCDKEIETIIHRMGNGGLNKNLSTKRKTTRHNKPEVDNLGANLIDIFEGRDATIISGITDYSWMQLLSEIGTDLSRWPTEKHFSSWLGVAPGQHWSGKMNRNKKKSGHPKAGQIFRQIAQGLLASKNIALGSFGRRIRSRKGPAKAVKAMARKLAVMYWRVMVKGVDYAELGIKKYEEQLLAQKQKSVKRMAKELNLQLVNMQPIINSCH

SEQ ID NO: 369114 - protein, 313 aa, unidentified
MAAIEHFVGIDVSKETLDVHTLPDGKVFAFANDPDGIKAICKKFSKIRPELIVLEATGGLQIPVATALSLKKFPVAVVNPRQVRDFAKALGRLAKTDKIDAEILALFGKQIRPEARALKDEQAQELSAFMSRRNQLLRMLVMEKNRLSRSYGSVKDDIEKNIDWLEERLSEINTHLGKLVRASPLWREQDNLLRSVPGVGEVLSTAILSNLPELGKLNRRAIAALVGVAPMNCDSGKFRGKRRVYGGRSNLRSILYMAIMTAIRFNPVIRDFYKRLTEAGKPHKVAAVASMRKLVTILNAMVRLGQPWAHCAS

SEQ ID NO: 369115 - protein, 341 aa, unidentified
MQAPRHIGIDLHRNQFTCCVRLENGRNYLTDWKLEELPRFVKKLRPDDEIAVEVTGNTRLFRDAVAPHVARVVAVDPNQFKVISHSVKKTDANDARNLALYLEKDLLPEVRMKDKTRAQLASLTQTRDTLVKLRTSLKCKVNNILSAHGINLEKEALSSEKKLREILAMKFDPMVGIELEVIVEEIRSLNQRIAKLEKTIADEGSKLEGHKNVTSIKGIGPLSGSILLSVIGDIDDFDDEGKLAAYFGIVPRISNSNETERAGRITKRGSKLGRTTLVQCALIAQRYSPYLKRYYEKIKARRGTGKAIIALARKLLGIIYRTLKNKWVFEDFPNFVLAEAA

SEQ ID NO: 369116 - protein, 334 aa, unidentified
MDFNYFIGTDVSKGKLDIAVYRLKELLYHKEIANEVKGIQLFIQELMKLEGFKLSEALFCMEFTGIYNNLFVYELVRQEANIWLEPASRIKYSLGMIRGKNDKLDAIRIGKYAYKNCDEVRLWTPRRKVVEKIYHLITLRNRLISTKNMLTTPLNEMDLFVDKPVKSMCSKLSNRSVNSLKADVKKVEKTIDKLIMEDTEMSRLVKVITSIPGVGKQTAIGIIITTNEFKDIKDSKKYACYAGVAPFPRESGIFKGRARVSHMANKKMKTVLHMAALSAILYNKDLKNYYERKVAEGKNKMAVINAVRNKLIHRIFACVKQNREYENSYITTLV

SEQ ID NO: 369117 - protein, 388 aa, unidentified
MDILYQSCAGIDVHQATVVVCILHGPLTSTRPKREMAQFDTTTKGLKACHDFLSQFHVEAVGMESTGVYWRPVWHELCDDFELILAQPAHMKAIPGQKTDKKDAHWIAQLTRIGLLPRSFVPDETIQELRELTRQRKHYVESRNRETNRIHKILQSGGIKLTTYIEDIMGASGRNLLQLLIDETPVTPRMIHQSVYTSLKRKVPQLLEALDGYFSAHHRFMLGQSLEIYDFYQKQIDCLEERINGYLNLYERPVEILDSIPGIDLITASVIIAEIGVDMSQFPTAGHLASWAGLCPGNNESAGKKRSTKIRHGNSYLKRCLCQAVFAAKRQKGSPLAERYYQIQSRRGPQKATIALAHQLLKIAYILLKENLTYQEFVLQKRLLETSQ

SEQ ID NO: 369118 - protein, 351 aa, unidentified
MMIIGVDYHPSFQTIAFLMEETGECGEQELNHSDGQAERFYRDLKQRGICVRVGMEATGYSRWFERLLAELGFEVWMGDPAEIKAKRVKKQKFDREDARLLRRLMLENNFPQIWVPGPENRDLRQLLWHRHRLVQMRTRIMNQLQALAMNGGYRWKKKLFSAPGRALLEKLSLAPWASRRRQELLELLDRMNPTIEELTAAVEREARKRPEAMRLMTHPGVGPLTALAYVLIIGTPTRFQRGKQIGTYVGMIPCEDSSAGKQRLGHISKQGSSLLRFLLVEAAQAAARIQPDWRRRYLHLAMRRHKSIAKVAMGRRLAVRLYWMWRNGCEYSPSLEFGSYVGQLGTGHGVQ

SEQ ID NO: 369119 - protein, 346 aa, unidentified
MDYFAGLDASLETVNVCIVNADGSVVLEQKVGAEPQAIVALLKQFGRPLKRVGLEAGPTSSWLFTELRAAGFPALCLECRHVKAGLSAMRNKTDRNDARGIAHLVRLGWFRVVHVKSEEAQQIRMLLVNRNLLLCKLQDIENSVRGSLKVFGLRLGQVTKRSFEARVIELVAGHANIAAITEPLLRVRRVLLEEFCRLDRMARTAARNDAVCRRLMTVPGVGVIVALTYRTGIDLPERFTRSRDVGAHFGLTPRRYSSGQVDYDGHISRCGDEMVRTALYQAAHVLMHHGRWSGLRGWAMRIAKRSGAKLAKVALARKLAVILHRMWINETNFRWTIREPAPAAAI

SEQ ID NO: 369120 - protein, 339 aa, unidentified
MKLYAAFDLHSSNSYLGIVDEKGKRTFKKRLRNEPETIIDTLKPFKSEIVGITVESTYNWYWLVDLLMEKDYRVHLANPCKIQQYSGLKHGDDEDDAFWLAEMLRLGILPEGYIYPKEQRPLRDLLRKRGHLVRLRTSLILSLQNILARNIGTKMNTNALKALREDRVTPLLAGNDDISLAGRVSKDAIDSLSRQIRAIEVVVEKRIKLRRPYDLLLSMPGVGRVLALTIMMETGPIGRFIKVGNYVSYCRKVPAGRFSNDKKKGSGNRKNGNKYLSWAYAEAAELARRFDAEARAYYDRKQRRTNAPIAHGALAHKLSRAAYHIMRDKVPFMPEKTFA

SEQ ID NO: 369121 - protein, 366 aa, unidentified
MLIIGCDYHPGFQQIAFVDTETGECGERRLTHREEAEQFYRKLQERSLRVRVGMEASGHARWFERFLRELQFELWIGDAAKIRTKRVRKQKTDRQDAQLLLRLMVEDRFPRIWVADAENRDLRQLLWHRHRLVQMRTRVMNQLHVVALNEGLRRKKALWRPAGRNQLESLKLAPWASRRRQDLLDLLDQLTPKIQELTRALEEEVEKRPVTRRLMTHPGVGPLTALAFELVIGTAERFHCGKQIASYVGLVPSEESSGDRRRLGHISKQGNTLLRFLLVEAAQVTVRSQAQWRSKFLHLALRRGRKIAKVAMARKLAVHLYWMWRWGWDYGQLEKLGSQGRKSSALMLDWPPVRFGSRGCEVRESF

SEQ ID NO: 369122 - protein, 333 aa, unidentified
MKNEPIKEFVGIDVSKLTLDVHLHVKNLHCVFSNDSKGHRLMFSWIRKQCIKNEELRFCFEHTGIYSLELAMFLKKNSQVIYIVSGLAIKRSMGLKRGKSDKTDAKEIAKYLFQNHYAIKPTELASDAIQELQMHLSFRSNLVKKLASFKMHRKEFGKINESKGYDQIEQVTAEIMDALKKGIKEIEKQIQEIIYTDEALKNTFENISSIKGVGPILAATMIVITRNFTSFETSRQLACYAGIVPFEHSSGTSYRGKNRISSLGNRDLKSLLTMAAISSITYNPELKIYYQRRISEGKSKMSTINIVRNKLVSRIFACANRNSKYVEIYKFAA

SEQ ID NO: 369123 - protein, 415 aa, unidentified
MALKIVYQICCGIDVHKTFVVACIASTNKQGVTTYKRHRFSTFTQGLKELLQWLLDNHCKDVCMESTGKYWIPIYNVLEKDCNIVLAHPKYVKAIRGKKTDKKDAKWIADLFKHDLVAGSFMPPADIRQLRDLMRYRFKLTCFMSSEKNRLQNCLTVSNIQLASVVSDTFGKSSQRILDKILENPDDTSFDIEPLIHGSMKKKLPELELAIDGFITPEQAGKLKVIKKHFEDLESRKAELEKLILALASPYQQELDLILTAPSFKNKFTAIGIISEIGVNMEAFPSAKHLCSWAGLTPTNNESAGKKKSVRVSKAGCYIKPLLVQCANSVVKSEKHPEIRNRYLRLRKRRGHKKAIIAIARMLLTALYNMLKNKEPYNAELYRKSDALPVNREITIEQAILMAQFQGYKIKSAAE

SEQ ID NO: 369124 - protein, 479 aa, unidentified
MPTITQSRVRLKTQSAAPVTALASRDRVEVPTAKRRARRRSEVTETPSTVPIEAQKASENRAILPPSGRIPYGTPTRSVTQLDGAQGRMTMRIVALDLGTKKTSFCELSQGQVVQRLTVSDVCSLEHLLGPDQPPAKVAIEACREAWFVHDLLVDWGNEVVVVDTTRSKQLGIGQHGRKTDRIDAEVLARALESGRIPKAHVLPPQRREMRRVLLVRRTLVENRAQLVTTARGLVREQGVKIPTCHTSNFVSRVRAQQLPMDIAQLIEPMLVLIQLIDTQLVSISERLDALCAQEPTVALLTTTPGVGTVVAACFVAVVDDAKRFHRAHQVESYVGLVPSEESSGGKRRLGAISKRGNSYLRALLVQAAWTIVRSRDKSNPLYLWVAQLIERRGNRIAVVALARRLVGVLWAMWRDGTVYDTEHLAKQHVRGLRGAIQTLEQQKAALAHAAKKTSAKHPRIDSTATPRRKTKTPAAKAA

SEQ ID NO: 369125 - protein, 431 aa, unidentified
MNKLNNNRLKEFRQLKEEIRGSKEYVIVGIDIAKDKHNAFFGTATGKTLFKGLVFENNREGFEKLVVQAEAIKVQNGLKKVVYGMEPTANYHKPLGEYLIKGGHGVVLVSGFAVKRNRGTLDGRWDKHDMKDAANVADLISQGKCQYYEYPTEGLRDLRNLLSLKRRLKRQEHGMRVRIRNHLIAQYYPEMDGYYGRSEREGLAVVRWCLSPQVIAGMKYEEFRRLVGGRYRSLCQEQRLRAIWEEAGSSIGCKVGKAVSFEGKMMVEMVKGIREAIGETEVKIKDICEQYPSYAYLLTIPGFGPDVASKVLGAIGDPFRFQRGSQVLNLAGLDLSADRSGRRSEGVTPVISKKGKAELRYALYQAALIASVRNRYFIEYYTNKLRGREKEKGIKTKMRVKLAAKLLIIAWTLMKKGELFDPEHLNRGYKE

SEQ ID NO: 369126 - protein, 340 aa, unidentified
MEKPVNLQAPAFILGIDVSKDSLDVCLVRVSDNQQLCHKLNNNPSGFRRMKAWLKQQGCEAGPETLCCLEHTGLYTRQVVHYLLARDVQVWMESALQIKRSIGMVRGKDDKVDAQRIARYALLHQREARCLNLSGVTLERLKDLQANRSRLLKALQSIKVTIKELIAVDPVSGKTLEQVNKKAIKGIEKSMEQVEEKMQEFISKDDQLKKKYDLLTSIKGVGKVLAISLLVYTQGFTKMEDGRKLACYCGVAPFEYRSGTSVMGKTGVSKFANKELKHILHMAAINSVRFNEEFRLYFERKVGEGKSKMSVINAVRNKLLHQIVAVVKRGTPYELKLKNI

SEQ ID NO: 369127 - protein, 342 aa, unidentified
MQIATIGLDIAKNVFQVHGVDASERVVVRKQLRRRQVLEFFKALAPCLVGMEACATAHYWARELMKFGHLVRLMPAKDVKAYVKRNKNDAADAEAICEAVRRPTMRFVQIKSTEQQGRLMLHRARDLLMRQRTQVINALRAHMAEFGIVAPQGRQGVKELLLIIAGAEDERLPVDAHASLVVLAAEFTAMQTMIGSIEKRIIANHRSNEASRRLETIPGIGVAGATAIAATVPDPTVFRSGRDFAAWIGLVPREDSTGGKQRLGPISKRGDRYLRRILVVGAVAVLRYARQNPEKYPWLTRLLARKPFKVAAVALANKTARVAWALLAKGGTYRAPALVAAA

SEQ ID NO: 369128 - protein, 355 aa, unidentified
MVSPILAQWTTLSEDFVLLGAIMDTVSLIGIDLGKHCFHLHAQDGSGGMVLRKKLTRNQMFTLLSNFPSCTVVMEACASAHFWARKLQTLGHTVRLMAPQFVKPYVKTNKNDVADAEAICEAVARPNMRFVPIKNVDQQAVLALHRARQGFVRARTAQANQIRGLLGEFGLVMPRGITSIAQHVPQLIEDASNELPGSFRLLIQRLTDHLKELDRQVAEIETQIKAWHHASDASRRLAEIPGIGPITASALVASIGDGKCFSNARQLAAWLGLVPRQHSSGGKPTLLGISKHGDTYLRTLMVHGARAVVRYCANKDDAFSGWLHRLLTRWHKNVAGASMYVGGDRSDYLTAPIPI

SEQ ID NO: 369129 - protein, 340 aa, unidentified
MEKRYIGIDLHRNRFTCCIRLENERTYVTEWALEALARFVKKLRATDEVAVEITSNTRLFHEAVAPHVARVVVVDTNQFRVISQSVKKTDPNDARLLSLYLSKNLLPEVRMKDKDLAQLASLTQTRDTLVKQRSALKNKVNNILSARGLNLAKEALSSEKKLAEVVELPFDEIVRIELRVIVEQIRSLNKSIAELEKTIGEEGSKLEGHKGLSSIKGIGKITGAILLSVIGDVNDFADEGRLASYFGIVPRVSNSNATERSGRIHKRGTKLGRTALVQSALIAANYSPYLKRFYEQVKARKGAGKAIIALAHKFLGIIYRTLKNKWVFEDFPNFVLAEES

SEQ ID NO: 369130 - protein, 352 aa, unidentified
MEIATVGIDLGKTVFHLVGLNASGETVVRKRFSRAQLLRFTGNLKVGLVGMEACAGSHFLGRALRQQGHEVRLMPAQYVKPYVKTNKNDYIDAEAIAEAVGRPRMRFVPIKSDEQLDMQSLHRARERWVRTRTALLNQIRGLLLERGITIRKGRRHAEEALPTILQDAEANLTGMMRQLLARLMSELKQLDVQISEIDALIAGKADDYEACQRLMAIPGIGPITATAIVSAIGNRAEFRKGRGFSAWLGLTPAEYSTGGKQKLLGISKRGNCYLRKLLVHGARSVMQCREKQTPGLRAWLGELVSRCHPNVATIALANKMARMAWALLAKGETYRPALLKSSLEAAAPQLVA

SEQ ID NO: 369131 - protein, 347 aa, unidentified
MRFYTHPHQVYCGIDLPARSMYVCLVNRDGEILVHRHLKAAPEPCLKAVAPYREGLVVAVECIFTWYWLADLCAAQGMPFVLGHALSMKAIHGGKAKNDQIDSQKMAALLRGGMLPQAYVYPAERRATRDRLRRRTQLLRTRAELLAHVQNTNSQYNLPEIGKKLAYKANRDGVAERFEEAAVHKTLAVDRGLITYDDELLKDLELSLLKTAKQHEAQTLYLLQTVPGIGKILSLVLLDESHRIARFPRVQDFASYGRLVKCSQESGGKRLGPSGKKIGHAHLQWAVSEAATLFVRNHPQGQKLLSRLEKQPDKGKALSILAPKLGRAVYCMLKREVAFDLERFLQT

SEQ ID NO: 369132 - protein, 361 aa, unidentified
MTDVDLDRGVIGGVDTHGATHHAAVIDVIGRHIADREFGADSGGHAALAAWLAGHGQVISVGVEGTGSYGAQLARALTAAGITVIEVDRPDRKARRAQGKSDPLDAYAAAMAVASGRAGGTPKTRDGLVEAIRALHVARRGAVKARTATLNQIKALLITAPAGLRERLAPLGTAELITTCARARPGADLGCPAAATKKALRALARRWQLLDAEAGEHERDITALVRTANPALLALPGCGPITAAQLLISAGDNPERMRTEGAFAHLTGTAPIPASSGRTHRHRLSRGGDRQANNALHMIAITRLGHDQRTREYAERRTSEGLSKKDIIRCLKRYIAREVFKALTCTNTTTPGANPQVATTS

SEQ ID NO: 369133 - protein, 427 aa, unidentified
MNETESNKVDEFRQFKSQIRGSREYLIVGLDIAKRKHHGFLGDANGKTILKGLTVENSAEGFGYLLSQVRFYMQRDGFSRVVFGLEPTSVYHKPLAEHLISQGHLVVYATNEAIKKNRSLIDGRWDKNDTKDSANVADLVAQGKCHYYDLPDQRLRDLRSLLLLRKRLKKQVHSCRVRIRNNLVAQYFPELDLFWNNAEAENLAIVRGYLDPARIRQLTCEQFIAQVSTHNGGLRQQRRLRHIWEAAGNSIGCRPGAAMALEAKLLVASLKSIQEQLDHVEKATQRLAEGFEEYGYLKSIPGFGPYVSAVTLAAIGNPHRFENRAQLIRLAGFDLCASRSGEKSNTAVPVISKKGKADLRYALYQAALVASSLTTHFRSHYNRLLEGRQREKGIRTKMLVKIAAKMLVIAWTLMKRKEPFNPAHIQA

SEQ ID NO: 369134 - protein, 347 aa, unidentified
MWKVSLTGSLQKAVVSVGLDYHQAFVQVCVMDASGHVLSNYRCANTWQSVLACVPRDVAVQAAIEACCGAADLADELAAAGWQVTLAHAGYVNRLKQSPDKTDWSDARLLADLLRVGYLPNVWLPPAELRQLRHLVRYRQQLAQQRRSAKQRVTALLRSQRIQFTGRRWTKSWLGAVRNCTELGTEGRWVMDRLLEEIAHVQRQLDQVEDRLRQLTANDPFVQRLLTFAGIGPITAVMLRAEWGQMDRFRSGKQLSRFCGLTPRNASSGLKQADAGLIKAGNSQLRAVLIEAAHRLERHDRRWAELGLSLRRRGKPGSVVAAAIANRWVRWLYHQLRSDLAPATLSG

SEQ ID NO: 369135 - protein, 331 aa, unidentified
MQNQNFAYFIGIDISKSTFDVAILNEDRTTSYVFENSKKGTNAFIRLLKNQKIPLKDTLTCMEHTGVYGKLIIAKLVEKEASFCVEMPIKITKSIGLHRGKNDRVDAVRIAQYASKNVGQLKLYEPIPEILEKVRILLKIRRQLVNARADFNKYPNELELFSPEMGKLAKKNLKKINKNLTGEIERIEGDIKKLILSDDRLNKTIGLVTSVTGIGQITALHLTVFTSFFTKYDNPKQLACYCGVVPFEYTSGSSINRKSRIHPMANRTLKKHLHMGAMAAINHDPEIKAYFERKVEEGKNKMLIINNVRNKLVHRICAVIKRQQPYVKNVA

SEQ ID NO: 369136 - protein, 343 aa, unidentified
MQTIATIGLDIAKSVFQVHGVDAAGQAIIRRQLKRRYVLAFFQKLPPCLVGIEACASSHHWSRELKALGHTVRLMPPAYVKPYVKRQKNDAADAEAICEAVTRANMRFVATKTPEQQSCLMLHRTRHLFIRQQTAVINAIRAHLAELGIEAPVGRNGVEELLNIVADPSDKRVPEVARMCLAALGAQLHRIKEQILAFDRMITAWHRSNEVSRRLDAVPGVGPMLATALVASIADPKAFRSGRNFSAWIGLVPKQHSSGGKDRLGSISKQGDRYLRSLFTAGALAVIRYAKINGAKHRPWLTALLARRPTKVAAIALANKIARMVWAMMARGERYKEPVALAA

SEQ ID NO: 369137 - protein, 347 aa, unidentified
MLYAGLDLSRQRLDVHVLDEEGQTIEVTAATPEVFGLRELVARISRHGDEVTAVIESMNGARFVHDQLELAGWDVEIADAVKVKGLAPLAAKTDKIDAWVLAELGRRDLVPAIWLPDPTVRAERERARFRLHLVRHRTALKNRIHATLIAFGHPVPVSDLFGTRGRELLASLAIPEPWATTLATSLRIVDELGAEIERCTADLQAAGADHPYVALLQTVPGIAWVLGYTIAAEIGDITRFASPKKLTGYTGLCPFVRQSGGRDDRGPLAKNGPKYLRWALIEAATHAARHPAYRDKYEHTKKRLGRQRGSKVARVEIARELSTAIWHMLTKNEPFAPGRPPVMPLIA

SEQ ID NO: 369138 - protein, 354 aa, unidentified
MKTPNNQLDFTGYQLYIGIDVHLNQWTVTIRMRDLELRTFSMDPSPQKLLEHLKKNYPHADYSSTYEAGFCGFWAHRELTKLGIKNIVVNPADVPTTHKEKTQKRDKRDSRKLARELADGSLEAIYIPTQPQEALRLLSRLLVQLSKRNRQLKSRIKQFLHTQGIILPKRSEMSHWSGRFIQWLKSLDFEYDDARYYLDELLIDLQRARKQKTQHLRKIRTRITGNQIIQLLRTVPGVGLVTAFTFYTEIMDICRFQKLDHLIAFIGFIPSVEASDKKEKIIGLTNRCNKYLRYLLIEATWVAVRKDPALTLAFNNLLKNKSKQRAIIRIAKKLVNRMRSVWKNQQQYVIAVIE

SEQ ID NO: 369139 - protein, 389 aa, unidentified
MLLDHPSDGLTAIRTHIAAIFVSLELSRSTWLVTSLSPGKGERMSRHSVTAGDMAELLALFAGLRRKAEVRTGQSYPIITIQEAGLDGFWLHRVLQQNGIESHVVDPASIATPRRRRRAKTDRLDGETLLRALLAYKRGEPRVCAMVVAPSPEEEDRRRLCRERRTLIEERVTHVNRIKGLLFAQGISDYAPLRRDRRTRLEALRTGDGRELPSHLRAQIGRELDRIELLLDQIKSVEAAQDALLAAARKPASEKAAPDPITMLLALKGMGANFAAVLWSEAFYRQFTNRRQVAAYAGLAATPWQSGGIRHEQGVSKAGNPRLRTTMIQLAWLWIRHQPQSALTRWFKERSHQGRKRAIVALARKLLVALWKYVTQGVVIEGAVMKPAA

SEQ ID NO: 369140 - protein, 343 aa, unidentified
MQAVTTIGLDIAKSVFQVHGVDAEGMVVFRRQLRRRQVLPFFKKLSPCLVGIEACATSHHWSRELQALGHTVRLMPPAYVKPYLKRQKNDAADAEAICEAVTRPSMRFVETKTKDQQACLMLHRTRHLFIRQQTAVINATRAHLAEFGIVAPVGRNGVEELLDVVADPDDDRVPEVARECLAGLGVQLRMLKAQILEFDRRILAWHRSNETSKRLDEIPGVGPALATALVASVADPRVFRSGRDFSAWVGLVPKQNSSGGKEKLGSITKRGDRYLRSLFTAGALAVIRYAKIHGTKHRPWLTALLARRPTKVAAIALANKIARMAWAMMAKGECYSEPVALAA

SEQ ID NO: 369141 - protein, 341 aa, unidentified
MELKRIAIDTSKHVFTLHGVDPQDRVVLRRELKRAQLEPFFRKLLPTEVVLEACGGSHHWGRFLSELGHTVKLIPPQYVKPFVKRGKNDRNDAEAINEAASRPTMRFVPVKSAVQQAGIMILKTRDLLVRQRTQLINAVRGHAGEFGVIAAKGTARVEALLERVAGDETLPEAARDMIALLGEQIKDLDIRITALETRMKQAHKANPMSQLLETIPGVGLIGALSLALTVDPGQFRSARHFAAWLGLTPRERSTGGKQRMGGISRAGDERLRHLLVTGATAVIRHVKPGSRNASAWLLSLLERRPRKVAAVALANKMARVAWAMMTSGEAYRGTPAVPASA

SEQ ID NO: 369142 - protein, 340 aa, unidentified
MNEITTVGLDLAKHVFQVHGVDAEGTTVLRKQLRRGQVLAFFSRLPRCLVGMEACATAHYWARELRALGHEVRLMPAQYVKAYVKRNKNDAADAEAICEAVGRPTMRFVPVKTAEQQAAVLLHRGRERLVRQRTMLVNALRAHLAEFGVIAPQGLRNVGRLIAIIRDDDDARLPGLARQVLQVLAVQIEQLEAAIAALEKRLMGWHKSNPVSQRLATVPGIGPIIATAIAAMVAEPSGFRSGREFAAWLGLVPRQNSTGGKNRLGGISKRGNQYLRRLLINGASANLLRSKATNADPWVIGLRRRRPSLVVAVALANKTARIAWAVMHRQENYQRMATAA

SEQ ID NO: 369143 - protein, 322 aa, unidentified
MSGSNQHCAGIDVSKGTLDIVISSTASQFTVPNDTDGLNQILKEPKRNGALLLLMEATGGLESGVACYLKSEGFDVAVINPRQARDFARAMGYLAKTDRVDARALLQMAEVINLPPEREKYIHPLPDTHRQFLAAMVVRCRLLTIMLTAERNRLHPSNLLSQRSIRSIIKALKDESARINGEMADHIAKSFSDISALLGAVKGVGAATVAVLLAEVPELGSLSRREIGALIGVAPVNRGSGTMRGRRTIFGGRASVRTALYMSALVGTRHNPVIKKLYERLVAAGKPKKFALTACIRKLLTILNAMLKKNEAWDSSFYRHAS

SEQ ID NO: 369144 - protein, 330 aa, unidentified
MKNYKEVVGIDVSKKTLDAYCYHGQSHKVFTNDIGGYKSLIKWVFKVVKTTEVFYCFENTGYYSLKLAHYFSGQNIVYVEESPLRIKRSSGIVKEKTDRLDASLIARYAWMYREELNPSTVKSSSHLELGRLLALRDQLVRNNAGLKGTLKEMKVLLTSPTTDAGCVSLKRSIDYLEKQVKSIEIRIKAILSEDSSMEKNFGLLTSLKGFGLVVASQLIYHTGNFTRFDSWRAFSSYCGTAPYEHRSGTSIHRRKQCHYLGDRKMKSLLSMASVSAIQHDSELRLYYKKKLAEGKDKMIAVNNVRNKLIARAFAVVKRGTPYVVLQQHAA

SEQ ID NO: 369145 - protein, 408 aa, unidentified
MGRAAEIVAPSSSLRTDGGFPVAQVNDLSRSLTAFDPISTLVVVVEMSKASWLVSGVVPGVERQPLKKLEPDATALLRLIERWRNEAVRAGRPISRIALAYEAGRDGFWLARWLIARGIEAHVIHSASVAVSRERKRAKTDRLDAAMLMRVFLGWLRGERGHCGMVAIPTMEEEDARRPSRERESLVDERSRITNRMKSALARLGIRGFKPHLRKAPERLAGLRTAEGTGLPANIIEEFRRDMARLALVREQISSIEKTRAERLERAPDTGPHAMVRLLARVIGIGIETADMLVREILSRKLRDRRALARYAGLTGSPDESGLKRREKGLAKAGNARVRRGLIQLAWRFLMFQKDSALAQWYRTRTEGPSGARKTTMIVALARKLLIALWRLVTTGEVPDGVELRPAA

SEQ ID NO: 369146 - protein, 472 aa, unidentified
MEKEKKTIYIGCDVSKGYADFCILNENKELLVKDFQLDDTDRGHSKLKSIIKDVFNKTPDIEICSAVESTGGYENNWYNTLKKLSESYNLKITRLNPWGVNLNQKAGLKRNVTDAISAFNIAEYIIDHSDNVQYKQDDSFASLRCYWNLITMNKKHRKELINQLEIALYNANPTLMQYRKSKFPNWLSELLISYPTATDLANANIEELIKIPNIKISKAEKLITEAKQSVASRTDAFTKRYIIETVTQIKALDMTIKNDIDTVEQELKNTKQYEEELTVLKSFKGINTISAIGILLEIGSIERFKNAKAICCYFGVQPKFKQSGDKTSGVHMSKQGSKIMRGILFNITKGAIVYNPVIKTTYEKKLSEGMSKMSAIGVCMHKTLRIIYGMLKHMQNFDPNIDKLNTERSNKKCQDKYNQSLVYTIKARRFQTFDPSAPISKIQNKKRKELNSSQCATNTHTTGSKNSFPVSS

SEQ ID NO: 369147 - protein, 354 aa, unidentified
MEAELMILVGCDLHTRKQQVALLNTDTGELRDQELSHVGNDVERFYAALSPPVTVGIESTGYSLWFHALLQRLGHTLLVGEAAKIRAMVVRKTKTDRRDARHLRDLLKDDRFPVVWIPDPTTRDLRALIKHRLRLVRIRTMVKNGLHAIALNQRLALGPSLWSRQGLAQLQALVLLPHTRRRRDDSLDLLHWLNRHIDELDLQVATAAAADPDARRLMTHPGVGPVTALATVLVLGPVGRFPGSKHVVSYIGLAPTVNASADKCRLGHISKQGSALLRWVLGQAAPLATRGDAGLKRVYFAVLRRRGRPKAKVAMARRLLVRLYVMLRDQIDYDEFCRRGRARHGGLELARTPV

SEQ ID NO: 369148 - protein, 321 aa, unidentified
MSTYTEYFGIDISKQTFDVVNKSGKHWQYENTSKGFLKFKRTIKAKSICVMEATGIYHLPLAKYLHSKDINLSVVNPTRIKRYSQMMLNRNKTDRSDAKMISSYAQNQAIALWNPAPELIEQGKDLVQIIEQHIEFRAGLKNKKSALKSKKACKSLIEIVVNQIESLSISIAELQEKLIQMVKEYDLELLQNITSIVGIGQNTAALLILASEGFNSFDSAKQLSSYFGLAPTEYTSGTSVKGKRKISKMGNPLVRKKLYMCSLQASMYNKACMDLYQRLLAKGKPKKVALIAVVNKLLKIIFAIAKSGLPYDKEYRSYIAR

SEQ ID NO: 369149 - protein, 356 aa, unidentified
MSRDIQYIGMDVHKEATVIAVLNGTGKVVMESIVETKASSILQFIHSLRGELHVTWEEGTWAAWLYDLLKPHVQQVLVCDPRRNALLKEGNKSDKIDARKLADLLRTGMLRPVYHGEHGLRTLRELGRSYRTISQDLNRVMNRIKALYRGWSIPCAGTQVYAPRYREEWLHKIEQAGVRRRAELLYQQLDGLQTLRRTLRPELLAETRKHKAAKLLRQIPCIGPIRAARLIALMQTPHRFRSKRQLWTYSGLGIETRDSAQYRFVRGQLQRTKKPQQIRGLNQNHNHEMKEIFKGAATRASCGVGPLRDFYVALLAKGMKPEMARLTLARKIAAIALTLWKKEERFDAEQLKPQAA

SEQ ID NO: 369150 - protein, 547 aa, unidentified
MPGYEGGRISGHLGVIPTPREDTRSGRVIMKYRVLGLDLGIRAPSVAVVADTDGTIIGNTVRFELGIDELKGVEVAALKDAKEGTKLHVIMEQTYPTSEYVTAFFLGRGHKVSFAKPNQVKEFRKCLSPKVKTDDVDAYVMARLPWLDPNQLARTYVPPPEIRELKIQVSQRASMVKQLVELKNQLIAYTNAVWPGIARAFGDFDSAHARSFLREQRPQNIAMLQVDELAQLLKDRGQIQQCYAKRLAGKLLAIAQRTLGLHQLLPEEQIESNRAHTIELVDMVEELEARIRIKEKRLDEAYVRCDPQRLLVSIPGIAEKTAPTIFCYFGEPERFATTRKAQGFVGMFPETDASGTSDRKGTHITKAGPALLRRDLFLAADHFRRNDPQGAKLYHDQMVHHGKHHNSALCIIANRSLIPRILAVLREQRPYELQDFEGHSITKTEARELAEKWKVPEEVRKRLRNKKTVTQERWEAPPSVTSEPKAPRNGRPSQPADPNPETLSLTKDQLKMLVFRSLEQMLNSGGNVEEIRLQLKKEAANLFQERA

SEQ ID NO: 369151 - protein, 354 aa, unidentified
MLHVGLDLSRRRVDVCAIGETGELVGQFRSPVDRDGLFGLSRRLEPYGEQVRAVVESMNGARFVHDELTAYGWRVLVADAQRVKGLAPLACKTDKVDARVLAELSWRDLVPAIWLPTAGVRCERERARYRMHLVKHRTTLKNRVHSTLIAHGHQAPVSDLFGAQGRRLLASLELPDPWAGTTTATLELIDDLDRRIAGIERELQRAGAEHRYVPILMTAPGIGWILAYTIAAEIGEIERFPTAKRLVSYTGLCPRVHQSGEVDLRGRLSKHGPRYLRWALIDAAAHASRHPIYTERYQQIRRRVGRQRGSKVAQIDLARRLAEAIWHMLTKNEPFTPFTPTGATRPLAATTAPH

SEQ ID NO: 369152 - protein, 407 aa, unidentified
MAAVMIGVDPHKGSHTAVAISAAEQPLGELCVRASAGQAGELVAWAAAWPERTWADLGAAGLGHLLAQQLVAAGEQVLDVQPKLAARVRLLQAGDTNKNDPNDALSVAVAALRSTAPRLVRAEDCSAVLKVWATRHRDLARARNQVACRLHAAACDLVPGGHRKEISAAQAARILEKATPSGAVALARAELAAEFLTDLRHLDAQLRLTKKKLAAAVRASGTSLTEVFGVGQVIAGTIAGDCGDVSRFPSRDHFAAYNGTAPVEVSSGNRKIHRLSLRGNRRINHAIHMAAITQISHRHSDGRAYYDKKLTEGKTHKEAVRCLKRRISDAVFARLQADARQTSASQPVTGPGGQPGNDSASSAAGSHPARQLFGQATPGPGTSLRPSTTTPTPSPSKRTSKKTRPAA

SEQ ID NO: 369153 - protein, 420 aa, unidentified
MTTSNSTRAAAVLVAIDIAKVRNEVLIEAPGHKRRRRLLVLNTRAEHDHLIEVLQAYGRPVVCAFEATGNYHRPIAWRLAEAGFEVRLVSSLALARTREALHNSWDKNDPKDAQVMLHMLRIQATQVYHDPLRAGINDVQELSKTHEAIARAKTEIQHRILTHYLPLYFPEIDRFRGNSRSDWFFAFLHAFPTPASIMVLTKEEFVTAAWDVVGRKVSKTQILMDIYETARSSIGLPLPLDAPAIRMFRMVIDEARSLIRQRNEIEAQADELLRHSPDYQLLRQIPGIGPINALTIIAEAGDLRRFGHHRQFLKFCGLDLSTQQSGQYRGQTRLSKFGNARLRRTLWIAGQVAIRQRENGFRHKFERYIARDRDNPDLRRKAMTAITAKMARVVHAVIKGGSDYRPFIEGRVPGGRTSVS

SEQ ID NO: 369154 - protein, 337 aa, unidentified
MEQRQYVGIDLHRRRSVIVRRSADGETLATTHIDNDPLTLAAELARAGEHPEVVLEATYGWYWAADVLAECGASVHLAHPLGNNWGHRRVKNDERDATDLVDLLRMGRLAEAWIAPPALRELRELVRYKAKLVHLRTSCKAQIHAVLAKEGVRVTASDLFGPSGRVFLDGCGLGESYAVRVTSLLKLLEVLDWEIDRLAERVAAWLVDDAGYWAIQAIPGVGPVFASVFVAEIGDVHRFPTARHLCSWAGLTPTHRESDTKVHRGHITKQGSRLVRWAAVEAVARQQQANPIADHRRRVADRRGKNIGRVAAARKLLTLVYYGLRDGDIRCLAGTAG

SEQ ID NO: 369155 - protein, 374 aa, unidentified
MTVIIGMDPHKRSATIDIIDPTGKTLADGRYATDKPGYAQMLTTAKQFTDRVWAVEGCNGIGRHSAHRLVDDGETVIDVPAQVRVFATGNGRKTDPVDAHSVALAALRAPNLRRVLADPELIALGLLSDRRDELGRSRTQIVNRAHRLLLDLIPGGAKKFRTATQARALLASLTVDGPVERVQKRLVSEQIDELGVVDGKIEAADKELRELITDRGSTLMDLNGIGPSSAARLLADTGDIHRFATRDRFASWNGTAPLDASSGDQQRHRLSRSGNRKINRVLHIMAVVQLRHRTAGRAYYDHKRLAGKTSMEAVRALKRRISNVIYTRMLADQDKRELAGPGGQSGTTTGSSATGFNPHSDPSDKPPPRTHETA

SEQ ID NO: 369156 - protein, 425 aa, unidentified
MNYKQNEKINQVKESTLVVGIDIGSTTQYARAFDWRGIELGKVFPFSNSREGFESFKAWMQHLQDKYKKLDAIVGIEPTGHYWFDLGAYLEDEGILLVMVNPYAVKQTKELDDNSQSKNDRKDPKVIAKLVTEGRYSAPYTPDGVYADLRIMVANRKRLIREMTQIKNRFARWFAIYFPEYTDVFGDYEAQSSMLLLKKVCTPEAIVELGAEKINQIWRDAKLRAVGMKKATTLCETAKRSIGLKKGSSAAQYEMKLLLEDYEYKKAQLDAVMEEIEKLCRKIPESEQMLAIKGIGVITVAGFLAEVGDVRRFESPRQIQKLAGLSLRENSSGKHKGQTTISKRGRSKLRAVLFNAAIPLIAKNPEFKSLHEYYTTRANNPLKKKQSVIAISCKLIRVFYAILAKGVTYDAQKLISDIHRQPQVA

SEQ ID NO: 369157 - protein, 444 aa, unidentified
MVCSGMILIREVAYAPVIMGISKPADLKSPCGEVKIVNPLFVGIDVSSRSNVAYLMKPDGSKHSSFSVQNNLGGAKLLSERIVSALNSMRLSDVVIGLEATSIYGNNLVYALREDGSLGQFQRKIHVLNPKQVKKFKEAYPDLPKNDFVDAFVIADHLRFGRIAKEVYMDDYRYQALRTLTRARFDVIQNLTREKQRFANYLFLKCSGIAQEKGIQNTSATTIALMEHFETVDDLANADLDELTDFIAQAGRGRFADPDVVAKVIQTAAKGSYRLPKTVNDTVNQAMSVSIASMRALKEQAKVLDKAIEQQFEIIPNTLTSIPGIGKVYSAGIIAEIGDIHRFASQASVAKFAGLVWTQHQSGEFEAEHSRMIKSGNRYLRYYLLEAANSVRRCDSEFRRYYDLKFNEVNKYQHKRALALTARKLVRLVFRLLKDNRLYIPPEN

SEQ ID NO: 369158 - protein, 408 aa, unidentified
MRIIGLDIHRAFAEAVTWSDGKITRVGRIDMRRERLSAFAATLSREDVVVVEATGNAAAVASVIGPHVKRVVIANPKQVRLIAHAKIKTDTMDAGVLAQLYASGFLPEVWIADEPTQALRRQVTRRNQIVRQRSRLKNVIQSILHAHLIPSCPHQDLCGPRGRAWLAEQVVPEDERLAVERHLREFDRLGEDLKVIERDLARSALADESVTRLMTIPGIDMVVALALKAAIGDIARFERPQKLVSYLGLNPSVWQSGPGPAYHGRITKRGRGHARGMLVEAAWAAARAPGPLRAFFLRVRARRGQHVAAVATARKLAVLIWHLLRKGESYLWARPALHAKKVRDLELRAGHKAARGQKGAAHAYNLRSHREQERRWVEQAETAYARFVAGWNPRGPKARTGAATEERR

SEQ ID NO: 369159 - protein, 420 aa, unidentified
MRNAGIHANSLLEVRRMYNAVGIDVSKGKSTVAVLQPGGTVIRKTFDVSHTSQNLNELADYLSSLDGTTKIVMECTGRYHEPMVKALSEAGLFISIVNPHLIKNFGNNSLRKVKSDPADARKIARYTLDNWTELRQYSGMDNTRTQLKTLNSQFSFFMKQKVAAKANLIALLDNTYPGVNKLFDSPTREDGSEKWVDYAYSFWHADCVRKIGLKAFTERYMSFCKKHHYIFQQDRPEKLFNASKELVAVFPKEKTYKLLIQQSIQQLNLASEHVERFRREMNELASTLPEYSTVMGIYGVGKTYGPQLIAEIGDVSRFTHREALTAFAGVDPGVDESGQHKSKSNRASKVGSARLRKTLFQIMTTLLQNAPEDDPVYRFLNKKRSQGKPYYVYMTAGANKFLRIYYGKVKECLQNLEQTE

SEQ ID NO: 369160 - protein, 326 aa, unidentified
MNVGIDVSKASLDVCLLVANQSRLFKIKNNVKSIKSFFTKILKQNKGLEVSICMESTGYYNWPCYEALESLEMKLFVVNPLHLKRSMGLTRGKTDPIDASRIAKFIALNKQDLKPTLIPRKQIRVVQALLAQRNRLIETKKKFSVSTNELTFIADKELYKTIKKSSEKMIKEIEIQIAVVEKELNMIIQEDVELKQQYAFITSVQGVGKVLAWTILVKTNEFKSINDPRKLACYAGVVPFEYKSGTSIHKKPRVSFMADKTLKKLLHLSAMRVIQLKGDLQTYYQRKVNEGKNKMLVLNAVRNKLIARICATVKNQRNYEVSLLLS

SEQ ID NO: 369161 - protein, 388 aa, unidentified
MIYVGIDIAKLNHFAAALSSDGEVLIEPFQFTNDNDGFCLLISRLSSFSKDELIIGLESTAHYGNNLLLFLVPKGYKVVLINPIQTAVLRKNNIRKTKTDRVDTILICKVLMTAQPLRFVSLQDIGLMQLKNLGRFRLVSVKQRTRLKIQLTSYVDQVFPELQYFFKSGIHHKGCYSLLKEASSPASIASMHLTHLTHLLSSNSHGRFKKETAVELRVLAQKSVGNSDKSLSIQIAQTVEQIELLDSQVERIESEMKDIVSSLDSVIMSIPGIGYVNGGMILGEIGDIHRFSNPHKLLAFAGLDPTVYQSGNFQAKRTRMSKRGSRAFRYALMNAAHNVVKNNLTFRSYYDQKKSEGRSHYSALGHCAGKLVRIIYKMLYDDVTFDLK

SEQ ID NO: 369162 - protein, 390 aa, unidentified
MFIVGIYIGKNNHEATIIDETGAIIGKSIKFTNSHSGANKLIEQINKNIGNLQVIFGLEATGHYWLSLYSFLLEKGCVINVINPIQSDSFRNLYIRQTKNDTKDSFIIAEVIRFGRFTNTQLADEKILSLRQLCRYRLSLVDSVSELKCRIITVLDQVFPEYEKLFSDTWGISSKKLLEKYQTPEQILEIDTGKLAEFLREHSRGQLGIVKAKKIQDAAKNTFGIKFAQDAFKFQLKQLIKQVLFIEEQIKDLDVEIEFYYTKFGSHLESIPGIGKVTAAIILSEIGDIKRFKSAKGLVAYAGIDPTVRQSGQFLANNNRMSKRGSPYLRRALFLCASTCTLHESPLNDYYLKKRSEGKHHLTAVGAVAHKLTHIIYAILRDNKDYEPMS

SEQ ID NO: 369163 - protein, 385 aa, unidentified
MNSKAFVPRDYDVFAGLDVDKKSISVTFTNHQGFIRSLRVPYSAQHLVNHVRKHFPDQKVAFAYEAGPTGYGLYDGIVAQDYPCLIASPSMIPKAPGQRVKTNRLDSRGISENLRGGQLKSIHVPAVLYRELRHLTQLRDTFVSAMVAMKQRIKSLLLMEGLEFPPAPAGSQWSFMVKAKLRKLPCSSTVRFKLDELLDSLEFNEKRVVKTTQQIRRLCQNDAELSRCIKYVISVSGIGQIVASQLLARLGDWRELRNVRQLGAFLGLVPTEHSTGERTDRGSITHSGDPRLRSKLIQAAWSAIRKDGELREFFRSVCQTHARPVASRVAIVAVARKLTVLISVVLMEQRPYVVRKKVHSAPLTQEETVPQGTPRRQAEPGAKNS

SEQ ID NO: 369164 - protein, 341 aa, unidentified
MQDVTIVGIDLGKNTFHLHGQDRGGKAVFRKKLGRRQLVEFFATFHACTVVMEACAGAHHMARLLTTFGHEVKLISPQFVRPFVKSNKNDFVDAEAICEAASRPTMRFVTAKTESQQTLSALHRLRESFVRDRTRTINQMHGLLLEFGVSLPVGKASVARLPAFLSEHSLPPRLIAILQRLHEHYKYLDSEVGHIEKEINAQLADDELGQRLLTIPGIGPITASVLAAEMGDGKQYRCGRDFAASVGLVPRQYSTGGKATLLGISRRGDKNIRRLLVTCARAYMLRLEGRTGQLADWVRAMLTRRHSNVVACALANKLARTAWSMAAHGTAYCAGLTVAAD

SEQ ID NO: 369165 - protein, 466 aa, unidentified
MKIYVLGWLGAIKLYPYHVPGSVFIVFMEPYRKELTMYNKNYISVGIDVGSAFSFMTIVAPDGSVIQKPFKITHNKPDSLEKAVSAIKKAEELHSLESRTFLESTGIYHFPLFCYLVDCGFHVSIINPIITHSANNTSIRKVKNDKVDSIGIAKLGLSGDIPVSQFPAKLVLEIRSLTRKYYDLTDERSAHINKLKGDLHTVFPQYLDIFCDVTGKTSTMILRQYGTPDKILRGHKKTMIEKISKASRKGLSKAAERYEKLCAAATAAKTFGCQIDSIYFNISLTLDLIEKLDSALDSILQRIHQLVTFNKSEKFIQQIKWLDTIKGVGFLTAVTIMCEIGDFSAFRNPKQLFAYFGLDPEVNQSGKFVGTEMHMTKRGSRIARRAVFAVALASIRTKRNGEGINPYLREYYEKKSGQKPKMVALGAVMHKVCNIIFAVLRDEKEFELRSPEEHCRQYQRPALQAA

SEQ ID NO: 369166 - protein, 413 aa, unidentified
MEGLSPLYRRVAGIDVHKMLHVVTAVIEHPDGTIEQQSREFGGFKRDCRALASWLLELDVELVVMESTGMYWKSIYAHLERAGIQAWVVNARFVKHVPGRKTDMNDSQWLAVLARFGLVRGSFIPPQDLRELRLVSRYRRKLTAMRASEINRLHKILDDGGIKPGGVVTDINGLSAREMVAGLIAGKPITALPDMARGRLKLRREDLQAALDGDLTARHRFILEHLHEHIEMLERSLAQLDAYIFAAMTPCQWAHRLLQTVPGIDQIASALILIEIGDDMTRFGSADRLAAWAALCPANNESAGKRKSGRIGKGSSVIRYIMCECANSAWKTRSSLAAKYRSLMVRKTHKKAIIALAHKMIRLIFLLLTRKVAYHDPQIDYQAIGAKKNAPRWIKQLKAIGQWPDEASASVTT

SEQ ID NO: 369167 - protein, 429 aa, unidentified
MNLRPIAGIDVGKFFSEMAILSPSNEVVARMKIHHDSSADVKRAIELLEKMEKDFASRPFVVMESTGHYHKILFHSLCKAGFEVYVTNPIQTDSIKNIGIRKVKNDKVDARKIALLHRFQELKSTNIPNEDIECLKNLCRQYYKLSDELTVYKNRLTGIVDQVMLIFKDVFPNSFSKAAIAILEKYPTPEHILKANKDDLVSLIRENSHKSLEWSTAKYELLVSKAREFAPLSINNPSNVAMMGVYISMIKTLDENLAKILKAIRQLITEDMAKDTPMLSLTLELLQSIPGIGLLTAATILAEVGDFSAFSKPGKLVAYFGVDPSVMQSGEFIGTRNKMSKRGSRLLRRVLFTAALANIRTKRDKKPCNPVLMEFYKRKCQSKPKKVALGAVMHKLVCIIFAILRDRKPFELRSPQKHAQMLAAKREAA

SEQ ID NO: 369168 - protein, 354 aa, unidentified
MSQKLNSAVAVTGIDIGKNSFHIVGHDQRGAIVLRQKWSRRQVEARLANLPPCLIGMEACVGAHHLSRKLQMLGHDARLMPAKYVRPYSKGQKNDFRDAEAIAEAVQRPTMKFVATKTAEQLDLQALHRVRERLVGQRTGIINQIRAFLLERGVAVRQGLRYLRAELPGILATRTDVLSPRMLRIIEDLAGDWHRLDERIAGLSGEIEALARQDQACTRLMTVPGIGPIISSAMVAAIGSGDVFSKGRDFGAWLGLVPKQISTGDRTILGSISRRGNRYLRVLFVQAAWVVLVRSKQWERYGLKSWIEAAKKRLHHNVLAIALANKLARIAWAVLNKGRAFECVKRDAMASRPA

SEQ ID NO: 369169 - protein, 353 aa, unidentified
MQIVGALDVHRRQITFKTIELATGEVRRGRITPAVRQSVREWLAGFAAGEAQFALEGTTGWRFVVEEIERAGHRAHLADPAETAAKRGRKRRAKTDNADCDLQLKLLLAGELPGSWIPPAHILELRTRVRLRKTLIDQRTAWQQRLQAQLFHQGVPAGLRPRTRAGRAALARAELSPAGRELVELALRMIDAIDRELAPLDRQLCSFARRQPGCRALIARLYGVGPVSATAILAELGDARRFARSDDAVRHSGLDVTVYQSDEKRAPGHLSHEGPELLRWALFEAALSAARAGSPDHAYYLEVAERIDHNRACLSVARKLCRRAYHILRELGDEALAPVAGDPHAEEAIAAAA

SEQ ID NO: 369170 - protein, 335 aa, unidentified
MNEFWIGIDVSKRKLDVACLDVRGKIKSRVFANDAAGHAALKSWLLERGASTDTAHLCMESTGPYSEPPATALADAGWKVSVVNPTRPKAFAQTSGVRNKTDKSDAALLARFCAKLAPELWSPPSIEQRKLRALVDRLQALKDMHLQESNRLEGQELLAQESSVKSIHEHLAWLNARIAELKREIDDHIDSNPTLKHDADLMTSVPGVGATTVAKVLAYVGDIRRFRSAKALSAFIGVTPRQKQSGTSVRGRTTISRAGHASLRSALFMPAMVALQHNPTIKAFGERLGGNGLTRKAVVAASMHKLVHLLYGVVRSGLPFDPIRARPRIDIQVSI

SEQ ID NO: 369171 - protein, 346 aa, unidentified
MTTLERARRVTGGVDTHLDVHVAAVLDDIGGLLGVEPFAASRAGYGQLLQWMNSFGIPARVGVEGTGAYGAGLARYLQAAGVEVIEVDRPNRQARRHHGKSDPADAVEAARAAHNGRVQAVAKSRNGKVEAIRTLVVAKRSARQARIKALNQIRHLSFTGPDELRARLAGLVTARLAEQTAALRPRPGAEVVAYATRVALRTLGRRILALDEELAALNELLAELVAAAAPQLLAVHGVGVDTAAALLVAAGDNPERLRSEAAWAHLCGVAPLQASSGKVTRYRLDRGGDRQANQALWRIVMVRMSTDDRTRAYVERRTKEGRSKREIIRILKRYVAREVYRLLSRP

SEQ ID NO: 369172 - protein, 369 aa, unidentified
MQTVRSFVGMDVHKETISISVAEDGRNGPVRFIGVIPNRPDDIAKMAKRLAKHGELDFCYEAGGCGYNIYRQLIALGHSCTVAATSMIPRKPGERIKTDRRDSQKLAILHRSGDLTQVWVPDATHEALRDLVRARVDASMHLMRCRQQLLAFLLRHGRSYPTGKHWTQRHRSWLAGQAFQLEVHRIVFQDYVEAVWTAQERRDALIERIGAMTASWSLGPLVEALRGLRGIDLLSSATFLATTGDLSRFESPRMLMGYLGLVPSEHSSGGSIRRGGITKTGNREARRMLIEAAWSYRYPARVAKEKAEILVRLPKSVRDIAWKAQTRLCARYRTMIARGKKPTVVVAALARELAGFIWAIGQEVRLSGA

SEQ ID NO: 369173 - protein, 387 aa, unidentified
MPQPNDLSRSLVALDQNSTIIAVVELSQSSWLVGGMLPGIERQPRKKLEPSPERLFALLHRWRDEAVKAGRTITRIALAFEAGRDGFWLARWLEARGVEAHVIHPSSVAVSREHRRAKTDRLDTELLKRGFLGWLRGERGHCSMVRVPTLAEEDAKRPNRERECLVKERTRLVNRMKGTLARLGIRNFRPTLRKAAEHLAALYTPEGSPLPPNVSAELERDIARLGVVIGQIKQIEVARQRRLEEQPKSRPHAMVRLLVRVVGIGTETADMLVNEVLSRPMRDRRAVARYAGLTGAPDESGAKRREQGLAKAGNARVRRGMIPLAWRFLRFQKDSALARWYQARTADRRAGTRKTMIVALARKLLIALWRFVTTGETLEGVVLRPAG

SEQ ID NO: 369174 - protein, 339 aa, unidentified
MELYSGIDLHANNHVVGLTDKEGKRILKKKLINDAELTLNLLEPYREELVGVVVESTYNWYWLVDALMDHEYHVHLANPSANQQYSGLKYRDDNHDAFWLADLLRLGTLKEGYIYPKQDRPLRDLVRKRWHLVKLRTSLLNSLKNILARNFAISMRASHIKNESLDTLVSRLPAEDNIALVIRTSKASIDFLTVQIEEVESVVVKQAKEKPSYEKLLSLPGVGVVLGVTIQQETGDASRYREVGNYVSYCRKVPSKWSSNGKTKGRGNPKNGNKYLAWAFSEAAEHARRSDPASRKFYNHKLNESNEAVAHNALAHKLARAAYYLMRDNVAYDEKKLFG

SEQ ID NO: 369175 - protein, 350 aa, unidentified
MIIIGVDFHPEFQQIASVDTESGEFEERRLQHREEAERFYRELGSRGVAVRVGMEASGHARWLEHLLKELQFELWIGDAAEIQTKRVRKQKTDRQDAQLILKLLLEDRFPRIWVPDAENRDLRQLLCHRHRMVQARTRIMNQLQAVALNEGLRCKKKLWRERGRQQLESILLLPWASRRRSDLLQLLDRLSPTIAELTDAIEQEAEKRPEARRLMSHPGVGALTALAYVLIIGDPERFRCGKQVASYLGLVPLEKSSGRRRRLGHITKQGSSMLRFLLVEAAQATVRSDPNWRNKYFHLVMRRGRKTAKVAMARRLAIRLYWMWRGGREYEQQIKFGSHAGQPGNRYGVQ

SEQ ID NO: 369176 - protein, 364 aa, unidentified
MSKVTVQGERPRTCWVGLDVSKATFDAAVAGPDQRFPSTLLRALPWKAFPRTRAGVRLFLRWLKEQTSQYEHEGVRVVMEATGQYSVELTTWLLAVRPSLQPAIENPQNTKAFIDSLNQRNRTDGLAARGLAFYGVERHPVAYEPLSPARQELRALSRYRTVLVRQRTALKNRRQEKSDSRIVAQMQARQIQQMDRDIAQLEQEIKRVLHEDSSLRHDFELLVSIDGVGFITAMTVLAEIGDLRRFERARQLTAYVGVSPRVVQSGTSVRGKTHMCKRGNARVRHALYLSAMATLKTKHPNTLSATYRHLREEGKEPRAAIGAVMRKQLTVMRAVVVSGKPYDPAWKPCANRCGQLPPERTFSP

SEQ ID NO: 369177 - protein, 354 aa, unidentified
MAELLKTAVAVIGIDIGKNSFHIVGLDERGAIVLRQKWSRGQVESRFANMPPCLIGMEACVGAHHLSRRLKMLGHDARLMPAKYVRPYSKGQKNDFRDAEAIAEAVQRPTMKFVATKTAEQLDLQALHRVRERLVSQRTGIINQIRAFLLERGVAVRQGLRFLRAELPSVLATPSDVLSPRMVRVIEDLAGDWRRLDDRIDGLSSEIEAIARRDPGCERLMSVPGIGPIISSAMVAAIGAGDVFSKGRDFAAWLGLVPKQISTGDRTILGKISRRGNRYLRVLFVQAAWVVLIKPKSWERYGLKPWLEAAKKRLHHNVLAIALANKLARIAWSVLAHGRSFEARTITEANVQPA

SEQ ID NO: 369178 - protein, 350 aa, unidentified
MTMVGGLDVHRQQITFDYVDDDGLVRWGQIRPATRKALRGWLSEHCPEGDAEFALEGCTGWRYISEELAAAGVGMHLGDPAEIAGLRGRKKRAKTDRADARLLRTLLLEGRFPESWIPPMHVVEIRTLGRLYCTLMDERRTWQQRIHAQLFHQGCPPIRALLTQAGRAALAGAELSSAGRQYVDTALRRIDELTVEIDPLRTQLVRFARRQAGCRALQRHYGIGWLCAAIIWAEIGDARRFSSSDQVVRFAGVDVTVYSSDGKRSPGHLSRQGSPQLRWAAFEAAKCAARRGSPDYAYYHKLAAKHDGHNGKNPTLAVERKVLRRCHHTLRELGDAALAMPVAEPEEVAA

SEQ ID NO: 369179 - protein, 346 aa, unidentified
MKHVTTIGLDLAKQIFQVHGADADGAPVFNRRLRRTEVLRFFERQPPCLVGIEACGSSHYWAREIAAYGHEVRLIPPAYVKPFVKRGKTDAADAEAISEAVVRKTMRFVPVKSVEQQTAAMVLKARGLLVRQQTQAINALRAHLSEIGIVVGAGIAKVADLLEIIRDESDARLSKAVRFALSAIADQIEALARQIGRLEREIVAEAKRDEDMRRLTTIPGVGAITAASIKALVPDPAGFKSGRHFASWLGLTPKSHSSGGKERLGKISKMGNTQLRSLLVLGATSVLRHARHNTNASKWLTAIMARRPYKVAAVALANKMARIIWALLTKGGTYRKMEAAIGAASA

SEQ ID NO: 369180 - protein, 344 aa, unidentified
MDHYAGIDVSLEYSSVCVVDASGKVVREAKVVSEPEALIGWFGSLGLELARIGLEAGPLSQWLYAAMKQAGLAVDLLETRHVSDAFKAMPVKSDRNDARKIAQLMRLGWFRPVHCKSTTAQEIRAMLTARKLVQSKLLDLENSLRGILRGFGLKVGKTTRTKFAGRIEELVQGHPNLQTIGQALLRARAVLLAEFNGFEKRVRAMSRLHDKARLLMSTPAVGPIVSLTFACAIDDPSRFTSSKQAGPHFGLTPKKYQSGETDYTGRISKHGDASVREALYEAAHLMLTKPIKGCSELKSWAMRIARRAGTNKAKVALARKLAVIMLRMLKDNVPFNPAAKAATA

SEQ ID NO: 369181 - protein, 310 aa, unidentified
MDATFVGIDVSKDRLDVHVVPSGESFRVDNDGGGIERLKGRIEALRPERVALEATGGLEMPAVAELSAAGMPVVVLNPAQVRSFADALGKRAKTDPIDAAVIAAFAAAMRPELRALPDAETRLLADLVARRRQITAMIVAEENRARTATAKATQKSIRRLLAALRRELASVNQDLDGHIRKSPIWLVRQDILTSMPGVGPTVARTLLAELPELGSIDRRQVAALAGLAPFTRQSGKWRGKSFIGGGRSSLRSTLFMAGLVAIRHNPVLKAFRDRLVANGKPKIVALVATMRKLLTILNAMIRDQKPWQST

SEQ ID NO: 369182 - protein, 296 aa, unidentified
MAIRPSGERFSEANDARAVRRLVKRLAPLGCTRIVVEATGGYEALLAAALYAAGLPVVVVNPRWARDFARSIGQLAKTDVIDAALLAQYAALPQLKVRALPDAQTRELQALCARREELIDMLVAEEHRLEHVPARLRRELNGHIDYLRKRLKHLDHDLDQTVRNSELFRQQSELLTSVPGVGRVLCVSLLARLPELGRLNRAEVAQLVGVAPLNHDSGRLRGVRLIAGGRAPLRRVLYMAALSATRSNPVLSAYYRHLRDLGKPGKVALVAVMRKLLLMLNAIIKTQTPWRPPCPA

SEQ ID NO: 369183 - protein, 405 aa, unidentified
MLRRTFGVDVHRDLIVVTKLGEEGKETRSFGVGFEELRECINWLRLDECMDGAMESTGVYWVPIYTTLREAGFNVCVANAYQVKAIPGRKSDVKDSEWLAYLFRAELIKPSYIPNKEHQDLRTLTRLRTRLAETETDFKNRAHKVLQLCNIRLASKLSDLFGESGLRILEALLNNGDIDEALKASDRRIQAKAEEIKASIIGNLSQMDIFELKIILENIKLLQTQIQQVDERLSTLADRNLVDKLSKIPGVAPTSAYTLIAEIADPNRFENQKKVGGWSGLAPSRYQTARTDRHGHITKHGSSWLRRIATQSAKAASKSKSNLAQSYNRIAGRRGKAIATVALARQIVTIAWHTIKTGQEYSEEHYAKKTRYRIKHGKAEKYNLSQTSRILSQATRIINPNMSCW

SEQ ID NO: 369184 - protein, 332 aa, unidentified
MSTKKADSQHREEAEKFYRDLAARGVKVRVGMEASGQARWFERLLAELNMELWIGDAAEIRAKRVRKKKTNREDARHILRLLLEDRFPQIWVPSWENRDLRQLLWHRHRMVQMRIRIMNQLQAVALNEGLCCKKRLWRESGRKQLEGFPLAPWGSRRRRDLWELLDRLNPTIVELRQTIEQEVEKYPAAQRLMTHPGVGALTALAFVLIIGEGERFRCGKQIASYIGLVPTEESTGERQRLGHISKQGSGLLRFFLVEAAQVTVRSDMEWRSKYFHLALRRGRKIAKVAMARRLAVRLYWMWREKRDYEQLKKFGPHAGQPGTGVGDQQNIA

SEQ ID NO: 369185 - protein, 433 aa, unidentified
MKAEDIRLEEFRKFKKEVRGSARHLLVGIDIAKEQHNAFFGTATGKTLVKRFVFDNSRAGFEKLLAETGALKEKHGLSQAVFGLEPTANYHKVLGEYLIRQDQEVVLVAGNAVRQNRELLDGRWDKHDVKDAANVADLMSQGKVVYYEYPGIEVRELRGLLSLKRKLKKQEHGLRVRIRNNLLAQYFPEMEGCYSRCERDNLAIVKHCLNPTVIAGMPYGEFFKTVVRRKNGLRQQKHLYGLWQLAGASIGCEAGEGVECEAGVLVEMLRQTREAIDRVDEQIQKLSRLFAEYACLMSIPGFGPDVSAKVLAHLGSPHRFETAGQVLKMAGFDLSASRSGKVTERAVPVISKKGKAELRYALYQAALIASSRGGYFTGYFKEKLRGREKEKGIKTKMRVKLAAKMLVIAWTLMKNKEPFNPEYLKTAQQQFCN

SEQ ID NO: 369186 - protein, 380 aa, unidentified
MRQVCGLDVHKDSVFVCIINDEGVVYQKKFGVLTSDLNQLVAILSEHQVGEVCMESTSIYWMPVWRVLEPYFELKLVNPYFIKQLPGKKSDVKDAEWIATCLWKDLVKGSYVPNDCIQQLRQYDRRIFDLNKDIIYKVTKLDAALQRCNIRISNYVSTATGKSYQRVVQLLCEGITDPEELIKVIHGRTIHRIGIEPIKGALTGVITEVDIDIIGQLRDEVALANSHKEQCQSRMDELCSKWFPQQLANLKTIPGVRERSATAIIAELGVDMSSFEDAAHLVSWCGLKPRNEESAGKIKSRKITHGNKYLRKTLIECAWAASKTQNCFYNKFSYHQTIVRRKNKMKVQVAIARKMLTAIWFILQYNVPYRNFMLDISPAQ

SEQ ID NO: 369187 - protein, 367 aa, unidentified
MSKTNSASSKTTWVGLDVHRDSITSAVLTPDRETPVVDRWFHDEPSVRRFVGTLGDPALVRLCYEAGPTGYDLARFLGRLGVRTEVIAPSLIPTAPGARVKTDARDARRLVHLHRAGELTAVHIPTPGEEAIRDLARTRADLVIDRTRCRHRLSKFLLRHGQVYRGGVAWTLTHEAWLRQLHFDDAALASTYSHYRAIVAGLDAHLAAVESDLKSYLERGPFTEAVSRLSAYRGISELGALSLSAEVCDWRRFPRATSLMGFCGLVPSEYSSGERKVRGRITKSGNLHLRTQLVESAWAYQHRPAVGATIKKRQERCGEDTITRAWAAQLHLCAKFRRLAERKSSRNVVVTAIARELTGFLWAEMAA

SEQ ID NO: 369188 - protein, 385 aa, unidentified
MTAIEQFSSFVPRDYDIFIGLDVDKKKMAITCTDHGTMRRSLSMPYSASQLLNYTRKHFPGQRIAFVYEAGPTGFGLYDELTAAQHPCLVVSPSMVPSAPRNRVKTNRLDSKKLSEGLRGGQLRGIHVPPPIYRELRHLVQLRDTQVGQLKASKCRIKSLLLYEGIPFPAANEKWSARVLRELETIPCNASVRFKLDRLIDALQFHFLTAAQVQKEIRRFCKNEPGLQQAITFLTSLPGVGTITATHAVARLGDWRQIENVRQIAGFLGLVSKEHSTGDKENRGEITRIGDPRLRNKLIQCAWTAIRKDPELRAFYRQVYERQPKKVAARKAIVAVARKLTTRMYAVLKEQRPYVIRADSSIAPLTEEETAGLRERLDAAQNDEP

SEQ ID NO: 369189 - protein, 319 aa, unidentified
MFVGIDVAKAELVVGVRPTGTGWTAVNDAQGVRDLVTRIQALGPTLIVLEATGGYELLCVAALAAAGLPVVVVNPRQVRDFARATGQLAKTDRIDAEILARFADTVRPEIRTLPTVEAQALDALLTRRRHLLEMLGAERNRLGQVCGSGKKPVKKSLTTHITFLERAVARADAELDAAIVRSAIWKAQDALLRSVPGVGPILSRTLLADVPEPGRLSRREIARLAGVAPLSRDDGTIRGRRFVQGGRAPVRAVLYMVAIMAARRTPLITAFSARLVAAGKPKKLALVACMRKLLTVFDVMVRTTTPWNPEFAAMSVATA

SEQ ID NO: 369190 - protein, 349 aa, unidentified
MSHKSAPPTVSTIGIDLGKNSFHLVGLDQRGAIVLQLKCSRAQLGRRLANIPSCLIGMEACSGAHYIGRQLAALGHNVRLMPAQYVKPFLKGHKNDYRDAEAIAEAVQRPTMHFVAIKTPEQMDLLALHRVRSRLVSHRTGVINQIRGFLMERGIIVRQGVVPLRRALPDILSLNTGALSPRIVNLIAELVQDWRRLDERVAAVSAEIESLAEQDEACQRVMTVPGVGPIISSAVVAAIGNGAGFTQGRDFGAWLGLVPKQVSTGDRTILGKISKRGNKYLRTLFVQAAHVVLARRPSAAMRGLWPWIEQASRRLHRNMLAIALANKLARIAWAVLARGRSYQPRIVAI

SEQ ID NO: 369191 - protein, 402 aa, unidentified
MNCVGIDVSKGKSMIAVMRPFGEVVVSPFEVRHTASELSKLAGLLKSLDGETRVVMESTGNYHAPVAWLLHDAGLYVSVVNAMLVHDYGNNSLRRGKTDKKDAVKLANYGLDHWLTLPRYVPDEDTRLMLKTCYRQYQQYSKVQTMLKNNLISLLDTTFPDANRLFTSPPRTDGSEKWVDFVAAFWHCECVCGLSEKAFAAKYQKWCRKHGYHFSEDKALDIYASACGHFGVMPKTDTAKLLVEQAIFQLRATSAALAALKQEMQSLAASLPEYPVVMEMFGVGPTLGPQLMAEIGDVRRFHSKKALVAFAGIDAPPYQSGQMDVRSRSISKRGSAALRRTLFLVMGVYLQSAPMGEPVYQFMDKKRSEGKPYRVYMMASANKFLRIYYASVTAYLNTQTQA

SEQ ID NO: 369192 - protein, 483 aa, unidentified
MKSKPEEKNKKATNHPTQHHWHEMNRKQRRETIRKIQSEELSLEVIHPHAAGIDIGNGSHYVAVPPSRDSQPVRCFGCTTAELKAMADWLQQCGIRTIAMQSTGVYWVAVYDILEQAGFEVYLVNARDTKNLPGHKSDVQESQWLMKLHTYGLLRNSFRPPQEIRTMRTYWRQRNDLVRSAGRHILRMQKALTQMNLQLANVLSDVSGATGQAIIKAILAGERNPHKLAEFRDPRVKASEEQIAQSLEGNWQPDLLFLLKQEQDGYEFCQKQMAECDRQLEQYLHQREDRSQGAPLPEEKRKERLKKKKGNKPQFDLREGLFRMTGTDLTRIDSIDVMTAMTVISEAGYDMSKWKTENHFVSWLRLCPDNRISGNKVIGKGRLPTNNPLNVALKMAASALLKSKTYLGAQFRRLRTKLGAPIAIKAMAAKLARLVYRMLRYGMKYVDQGAAFYEAQHKQLQIKRLKWKAAKLGYKVTPVPAAA

SEQ ID NO: 369193 - protein, 372 aa, unidentified
MNNITVYVGMDVHKESFTLCDYLIETEKPSHPRRTHADYKEVLKYLEFLRTIYGNDTNFICGYEAGCLGYTLYHQLTNHNVNCVILAPTTMLEPRSGKRIKTDKRDAELIGKCLAQHNYSSVHVPTSTDEETKEFLRMRDDHKLALKKVKQQILSFCLRHDYRYEGKSHWTEAHVNWLKSLKPEALYKEILDEYLLTYMNLSDKLERLDKRIEELALKDEYREPVKKLCCFIGVQTHTALSVLVEVGDFKRFASANQFAAYLGLVPGEESSGDEKSRLGITKAGNRHVRQLLIESSQSYSKGQIGHKSKALKSRQIGNSPQVIAYADKANERLRRKFYKMVLGKSKKHNVAKTAIARELACFMWGMITDNIA

SEQ ID NO: 369194 - protein, 349 aa, unidentified
MDRTTYGLDIAKNVMQLHWVEAETGEIGRKQLARGKLAAYFAQLEPVRIVMEACGSAHHWARVLGALGHQVELLPAAQVRPFVRSHKDDAADARAIWLAAQQSDIRRVPQKSVEQQAVLALHRTRSHWVSVRTASVNSLRGLLYEFGVVLRGGRQAGLKALAEQRAAIDEQLPATMRALVDGQLQTLAQIGQRIDQLEREIAALQKQLKGARELGQVPGIGVLGSTALAATLGDAKAWRSGREFSASIGLVPAHAGSGGKVRVGHLSKRGDPYLRTLLIHGARSVIEHAKDKPKWLQQLLARRPLNVVVVALANKMARTAWAMVAHGRAYQRDWQSAKPGSGAAQAATA

SEQ ID NO: 369195 - protein, 412 aa, unidentified
MEVFYACCCGLDVHAKTVVACLVTNGRKETRTFATMTEDLLQLGDWLHSVGCTHVAIESTGVYWKPVFNILEGLLTVILVNARHIKAVPGRKTDVRDCEWLADLLRHGLLKASFIPPPEIRELRELVRYRQTIITEHTAVANRIQKLIESANIKLGQVASDVLGLSGRLMLQALAAGETNAETLAELAQGKLKSKKAELRRALTGCLTPVQRWVLTELLTREEELEAARTRVETRIGEEVAACTDPLVPEAVELLESIPGVGQRTAQTIVAEIGVDMSRFPSAKHLASWAGVCPGNHESAGKRQSGQPTKGNTSVRTILTEAAWAATHVKGTFLQAKYQRLVRRMPKQKALGAIAHRLLVICYHLLSRRVPYAELGTAPLDQEQVARQRRRLVEQLIGLGVKVTIEEGAAVA

SEQ ID NO: 369196 - protein, 341 aa, unidentified
MKNLFIGVDFSKEKVDVAIIFADGLTETAARVFNEFKTTVSGYKQLVKWVEQNSYGIDSSLWLFCGENTGDYSKGLCNFLYGKGYDMWLENAKSIKDASGLRRLKSDRADASMIAEYAMRNYDRAIMYEPLSESLAQLRELFLYRQMVIRHRCSFQVRRGEKKLTMEKSPVKTMISQSGRHIVSELNKEVEKIDKRIAELIKSDEELTEVFTIVTSVPGIGTQNAVCLMVYTDNFRRFNYDSRKIACYYGIAPFGKDSGTSVHSDPRVHYMANRQIKSMLTQAALAAVNFNPVIARYYMRLVERGKKKQVALNNVKNKLVHLVTAMVRNRQLFTTEYKITA

SEQ ID NO: 369197 - protein, 415 aa, unidentified
MTACVLLYEDSPKPQMRRKEFATHGKALETLRSWLSAQKVTHVALESTGVYWKPVWHALESHFKLLLLNPYQVKNMPGKKTDKRDSEWLAELLAHSVVQGSFVPPVETRALRDLTRYRVKLTEEMNRIHNRIHKVLEDGCIKLDTVASHILGVSGRKMIQAIIDGEEQPNRLADHAQGKLREKLPALRLALRGQVTEHHRFLLKELMEDLEFVEKKILRLDQTIVQRVDMNALARLCTIPGVDVITAWTLLAELGSDMRVFPTDKDAASWAGLCPGNNESAGKRLSNRTRKGNRWLRRALCQSAWGASRKKNCFLAAFFQRQKANGGAQKAVVATAHRLLVIAYCMLRDGTEYRELGGDYYDKQQPQKARARLLERLRRLDPQLVLPPVPAAVSPLAASPDSPPSCRPQKKRPPL

SEQ ID NO: 369198 - protein, 386 aa, unidentified
MQKLNDLSRSLTALEPDGTLIAVIEMSLSSWLVAGIVPGVERQPLKKLSVDESALLKLLHRWREEAEKAGRRIERIVVAFEAGRDGFWLARWLRARSIDAYVIHAASVAVSREHRRAKTDRLDSELLKRAFLGWLRGERDHCKMVAIPTAKDEDAKRPNRERESLVGEQNRIINRMKAALIRLGIRGFNPKLKKAAGRLKDLRTPEGEPIPPNTLAELCRDMERRRLVSNQIRQIEEARLERLEQAPRDGPHAMVRLLARVIGVGTETADMLVQEVLSRNMRDRRAVARYAGLTGSPDESGRKCREKGLARSGNARVRRGMIQLAWRLLMFQKNSALAQWFRARTENARSTRKTMIVALARKLLIALWRLVREGVVPDGVVLRPAQ

SEQ ID NO: 369199 - protein, 412 aa, unidentified
MLFVGNDWAEDHHDVEIVDEQGRRLARRRVPEGLDGVTRLHALIAQFVPDEWGALEADDAAWRVKVGIETDRGQWVQALIAAGYEVFAINPMSVARYRERHSTSGAKSDAGDAHVLAEIVRLDRSHHRPVAGDSELSEAIKLVARSHQSLVWDRTRHVLRLRGVLREFFPAAMEAFADLDAPDALELLAAAPDPDRAARLSRAKITATLRRANRRGVEDKAAQIQSVLRAPALRQPAQVQAAFAAIVTSQVRLIGTLNGEIAKLGEVVAGHFGRHREAEIYTSQPGLGVILAARILAEFGDDSTRFADAKARKNYAGTSPITRASGTRKIVLARYARNTRLGDAVQQWAFGSLKGSPGARAYYDSLRARNIGHQAALRQLANRLVGILHGCLKTDTRYDETAAWAHRNSAAA

SEQ ID NO: 369200 - protein, 387 aa, unidentified
MSDRFDVRKSNSPFDQNRTLVAVIELSQTSWLVGGIVPGLERRPLKKLDCEKEELLGLLVRWRDEAVKAGHEIDRIVVACECGRDGFWLVRWLTARGLEAYAIHAASIAVSREHRRAKTDRLDTELLKRAFLGWLRGEAGHCSMVTIPTCEEEDAKRPSRERETLMKERTRLINAMKGDLTRLGINNFNPKLRDAPTKLEALRTPEGTPIPRNTLAKLLRDLERLRLVVAQVKAIEAARLERLESSPRDKPHAMVLQLARVVGIGIETADMLVREILSRKLRDRRAVARYAGLTGAPDESGSKRREKGLAKAGNARVRRGMIQLAWRLLKFQKDSALVQWYRERTSDCRRGTRKTMIVALARKLLVALWRLVTSGEIPQGFILRPAL

SEQ ID NO: 369201 - protein, 353 aa, unidentified
MKLDKYIGIDLHQATSVVAVLDADGKVVLETILATEAAPIIRMVQSLNGPLHVTFEESTQAGWLYEVIRAYVLEVVVCDPRRNKLLGEGSKGDKPDARKLAELLRAGLLRSVYHGHEATRILKELVRAYETLSIDTMRTMFRIKAIYRGRGIRTPGSAVYQVKQREQWLHRLSEPGIRQRVQWLYEELDHLRSLRKRARQAMLTESRKHRAFMLLRSIPQLGPIRCALIVATLDTPHRFRTKHQLWAYSGLAVITHTSSEYEIKAGRVVRSRKPMFTRGLNRNGNRRLKDVFVAAAAGGTQAEPYRTYLHGLQQKGMRAEMARLTLARKIAAIALSIWKKGETFDPKKLNWTT

SEQ ID NO: 369202 - protein, 468 aa, unidentified
MSRRTGRSHKRKSKRRKNSLPPGLEKVNLNAAGIDVASGMHAVAVPAGSSPDGEDVKEFDAFTRDLYAIASWMKECGVTTVAMESTGVYWIPLYEILESLDFDVNLVDPRQLKRAPGRKTDILDCQWIQQLHTFGLLSGAFRPDEQICTLRGYVRQRAMLVEYASHHVQHMHKALEQMNIKLKRVITEVTGTTGMRIIRSILAGERDPQKLAAMRHGRCKNDQDTIAKSLEGTWRQEHLFALRQAVDLYDSFQEMIKQCDKAIEEYFAALECTDPRHEPGKRTGTTRRRNEPHFDAQRVLHQFAGVDLTRIEAIDGNTALKIISEIGADVSAWPSVKHFSSWLCLCPGNNKSGGRQRSGRTTPSANRVASALRLAARSQWNSNSAMGAFLRRLAARKGMPKAITATAHKIARMVYFMLKYGTEYVVKSQEEYERQHKERQIKNLKRRAKLLGFEVSELAQWQPLIDNT

SEQ ID NO: 369203 - protein, 343 aa, unidentified
MTDASIIGVDLAKNVLQLHGAAADGSVAFRKKLSRQQFQRFMSDLPRCRIAMEACGGAHHWAREMERLGHEVRLIAPRYVKPFIKRQKNDAADAEAIVEAALRPTMRYVEPKTADQQARALVFRTREQFVTQRTEAVNALRSYLYEFGYIAPQGIGYISRLAEVVDDPLSNLPPLAREICRELLGQIAHLTARIDVLKKRIDAIAREGKISRRLQTMPGVGPLSALAVETFAPPMEQFKRGRDFAAWLGLVPRQASTGGKQKLGKASKMGQRDIRRLLVTGAMAVIRWALLRGAPRNPWLMRMLERKPPMVAAFALANKMARGSWAMITRGEDYRGPALESAA

SEQ ID NO: 369204 - protein, 450 aa, unidentified
MPTKRNRVAHLPVIEPNAAGIDIGATQIFVAVPGDRDPAPVRCFQTFTVELEKLANWLQECRIRTVAMESTGVYWIPLFQILEKRKIEVRLVNAYHVRNVPGRKTDVEDCQWIQHLHSVGLLRGSFRPDDEICAIRSLWRHRDNLIQLATVHLQHMQKALDQMNLQIHHVISDLAGTTGLAIVDAILAGERDPQKLAQLHDWRIKASEETIMKSLVGDYREEHLFVLRQSLESYRRYQKMIQDLDAEVKRRMSQLPSNVDPAVKPLGKERNPRKTPRRTEPLDLRLELYRAFGIDLTQIPGINPLTAQVLLTEVGTDLSRFPTAAAFCSWMRLCPEPKISGGRVLSSRTRPTKNRAALALRLAAQALHKSQTFLGEYFRRMKSRLGPAKAITAVAHKLARIVYHLITHRLEYDATIFQDQERRNQERKRNRLLAQARELGLHLVPVQAVP

SEQ ID NO: 369205 - protein, 318 aa, unidentified
MTYVGIDVSKATFVVAYSSAKGSETKTFKNTVKGIREFIQTISPKENHCVLEATGNYSMLLVYLLSKAGFVVSMENPLKIKNFARVMLSVVKTDEIDARLIALYGERMQPAPFKLRNDSILLLKQKRTVLRQLKKQLTANTNLEGSLKVLPFIDSKSKKVLEKTIKFLQKQIKEMEEELTSLAEIEYKKQMDLLTSIKGIGATLAAALIIATGGFTYFDNAKQLTRYLGLSPTYQQSGTSVNVKGHINRNGDAHLRSQLYIGAMASLRCNTECKACFERLRSNGKPGKVAIIAVANKLIRQAFAVVTQGSPMLMGISL

SEQ ID NO: 369206 - protein, 366 aa, unidentified
MKKTSTVRINGNKIFKGPKFTIGLDLGDRWSFYCALDEAGKIVLEQKVATTPEAMKQTFERIPRSLLALETGTHSPWLSRLFSELGHEVLVAHAQKVELISKSNRKDDRHDARTLARLARIDPELLGPVRHRSAKAQIHLTVIRARAELVSARTALVNAARGLTKSYGERLPKCGTEQVGRQLGAELSAELREVLEPLLREIESLNERIKEYDARMEKIARESYPQVALLKQVKGVGTQIALTYVLTLDDAHRFAKSREVGCFLGLKPGRRDSGESEPQMGISKEGDRYLRTMLVQGAHYILGPFGEDSDLRRWGLRLAERGGKNAKKRAVVAVARKLAVLLHRLWVSGEVYEPLRNSHKAMRAAA

SEQ ID NO: 369207 - protein, 316 aa, unidentified
MSMNPTPVYLGIDIAKDTLEVAGPGLRLPVANTAEGHAQLLAAARALRLPVHFICEATGGYERRLVASLLAQDCAVSLLNPARVRQFAKATGRLAKTDRIDAEVLAEYGRTLQPPAEPKPVPLLEELTDVVRRRAQLAELLGLQRTQRPQLHDARLIEELDRLIGFLERQIAALDRRLDELIDQDGGLGARLQRLCQVEGVGKTTAMNLLAELPELGRLNRARIAALAGLAPFNHDSGAATGQRHIRGGRANVRRALYMAALTATRCNPVLRPFYQQLRARGKGHRVAITAVMRKLLVHLNQIVRTPEVMLASQHS

SEQ ID NO: 369208 - protein, 397 aa, unidentified
MYIVGIDIAKRKHEAAVIDGEGTIIIKPFSFTNNCSGYNRLLAMLAKAKLPLDEVSFAMEATGHYWLALFTRLQKEGFRVQVINPVQTNSIRSFYIRQAKTDPRDALLIAEVIRFGHFSESTLHPENIYELRELCRGRHAIVSMQADVKRKVVALLDQVFPEYETAFTNLFGDTSMAILQTCPTPKELSEMPFEELCHLIEVSSHKRFRLAKAQELQELARNSFGFAMAGDVFSTMIRLYAKHLDFLKQQVREMDRKIAEIMETLDTPITTITGIGPTLGAYILSEIGDIRRFPSAAKLAAYAGIDPTMRQSGEYNGVRNRMSKRGSPYLRHAIWLAASSAVLHDPALKLYFQKKRDEGKPYMASVGHACRKMVSIIYAVMRDNKAYTPCIPNEISA

SEQ ID NO: 369209 - protein, 366 aa, unidentified
MNQSSTAFVGMDVHKDSIDIAIADAKEARLFGRIGGEAAALDRAIRKLRSVHRKAVFVYEAGPCGFWIYRRLRAQGLACMVVSPSMTPRRAGDRVKTDRRDALQLARLARAGELAPIYVPDRRDEAIRDLVRAREDAVNMQRQARQRLQALLLRNEIRYVGKTAWTAAHRRWIAHLKLPDPAQQIAFEEYVAAVEEAGARLERLGGAIATQLEPWRWRPLVEALQALRGISAIHAVRIVAELGDLTRFDSPRKLMGYLGMIPSEDSSGRRRRQGRITKAGNSSARRALIEAAWAYAHPARVSWPIARRQTGLAKRVTDLAWRAQLRLCARFRKLSARGLNRNTIVVAIARELSGFVWAIAQDIKPL

SEQ ID NO: 369210 - protein, 358 aa, unidentified
MNNHMIQGYVVKGKEVFVGLEDSKKTWKLAVRCDRMLIRQASMEARYPVLLSYLRNNFPECTINLIYEAGFKGFTLHDRLTEDGITCVVIPPHLVTEPKVNRVKTDKRDAGRLALILENGDMPSLCCVPDRERREDRQVSRTLIAVVRDIIRTRNRIHKLLDFHGIGVPFEMKAKWGEKEFGILRELPMSAPLRTSLDVLLDLLEHLWRHRETLTAYLKGLCDKERYRRAFAIAESLPGIGWKTAIRFVLEFGEDFSRFTSGKKIAAFAGLTSREHSTGETERRGKITGLGQGFIRSTLIENSWAAIRKDQALLAKFTRVWRNSGSKKKAIVAVARTLVIRLRACMVSGTPYATGIVR

SEQ ID NO: 369211 - protein, 451 aa, unidentified
MNKKVSMEIINPNAAGIDVGSRSHFVAIGQGKEDVREFGVYNEDLLAIVAWLLANEIKTVAMESTGTYWQSLFMALQNAGFSVILCNGKFTKNIKGKKTDVQDCQWIQKLHTIGLLTGSFLPDEATEQLRTYCRHRANLLDQAADTTRKMQKYLRLLNLRLDVVVKDITGLTGLKIIAAICNGEVNPESLASLRNGNCKKSEEEIAKALQNNGRTDYLFALKHEYRMYQYIQSGIKECDIEIEKMLNEQIMGNNDKRQHFIDNKVHKRINKNSPKNIDINLMAYQYFEGVDLLAIEGVSHSTVLSVMSEVGLEGLKKFESGKQFASWLRLAPNNKISGGKVLSHKVPKGSNRLKISLRNAANAIGNLKDTPLSNFFKRINFRKGRVSAISATARKLAVIIWNMVVKKQPYKNEHGYEFLDQKRKRKVQEMKKLIHKFDIKTDELGLQISGL

SEQ ID NO: 369212 - protein, 402 aa, unidentified
MNAVGIDVSKGKSMVAIMRPFGEIVSTPFEIKHTSSDINSLVKLIKSIEGESRIVMEHTGRYYEVLAHQLSEANLFVSAINPKLIKDFDNDSLRKVKTDKADSVKIARYALDKWQNLKQYSVMDELRNQLKTMNRQFGFYMKHKTAMKNNLIGILDQTYPGVNTYFDSPARSDGSQKWVDFASTYWHVDCVRKMSINAFIDHYENWCKRKKYNFSKSKAEEIYGKAKELVPVLPKDAITKLIIKQAVDQLNSASITVESLRTLMNETASKLPEYPVVMAMKGVGTSLGPQLMAEIGDVSRFTHKGAITAFAGVDPGVNESGSYEQKSVPTSKRGSSDLRKTLFQVMDVLIKTHPQDDPVYQFIDKKRAQGKPYYVYMTAGANKFLRIYYGRVKEYLSSLPES

SEQ ID NO: 369213 - protein, 405 aa, unidentified
MEIIVEKGCGLDVHKGTVVACIMGVGIKKEIRTYTTMTNDLLRLKEWLQNSGITHVAMESTGVYWKPVFNILEDHFEVILVNARHVKNVPGRKTDVQDSEWLCKLLRSGLVSGSFIPPRDIRELRDLTRHKRKLIQAIVAEKQRVEKVLEDANIKLSSIASDTFGASGKRIVEELIKGKLRAEEMAELSKGRLRQKREDLKQALVGEVREHHKFMIKASLKHIRAMEKILSDIERKIQEKIDRHYKEEYKLLQTIPGVKGEASTLIAEMGVDMERFPSEEHLSSWAGMSPGNNESGGKKKPGSTTYGNKCLKTMLTEFAWVASKTKDTYLRSKYHSLVGRRGKKKALVALGHKILIMCYHILKYRCAYKELGVDYLDKRRKDKIAKSYIKRLHHLGYEVTLKEAA

SEQ ID NO: 369214 - protein, 370 aa, unidentified
MKQRLLYVGLDVHKNTTDVAIASGRSNGKVRSYGKIASTLDALNKLIKKLQDGDKELRFVYEAGPCGYQIYRHLDTKGIHCSVVAPSMIPRRSGDRIKTDRRDAINLARLFRAGELTSIYVPTHEDEAIRDLIRCRDDMKRFERKARQRLLSFLLRHGHQYSGKKNWTKGFYTWLATVRFSHSAQQVTLQEYIDVTNECSERIKRITQQIQIHIEEWSRAPFVKAYQALRGVSLIVATTVVAEIGDMNRFQSPKQLMAYLGLIPSEHSSGKTVRRGPITKTGNSHVRRVLIEAAWTYKMQARVSNILLNRQKGLPKSVCDISWKAQTRLCARYRRLYARGKSRQTVVTAIARELSAFIWAIDKEIQLTAL

SEQ ID NO: 369215 - protein, 422 aa, unidentified
MLEEVQEREDIVERVAALDIGKAELVCCVRVPGRSGATRRVQEVKTYKTMTRALLIMVDRLTELGVTRVVMEATSEYWKPPFYLLEAAGFETWLVNAKDVKHLPGRPKTDRLDAVWLCKVAERQMLRPSFVPPPPIRVLRDLTRYRWDQVAVRTAEKQRVEKLLEDAQIKLSVVVSDIFGMSGRDMLAALIAGQRDPKVLAQFARGRMRAKLTVLEEAFTGRFNDHHGFLLAKMLARIDTISADLVDIDARIDAEMAPFAEAATRLDEIPGVGHVAACVIVAEIGVDMSRFPTSGHLSSWARFSPGIKESAGRKKGAGATGHGNRYLARVLGEAAVSAGKTDTFLGERYRRIARRRGKKKAIVAVGRSILVIVWHLLGDPESRFHDLGKDFYDDRRDTNSKKRNHIRQLEALGYTVILQPAA

SEQ ID NO: 369216 - protein, 317 aa, unidentified
MTTPSEAYVGIDVGKAWLDVAVWGEDEVWRVSNDEAGVEELLDRVEKLEPQLIVVEATGGYEQLAVQTMLLKSLPVAVANPTRVRALSKATGKLAKTDVIDARLIAEYAFKIQPAAQAPKEANEIRLKALVTRREQLVEMRTAEQNRLGTAPNCMRTDIRDHIEWMGGRITELEAQINELLDRLPEWKTQTERLDSIPGVGLITAVTVLAEMPELGQLDRQKMAALAGLAPFNRDSGQKRGKRRIFGGRKSIRRVLYMACMSAKKYNPVIRPLFERLIKKGKIFKVAITACMRKMLVIMNAMTRDQVNWRSPEPISD

SEQ ID NO: 369217 - protein, 412 aa, unidentified
MDVLIERCAGLDVHRDTVVATVRRPGPGGVRRSETRTFTTMTGQLETLADWLTEQKVTLVGMESTGIYWKPVYYVLEDRVPVWVINAEHLRNVPGRKTDVADSMWIAQLIEHGLVSPSFVPPRNVRLLRDVTRHGRRLTEERTRAIQRLEKVLQDAGIKLTSVASTILGKTGRAILAALLAGEEDPAVLAELAKGRLRPKIPVLREALTHRFRLEHHGALIAQMLAHIDFLESAILETHQRIEVLLRPVADIVELVMTIPGVGRRTAEVLIAEVGLDMTVFPTAGHLASWAGICPGNNSSGGKRRPGRTRHGSMWLRIALTEAAQVAARGKGTYLAAHHAQIRGRRGTQKAIGATRHDILIAYYHIVTNKVAYHDLGPDWNDRRRSTEQQTKRLVRQLERLGVNVTIEPSGA

SEQ ID NO: 369218 - protein, 319 aa, unidentified
MTITYPIAGIDIGKDTLDISLLHANGSFEAFSFANEKASRKKLARRLEAKGVRLVVLEATGGYELPVMAALAEEGIAFARVNPARVRAFAKSMGQLAKTDRLDARCLALYGERVRPKPTPMPSENESRLNALTLRRRQLVGLRQKERNRAHRAGEPDIAHSIERAIAFLSEEIDAIDAAIETLIASVPEMAERRDLIDSVPGIAANTANVLLAGLPEIGRMGTRKLRKLVGVAPLNDDSAERRGERHIAGGRAHLRQALYMAAQTGYRHNPALKALYQRIRAKGKSHKVAIIACIGKMLAILNAIIRSKKPFDPKFATP

SEQ ID NO: 369219 - protein, 343 aa, unidentified
MEAYAGKQFVGIDLHRRRSVIVRTTASGEVLEAVRIVNDVQRLAAVMDRAGDCPEVVLEATYGWYWAVDALQAGGANVHLAHPLGVKAFEYRRVKNDFRDAQDLADLLRMGRLPEAWIAPPPTRELRELVRHRAKLVGLRSHCKAEVHAVLAKCGVQVLMSDLFGVWGTELLDGLELPAPYAARIASLRRLLDDVDFEITVFAGIIRGRMAQEPGYTAVQKIPGIGPTLGAVLVAEIGDINRFASASKLTCWAGLTPKHHESDTHVRRGRITKQGSRLVRWAAIESVKTVSKTSEVGVLRERVADRRGRNIGSVAAARRQMELVFYALRDGHVRALDHLPAAA

SEQ ID NO: 369220 - protein, 416 aa, unidentified
MDVLHARCAGLDVHKDTVVAGVRIADGGPAKTEVRTFDTTTPGLLALSAWLAEQGVTHVAMEATGIYWRPVWHVLSDGEVTLILANAAHVKNVPGRKTDVADAIWLADLLAHGLVRPSFVPGAATQEMRALLRTRKQLVREQASHVQRLQKTLEDANIKLSSVLTNIMGKSGRAIIEALIDKQADPEALLALVQKGVKAPAERIKAALTGRVTDRHRFLLRLHLRQIDALDAAITAIDAEVDRGLDPFRQAVELLRSIPGVSDLTAQVIVSEIGTDMSRFPTAGHLISWAGLCPRNDESAGKRRSNRLRHGAPWLKTTLVQCAWAATRKKASYLQAQFQRLRHRRGPKKAVCAVAASILTAAYHMLRDGTLYHDLGPDHLRRTSPETHAKRLAQQIAKLGFTCTIAPASAGTEVSI

SEQ ID NO: 369221 - protein, 388 aa, unidentified
MNVGADKSEPLTAIHTDLGAIFVSLELSRSSWLITSLSPGGGEKMSKHSVPGGDFAGLMERFAQLQEKARLRTGQSFRIIVIQEAGLDGFWIHRALQNEGIESHVVDAASIATSRRRRRAKTDKIDGETLVRALLAYKRGEPRVCAMVKAPTPGEEDRRHLCRERKALTAERVRHVNRIKGLLFSQGISGYQPLRRDRRQRLEELQTGDGRAFPQHLKALVNRELDRLELLLKQIKTVEAARDALLAVGQTAKPAPAAMLLDIRGIGPEFAAILWSEGLFRHFENRRQIAAYAGLAPTPWQSGAVDREQGVSKAGNPRLRTTMIQLAWLWLRNQPRSALSVWFHERVSRNGGRLRKTTIVALARKLLVALWKYVTAGVVIEGVTMKVA

SEQ ID NO: 369222 - protein, 382 aa, unidentified
MKKNTTSKKSAQKAMTKQIRQQASKQRLTIGLDLGDRSSRYCILDEAGNKISENRLPTTKAGLDSLFAKMPSSRIALEVGTHSPWVSRHLAGLGHEIIVANARKVKLITQNVRKNDRMDAEQLGRLARVDPKLLSPIRHRGEKAQADLAVVRARAELVGTRTKLINCARGLVKPMGERLKPCDAEQVKESLGEGMSEAVQAVVRPVLRCVEQVSEQIREYDRQIAEMEARYPEVKLLKPVYGVGTLIALTYVLTLDDAQRFGHSRDVGPYLGLTRKEHESGASQPELRISKAGDELLRSLLVQGAHCMLRKGAPDSDLRAWGMQRIEGGGKRVKKVTVVAIARKLAVLLHHLWVTGEVYDPRYNRKAAEQAGKKKLQAKAAA

SEQ ID NO: 369223 - protein, 360 aa, unidentified
MSNSSALVSPTATVIIGVDTHKYVHVAVAIDLLGARLATCSAPADRTGYAELVAWARTLGTIGAFGIEGTGSYGVGLASFVRRQAIRVVEVSHCDRRKRRNNGKSDTLDAETAARSVLAGVATAVPKTADGAAEMVRQIKVARDTAVKARSAAIITLKTLIVNAPGELREALEPLTDRKLIDRCARLLPGVIADTVASTKHALRALATRWLALSTEIGAHDEVLDAITQAATPTLREAFGIGPDSAAEMMIVAGDNPTRVRSEAAFAKLCGACPIPASSGVTNRHRLFRGGHRQANAALYRIVTVRMRWHQPTIDYVDRRTAQGLSKKDIIRCLKRFVAREIYRSLIDDHRSRSAVVEAA

SEQ ID NO: 369224 - protein, 390 aa, unidentified
MFYAGIDVAMDKHDCVVLDSDGNVVFEVFTFENSREGFKTLKKVFQSCSKNPKKIKVGLEATGHYSDNLLEFLNSIGFAPVLFNPLHTNLFRKGLSLRKTKTDHVDAHTIAIMLRTEDLKSYSQQSYHLAELKSLTRYRSMLVSDCSRHKISLVRLCQILFPELKNLVPYMHQSSVYTLLSELPSADKIANCNLTHLTALLSSASKGHYGRDKAIEIRDTARASIGIKSVVKELELQQTIELIQIYQQQIEAVEEQINNLMDEIDSPITSIPGIANRMAAVILAETNNFQDFERAEQVLAFAGLEPSVYQSGQLTSTHSKMVKRGSKYLRYAIFNATKYVCHWDPTFRAYLAKKRAEGKPYNVAVSHAAKKLTRVMFHLVKTNKEFVSQA

SEQ ID NO: 369225 - protein, 342 aa, unidentified
MQITTIGFDLAKNVFQVHGIDVKEKVVARKQLRRGQVMQYFKALPPCLIGMEACATAHYWARELTKLGHEVRLMPAKDVKAYVKRNKNDAADAKAICEAVRRPTMRFVRIKSAEQQGQLMQHRTRDVLIRQRTQIINALRAHLAELGIVAAQGNAGVNELRAIVADERDTRLPIDARASVIVLAAQLEALECVIGAIEKRIKMQHRSNEASQRVETIPGIGIIGATAIVAMVADPRVFRSGRDFAAWIGLVPRQDSTGGKQKLGPISKQGDRYLRRILVVGAIAVLRRALENPGKYPWLTQLLARRPFKVVAVALANKMARMAWALLAHGGTYRAPELAETA

SEQ ID NO: 369226 - protein, 335 aa, unidentified
MSKAEAGKRWYVGVDVSARELVVAISDGREAMMAEVSNDAAGHERLQARLRALPAPATICLEASGTYSLDVALALARAKANWQVSLVNPRLARRFAESLGMRSKTDPVDARMLARYAERMQPEPWQAPGAARLRLRSITRTIAALVRQCVQHKNRQHALSASTALPTLLVRELEAQVAYLEKRIRHLRRQARSLIERHPELLRRWQHLQTIPGIGEASGLAILGELAVLPAMMDERQWVAHSGLDPRQHRSGSSVEQKDRISKAGNRYLRAALYMPALVAVQHDPWLARFYQRLVARGKAKLQALVAVMRKLLHAAWGMFRHDQSYDGAKLCPQP

SEQ ID NO: 369227 - protein, 400 aa, unidentified
MTGSRLWAGVDVGKEHHWICVLDTSGAVVLSRRCDNDEATIRAVITEIDALAETVSWTVDLTTVYVTLLLTVLADAGKPVRYLSGRSVWQASSVYRGGEAKTDARDARVIADQSRMRPDLPVLRPDDELIRELQMLTGHRTDLVADRTRIINRLRQQLVAICPGLERLAQISSDRGWVVLLARYQRPKAIRRVGAARLATMLTGAGVRHAESIAQAAVTAAKAQTVRLPGEDVAAELVTELAQAVIDLDARINAVDAEIEARFRRHPLAEVIVSLPGMGFRLGAEFLAAVGDPALIGSADQLAAWTGLAPRPRDSGKRTGRLHTPQRYSRRLRRVMYMSALTAVRCDPASRAYYQRKRAEGKRPVQATICLARRRVDVLYALLRDNRTWQPTVPVTAVAA

SEQ ID NO: 369228 - protein, 345 aa, unidentified
MEIRAIGIDLGKSIFHLTAVDARGQVVQRKKLSRLQLLRYTSTLRACLIGMEAGAGAHYLARRLLAQGHDVRLMPARYVRPYMKSGNKNDTVDADGIVEAVQRPTMRFVPLKTPEQLDLQALHRVRDRLVARRTSVINQLRAFLLERGITVRQGRLHLERQLPAILEDVDNDLSARMRALLRGLREEWKTLESGIANIEKEIGQLAAHDDACRRLTEIPGVGPLVATALVAAVGNASTFAKGRDLAAWLGLVPRQHSTGGRTRLLGISKRGNPYVRRLLIHGARSVLMSPRRERHRFGRWLVALEARAHRNVVVVALANKLARIAWAVLTKQERYRTAWLAGVSA

SEQ ID NO: 369229 - protein, 420 aa, unidentified
MGRLKIVYSVCCGMDVHRDFLIACIAATNAQGVTEYQSRRFSTYTGSLRELRDWLLANDCKDVCMESTGKYWFPVHNILEESCHVVVSHPKFVKAIKGKKTDKKDAQWIADLFKHDLVRGSFIPPKDIRQLRDLCRYWVKLSSYMTGEKNRAQNCLTVSNFKLDDVFSNVFGKSASAITTQLLEHPGEQFDVAPFVDGRCKTPIAQIQEAVDGIFTYEQAEKLKIIRGHMDSLERHKAELESLILEIAQNYLPQIELLLTVPGIHDAFTAIRILAEIGADMTVFDTSKHLCSWAGLTPQNAESAGKKKTTRIGKSGAYLKPLLIQVALAASRGEKHPEIYGKKQALQKRRGKKKAIVAIARRLLTAIYHILSKNEPYNPAAYIQEDKNPMARQISQEKAFEMLARMGFIVSNPSPLSSSG

SEQ ID NO: 369230 - protein, 418 aa, unidentified
MSKIRRKPKIVNSNTLLVTVDISKDKHTGYFRCPDGTEIMPFEFSNDRSGFNKLYQMIESIKYQKQLVEVVLGFESTGPFAEPLVHYLKGKDVKLVQVNTAHTKKLKEVYDNSPGKTDRKDPKVIADLVELGRVLNVVIPEGTCADLRRLTHARERYIKTRNMLVNQLYDLSYIIFPELGQIIPDFQSKTAQYLLRHYPTPQRMRKMSPTRLETILRKVSRGRYGKEQAERLYQAAIHSVGIREGIFSIVEEIENILKAMDLQNRFIKKCEEDISRNLVQIPLSRELLLIKGIGEITVAGVIGEVVDFNNFTSTNEIEKYAGLNLFEISSGKHQGQRRISKRGRWFLRKVLYFAALNTIRKGGAFHEKYQRYQDRGMPGNKALIAIARKLLRVMFAMARDQKVFKEEYHHTSTNSEAA

SEQ ID NO: 369231 - protein, 397 aa, unidentified
MYIVGIDIAKRKHEAAVIDGEGTVIIKPFSFTNNCSGYNRLLAMLTKAKLPLDEVSFAMEATGHYWLALFTRLQKEGFRVQVINPVQTNSIRSFYIRQAKTDPRDALLIAEVIRFGHFSESTLHPENIYELRELCRGRHAIVSMQADVKRKVVALLDQVFPEYETAFTNMFSDTSMAILQTCPTPKELSEMPLEELCHLIEVSSHKRFRMAKAQELQALARNSFGFAMAGDVFSTMIRLYAKHLDFLKQQVREMDHKIAEIMETLDTPITTITGIGPTLGAYILSEIGDISRFSSAAKLAAYAGIDPTMRQSGEYNGVRNRMSKRGSPYLRHAIWLAASSAVLHDPALKLYFQKKRDEGKPYMASVGHACRKMVSIIYAVMRDNKAYTPCIPNEISV

SEQ ID NO: 369232 - protein, 355 aa, unidentified
MSKTNPVKIIIGVDTHKDIHVAVAINGIGAHLGTLTIPVSPKGYQNLETWARAFGSIHAFGIEGTGSYGAGLARFLQAKGHTVVEVNRPNRQLRHQNGKSDPLDAESAARAVLGGQANARPKSADSSVEMIRHLKVARDTAVKSRTQAMVTLKTIIINAPAALRQALDRIIGKMALIRHLAARPGPILSVTASAKGALRAIARRWLTLDAEIRAHDADLEALTASCVPAMLEAHGISTGTAAEMLILVGDNPERIRSEAAFAKLCGVCPVPASSGKTNRHRLNRGGNRQANAALYRVVIVRMRNHQPTLDYVKKRKADGKGKMEIIRCLKRFVAREIFGYLCGAQRSVPSISKAT

SEQ ID NO: 369233 - protein, 273 aa, unidentified
MITQKNQNEINVGVDTGKHQLDIYIRPLDIYFTVSNDEKGISEAIGTLKNHHPTRIVIEATGRLEQAFIMACAKAKLPFVIANPAHVKKFAGAIGQLAKTDQLDARLIAHYGDAIKPPLSELKPEMMRRMSDLLSRRRQLIALQTMEKNRLQIMPKALSGTIKPILTVLKNQLSKIDQQLLKLIESCPQYQAKNAILQSMPGVGNVVAFNLLSNMPELGYLTNKQAAALVGVAPINRESGAYQGQRRIRGGRHQIRTVMYMAMMSAMQCNPVF

SEQ ID NO: 369234 - protein, 400 aa, unidentified
MSNKDVVRERVVIAVDPHKASWTAAVVNASLQPLATLRVPVSAAGYQQLRRFACRWPQASWAIEGAGGLGAPLASRLSGEGIAVVDVPAKPAARVRLLSTGHGRKNDDADATSVGIAALTATGLHTVAIDEAAIALRALVEHRDDLVKTRTQTLNRLHGLLTQLIPAGAPTRLTAEAAAGLLRTVRPRIPLLRTLRALASDLITEIRRLDRRITTTATEITTAVAASGSTLTQLHGIGNLLAGKILARVGNINRFRSAAAFASYTGTAPIEVSSGDVVRHRLSRAGDRQLNSCLHIMAITQIAHDTPGRAYYQRKRAAGKSHREALRCLKRQLSDAVYRRLVRDAHPDTETGPEGHPGTTTHSGAADSTPTTDSSDKSLPGPPAPILPTHQDQLDTERCR

SEQ ID NO: 369235 - protein, 315 aa, unidentified
MTQTNMTTAGIDTSKAKLDIAVHGRTERWQVANGLSGWRALAAEFVRLGVTRVGIEATGGYERGVVEYLRAAGLIVLVLQPTQVKALGRMHLRRAKNDALDAVLIAACAAALDPPAIAPDPRLADLAENLTFLEQVEEDIRRCKTRLEHIEEPRLRRFVLGDIARLKARRATQIRDIARLLRCHHDLAVRLDLVLSIPGIGERTALALLIRMPELGRVSREEAAALAGLAPFDNDSGQYKGQRRIAGGRARLRRSLFAAALPAAFRWNKALIALYARLTAAGKAHNAALVACARKLLIYANTVVQRGTPWTDRAA

SEQ ID NO: 369236 - protein, 422 aa, unidentified
MLEETHDSDQIIQRVAALDVGKAELTCCVRVPGPGSSGRRLQEVRTYQTMTRSLLVLVDRLGELGVTRVVMEATSDYWRGVYYLLEAHGFEVWLVNARDVKHLPGRPKTDTLDAVWLCKLAERQMLRPSFVPPRPIRQLRHVTRYRADLVAARTAEKQRVEKLLEDAQIKLSVVASDIFGVSGRAMLAALVAGERDPKVLAQLARARMRAKLSLLEEAFTGFFTDQHAFLLAKMLARVDALDADLAELDAKLQELIAPFAEAVDRLDEIPGVGQLAAHLLLAELGADMTRFPTAGHLVSWAKFAPGVKESAGKRKGRGSTGHGNPYLARVLGEVAVAAGKTDTFLGERYRRIARRRGKRRAIVAVGRSILVIVWHLLSDPEAHFHDLGAGFYDTRIGPERAKRNHIRQLEALGYKVTLDPAA

SEQ ID NO: 369237 - protein, 349 aa, unidentified
MQITTIGLDIAKNVFQVHGIDANEKVVVRKQLRRGQVMAFFEALAPCLIGMEACATAHHWARELTKLGHEVRLMPAKDVKAYVKRNKNDAADAEAICEAVRRPTMRFVQVKSAEQQGQLMQHRTRDLLMRQRTQLINALRAHLAELGIVAAQGREGIQELLAIVADNEDQRVPIDARASLILLAAQLQAVQTLIGLIEKRIMAQHRSNEASKRLQTIPGIGVVGATAIAATVADPTVFRSGRDFAAWIGLVPRQDSTGGKQKLGPISKQGDQYLRRILVVGAHAVLRRAKQNPEKYPWITQLLARRPFKVVAVALANKMARVAWVLLARGGKYRAPAIALSMCVHELQG

SEQ ID NO: 369238 - protein, 306 aa, unidentified
MGRSIGLDACRDLCEVAIADGGRARSAGRVATTPEDLGLFADSLASDDRVVLEATGNALAIARILAPHVGEVVLAHAKQVRAISHARVKTDKVDARVLADLLAADLIPRVWIGDERVRMLRRLVSRRRGLVKRRTQVKNEISAVVHRNLKGRPPASDPFGRKGRIWLAAQELPADERLTVDAALRQLDFLGEELAAIDHLVAVEAQGDEDVRRLLTIPGVDVTTAVTLVAVIGDISRFPSSRHLVGYLGLHPRVRQSGSGPAHHGRLSKQGSAAARHAPGSPDESSSPRTNSHAAALPPKRYTVAP

SEQ ID NO: 369239 - protein, 395 aa, unidentified
MFIVGVDIAKRSHEAIIIAEDGQVVRKAFSFRNNCTGYNLLLEQVRRLTLVKSQIVFAMESTAHYWLALYARLLKDGYTVLVLNPIQSHSLRELYIRKTKTDARDSLIIADLVRFGRCKASNVPQDKILALRELCRSRAYLVDMAADLKRKLIALLDRIFPEYESLFDSVFSKASIAVLSKYSTPQKVKNANLRKLTDILMESSNGHFGEWKAHQLKEAACSSFGIDDSGGVYSTLLGMFLEQILSLTAQADSLEKQISVFFQEFNNPLTSIPGVGTVLAATILSEIGDITRFSSADKLLAYAGLDPSVKQSGEFKSNQNRMSKRGSPYLRRAIWLASTVAVHRDPMFQTYYEKKISEGLHYMNVIGHVSRKMTAVIFAVLRDGQPYQPILQSAG

SEQ ID NO: 369240 - protein, 343 aa, unidentified
MKLSRVGVDLAKNVYQLHGVDRYGKTVWKRRLRRGQWLQALMDNAEPGCVIGMEACTGAHHWARELQSRGYKVRLIAPQFVKPYIKSNKNDANDAEAICEAMSRPTMRFVTVKSVEQQDIQATHRVRTELKEQRVAKANQIRGLVAEYGLVAPQTLLALRRAIPCWLEEADNGLTDHFRSLLHGLWGDLVALDDRMTELDKQIKALADSNEVTRRLQQLRGVGPLVATALVATVGTGEQYRKGRQMAAALGLTPRQCSSGDKQRLLGISKRGDLYLRTMLIHGARAVVSQAKHRDDRLSRWVTSIAKRSHTNVAAVALANKTARMAWAMLRNDSNYDPDFAIS

SEQ ID NO: 369241 - protein, 339 aa, unidentified
MQVTTIGLDLAKNVFQVHGIDDHGEVAFNRALRRSQVLAFFGSLEPCLVGIEACGTSHHWARELIKLGHNVKLIPPAYVKPYVKRGKSDAVDAAAICEAVTRPTMRFVEVKTPEQQAILSVHRTRDLIVRQRTQTINMLRAQLAEFGIILPQGVYHALQFAKVCVNGEPLNLPADAEEVVFDLCDQLLFLHAKILRHSRHMTQIAKREKRVALLRTIPGVGPITASAIVATVGSGKQFNNGREFAAWLGLTPLNRSSGGKERLGHISKMGDQYIRRLLVLGMTSRIRSIRLQPEKFDPWFADILSRKPSRVAAVAMANKTARMIWAVLTCNEPYKVRTV

SEQ ID NO: 369242 - protein, 349 aa, unidentified
MEYVGFDLGKVNSQICVLTEDGELVEKRLKTERETLAQFFGRRSEKVCVLIEASTESEWVARCLEELGHKVIVADPNFAPMYATRSKKVKTDRRDARALCEACRLGAYRAAHRISDEARATKNLLAVREQLVLTRSRYISFAKSLLRGEGLRLNSVDADRLSRKLEAMELPAVLRQTLTPLIEAMKTLDEQIKITDKELERLAADNETIKRLQTVPGVGVITAASFAAVIDKVERFETAKQVRMYLGLVPSENSSGERQQRGRLTKTGNRRLRYLLVEAAWSLLRSKKADTAKLQKWTQAIAGRRGKQIAVVALARKLAGILYAMWRDGTEFGIAGQESQLMMTGSQQL

SEQ ID NO: 369243 - protein, 347 aa, unidentified
MSIVEVTRPIVGGVDTHLDVHVAAAVDPVGGLLGVASFPTTPAGYHDLSSWLSSFGPVERVGVEGTGTYGAGLARHLSASGIVVVEVDRPNRQARRRNGKSDELDAIEAARAALSGRASGAAKSATGNVEALRTLLVAKRSARSIRIKTVGQLRHLVITAPDDLRDRFGGLTTKALIRQAAALRPRPGSDPLGHAIKTAIVTLARRVQAINTEIAALDAHIDALVRATAPALLEVYGVGSDTAAIFLAAAGDNPGRIRSEAAWAKICGVAPVPAGSGRTNGRHRLNQGGNRQANHALWRVVLTRLGQGEPRTVAYMHRRLAEGRTKPEIIRALKRYVAREIFQQLPT

SEQ ID NO: 369244 - protein, 343 aa, unidentified
MDYFAGLDVSVKDTSVCIVDDAGEIVREVKVASEPDTLLAVLTNPAYRFKRIGLEAGPLSQWLFSALTEAGLPVICVETRHMRAALKAQINKTDRNDARGIAQMMRAGLYRPVHVKTLRSQKLRMLLTHRKLLQSKAIAIENDLRATLRNFGLKVGVVGTVKFEARIKELVENLSDLVVLVEPLLIVRRAIREQIGILHRRLLAIVRDDDVCRRLMTIPGVGPVVALTYRATVDVPARFRNSKAVGAVLGLTPSKYQSGEINRTGGISRCGDEMMRAMLYEAAHIMLVRSTKWSWLKAWAMTIARRRGLKKAIVALARRLAVIMHRIWVDGTEFRWTRETAAA

SEQ ID NO: 369245 - protein, 341 aa, unidentified
MENCGIDLHQKSSQVTVVDEEGEVLERASIPTTRAGLERWFGRRERMRILVEASGSSPWVVRVLLELGHDVDVIDPRRVRLIAQSTLKTDRIDADILAELARLRTKLRTLVWQRSETTQRQRGHLRVRRALVGARAAFIVTVRGLLRSFGVRVASCRSDRFAARCQATAIPPELAEVMTPLLDAIRDLDARIASMDAVVKQVGQGYPAVESLQDIPGVGPVVALAYVLSIEDPGRFRRSRDVPGYLGLRPTLRASAATVRQGHITKEGDADVRRLLVQAAHAHLRSHVDTALKSWAETLIPRIGKRKAIIALARKLAVLMHRLWITGEVYQPFPNDVSKAA

SEQ ID NO: 369246 - protein, 352 aa, unidentified
MEIIALDAHKRYSQVCVQSKNGKLLCEKRINHHRGQIAGFLGRWTPGSSVAVETIGNWYWIVDEIEASDMQPRLVHAHKAKLMLGCVNKTDKLDARGMNKLQLAGTLPTVWIPPSEIRDHRELPRTRMVFANLRTRLKNRIHSVFDKYGLHNDFYGISDIFGSKGREQMVLTIRKLPSETRYTLRCLLRELAMVESQVQRIEKRMNKVFSKTEPIHRLMTLPGVGLILAVVIANEIGDISRFSTPQRLASYAGTVPRVHSSGGHTRYGKLRSDVNHYLKWAYSEAGNSTAVNHKRLPARHTSMLYKRIRDKKGHAKAVGAVARHLAEASFWILTRNEDYKEPQNQSVLSTAV

SEQ ID NO: 369247 - protein, 351 aa, unidentified
MTRYIGLDAHSESCTLAVLGPSGKRLRYERLQTSTALLKSFIKEVPRPRQLCMEEGTLSEWLCEELAPVVDKLVVVVPDRNPGNKSDLIDACKLADDLRRGTIRRPVYKAPGQFRTLREAARAHYVLQRDKVRAKSRLHALCRSCGHADLGKSLYSPTTRAEALQQLPEHLRPRAALFGQQLDALVECSSQAEHNLREQCSRLPIVQRIATAPGIGVVRAAYIVAVVMTPHRFRTTRQFWSYSGLAVVTRSSSDWVSEGAGKWRRSKTQQTRGLNHNRHPLLKNVFKGAALQITLMPEHPLGKAYQRLLTQTKPNLARLTIARRLAAAVLAMWKHGEDYEPTKHEIPTASA

SEQ ID NO: 369248 - protein, 426 aa, unidentified
MSQRDYNRQVAKRQRIRKATLIVGVDIGKAFNAVGFMDKEGNVLGSCAKLYNSREGFEEFVNLIERLKAKHHLRDVLIGMEPTGHYWRKLAYFAKDHGYEVRFVRTTALKHHREIDESSSAKSDRRDALTIANITREGKYIDTVIEDGPLRQLRTLSKARERLLRYSVSAKNSLHAALDDYFPELHEIFWAMGSRSLWAILEQCPFPQDVVLMKVPTLQELIGRISRKQAGSARKAKELYDAAQKSIGVKQIGSADRYRVGMCLEEVKRTVMTLKHIDIQLKLMLREIPSASYLMSIPGIGPLSAAVFLGEIGDPVNFQNARQLVKYAGYDPQECDSGSRIGRRFISKKGRWLLRKYLFFMGMRVVVLSKYFQEYYHRKLETKNRYGQQPRRKEILCAVVIKLIKVIFALLRDKRGFKDLEPAAAA

SEQ ID NO: 369249 - protein, 322 aa, unidentified
MASFLGIDVSSRSLDGWVRPQAVRIAVSNNPAGFEELERTLRKFSIKRILLEATGGYERDVLRLLQDAGYKVIRVNPARARKFADSMGVKAKTDAIDAEVLAHYAEVIPDQPTLQISPDRALLRELLMQRDRLVQQRDDDRRRLKQAQSLVVANFLKANLQHFRSQIRLVEQEINQQAAKLNDERIARLTQVKGIGMVTAGKLVALLPEIGRVESREIASLVGVAPFNHDSGKSLGKRSITGGRFEVRRTLYMALLVAVKYNPALKARYEALRGRGKLAKVALVACMRTFIVRLNAMIKTGTPWRDLILPQPAGTTQVEKAA

SEQ ID NO: 369250 - protein, 422 aa, unidentified
MLEETQETEEIIQRVAALDVGKAELTCCVRVPGRGGSGRRLQEVRAYQTMTRWLLVLAERLGELGVTRVVMEATSDYWKGVYYLLEAHGFEVWLVNARDVKHLPGRPKTDTLDAVWLCKLAERQLLRPSFVPPPAIRQLRDVARYRTDLVAVRTAEKQRVEKLLEDAQIKLSVVASDIFGVSGRAMLAALVAGERDPKILAQLARTRLRAKLGPLVEAFTGFFTDQHAFLLAKMLARVDQLDADLAELDAKLQELIAPFAGAVDRLDEIPGVGQVAARLLLAELGTDMTRFPTAGHLVSWAKFAPGVKESAGKRKGSGSTGHGNPYLARVLGEAAVAASKTDTFLGERYRRIARRRGKRRAIVAVGRSILVIVWHLLSDPTARFQDLGAGFYDTRINAERAKRNHIRQLEALGYKVTLQPAA

SEQ ID NO: 369251 - protein, 492 aa, unidentified
MCGLRPIRLSWRFVYGDVMGGSSTVRFVLGIDVACRAAHRATLAAQDGAILWQQAHKFWSTPEQLEQVWARVIQKAGSGEQVQVVMEPTRNAWVLLACWFSERGASVVLVPTTQSADLRAYYNKHTKNDRLDSQVLARLPLFHPEGLHPFTGSGPADPLRRVVSLRGSMVQRRTAGQQRLDSYLEILGPGWHVALGTDFSKTALAVLGRYANPDTLLKLGKTRLTQFLIRHSRGHWGEQRADLLLAAARQSQLLWGTRLDFTALAADIAVEVALIDALNTQISQSEARIADLYAAADPDAIVATAPGVGATLAPVIHARLGDPTRFHNLAAVRRFSGLVPKVNQSGLKQTEHPGITKAGDPYLRQALFLAADHARRSDPQLAVAYKRLMENGAHHNSALCHIATRLLTRIASCTRNRQPYIIRDVDGTPLTSQQGRCIVQDRYQIDPALRKANRQARKSQTLKGRAGREQQESPSAPPHRPATHKNTPPKTP

SEQ ID NO: 369252 - protein, 387 aa, unidentified
MSVQHWRPRHIHERSFLMLNATTFIGLDVHARSIKAFGFNVITGEEFSSSFGYDHVAVSDWISSLPQPAKCVYESGVTGFDLQKKLTQDGIDCVIGAVSKMIKPAADKKKKNDRNDAKFLARMLSVGNITEVWIPDDECEAARDLVRALEDATEEVKRSKQLLSKFLLRHGLIFNEYSPTGQRKKNWTLAYWRWIKEIHFKEKTDQKTFEYYIDRVKASLEEKKRLEDLVKELTCLPRWKKRVDSIRCIKGIDIISAANLVFEADEFSRFKNARAFASWLGLTPSEYSSGESVIRGGITKAGNKHLRRILVESSWHYLYASPSAKDLTKGQSPDPLARRHANKGTRRLTERRRYLLERGVQKNKANIATARELAGWVWAVGKIVEDN

SEQ ID NO: 369253 - protein, 354 aa, unidentified
MAKTIQAEQSGFATIGIDIGKDVLHLVGFDHDGRITLRRKIKRLALVSTFEALSPCIVGMEACLSAHFVSRTLRKLGFEPRIIPAKYTKPFIKGQKNDYNDAEAIAEAALRPNLNLVAEKTQAQLDLQALHRVRSRLVSRRTATINQIRAFLIEQGIAVRTGSRALRNSLFAILKNRADEISPRMSAIIIDLHDDWSALDDRIARISAEIEEMSQQEENCRRLMSVPGIGPIISTAMVAAIGTGEAFDRGRDFGAWLGLVPRQFSTGGSTILGRISKRGSRYLRTLFVQAAHIIMMRPKNWERFSFGPWLAEATKRMHKNKAAAALANKLARIAWSILRHGKGFDAHRIEGFAV

SEQ ID NO: 369254 - protein, 407 aa, unidentified
MRVGEEEVCLRYRGLRTGVRRATYRAPEGDSLQSHRRQTMSNVITSFVGLDVHRDSIAMGVAQTGREPPRFVGTVTPQWAPLSKALGRLGRRQELQIVYEAGPCGYTLARQLRAHGYACEVIAPAKIARRPGDRIKTDRRDALLLARAARAGELVSVTIPDERDEAMRDLSRAREDAVRARLKARQQLKALLLRHGHRYTGKSSWTAAHERYLAEVSFAQPAQDIAYAEYRSAVREAYERVERSTGALGAQLEHWRMRPVVQALMSLRGIDLIAAVTLVAEIGDFTRFARPRELMGFLGLVPSEYSSGATRRQGAITKTGNSHARRVLVEAAWNYRFPARVSRVLQARQEGQPKAVRDIAWRAQLRLTRRYRHLCARKLALNKICVAIARELSAFVWDIARQVKPVT

SEQ ID NO: 369255 - protein, 346 aa, unidentified
MEYYVGLDVSLKLTAICIVDRTGKIEREGVVPSDPEAIAIFIKLHAPHVARVGLETGATATWLWTELNKLGLPVVCIDARHAKAALRMQINKSDRNDAVGIARIMQCGWYKEVRVKDLDSHAIKALLVSRALLVKIKRDVENQIRGLLKNLGLVIGRAKMNVFAVRAGELIQDRPELAAAVAPLLKTREVIERQIADLDRKVMRMARNDIQVRRFMTVPGVGPITALCYRATIDDPTRFKKSRSVGAYAGLTTRRYASGEIDWTGRISKCGDAMLRSYLYEAANVLLTRVAKWSALKSWGMRVAKRSSLRKAKVAVARKLAVILHRMWVDGTEFKWSSKEIAAQIA

SEQ ID NO: 369256 - protein, 374 aa, unidentified
MKMSIGVDLHKSQFTVCFLAEDRKVVETGMYPTNENGYKEFLDKCNELAETGYEAKAAVESTGNARYFRNRLLSAGIEVTVVNTLKFKVVNESVKKTDKHDARTLAEFLEKDMLPESCLCSQTSEDIRRVLKTRSITVKALVGIKNQIHGLLLGYGIETKRGELQSKKERQRILVGLEDHRSLGGAAEAVKPLFATVDKFSAQVKELEKVLEKMIAQDRDVEEDVALLQTIPGVGLITAATLCAFIDDIHRYESPKKFAAHMGLVPWVQNSNEMIRHGKITKRGPKEMRTAMVQCVLGMVRAKGTTGGYRIMTQYDRMKRQKGSGKSIIATARKLSTIIFMMLKNREPFDPLRMVQSQKYLNMQAAAFEAAKTG

SEQ ID NO: 369257 - protein, 457 aa, unidentified
MMKQPEEILDEEHEQVLERVCAIDVAKASGKVCTRLPHAATPGRRVSKVWDVAATARSVTELATHLVELGIEKVTVESTSDYWRIWFYLLEAHGLDVQLVNARDVKNVPGRPKTDKLDAVWLAKLTEKGLLRPSFVPPAPIRTLRDYTRMRVDLTQERTRHWQRLEKLLEDSLIKVSSVASTLDTLSTRDMLEALIAGERDPQVLADLARGKMKAKRAALVEALTGRFDDHHAELARMLLDQIDGLSAQTDKLTARIEALIAAIPAAAAPTDDNRPDRGEHPSGHDTDTQLAPVWLPALQRLQEIPGIGPRGAQVILAEIGLDMNRFPTAGHLASWTKLCPRTIQSGSKNRAGKTGKGNPYLKGILGEAAAAAAKTATFLGERYRRIVKRRGKLKALVAVARSIVVIVWHLLADPTTRFLDLGPDYHTTNVNTGRKIRNLVHQLEVLGLQVSLQPAA

SEQ ID NO: 369258 - protein, 452 aa, unidentified
MNDVKTEDRSYLGIDVSKGYADFCLMGADGAVWKETVLDDTDRGHTALRELLEWAFDRSESLEVGLEATGGYERNWLQTLREWGEGRPVETDLVNALAVKRFAQQDLHGNKTDRISARRIASYLRKGLRKTEVRFEPHMEGPKAVIRMVREASNRRGSLKSRFQQLLVRANPELVQYCRSRLPKWLLKLVARYPTARQLAEAGPEDITDIPFVTEERAEEVLSAARKSVASQTGEDTGFALAYMAEKLLNLQEEIEDLKEQVDQMLEGEPGLKVLCTIPGISRWSAAVLRSEIGPIDRFDTAKELVAYVGLDPRREESGDKQAARSISKRGNPRVRAILYICVQNAVQHNPPVKALYDRLTGRGKHHMLAMTACMRKLLCIAYGCWSKGEAFDPTYEKRIKAEKTDRSDACSEENQNDRPLDLNAPVSRTEAQRRRTNRKREATAPQKGVGP

SEQ ID NO: 369259 - protein, 349 aa, unidentified
MKIVGCDLHARQQSIAMVDTETGEFTEKTLCHEGNAVRAFYASLEGPVVVGIEATGAMQWFLELLDELGIEGRVGHPAKIRAQETRKQKHDRRDARLLLQLLSEDRFPEIWMPSTEQRDLRTLLRDRDQWVRMRTRVQHTLQAIALNHALRQGRALWSATGQTALEALPLPPYTRQRRDELLALYAQLQKRIQELNKEVEAQARQRPQARRLLTHPGVGPVTALATDVFLGDPSRFATGNQVASYIGMIPSERTSGKRQRLGKMSKQGNALLRYLWTEAAMSTVRKDPELQRFYRRKLIQKGMGKARIAAARKLGIRLWIMMRDQIDYQEFCRRGKLRQTGETHAGMPA

SEQ ID NO: 369260 - protein, 412 aa, unidentified
MDVMYPRCCGLDVHKNTVVACCILSPEGPEPVKEMRTFRTMTTDLLALADWLQEKGCTHVAMESTGVYWRPVYNVLEGQCELLVVNAQHIKAVPGRKTDVKDAAWIAELLRHGLLRGSFIPSKPQRQLRELTRYRSTLVQEHARTLNRLQAVLEDANLKLASVVSDISGVSARAMLEAILAGERDVEALADLARGRLRAKRDQLKDALEGRVTAHHSFLLTEHLSALEYLDEAVARVSAEIDQRLTADQEAIALLDTIPGVGLRAAEILIAEIGTDMSRFPSAKHLASWAGMCPGNHESGGKRLSGKTRKGSRWLRQILVEIAHVASKTKNTYLAAQYRRIAARRGKKRALIAVGHTVLTIVYTMLTRKQPYQDLGAAYFDQREQHRVERRLVQRLERLGYEVALHPRALAS

SEQ ID NO: 369261 - protein, 392 aa, unidentified
MEPVVGVDVAKGFSVVQAFLKRNEPWRKAISISHEKSGLDQLGGLLSELQAQTEQSPVVILEATGHYHRGLVAYLERNGWTYFIVNPLQAKRAKGTQLRKVKTDAADAWHLAEMYYRGDVHPHRTWEEGFTELQHVTRQHEFVTGMFVQAKLNMRALLDQVFPEYEKVFSKLFSVTSLHVLARCLEEQVEDLQGVIQKHAGKSHSKKWAEAKVEHLSEVLSRWSEEPRSPAQTTVLRSMVSLVLAFTEQLSVLEKQMDELATGLPEVELVKSIPGVGDKLAAAIVAEIGDVRQFKEAKQLVAFAGLDPGIFSSGKFTATSSRITKRGSKRLRRALYLAVQCGIRGGTNPKIREYYEKKRKEGKPYKVVVIACANKLLHHVYAILSKRQPFQP

SEQ ID NO: 369262 - protein, 338 aa, unidentified
MELKRIAIDTSKSVFTLHGVDAQERAVLRRDLRRGQLVAFFAKLAPTEVVLEACGGSHHWARTLSKLGHRVGLIPPQYVKPFVKRGKTDRNDAEAISEAASRPAMRRVAIKSAAQQADALTLSARELLVAQRTQTINALRGHAAEFGVVVAGGTGRVAKLLAAVAQDADVPQAARSLLAFLGQQVAHLDREIAKLDTALMAQHKANPVSRLLAEIPGIGPIGALTLAVRIDPRQFQSGRHLAAWIGLTPREHSSGGKQRMGGISRAGDERLRQLLVLGATAIIRYAKPGRASAWLLSLLERRPRKLVAVALANKMARIAWAMMTTGEAYRRAPLAAAA

SEQ ID NO: 369263 - protein, 492 aa, unidentified
MGRKGKQKPAVVSAPVEIADAEHELVVERAAAIDVAKATGKVCVRLPGKSGRRFSRVWDVPARTGAIGELAEHLKQLGVEKVSIESTSDYWRIWYYLLEAAELKPELVNARDVKNVPGRPKSDKLDAVWLAKLTEKGLLRPSFVPPAPIRRLRDYTRLREDLTRERTRYWQRLEKLLEDAAIKVSAVASTLDTLSTRDMIEALIAGERDPQRLAELARGRMKAKRMELIGALDGRFDDHHAELARMLLRQIDTLTGEIDTLTARIEQLIADLPDTAAVDQAADDDTGGGEAGARPSALGEQGTGESGGDSPAAARNPIRVDPHTVAECERLTAIERLDEITGVGERAAQIIIAEIGTDMSRFPTPQHLVSWAKLCPRTIQSGPVTRAGKTGEGNPYLKGALGEAAAAAAKTNTFLGERYRRIVKRRGKLKALVAVARSILVVVWHLLANPTARYRDLGPDYHTSRAATTRRICNHIAQLTAMGYRVTLEPAA

SEQ ID NO: 369264 - protein, 343 aa, unidentified
MDKVDTVGVEVSAKVLVVALKSNGQIRACEFANTASGHKQLISYVRRYSQRVRVCMESTGLYGLDLALALQAQKGMEIMVANPRSVRHFAEAMMKRSKTDPVDAKLLAEYAERMPFQVWQPPSLAARRLCALARAMHQLTEISTMQKNQLHAAGSTETTPKIILTELRRSLAQQQRAIEHLLKEAIDLLQSDLLLQKRFQLLLGIRGIRELSAVHLLGELVLIPADCDVRQWVAYAGLDPRQYKSGDSVEKKVRISKVGNRHLRRALYMPALVAVRHNPHFRAFYRQLLAKGKLKMVALVAVMRKLLHGIYGIFKSQQPFDATKLFSLSLVSALEPATEKMAC

SEQ ID NO: 369265 - protein, 395 aa, unidentified
MAVGATMKPWLRYDFVESARQMRSRRPSCSATKLAQYPKPLSSESRACIYKLEPARKQSSTKEPNRMNLPVTALGIDIAKLKFDVCLVTPSGRAKHKVFQNTRHGFEQLVAWLNSHQVVDLHACLEATGTYGEPLALFLFEAAFMVSLVNPAAVRAFANAGLSRTKNDKVDAELIARFCLAQRPALWSPPAPELRELQALVRRLESLVEMRVAEENRLSSGISADAVKQSLEEHIAYLIEQIKQTEALIREHINNHPDLKQQSELLDSIPGIGETTAALLLAEIVNIKAYKSARQVAAYAGLVPRERRSGSSVRGRVCLSKIGNARLRKALYFPAITALRSSDFFKAWAEPLRMRGKSKMSVIGAAMRKLIHLAYGVIKTGKPFDPNWVKQTEVA

SEQ ID NO: 369266 - protein, 312 aa, unidentified
MDKTICGVDVSKEWLDAHLEPNGAAGRFRNDAAGITDLAAWCQGHGVELAVMEASGGYERLALLLLWDLSLPCALVNARSVRRFAEAMGFLEKTDGIDAAMIAGYAQAKRVQPTLPPSPAQQRLKALVARLGQVTGDLTIQKQRKSAAADTETIASLDEVIALLVRQSRRLEGEIASLIDDDPLWACLDRAFRSLKGIASRSVARLMAELPEIGILSNKAIAKLAGLAPIANDSGKRSGRRPVRGGRAGPRGVLFLVARIVAKYDPHLAAFQHRLQAAGKEKMVIRIALARKLLAILNAKARDARTEFANAT

SEQ ID NO: 369267 - protein, 350 aa, unidentified
MDRYIGLDAHTSSCTVAVVGPSGRRVNSQIVETNARALIQVLRSIPRDRHLCLEEGTHASWLYEVLSPHVEEIVVAAVRESRGPKSDKLDAFGLAEQLRIGAVKRKVYKKRGDFGPLKPRTTAYKLLVADSVRVQNRIKSLFRSRGVAVAGKGVFSTAEREEWLRKLPTAACPLAELLYLEHDGLLALRRKAQKEMLGEARKHRVFGIVKSCPGLGEVRTAQLLPIVVTPYRFANKRAFWAYCGLGIVMRSSSDWVRTQSGEWIRAPIQQTRGLNRNANRTLKGIFKGAATTVISRAEDEPLYRHYLRLLDGGTKPNLAKLTLARQVASIMLAVWRKEEVYDPKKVGQAI

SEQ ID NO: 369268 - protein, 405 aa, unidentified
MNAVGIDVSKGKSMVAILRPMGELVRKPFEVSHDYATLEALAYYLKGLDGETRAILEYTGRYYEPVARALHQVGIYVSAVNPILIHNYSDNSLRRVKTDRKDALKIAKYALDNWYDLREYTPMDAVRLELKTANRQYQLYTKMKVGLKNNLIALLDQTWPGVNTLFDSPVRADGRQKWVDFAYDFWHSECTCNLSQDVFVEKYRKWCKRRGYNFSHAKAEDIYIESLGHFNILPKNANTKMLIRESVMALNAVSKTAETFHTEMLRLAEQLPEYKVVMAMYGVGKATGPQLMAELGDVRRFSHRGAVIAYAGVDPQPSQSGKHTRNSDPISRKGSSLLRKVLFQIVEAHLRKAPVDEPVFAFIDRKRSEGKPYFVYMTAGANKFLRIYYARVKEHLNILEIPFNE

SEQ ID NO: 369269 - protein, 340 aa, unidentified
MSEITRIAIDTSKSVFTLHAVNAVGAAILRRNLRRQDVVPFFEKLPPVEVVMEACGGSHHWGRVLQAMGHRVRLIPAQYVKPFVKRSKNDRNDAEAISEAAARPGMREVAVKSAEMQAQAMLLSVQELLVRQRTQLVNALRGHAAELGLVAPVGDKGYATLRAAVATDASLPAAATEALRLLGSEVDRVEARLVEIDAKVMAQHKANPDSRRLSAIPGIGPKGALNFTLRIDAAQFKSGRHFAAWLGLVPQERSTGGKQRLGGISRAGNERLRQLLVLGATAVIQHAKPGRDGVSAWLLKLLERKPRKVAAVALANKMARIIWAMLTRGESYRPAAPVAA

SEQ ID NO: 369270 - protein, 380 aa, unidentified
MPEAVIGLDVGKSSHWACVATRDGEILLSAPVANREGDLDSLFGRFPDALVVVDQSRNIGALALARAKAAGMSAAYLPGLAAHGAARLFAGDAKTDERDAMVIAKTALGIPDALLPVGDPGPTVAAARALAAQRNFLTCENTRSKNRLRSILLESCPAFEALVDLSDGPQLRLMASLGGAWSVADAGPRRAAALTRGAARGKIEALVRSTASSTRPDAAAIAAEDRAVRLLARRISENSAEIDVITAEISALLEGDDTYRCLLTVPGIGPKTASELAISIDIEDFPSHDRLASYCGLAPRNRQSGTSISSVTASRQGNKRLKNLLIFSCNCLTRTEGRWGDYYARCRERGMPHGKALKALARKRLKVIYAVMRDRVPYAA

SEQ ID NO: 369271 - protein, 344 aa, unidentified
MTYYAGLDVSLRSTHICVIDDDGELLAEGKTDSEVADINAFLDDLDIEITEVGLEAGTLTQCLTYGLQSAGFEVVCMEARQVKAALSAMRNKTDKNDARGIAQLLRSGWYGRVHVKSIESHQVRALLSSRRAVLAKCIDLEQEIRGLFKVFGIKLPKRLGHGAFDPKVRPLIEADEALSHALLPMLDARLVLYHSFRELDNRTRHMANDDPTCQRLMTAPGVGFVTALTFKAGVDDPTRFKRSRTVAAHFGLTPRRFQSGEIDFDGHISRAGDANVRSTLYVAANSMLTRSSKWSPLKAWGMKLAKSRGHKRAVIAVARKLAVILHRMWIDDTQFQWSTEAARS

SEQ ID NO: 369272 - protein, 313 aa, unidentified
METSPLCIGIDVAKAQLDVAIGADRDTWSVSNDDAGIQTLLEDLQGRTCSMVVLEATGGFEVPVVSALAAAGIPVVVANPRQVRNFARATGQLAKTDRLDARVLALFAERIRPEVRALPDDATRLLDALLTRRRQISGMIVAERNRQGFAPAPLKKSIEKHIRWLQREMDGVDADLGTAIQASPVWRAKEALYRGVPGIGPVISRTLIADLPELGQLTHREIASLVGLAPLARDSGTMKGKRMIFGGRAPVRNALYMAAVVGVQHNDVIRAFYLRLRERGKPPKVALIACAHKLLTILNSMARTGEPWRLDHA

SEQ ID NO: 369273 - protein, 346 aa, unidentified
MQFVGLDIHKKFTHAVVIDEQGNKILEERFDSSIQGLHKFLRKINKEASIVMEACYMWQHIYDYLEDGGYKVKLAHPLKTRAIAEARIKTDSIDAEILAQLLRANLLPESYVPPRYVRTEREITRHRASLVRMRTRVKNKIHAILSKHGIRHGFSDLFGRSGIEFLRNLDLPMESRFQLNHYLTILRLLDYKIKETSYQIERLVKDNPSARLLTTIPGISYYSALLIISEIGDIRRFQSSKKLCSYAGLIPSTYQSGNTLRHGKITKQGSKWLRWILIQSTNVAIRFNERLSKFYTRIARKKGHNIAIVATARKLLSYIYVMLTLGIEFNALQVNRARATRDFHGQ

SEQ ID NO: 369274 - protein, 397 aa, unidentified
MASVFVGIDVSKEFSTAQGIDKDSKKVFYLRFAMNSEGFSELLKVMMKHAESVTEVRVAMESTGCYHINLFSFLSSEGVPCVVLNPLLITNFARLSLRKTKTDKKDALTIAQFLLSHEKSLSTIAFSQDTQDLKDLARERESLTVLISGMKNDIKRLLQGTFPELEKLCNPYGETMLHFLRQFPSARLVRAAKKRDIEKALICPNEKRKRVIVSIDDIVAAAKTSVASASATKELILSEKIATLLYLQEKNERITDVLIETCESLRIEELDIIRSVDGVNDITGSTFLAELGDINNFNSYKHVIAFAGLDPSIHQSGQYEGRSTISKRGNRHLRRVIFLMTLCTVRSKNKFREYFLRRKQEGLPPKKAILATAHKLIRVIFAMLSNKTLFRKGVVAE

SEQ ID NO: 369275 - protein, 375 aa, unidentified
MEVTTIGIDVAKDVFGVHGVDGRGQVTMRKRLVRKHLLEFMSKLPACLVGLEACTSAHYWARELGQLGHRVKLMSPRFVKPYRKSEKNDANDAEAICEAVARPSMRFVPIKSAAQQDLQALHRVREQLLKSRTALVNQVRGLLAEHGIVAPRGIARARRLLVETLTEPERHGLSEVFRETLLEIAERLRLFDQRIQAYDLRIERVFQHDERCQRLAAVQGVGPLVATAMVAAVGNAREFKSGRELSAWLGLVPRQHSSGNRSMLLGISKRGDHYLRTIMIHGARAALRCAERRRDPHSRWVTRLKLRRGANVATVALANKNARIIWALLTHDDQYRPSILDQSSVARLAALRSSPPASVRSAGAERSLHSEFKRT

SEQ ID NO: 369276 - protein, 375 aa, unidentified
MSEITRGLIARVGVDLAKQVIQVHAVDVAGRRVVARAIKRDQFLVWCAQLPPGCLVAMEACSSAHHWARKLRAMGLDARLIAATFVSPYRMEGKGGKNDMTDAAAVCEAASRPTMRFVPAKSCEQQGVMSLHRVREGLKEDRTACINQIRGVLAEFGLVFGKSAKVLRAALCDVIEDASNDLSTMARLVVQRAFEHWRELDEHMRWCDQQVGQHVRASAQAKRAVKLTGIGELGASAFTASVGDFKQFKSGAQFGSWLGIVPRQNSSGGKASLGRITKRGDDYLRTLLIQGAKAAVMSASKRDDPISRWLVQLTARVGWQKACVAMANKNARILWAVMTRDQGYDPHHVSVKPLTKQSAPPGVAPAEPAQESCTA

SEQ ID NO: 369277 - protein, 386 aa, unidentified
MVSTEPHAWGTGLMNNITYVGLDVHKATVCVAVAESGREGEVRQIGVFENRPEVLSKMVSRLGKGGRRLNFCYEAGPCGYGLHRFLTGCGYDCVVVAPSLIPMKSGDRVKTDRRDAMMLAKLHRAGELTKIWIPDAAHEAMRDLVRARATAVRVLSKARQHLQGFLLRHDRIYRGVRAWTKAYRRWLTTVRFDHPAQQIVLQDYIHAVQDAELRRDRLTQQIEELLPNWSMGPVAMALQAMRGVALLVAVTVVAEVGDFRRFANPRQLMAYLGLVPSEHSSGSSIRRAGITKAGNSLARRVLIEGAWTYRMQARVSRKIHDRLEPLSAPIRDLAWKAQVRLCARYRHLAAAGKPRVVVTTAIAREMAGFIWAIAKLAQPAVVQPEH

SEQ ID NO: 369278 - protein, 372 aa, unidentified
MNYNTVYVGMDVHKESFSLCAYTIEAEKASHYQRTEADYKKVLNYLEFLRTIYGDDANFICGYEAGCLGYTLYHQLTANNVKCIILAPTTMLEQRSKKRIKTDKRDAEIIARCLAQHNYRPVHIPTAKDEETKEFLRMRDDHKLALKKVKQQILAFCLRHNYRYDGNSHWTAAHLKWLKSLTPEALYKEILDEYLLTYHTLSDKLERLDKRIEELSTQDEYKEAVKKLCCFIGVKTHTALSVLVEVGDFKRFASAQHFASYLGLVPGEDSSGDDQNRLGITKAGNRHIRLLLTEASQCYARGQVGFKSKELKARQSWNTPAVIAYADKANERLRRRYYKMVLNKCKKHNVAKTAIARELACFMWGMMTDNIA

SEQ ID NO: 369279 - protein, 409 aa, unidentified
MQVIHSRCAALDLGKDVLAAAVRLQNGKTVARECRSYGTTTRQVLALCSWLQSCGVTHVVMEATGSYWKCVWRLLEAQFELTLANPAQIKNLPGRKSDVNDATWMADLLAHGLVRGSFVPPAAITALRELTRTRKQFVREIARHTLRMQKTLDIAGLKITGIISDVVGVSGRAILEALIAGETDAEGLADLAHGRLRVPRAQLLEALQGRLTLQQRRLLGMHLRQIEAAEDSLASLDMYIDEAMEPFRETVTRLREVPGLSDVSVPALLGEIGVDMSRFQTHRQLLSWARLCPRLDQSAGKVHSTRTLKGANWIKTLMIQAAWCAVRTKNSYFRAQFLRLRTRRGSKKAIGAVAASMLTTVYYMIRDRTPYQDLGDRYFDQRDRSRVARRFVVRLQRLGYTVQINDAVA

SEQ ID NO: 369280 - protein, 359 aa, unidentified
MQKQNYELDFTGQDIYAGIDAHLKSWKVTIMVQGISCKTFSQNPDADILRKYLSKNYPNGDYHSAYEAGFCGFSPHRELINQGINNIVINPADVPTTDKERKQKEDKRDSRKIARSLYNNELAAIYVPDMEIEGLRSLVRYRKTLVKEINRYKNRTKSLLYYYGIRVPIELEKSSKHWSKRYTTWLKGLELKTEYAASTLNSMIETVEHLRVKLLEINRQLRILEKEGEYSDTIVLLRSVPGVGLIMAMTIITELEDIQRFGNLDKLCSYVGLIPRTNSSGDNDKVGEITPRSNRQLRSMLVESSWIAIRQDPALMMRYSELCQRMEPNKAIIKIAKKLLSRIKYVLKNKEPYEKGLVK

SEQ ID NO: 369281 - protein, 422 aa, unidentified
MKNTAARKLKQVPERYLIIGVDPHKKKHAAVAITQDLTIHDRFKFDNTMEGLEFMLQRVKTVMVKSGCRGIMFAIETGGHYWRNIAYYLDERGIPFRFINQYTLKRRREGKDLNKRKNDYRDSEVAAQLLCTGEFVESGIPQGVYAELRTAHNAYRRLVKERTRITNLVKGLLDSLFPEFVHVFKDPCALTALSVLSTCSTPGIIAVMTEDQFIAVIEAQHHGRRLMRRKLGELRNLAKTSIGIEAGARSVAAEISFLVEKLELIRGHIRTIERTLVGLVDEAEEGKYLLSIRGLHYIAVAGLLAELGCFKSYRSAKQMIKMAGSNPTESESGGKRRSRTPMSKQGRPVLRYCAWTSVIPMLRLNPDFRAWAKERRERPAHANPLSGREVVGAALNRLLRLCFAMVKNQTYYRSPQLVEVTE

SEQ ID NO: 369282 - protein, 408 aa, unidentified
MNAVGIDVSKGKSMVAALRPMGEVALLPQEFLHTGVGLEQMAYAIIALGEDTRVIMEATGRYHEPVAAALHEYGIYVCVLNPLFIKQSGGGSIRKVKTDKADAMKIAKYGLDNWVDLREYTPMDTVRQQLKLCSRQYNLYMKTVVSLQNNLISLTDKTFPGVNELFSSPERADGHQKWVDFVMTFYHCDCICRVSENAFAERYQKWCKRKGYHFSAEKAQDVYLGSCGHFTTLPKNDNTKLLITTAAQQLLAGKMTLAALRTEMTRLAKQLPEYDIVRAMYGVGETTAVQLMAEIGDVRRFPRRSSIVGFAGVDPAVDQSGKPSAKSVPTTKRGSPHLRKTLYQIVCTYLKKSPVDEPVYQFLDKKRSEGKPYFVYMTAAQNKFLRIYYARVKECLEAFDAQQDTSQR

SEQ ID NO: 369283 - protein, 463 aa, unidentified
MRFERAGQLLPLAPGSPGGTALAGYQRTAGRAGNVEEVTDEPLYRDRVCGIDIGKAEMYATIRVPSDNDPARRAQETRGFATTRQGVLALADWMRSWQVPCAVMEATGDYWKGPFYRLEAEGFECVLADARQVKNLPGRPKRDPSDSRWLATCFERGSVTSCFVATPEFRIIREHTRYRRDLTAERTREKQRAEKLLESAAIKLSSVITDLHGITGRDIMDHLIAGERDPRVLAQLARGRARSKIAELEAALEGAEFFTSELAALLARMLARIDQLGADIDEVTVVIEALLAPYEEQLQQAESMPGWGRRSAQDAIAETGADMSRFRTGAHLASWAGRTPLDNQSGSRKGKAKSKKGNRYLGAVLGETAVSAGKTQTREGARYRRLSRRRGKAKACVALGSTQMKVYHKLLSNPGMRYEDLGADYYDQQADARRQLRALEKRARDLGYTLIPDLTGCPEIACP

SEQ ID NO: 369284 - protein, 457 aa, unidentified
MTVNASPTRMPVVPGVVRVSVGIDAAITAKHHVSVRETNADGSVSMHRFVVPPTLTGLSQLSRRLARYPGVVAVAEPTSMTWLPLALSLSSGGGRLALVGTRHSARLRGAISGKNKSDVIDADVLARADEVFDLPRLVLPSPAELALRRAVTRRASAVIDANRCWRRLVSLARWAFPDVWTAFAGSLATAKAVLGRWPQLDQLACARRASLTAVVAEHTRSVADVPDRVEQIRSAARDWAQFWAGRLDLDALAWEVSEHLTDLAAGNDRVDRAAEQATMYWERLYGDDALLVSLPGMGPVTAPAVRAFLGDGSRFDTAKAVANYVGITPSNWSSGTVNQPSRAITKEGPAALRLAFYLAGNAARRTDPQLAALYHRLMTRAGHCHSQATIAVARKLAERTWTVLTRGTPYRLQDPDGAPITSRAAKVLIAQQFTVPNEVRERARAHTAATHRSKLTR

SEQ ID NO: 369285 - protein, 448 aa, unidentified
MAQRSQLKRMEIANPNAAGIDVGSASHFVSVPSDRDDEPVREFKSFTEDLEHLADWLVSCGIDTVAMESTGVYWITLFELLESRGLNVFLVNARHVKNVSGRKSDVLDCQWLQQLMSYGLLSGAFRPKDEICALRSVTRQRAMLLSYQSRHVQHMQKALTLMNVQLANVISDVVGETGQKILRAIIAGERDPLKLADLKNGRIEASKEEIAKSLQGNWREEHLFALTQAVELFDAYSKALQRCDVQLESMLKALSRSEADPGPSRRRVGKAKNAPKFDARTYLFRICGVDLTAIDGIDVTTALKVVAEIGPDLSRFQNAKHFASWLGLSPGTKISGGKRLSGATKGNANRAAQALKLAAAALRPSQSALGAYYRRMCGRLDKGKAVTAVAHKLARLVYAMLTKGTAYVDQGQAYYEERYQQRVIYHLRRKAAAMGLELVPIQAQGQSG

SEQ ID NO: 369286 - protein, 344 aa, unidentified
MPIITVGIDLAKAVFAVHGVDEAGKATLVKPKVARDQLVPLIAQLPPCLIGMEACSGAHHWARVFAEHGHTVKLMAPKLVSPYRMSGKRGKNDAADAAAICEAVTRPSMRFVPVKDEHQQATLCLHRTRQGFIEERTSTYNRLRGLLSEFGVVLPQSPERLRKEIGPCLDTLPGWARRCMSELLEHTSHIEDRLVELDRAINQIAREDDRSRRLLQLRGVGSTTASALVASIGDGHDFRNGRQVAAWLGLTPGQYSSGGKQRLGSITKAGDAYLRSLLVLGARSVMANLGDKQDPLSRWIRNLMERRGYWRAAVAIAAKNARMAWAVLHYGDTFKPEQAEPTGA

SEQ ID NO: 369287 - protein, 460 aa, unidentified
MDQVPVIGIDLAVTAASELAVATGATIEASRKVASTPKGLTEGIAKAAKGRSVAIVVESTAMAWLIAAVAALRSGVDHTLYRVSGRKSAALRAFYRSHTKTDHIDARVLARMPAVDDSLRAFTLPTPAELALKRLVVARHKLTTECTKIQNRVRSLLHWAAPGILKAGAATVSAGLIAVLGRWSDLRSLARARAATIALQGDWSTERAEEVRAAAAESVAFYEGFVDFSAVGLELEISLAQLGFLGSQVERLEERIAALHAQLHPKDRLLSVPGVGPVVAGVVRAVVGDLSRFASLASFRAYTGLVPREDSSGEVRRRGRISKAGPSVLRWGLYLAADAARQCDPALADLYRRLVVERGRTHTQAVCAVASHLAGRIYAVARAGRDYVWRDLEGNEITKEQARAIAQSLRVDPETRARLRPRAEGGPRTPYARQPEVPQDATQPSGDKLIEAALELASKR

SEQ ID NO: 369288 - protein, 343 aa, unidentified
MQIHSVGIDLGKTTFHLVALGASGKVLVRKKFTRKQLLTFTVNMQTSLIGLEACSGAHFLGRVLRKQGHDVRLIAAQFVKPFVKSNKNDFVDAEAIAEAVERKNMRFVPIKTDDQLDLQAIHRVRDRLISRRTAVINQLRAFLLERGMVFAQKPAKLKAAMSDILENAEADLTPQMRDLIDMLWGEWKLVEQQIEGLNDELERISAADAGCTRIRQIPGIGPVVATAIVAAIGNGAAFRKGRDFAAWLGIVPRQYSTGGKAKLLGISKRGNVYLRKILIHGARAAVLRIKRDRAPIGAWLDAFDARAPKNVVVVAMANKLARIAWAVLSSGNDYRPTANALPA

SEQ ID NO: 369289 - protein, 309 aa, unidentified
MEQVFIGIDVAKGRLDVHPRPGHAFTVTRDGEGIASLVERVKALSPVLIVLEATGGFETVVAGALAGAQLPLAVVNPRQVRDFARAIGRLAKTDALDAEVIALFAERVRPEPRPLPDEDARYLSELVARRRQIVEMMTMERNRRRTLTGKRLLKSIDRLLAALQKELSDLEADLDDTIRGTPAWREAEDLLTSVPGVGDKLARTLIADLPELGRLSRRQIAALVGVAPINRDSGTMRGRRTTWAGRAKVRTTLYMAALVASRYNKTLKSFYQRLLQAGKAKKLALTAVMRKLLTILNAMIRDQTPWQNA

SEQ ID NO: 369290 - protein, 338 aa, unidentified
MENFAGVDLHKRVSQLAVLRKEREPSQLRFLNDLATVEGVLRRLPARTHIALEATGSWWWFVEKARSMGHEVSLSHPKQTKAIASARLKSDKVDALMLARLLRADLLPTVWIPGEKERQIRELLTHRARVVRQRTAIINELQALYAKRNIDFEMIAKRARAVVAGAQDLSGYGPSIVERDVELLRVLNEQIRALDRELERIAQHDAQARRLMSIAGVGPLTAVAVCCWVGDIERFADAKKLASYFGLAPRVSQSGERERHGHITKEGNRMVRSLLVEAALSSIRYSKGPARKHYLGVLKRRGKKIARVAAARKLLGAIFHMMKEGIDYPEYLKRSSAQ

SEQ ID NO: 369291 - protein, 345 aa, unidentified
MTNIVKQVAGIDVAQDELVVSLGSIDISIETNIYAFKTFANKPTGFAALLVWISKHSSADVPVRFIMEATGVYHEKLAYYLTDQGKQVSIVLPNKISNYVKTLEIKTVTDKTASQAICQFGLGRKLEIWQKPKKIFRDLKQLTRERDQIVAERTIAKNQLHAEQAGAFPNERSIIRLNQRISLFNSQEKEIKVEIADAVKTDEALTQKINTITSIPGIGKLTATIVVAETNGFELIRSKKQLVSYSGLDIKEKLSGTSVKGKPRISKKGNRHLRKAMHMPALTAIRNDERFKAVFVRLVSKHGIKMKAAVAVQRKLLELIYIVWKTDTKYDKNHLQRTTQNVQAA

SEQ ID NO: 369292 - protein, 312 aa, unidentified
MTEQLFIGVDVAKDWIDIHHPGRKPSRIDSTPAALRAFAARCRKDGVWVIFEASGGYDRGLRDALEAADVPFTRVNPRQARDFARAMGVLGKTDRVDARVLAEFGARLTPKRTEPASEARRSLQAQATRRRQLVDLRKQEATRLQQTTDPAALADIRAIIAILDRHIDKVEERMTATVAADANLASIDRRLQTAPGVGPIVAATLIAELPELGQLDRRRIAALAGLAPIARDSGKKSGARAIAGGRAIVRTALYLAALQASRRSAIFREFRSRLQAAGKSVKATLTATARKLLVTLNAMVSSGTNYRLDTAT

SEQ ID NO: 369293 - protein, 436 aa, unidentified
MRGCRCSMIMGFTKPIEHFNLQRKKVITMNTLYVGIDVSSKSNVVYLMLPNGDKHSNFSVANSHEGSTLLVKKIYSALTSHSLDTVLIGLEATSVYGDNLVYFLREDATLAPFNRKIHVLNPKQVKKFHDTYNDLPKNDYVDSFVIADCLRFGRINKEVYMGDYRYKALQNLTRARFFAVQNLVKEKQRFMNVLFKKYSTMTQEKVFSDAFSTTALAVYDEFESAEALANMDLHELTDFIIEKGKNRFPDPDAVAKAIQKAARSSYRLPKTVNDSVNQVLSISITSMKALESQIKEFDKAIKALMELLPNVLISIPGIGPVYSAGIMAEIGDINRFDNQAALAKYAGLAWTQHQSGNFEAQNTRLIHSGNRFFKYYLCEAAFSLVRCDKEYSNFYHLKYKEVNKYQHKRALALTARKFVRLVFTLLKDNRLYRPAE

SEQ ID NO: 369294 - protein, 372 aa, unidentified
MVANFTFDEYAVQCVGIDISMDKFTACLFTYNTASDLGWWTDVIEFRNNKTGFNQLVRWSRKNANKDYPIRYLMEPTSTFHEPLAYHLNAIGCTVFLIFPAKAKEFAKYEGIRSKTDEIDARTLSAIGCTNRKLKPWTPPKPIFRKLKQMCRFNNRMERMRTELTNQQSALKSGANAEASLMNRYEALLNELDKQVKNNKKLIKKTVESDSDLKERVARITTIKGVGYLTAVAIIAETDGFSLIGNRRQLASFAGLDVIAYKSGTIDTNHRISKKGSSYIRAALYWPSIAASMHNPQMKVLYDRIASKNTRTKMIAITAVMRKLLLLIFTLWKSGEEYDSKRSVSCTDVVTLSLDQMYKDEPGATLKESALV

SEQ ID NO: 369295 - protein, 307 aa, unidentified
MHCFANTAAGHKALLRALTRTGRRVRVDLEATGLYGLDLALALSAQEGIAVMVANPRAVRHFAQAMMQRSKNDRLDAGVLREFAARMPFQPWARPGENTLALWAIARRLEVLVKQRTAEKNRQHAARISQAVPLVVRRESARSLRELENGILRLRREARRCIAADARLQRQWELLCSITGVAEVSAVTILAELAMLPEDRDVRQWVAFAGLDPREYSSGTSVRKQTRISKVGNRHLRHALYMPALVACRYEPHVRDFYQRLLKRGKKKRQALLAVARKLLHAIYGMFRTLQPFDGTRLFAFMPAKTA

SEQ ID NO: 369296 - protein, 317 aa, unidentified
MTAPEIFVGIDISKNRLDVAVTPGDQTMAHPNNENGIQKLVKRLNNLKPLIILLEATGGYEFFLVAALREAKLPACFINPKLVRNFARSAGIAAKTDHIDAQVLALFACRMRPQPRPLPQAQQQELQHLMTRRRQLLGILLMEKNRLDPAPFPRVRQSIQRNIDSLEAQLADLNRDIDDFFRQNSWWVDLEKALSTQTGVGHLTLLGVVAYLPELGRLNRKEVASLGGLAPFNRDSGQWRGQRHIEGGRNPLRQALYMATLSASRFDHVISAFYQRLLQKGKPFKVAIVACMRKLLTILNAMAKKLLLRRSLAPLTP

SEQ ID NO: 369297 - protein, 358 aa, unidentified
METTNLKQKVNFTDKNIFVGMDVHEKSWNVSIFLEDMFIRSFTQQPSVEALERLLKRDYPQAKYLCGYESGYCGFSIQRRLNQLGIVCQVLHAGDIPQTNKEKLLKRDPVDSKKIGEALSTKKANPIYIPDEESEQDRGLIRYRDRVQKDLTRCKNRIRSILYEFGISLPERFAKGWSNRFIQWLKETEQVIGSTRTTLNHMIEQMETHRSLLLKVNRDIRALQKSPKYKQKAQYLTSIPGIGPLSAMIILTELIDIRRFGSFRDLNSYVGFYPMEHSTSDKEHKGGIMIRHNKHLRKLLVEDAWVAMRHDPALTLAFNQWSVRMTGKRAIVKVARKLLSRIRYVLINGTFYTKGIVK

SEQ ID NO: 369298 - protein, 358 aa, unidentified
MSDITRVGVDLAKRVIQVLAVNAAGQRVTGRALARDKFLAWCAQLPGGWMVAMEASGSAHHWARRLLAMGLDARIMAAHLVAPYRMQGKSGKNDANDAAAICEAACRPQMHFVSVKSVEQQSMLSIHRLREGFKEDRTACINRIRGLLSEFGIVMAQQVKALREALPDALEDANNEMNGLARLGLQRAWQQWQELDAHLAWADERIAAHAKDHVAVRQAQQLQGVGPVTASALVATVGDFKPFKNGSQFGAWLGLTPRQNSSGGKNNLGSITKRGDTYLRTLLIQGAKSAVLSAHKRDDPISKWVYQLREKSGWQKATVALANKNARILWAVFVRGKPFDAQHVSVKPGGVATAPLPA

SEQ ID NO: 369299 - protein, 429 aa, unidentified
MQNVLQERITRITPETVIVGIDAAKEIHWARITDYRGVDLVKPFKVHNSIEGFESLQAKIEKQQQKHGCNQVVIGMEPSGHYWRALGWYLKLHESKPVLVGVNPYHTKQAKELDDNSQTKSDPKDALTIAHLIRDGRYHDTYLPEDEYAGLRQLNAERQRLMKQISRANNVLIVLLDEFFPEYATVWSSVTCPTSLELLKTYTFPSDIMAASHEELLEDIRRASSGKEGVKLLKGMTRAAIRSVGVKQGMKSVRLRILSLIDELAYFEEKKTKVEAGLEAIMDTLQLGKVLQSMLGIGPIISAAFLGEVGDISRFSNWKQVRSLAGLNLAENSSGKYKGKTKISKRGRSYLRHMLYMAGECGCRCNPEMRGFYRYLRDRKNNPLDGNQAVVATGLKIMRILFHLAKTSEHYDPQKALGNVRLQQIATLG

SEQ ID NO: 369300 - protein, 421 aa, unidentified
MRGLMTKRVNTVREGTLIATVDIGVANNTGYCTTMDGRSTKIFRFNNTKEGFEKFWGMAIASKNRFGCDEVLVGYESTGPYAEPLVHYLADKPVKMVQVNPMHTKKMKEVNDNSPLKTDDKDPRVIADIIRLGRALTIVVPEGDAAYLRRLTKARERHVGERTALLNQLQQLIFLIFPEFKTVLKEIRGKTAQYLLKRYTTPERISSLSKKTLGEEMWKRSKGKFGMEDAESLIALARETVGIQEGLAGIVMDIRHILMQLEAEDRFMAEIEAEMEATLGRIPYSARLLSIKGLGIVSVAGLIGEVGDFSKFSTQSEIMKLAGLDLYEISSGKRKGQRRISKRGRSLLRKILFYAAIQTIRKNGILYEYYTRLTGRGMERMRALIAVSRKLLGIIHAIVRDDTDYVGQYQAPERRVLKKAA

SEQ ID NO: 369301 - protein, 406 aa, unidentified
MRIIGLDIHRVFAEAVALEGATIIHLGRIGMTREHLAAFAATLKKTDHVIVEATGNATALVDILAPHVARVAVANPLQVHLIAKAKTKTDKIDAGVLAKLYAAGFLPEVWVPDEATLARRRQVTRRNQLVKQRVRLKAIVQSILHAHLVPRCPHADIFGIKGRTWLKAQYLPEDEREAITCHLDEYDRLTEAQKGVERDIARAALADDDVKRIMTAPGIDMVVAVGLMAAIGRIDRFDDPDKLVAYFGLNPSVRQSGDGPAYHGRITKRGRSSARHLLVEAAWQAVRVPGPLKAFFERIRARRRNHIAAVAVARKLTVLVWHMLTKGEDYIWARPALMARKMRKLELTAGMPSRRGQRGQSYEYNLPERRRADRAIAEQAEGVYRRMTEGWRRTGLGAGATNEERR

SEQ ID NO: 369302 - protein, 424 aa, unidentified
MFGTAGRARKRWKLQRKFELFVGVDWGSEQHRVCIVSPTGEILDQRWVEHSGQSLAELVTWLRSKTTASPDNVAVAIELPRGSVVETLMEQGFAVFSINPKQLDRFRDRYSPAGAKDDRRDAFVLADSLRTDMRCFHTVRLDEPATIRLRELSRLDDDLRLEQNRVHNQLREQWHRFFPQLLQLSPAADEPWVWDLFQTVPLPGKAVKLPATRVQRILAKHRIRRIDVPQVQAILAATPLSVAPGAAEAASEYALLLLPRLRLLQQQRTAISKRIDTLLEELAKPDQTDSETIEHRDAEVLLSLPGVGRQIAATMLGEASQAIAERDYHGLRCYTGAAPITRQSGKKKIVLMRQGCNERLRNALYHWARVSVVCDPKSKAQYAEMRHKGQSHGRALRGIADRWLDVLISMLTHHTLYDPKRRAA

SEQ ID NO: 369303 - protein, 357 aa, unidentified
MQGLILHTKNVIGNYNNQEYDHYAAIDWALRNAALARCTRKNSKPKVMEFESDVKIIKKYLSELKGTIILTIEETTTSQWLYVELKPFADRIVICDPYRNRLLSDGPKTDKIDAKKLLQLLRAGLLKEVFHSCDSLYELRKLESAYTDLINAGVRLQNQRSAFYRAKGCQYTKQNSAELKERTKEQKYSRFITDFQDQHIEQYRTSKAQFDQMIEKTVRENSVIKNLTGLPGIGNISALTIYSRVIQPRRFKKTGKYLSYCGLVWHKKESGNKSYGKRQGRYCRQLKCIYKRSARITINSGQGPLYEYYEALVDKGSTHSQAALMVARYLAKVSLGMMKNGQKYEPYRWRKTEKETA

SEQ ID NO: 369304 - protein, 430 aa, unidentified
MKSNTQNAKIEAITEKTLVLGIDVGSETHYARAFDYRGIEYSKKPFKFSNTEAGFVTFKEWILDLKERHEKDKVIPGMEPTGHYWFNLGKFLQDNEMKPVLVNPHHVKKSKELDDNNPTKNDRKDPKVIAGLVREGRYMIPYLPDGVYADLRTASNIRFQLQAELTRIQNRISRWFNIYFPEYKTVYGKPDAKSGMLILKAAPLPEDILTLGIDGVNQIWRDAKLRAVGKARAKTLIEAAEHSVGSKEGAVSARMEIRMLLEDYESRNTRLQEVMVLIEELVRKIPMAEKLLEIKGVGIRTVSGFLAEVGDISRFNNPKELQKLAGLALVENSSGKHKGETTISRRGRKRLRYLLFEVAMSLVSKNPEFRELHNYYTTRRLNPLKKMQSLMAIAAKLIRVFYAMLTKGVDYDPKKMVSDIKRPAVYLQAA

SEQ ID NO: 369305 - protein, 385 aa, unidentified
MSASASAQAAIDLNLAAIFVSLELSRSTWLVTSLSPGGGEKMSKRSVRAGDVAELLNLFTRLQEKAQARMGRASPIIVIQEAGLDGFWIHRVLEREGIESHVVDAASILTSRRRRRAKTDKIDGEALLRTLLAYKRGEPRVCAMVRAPSPENEDQRRLCRERKTLMVERVAHVNRIKGLLFAQGIPDYEPLGRDRRRRLEELSTGDGRPLPAHLKAQISRELDRLELLLQQLKAVEAERDALLQPEGDAAPAPVAALAGLRGIGPEFAAVLWFECLFRSFSNRRQVAAYAGLAPTPWQSGSVQHEQGVSKAGNPRLRTTMIQLAWLWLQHQPRSALSLWFKERVTRDGGRGKKTAIVALARKLLVALWKFVSSGVVIEGAVMRIA

SEQ ID NO: 369306 - protein, 335 aa, unidentified
MHYLYYVGLDVSKETFDASLVAFEDANEMAHRKFANSRKGICSCLHWVEKRHGIRLDDVIFCAEDMGSYISEMAVCASDRTLNFNFSLISPLVIKYSMGIARGKTDRVDARRIAEYAITHYRKIALYLPAEKELCQLRTWLILRAHLAKQRVAKLVLLEKLDYKEKFADVSIQRSMLQEEIAYAETHMKTIEREMKELIAADSNICRNYKLLTSIKGVGPITAIVMLCSTLNFTKITDHRKFACYCGLAPFEHSSGTSVCGGCHTSSMANRDIKVQLNRSALIAIRCDPQLKAYYERKVAEGKHKFSVLNAVRAKIAARCFAVVRRGTPYVALQI

SEQ ID NO: 369307 - protein, 402 aa, unidentified
MTQSPKRFFGLDIHKEYFVAVGVNAQREIVFGPQRVSNYQLEGWIERGLTPEDAVVLEMTTNTYQFHDALSERVHSVIAVHPPHVALVTNVQVKTDKKAALALAQLHAAGMLTGVWIPPHEVRDLRSLIARREKMVRLSTIAKNRLHAMLHRHHLRLTEKPFAPEQRMWWESLPLSVTEQFLVHSDLDTLEFAQKQIAQVEEGLKKQSAEDERIPLLIQLPGVAMLTAITILAAIGDITRFPSAKKLVGYAGLGTRVHDSGMTHAAGRITKAGRRDLRRAMVNAANHAVVHHVHWRQEFERLEPHLGRSRAIVAIARKFLVTVWHVLTEQVADRFADPRDVATSLLRYAYTIGRRNRLQGQSVLSFTRDQLDRLGIGKDLQTIPWGSKTHLLPPSKLLALKE

SEQ ID NO: 369308 - protein, 337 aa, unidentified
MEDQAVFVGLDYHQSAIQVCVEDLRGSVLGNRSCSNDWRKVRDYAEGFGVVRRAGIEACSGASDFAEELIFKAGWSVDLAHPGYVRRMKQNPDKTDFSDARMLADLERVGYLPRVWLAPVDVRELRLLVRQRQALARQRRTIKQRIRAVMREQRVRCNMARPWTRPWLDAVACNQELSPAGLWVIDRHFMALRTIAEETRLVEEELTAKTKEDPLVNHLLKMSGIGQVTAWMIRAEIGRFDRFRTGKQLARFCGLTPFNASSGQRQADAGLIKAANGQLRAILIEAAHRLMRYDPRWRNFAAKMVGRGKPISLVAAAVANRWVRWLYHQMPPEPHPV

SEQ ID NO: 369309 - protein, 596 aa, unidentified
MLPQPAPAPQPPRRVGVGIDTSRYGHYAAFLRDDLQPAAPELQFAESAAGYALLRQRLECIAQRHPPAHFVVRLDAAGHYAENLPHFLHRLATPPADPLAPAARLALTISCGDPQRNQNYRAAVFGPQKSDPVAARAAARFALTERPGRDRPLSLPLRTLRQVAGRLQAVVRQRTRLINQFHHLLALPFPELALQTRDLAAGWVLELVHRYPTAVCLAGASLADLLDVPYLPDAQAGPLLEHARASVASPGGAATEELVRDHVRQLRDAGARQKRLEKLLVSAYQTLPRDNHLATIPGIGDVTAAVLTAFVLDIDRFATPGQLVAYFGVLPIEAPGGVDREGQARGPRRYVMSRRGNDLVRRYLWMAALSAVRYNPAVRALYARVVAKHPGRKAIAIGHAMRKLLHLAFAIWKSGRPFDPGHYPWQAPGHVETRGQDKGTEEEAGGKGPAEGDQAAGHRPDTQPARQVVTAACADSVAGAVPFGEATAIDFAHRKRQLPIARALDQLGLSDRLRGRGPQRRCACPLHRGDARGRSFSVNLEENVFPCFDRQCGRKGDVIDLWAAAHGYALREAALDLVRTFGLEPTPRSGTEKRNG

SEQ ID NO: 369310 - protein, 470 aa, unidentified
MPDTPNQSHTAISIPQEAAATGTPTPRRFAAFIGIDWGDKRHAWALQVEGSAQVERGEILHTPEAIEEWAAELRRRFPTGRLAVALEQSRGPLVFALTKYENFTLYPIHPTSAADYRKIFRPSGAKSDGPDAAMHLDMLLRHRDKLRPLNPDTVETRMLQFLVEDRRQLVDQRTQISNRLVADLKSYYPQVLEWFEQPYAPVALDFLERWPTLDELQKARATTLHQFLKQHKCRDQAKNQTRVEAMRGAVAATHDTAVVTAGRWAVCAAVRLLRDLNRSIQEYDRKTEELAQAHPDFAIFDSLPGAGAALVPRLIAAFGTQRDRYESAAEIQKYSGIAPVTEDSGHQHWVHWRWSCPKFLRQSFHEWAAQSAQQCDWAAAYYQAQREGKNKSHHAAVRSLAYKWIRIVFRCWKDRRPYEDSRYELALIRRKQATPASPKPSPFELPIQWTSCGSFKKLALKTHNKSDKVY

SEQ ID NO: 369311 - protein, 321 aa, unidentified
MSNIIGIDVSKVDFYASFNEQDQSKLFQNDKRGIKIFEKYLNKNNFKKDQTIIGLESTGIYHLPLSHKLTQAGFTVKVINPLITKKQNQTTLRRVKNDCKDASLVRYCTLNGAGYEFIDTPEMLTLKSLVRLRDNLSNMKNVLNLQQKSLEYKEKNLDISVSKANHRLNKSVSVEIEKLEKELKEYRKAEQKLLQTIPGVGPITAVSFISEVGNVSRFPFSQKLIAYIGLDSRVHKSGTSINGKGYISKRGNKILRTRLYNACSVAVLQPNIFQDFFQKKRSEGKPYKVALVATMHKMANVIYAVWKNNTPFQDRRGLTGI

SEQ ID NO: 369312 - protein, 399 aa, unidentified
MNSVGIDISKGRSTIAVMRPFGEVVISPFEVRHTGSELSKLAKQLKSLDGETRVVMEATGNYHASVAKLLHDAGLYVSVVNAKLVHDYGNNELRRVKTDRKAAVKLANYGLDRWLTLPRYIPEEDTRLLKNCYRQYRQYSKVQTVLKNNLISLLDTVFPNANRLFSSPIRGDGSEKWVDFVAEFWHCRCVSEKSERAFTSKYLRWCRKHGYNFREAKAHTIYAEASGHIGVMPKSETTKLLVEQAVAQLRATSTALAALKLEMQTLASQLPEYPVVMDLFGVGPTLGPQLIAEIGDVRRFYSKKALVAYAGLDAPPNDSGDVTGRHKSMSKIGASSLRRTLFLVMSVYAPLDEPVYQFMDRKRAEGKPYRVYMMASANKFLRTYYATVKAYLESLEHTA

SEQ ID NO: 369313 - protein, 348 aa, unidentified
MDNYAGIDVSLECSSVCVVDASGKIAREGKVASEPAALVAWFGSLGLSLVRIGLEAGPLSQWLYAAMREAGLAVELLETRHVRDAFKAMPVKSDRNDARGIAQLMRLGWFRPVHCKSMGAQETRAVLTARKLIQSKLRDVENSLRGILRGFGLKVGKTTARSFAARIRDLVAGHSSLETIAEALLAVHAVLLREFNALEKRVRTMARSSPQAKLLMTTPAVGPIVALTYASAIDDPGRFKSSKAAGPHFGLTPRKYQSGQTDITGRISKIGDASVREALYQAAHVMLTKPVKGCSELKSWAMRIARRAGMRKAKVALARKLAVILHRMLADGKPFNSAAATKTMATAA

SEQ ID NO: 369314 - protein, 331 aa, unidentified
MYVGVDYHKRYSFATKMDERGQIIEQIKLNNDQETLRAYAATLPRGSKIALEATGGWYHFYEVLEDSGLDIHLAHPLKTRAIAEARIKTDTIDATMLAHLLRSNLLPASYIAPREIRDIREVLRYRASLVSIRVSLKNKIHALLSKNGILFPYTNILGKKGRLFLKNLQLRDSYRQCLDGYLRLAETLTALIEELEATIMALAEKNDQAMLLTTIPGIGYFSALLILSEIGVIQRFPSAKKLCSYAALVPRVHSSGGKTRYGSITKQGSKWLRWILVETSKHYVKSCPRLKRLYDSVTHRHGKNTARVAIAREMLKIIYCMLRDQRAFVRG

SEQ ID NO: 369315 - protein, 407 aa, unidentified
MLFVGDDWAEDDHDIELQDEQGRVLARARLPEGIAGITRLHALIGQFAGPDTEPGEVALGIETDRGLWVTALRAAGYTVYAINPRQVSRYRERHGTSGAKSDKADAHTMAGMVRTDSHQLRPVAGDSAEAEAIKVAARAHQTLIWERSRHLLRLRAALREYFPAALEAFDDLAAADTLELLAKAPDPASAARLTTSQITAALKRARRRGIPATAAAIAAALREDHMQQPQPLTEAYAATVSSLTVIIAALNGEIGRMERQVTESFRRHPDAAIYLSQPGIGEILGARQLGEFGDDPRRYASAKARKNYAATSPITRQSGKKKVVLARFIRNDRLADALHRQAQSALIASPGARAYYDGQRDRGLDHDAALRALSNRLAGILHGCLKTGTPYDEATAWSHRVTTSGAA

SEQ ID NO: 369316 - protein, 311 aa, unidentified
MNAFVCVGIDVSKAQLDVALRPTGRFSAANTEAGIAEVLTRLQAVLPTLVVMEATGGLEIPLTEALAAAGMPVVVVNPRQIRDFAKATGQLAKTDALDAQVLAQFAEVMRPQPRPLLDAETRALAALLTRRRQLVEMLTAERNRLMSVHTPVRKSLRTHIAWLERAIQQTDTALTEAIHQSPVWREKEALLQSTPGVGPVMTTTLLANLPELGTLTGKQISALVGVAPFNRDSGTLRGTRTVWGGRAQVRAVLYMAALVAARFNPVIRAFYQRLCAAGKAKKVALTACMRKLLIILNAMMKHRTRWEHTTG

SEQ ID NO: 369317 - protein, 363 aa, unidentified
MRETITATDRGKLTVGLDVGDRYTQICVLDEDGGILEEGRVATSPRAFRQRFAALPPSRLVLEAGSHSLWAHRLLKEVGHEVIVANPRMLRFIYGNDSKNDRADATYLARVGKLDPGLLHPVTHRREESQAHLVLLRSREVLVRSRTRLISHARGLVKPFGVKLPHCGAHVFATKVREHVPEILLPALGPVIDIIAVLTEQIRELNDKVETLARETYKETALLAQVPGVGTLTSLAYVLTIEDPGRFSRARAVGSYLGLRPRQDESGTLKPQLRITKAGDTFLRHLLVECAHHILSNNSQDTDLKRWGLKLAERGGKAAKKRAAVAVARKLSILLLRLWTTGEIYEPLRGTPRSAEPEIVPSG

SEQ ID NO: 369318 - protein, 373 aa, unidentified
MTQSTMSNTLFIGMDVHKESIAVAYVPYDHGAEVTYLGAIGTRQADIDQLVRKLQSKAKHLVFVYEAGPCGYWLYRYLSKKGHACWVVAPSLIPKKAGDRVKTDRRDAIQLARLMRSGDLTPVYVPKLEDEAIRDLTRAREDAIEDLKAAKFRLKAFLLRHDIRYTGRANWGPAHLRWLSEVVCATPAQQIVFQEYVRSVDTITERLQRLEQELQDQVASWRLNPVVEALQVLRGVQFTVAVTLVAELGDLTRFDHPSQLMNYLGLTPSESSSGERRRQGAITKSGNTHARRVLVEGAWAYRYPAKVSRHLQLRLEKQPKVLQDLSWKAQVRLCKRYRQLIARGKHANQVVVAVARELVGFIWAIAKQVDVKP

SEQ ID NO: 369319 - protein, 337 aa, unidentified
MTIIRIGLDIAKHVFQVHGVDENEVTVLRRQLRRSEMEKFFNKLAPTRIGLEACGASHYWARLLRGLGHEVVLLPPQYIKPYVKRGKNDANDAEAICEAMSRPGMRFVPIKSAESQAELMPLGVRDLLIKQRTAVINTIRGYAAEFGVIATKGPEKVAELLQQAHAEEASVPALALDMLRLLAAQLDALDIKLKLIETRLMALHRENPVSQCLASQPGIGPIGAVSFALRVTDPKSFRSGRHFAAWLGLTPKDNSSGGKRRQGRISRQGNEALRKLVVLGATAVIRFAKPGHGSPWLLNLLARKPKKLAAIALANKMARTLWAMMVSGEVYRRPLPA

SEQ ID NO: 369320 - protein, 327 aa, unidentified
MKESVLGIDVAKEKLDAFLMIADKEYYKQFSNEFEGYHQLAAWLRRMDAGRVHVCLEATGQYSDGVTEYLHEQGFPVSMVNPARIKAFGGSKLRRNKTDKADAKLIAEFCREQKPPLWSPPPPHFKELQALVRRLDDLQQNLNQEENRLQAGTQAETVITGIKAHIEFIKAQIEAVKDAIQAHIDKYPDLKKQQSLLTTIPGIGKLTAAKLLGEVRDFKDFDNARQLAAYAGLTPRNFYSGSSVHRKSLLSKAGNANLRQTLYMPAISAKRWNPIVKVFCDRLLASGHRPMEVVAAAMHKLLHIAFGVLKSGKPFDPHYLAKTQIAS

SEQ ID NO: 369321 - protein, 359 aa, unidentified
MSTITLGVDLAKRVFSVCEMDAAGRVLRWHELRREAFAAWLGQQPAGTVVAMEACSGAHHWARRCLALGLQPKVIAAQFVGPFRKSRTTKNDRNDAEAIATAARQGNMRFVPVKSVEQQARLAWHRVREGYKAESLAIGNRLRGLLAEFGIVVATSDLALRRVLADLDAHDGLPGEFRELLRDLAAHWAQLHERIDACDARIDTHARQDARCIRLRSIVGIGPITADAVVATLGAATDFRNGRQLAAWLGLVPMQHSSGGRARLGTISCRGDAYLRTLLIQGARSSLQRAKAVVTEKATPEQLWIRTLDRRMPFGKVLVAIANKHARQAWAMLVRDVDYDPHACLQHPRHQQTNTAQAA

SEQ ID NO: 369322 - protein, 339 aa, unidentified
MKFTPVGVDIAKHLMQIHFVDEYTGELIDKQLKRNDFLTFFSNREPCLIGMEACGGAHYWARELRKLGHEVRLLKARFVRAFRMGNKNDVQDARAIWLAVQQPGKSVAIKNEEQQAILSLHRMRYQLVKFRTAQINSLQGLLLEFGETVHKGRTSLDKAMPEVLERLKEKLAPFLLNLLEKQYHRLNEIDEQIEQVEKLLTTWAKQNADCQRIMKIPGVGVLIATAAIATMGDPRAFRSGREFSAYLGLVPKQTGTGGRVKLLGISKRGDTYLRTLFIHGARVATLLTKTPLPWVTELKKRRPVCVVIVGMANKLARTVWALVAHQQEYQKDYVSVRPY

SEQ ID NO: 369323 - protein, 338 aa, unidentified
MNITTIGLDIAKSIFHLYGINSVGRLLKKKQLQRHQLLKYLANLDASLVVMEACGGANYWAREIMLLGHEVKLISPQYVKPYVKGNKNDYNDAQAIAEAAQRSNMRFVPIKSVEQQDVQNFHRQRERIKKERTALVNQIRGLLAEYGIVIKKGVAAVRRELPRILEDAENGLNTLSRELFAELQDELHALEERFVQCNHRINLMNQDNAVCRRLEGILGIGSITASATYAAVGDGKEFKNGRHFSAWLGLVPGQHSTGGKPVLLGISKRGNSYLRTLYIHGARAVLRYSANKQDRFSRWAQQVLARRGHNKACVAVANKLARIAWVIMARGESYRALV

SEQ ID NO: 369324 - protein, 335 aa, unidentified
MGVDFGSEQMDAKLAAQYEDGVRKILFSRRFENKETGFKDLDGWLKEKCRRKDIEIRVSCEATGVYHERCCYFLNGLAYYVTVEVPSRVKSYKKSLGFHSKNDKIDASALAYMGLERNLRKWEPINSFYYELRTLTRYHQSVQEMQTLACNQLHAMQAGMRISKLVVKQLKANIKLYEKQLAELEKAIEEKIVSEQEVKRKIDNIIEDMKGVGVMTVAVALAETNGFSWFTNRRQVVKYAGYDVVEDQSGKRKGKTKISKKGNAHIRRALYFPAINLATYNVKPFVNKYERIFERSRIKMKGYTALQKDLLLMLFTLWKKDQKFDPGYQNQQREK

SEQ ID NO: 369325 - protein, 397 aa, unidentified
MYIVGIDIAKRKHEAAVIDGEGAVIIKPFSFTNNCSGYNRLLAMLTKAKLPLDEVSFAMEATGHYWLALFTRLQKEGFRVQVINPVQTNSIRSFYIRQAKTDPRDALLIAEVIRFGHFSESTLHPENIYELRELCRGRHAIVSMQADVKRKVVALLDQVFPEYETAFTNLFGDTSMAILQTCPTPKELSEMPLEELCHLIEVSSHKRFRMAKAQELQALARNSFGFAMAGDVFSTMIRLYAKHLDFLKQQVREMDRKIAEIMETLDTPITTITGIGLTLGAYILSEIGDISRFSSAAKLAAYAGIDPTMRQSGEYNGVRNRMSKRGSPYLRHAIWLAASSAVLHDPALKLYFQKKRDEGKPYMASVGHACRKMVSIIYAVMRDNKAYTPCIPNEISV

SEQ ID NO: 369326 - protein, 342 aa, unidentified
MNSRLYGGIDLHSNNSMIVLLNESDEVVYQKRLSNDLDEILKALAPYKAALQGVVIESTYNWYWQADGLQEAGYKVHLANTTAIQSYSGLKYTNDKHDGIWLARLLRLGILAEGHIYPKEKRGLRELLRRRMILVRQQTMGLLGIQGMVTRYENVKLTADKIKRSKDNGEQILRHIKDEHVCLAVQSQLKVLYCILDQVETLEKEILAKIKDDKIFKLLQTVPGIGPILAMTIMLETGEITRFAEVGNYSSYCRCVESKRISNGKKKGENNRRNGNQYLGWAFIEATYHAIRHYDEIKCYYQRKLAKKKRVVALKAIANKLSRATFFILRDGVSFDMKKSFC

SEQ ID NO: 369327 - protein, 339 aa, unidentified
MGYYAAVDLHGDNGYYGVADETGKRVFEKRITNDLPTVLKLLEPYRKQLTNGVVVESTFNWYWLVDGLMDNGYQVHLANPAAIEQYEGIKNTNDETDTFFLIELKRLGVLPTGYIYPQEIRPVRDLLRRRMILVQQRTAHILSYQSLVARQSGQAISANKVSKLRVEDLAEIYEDPNLRLMGETSIDVIRFLTGKIRVLEKKIEEQSRLTPAYEKLLTVPGIGKILALTIMLETGPIGRFADVGKYTSYCRCVRARGWSNGKAKSTHNRKNGNRYLSWAYVEAANFIRRYCPEAKSWYQRKAAKTKVVVATKALSSKLAKACYFIMRDQVDFDVKKIFG

SEQ ID NO: 369328 - protein, 342 aa, unidentified
MGLDVGDKISHYCVLNEEAEVVQRAKLKTTPAALQPWLEALPGGTRVVLETGTHSSWISRLIEQVGQEALVGQPRKMPQIYASKRKNDRRDAEKLARTGRLDPNSMGPIRHRSAEQQADLAVIQARDALVQVRTQLINTVRGLVKGTGERLRGCSAPSFARQAEAQIPQRLRGALLPLVSQIGSLSEQIERYDAEVEKLAQKKYPETELLRQVSGVGPVTSLAFVLTVGDRWRFRHSRDVGPFLGLVPAQDESGESSPQLGISKAGNPYLRRLLVGSANYILGPFGPDCELRRWGMKRSERGDKNARKRAKVGVARRLAVLLHKLWVSGEVYEPLPEKRAAA

SEQ ID NO: 369329 - protein, 354 aa, unidentified
MKYYTSTTEFNCGIDLHARQMYVCVMDRTGKILVHTNIRNNDFAYFLKLVAPYRHDLTVCAECMFGWYWLADACQAAGIHFVLAHALYLKAIHGGKNKNDRIDSEKITHLLRSNLIPPGYVYPAEKRPLRALLRQRLLYVWNRSELLSRLQSHQLAYNRPTCRQNIYNREPWAEQLLAQEPDHVRQLALQNDLALVGHYDTQLACLEKELLKLTKQTASRDFTLLQTTPGIGDYLGLTILHEIGDIARFPTVKDFLSYCRLVKGTVASAGKIKGLRGAKLGNPYLRWAFGEAAVVAKRDPLVIGPLAQRLEARLNNKFKANTVLAIKLARAVYFMLKTKTVFDPERLVAALSRN

SEQ ID NO: 369330 - protein, 406 aa, unidentified
MDVIHERCAGLDIHKATVVACVMTPEGKELRTFKTFTADLLALRTWLKGKGIRQVAMESTGVYWKPIYNLLEAEDMVLTLANARHIKAVPGRKTDVRDAEWICDLLRHGLLRASFVPERPQRELRELVRYRRSLIQERAREANRIQKVLEGANIKLGLVIGNVLGVAGRAMLAAMAAGEAESTALADHATTQLKASREELERALEGRMGAHQRFLLTAQLRHIEYLSEELARLDAEIDERLRPFADAVTRLDTIPGVGTRTAQDIIAAIGTDMSRFPSARHLASWAQLCPGTHESAGKRGEARTGKANPFLRCALVEAAKAVGRSKKQTYLLAQSRRLGARRGRNKATVAVAHSILVIAYSILRDGKSYEDLGFTYFDERERERLIRRSVQRLEALNLKVTIEPAA

SEQ ID NO: 369331 - protein, 404 aa, unidentified
MSQAPCSCQPDLFDSPQPASLPAWLGCDVAKQTFEAAVYPPVPAGAPPRPLESLCAATFPRTAQGVSRCLEWAEGQLDVFARAERLEAAPPLRVAMEATGRYSVELIAWFVEQRPTAARPSLLDPTVSHHFLKSLRLRNKTDRMEARAIARLGAERVPASHQPRPAHYEMLRELSRERDAIVQIHVSVRNRTQELTDLPAVAKIHQRLVRDVQKALEKVEQAIVAHVQKHDDLNGIVTRLQTIPGVGLWTATVVLAELGDLARFARARQITAYAGVSPRRYQSGTSVQGGTHLCKQGSARVRRALFLSGMSASRGDNDLGRFYRHLVEDAGKPKMVALGAVMRKQLVLMRSLVIHEETYQDHRGDPRPTSTTAQTEKTPEKKKKNPRPCGKPVKKNRGKEAFSA

SEQ ID NO: 369332 - protein, 344 aa, unidentified
MDHFAGLDVSVKETSICIVDDAGKIVREVKVASEPEALLAVLKNPAYHFKRIGLEAGPLSQWLFSALAEAGLPVICVETRHMQAVLKAQINKTDRNDARGIAQMMRAGLYRPVHVKTIRSQKLRMLLTHRKLLQSKAIAIENDLRGTLRNFGLKVGMVGKVKFEARIRELVENLPDLAVLVEPMLIVQRTLREQIVILHRRLLAIVRDDEVCRRLMTTPGVGPVVALTYRATVDVPARFRKSKAVGAVFGLTCAKYQSGEVDRNGRISRCGDEMMRVMLYEAAQSMLRSKKWSWLKAWAMQIARRRGMKKAIVALARRLAVIMHRIWVDGTEFRWTREQATAAA

SEQ ID NO: 369333 - protein, 456 aa, unidentified
MKIPQSTIRLLTGRLVKILLNREVSTMKSNTQNAKIEAITEKTLVLGIDVGSKTHYARAFDYRGIEYSKKPFKFSNTEVGFATFKEWILDLKERHEKDKVVPGMEPTGHYWFNLGKFLQDNEMKPVLVNPHHVKKSKELDDNHPTKNDRKDPKVIAGLVREGRYMIPYLPDGVYADLRTASNIRFQLQAELTRIQNRINRWFNIYFPEYKTVYGKPDAKSGILILKEAPLPEDILTLGIDGVNQIWRDAKLRAVGKARAKTLIEAAEHSVGSKEGAVSARMEIRMLLEDYESRNIRLQEVMGLIEGLVNQIPMAEKLLEIKGVGIKTVSGFLAEVGDIRRFNDPKELQKLAGLALVENSSGKHKGKTTISRRGRKRLRYLLFEVAMSLVAKNPEFRELHNYYTTRRLNPLKKMQSLMAIAAKLLRVFYAILTKGVGYDPKKMVNDIRRPAAYAQAA

SEQ ID NO: 369334 - protein, 338 aa, unidentified
MSAIKTIGIDLGKSTFHVVGHDYAGQQRYRHKFSRSKLLQFISVHEPVLIAMEACCGAHWLARKCQEYGHQVKLIPPQYVKPYVKSHKNDFIDADAIAEAATRPRMRFVSPKTEQAQLGVVIRRIRTGYIRERTAVMNRIGSILTEFGFSFPRGHANMKRLFQWLADTGQQVPPLLIFELRNQLDHYNELNNKIKEQDKKLETLNSGNELFTILQTVPGVGPMTAVCCISSVSDPEDFSNGRNFAAWLGLVPFQYSTGGKPRMLGISKRGNKELRELFIHAARAVLWRDGTAEKYFGKWLIELKHRKPFNVALVALANKLARIAWSVMATKKPFEIRR

SEQ ID NO: 369335 - protein, 348 aa, unidentified
MKKISTVATQQSRKISEQKLTVGLDLGDRSSWCCVLDEAGAIVREQKLGTTPKAMKEVFGAVPRSRIALETGMHSPWVSRLLSQLGHEVIVAHARNVRLIGESRKKDDRIDAQTLARLARIDPQLLSPVKHRSAKAQADLTVIRARAGLVRARTALVNTARGLAKSYGERLRGCNVRNMNAEKAQGLSPELRTALEPLLAGIESLSERIGECNERIERLARESYPEVAQLKQVKGVGTLIALTFLLTLEDAHRFRQSRDVGCYLGLQPGRRNSGQSEPQMHISKAGAGSAPYPGAVWSRQRSAALGFEAGRARRQEREETGHYCRGTKAGRLAASPMGERRGVRTVAP

SEQ ID NO: 369336 - protein, 426 aa, unidentified
MYHFGGYDVTTYTLPFTAYVGIDWGDTKHDVCLQAAGSDRREFDCIPHQVPRIDEWAKALHQRFGGSIAIALELTKGPIVYALQKYDFFVIFPINPATLAKYRVAFKPSRAKDDPTDAEMALDLLQHHPERFKPLQPQSVAMRTLLSLTEHRRELVGDKTRLTNRLTDNLKQYYPQALDWFEQRDTILFCDFLSRWPTLTQVKRARQASLQAFFHAHNGRRPKVINGRLDSIKAAVSLTDDAGVILPCRLRTLALVEQLHVTLQAIDRYDHEIADLATTLPDYALFQPLPGAGPHLTPRLLVAFGEDRERFQSADEVQKYSGIAPVTERSGKKHWVHWRLQCPTFLRQTFVEWAGQTINKSFWASAYYQQQREKGSSYQVAVRALAFKWIRILYRCWKTRTPYDETKYLNALRKRGSPLLKNLSPN

SEQ ID NO: 369337 - protein, 334 aa, unidentified
MDLKEGALVNPTGTTTARVYVGVDVSKDRLDVCLRWSEPESREEVLAVAHDEAGIDTLVSRLVVEPPVLVILEATGGFERAVVGVLAAEGLPVAVVNPRQVRDFARATGRLAKTDRIDASILARFAEAIRPAPKPLPEEEIRALQGILARRRQLVGMLTAENNRLPTATKPVAKRIAAHIRWLEKELSRTDRDLEEAIKSSPTLRQNETLLRSVPGVGPVLARTLLAEVPELGTLTHKRVAALVGVAPLNRDSGTLRGRRSIWGGRAEVRAALYMGALVAARRNPVVREFYERLLAAGKPKKVALVACMRKLLSIVNAVLKHRTPWRSPHYLSP

SEQ ID NO: 369338 - protein, 321 aa, unidentified
MSTILGIDISKADFHAALLDGERVHRKSFPNTQRGFAQLSSWLHNRKVKEVHACMEATGGLGDALAEYLYDGGYRVSVVNPSRIKGFAQSELLRTKTDAVDAALIARFCRAHTPEAWTPPALELRELQALIRRYEALIDMRRQEKNRLAAPRGSAAIRASITEVIAQLDLAIDRIETQIRALFDQYPPLRAQRDCLTSIPGIGELTAARILGEIPNVHEFRNSKSATAYAGLSPAHRQSGSSVRGRSRLTKIGNARLRRALYFPAIVAQKYNEPLRLFSERLAARGKPKMVIIGAVMRKLLVLAFGILRSGEPFRIQATPG

SEQ ID NO: 369339 - protein, 347 aa, unidentified
MKFYTKQHKFYCGIDLHTKKMYLCILDTEGEVRLHRNIKTDPEVFLNVIEPYREDIVIAVECMFTWYWVADLCTEHGIPFVLGHALYMKAIHGGKAKNDKIDSRKIAVLLRGGMIPMAYTYPAKMRATRDLLRRRNHLMRKRAELYAHIQNTRSQYNLPETLGCIAKPQNRGGIVERFKDASVQKMIDTDLAVIRAYDPIIAKMERDIIRMANHHDPIAYALLKSIHGIGRILGLVILYEIENINRFPTVQDFASYCRLVKCAKESNGKKYGSSGKKIGNAHLKWAFSEAAALFLKGNEPAKRYRERLMNKHGKAKSLSILAHKIGTAVYFMLKNKKPFDQNKFLGL

SEQ ID NO: 369340 - protein, 387 aa, unidentified
MARKRTLSTLDTSIAYEAVGLDLAKEDTAIAAFGPDHEGPYLIDRMPYDKLYELLADMAPTLVAMEPCSGAHQIAEQIQELGHEVMMISGRHVQAWVKDHCNGQKTDLNDAFAILNLAYDRWLTPIRGKTREECRLLALQASYRQLKGQRTKTMVHVKATLHAWGFPIRAGSFNQKALHELIDANREAFGDEVAETLHLMINRVRDLDNDIATVLKLLTEATKRDPRASLLRSIPGFGVLTTSRWCAVIGDIARFDSPKQTMAFIGLVPNNRITGHHTETSSGREARGQGRMSKRGDKMLRSLCIMGAGSLCLMVRNDRLPDCPFVASIKERLASPRPWFKVLVYVAAKLVRIATALLKYGETFSFEKAGISKAVLKQWELEQAKAA

SEQ ID NO: 369341 - protein, 411 aa, unidentified
MKLFCGIDWAETHHDIAIVDGDGNLVAKKRITDDADGFAQLVELLAEAGDSAEHRIPVAIETPRGLLVASLRATGRSVYALNPLAVARYRERHSVARSKSDHADAMTLANILRVDAHVHRKMPADTELCQAIAVLARGQQDAIWRRTKASNELRSLLREFYPSFLAAFKGRFQIGIASLEARAVLAIAPTPAVANKLSASRLAAALRRAGRTRNIDQVAAEIKTALRAPQLRQLPLVESAMGRQTLALLAALDAACVSVDELGQAAAELFHTHPDYAVITSFPGLADSTGARVLAEIGDDRTRFADAKALKAYTGTAPITRASGRSISITRRRIKNDRLAAAGWVWGFAAMANHPAAQDHYRRRRDQGDHHAAAIRHLVNKFLGQLHYCLQNQQMFDTVKAFPPPNEGLAA

SEQ ID NO: 369342 - protein, 343 aa, unidentified
MEAVTTIGLDIAKSVFQGHGVDGHGKVVVRRQLKRRYVLAFFKKLSPCLVGIEACATSHHWSRELQALGHTVRLMPPAYVKPYLKRQKNDAADAEAICEAVMRPNMRFVETKTAEQQSCLMLHRTRHLFVRQQNAVINSIRAHLAELGIVAPVGRNGVEELLDIVADPDDDRVPEVARDCVAALGAQLRMLKAQILEFDRRIMAWHRSNEASKRLDEIPGVGPALATALVASVADPRAFRSGRDFSAWIGLVPKQHSSGGKEKLGGITKRGDRYLRSLLTAGALAVIRYAKMHGTKHRPWLTALLARRPTKVAAVALANKIARMAWAMMSNGERYREPAALAR

SEQ ID NO: 369343 - protein, 350 aa, unidentified
MSRDSTPATVATIGIDLGKNTFHLVGLDRRGAIVLQLKLSRGQLERRLANVPRCLIGMEACSGSHHVGRRLAALGHDVRLIPAQYVKPFLKGHKNDYRDAEAIAEAVQRPTMHFVAIKTPEQMDLLALHRVRSRLVGQRTGVINQIRGFLIERGITVRQGVVPLRRALPDILGSSPEVLSPRVVRLIADLAQDWRRLDERIETVSAEIDALAQQDESCQRLMTVPGIGPIISSAVVAAIGNGAGFKQGRDFGAWLGLVPKQESTGDRTILGKISKRGNKYLRTLFVQAAHVVLVRQPSAAKRGLWPWIEQASRRLHRNMLAIALANKLARIAWAVLARGRAYEPRVPAHA

SEQ ID NO: 369344 - protein, 361 aa, unidentified
MSGTMTWVGLDVHARSTHAAAIDSMTGELVRVRFGAGIDAPLAWLAELPGPVRACYEAGPTGFGLYRAAVAAGIAMQVIAPGKTPRGPSDRVKTDRKDAELLARLLLAGSLTRVVVPPPEVEAARELTRAHDACRRDLMTARHRVSKMLLRHGRVYPKSTTWTAEHRRWLSRQQFDEAASDLVFADLLAAVDGLCSRKAAIALRLSQLATDEQWWPTVARLRSFRGIDTLTAFSLHLELGGDWRRFEHAPSLSAWLGLTPSLSQSGESSRQGSITKTGSMLARRLLVESAWHYSRQPRLGATLANRQQGQPDHVLQIANRAQQRLYRVNQKMRARGKPHNVTVVACARELSCFLWAAATAD

SEQ ID NO: 369345 - protein, 345 aa, unidentified
MNIASIGIDLGKTTFHLVALGERNKILLRKKFSRTQLLAYTANLPASLIGLEACAGAHFMGAALRAQGHQVQLIPAQFVKPYRKSNKNDFIDAEAIAEAVTKQNMRFVQIKTQEQLDWQAMHRVRDRLMQRRTALINEIRGFLLERGLTFAARPIYLRKNLPTVIEDAEQNLSPRLRWLLDRLWQEWKQTEIDIKTITDEIERISNDDARCRRLRQIPGFGPLVSTATVAAIGNGSAFRRGRDFAAWVGVVPRQYSTGGKQKLYGISKRGNVYLRRMLIHGARAVLFRVKYDTAGFGQWVQRLAQRAPHNKVVVAIANKLARIAWAVLSSGQDYRHQPLQQRAAA

SEQ ID NO: 369346 - protein, 345 aa, unidentified
MQPMYYIGLDVHKKKISYCVKDGSGQMHREGEVPATRWDLGQWMKTLPQPWTAAMEATIFTGWIYDHLKPHAAALKVAHPLMLRAIAAAKKKNDRIDANKICDCLRCNFLPECYMAPTALRECRRTLRYRNLLVRQMVQMKNKISVLLMEAGVSYNKEKLHKVGYFRELMASNPDINDGLRSLLRLCRETVVRLGKTESALVRTLQRDPLLVERVERLMTIPAVGPITALTWALEVGEVQRFSSIKKAISYCGLCGDEKRSANTVQRTPISKQRNKHLQTMLIEAAKMAPRYSPALAALYDLEKQKGHANRATLTVARKLVAYLMAVDRGQRNFLVVENQASAVA

SEQ ID NO: 369347 - protein, 411 aa, unidentified
MVKENFIYVGIDLHKETHTAVMIDCYNQKLGEITFPNRPADFPKLVTKVKKCNTDAKEVVYGLENAYGYGRPLAVWLIDKGYFVKDVNTAISHRQAKHRGAMYRKSDSDDAEAIALATLNMLDKLPDACPNDAYWSLGQLVHRRDNIMKQRTRLVNQLHEQLCIAYPSYKQFFNDISRPTALYFWEHYPSRKYLKGKSVEDLRTELVPVSHNRCSTKNCEKILDAVASDKVKNNAYQDARDMVTLSIVSDLQHYDSQLAEVDKMLEQMYKMLGCTLTTIPGVNVITAVKILAEIGDIKRFSNANKLAQFAGIAPLHLSSSGKGKDVATKQGNRRLQATIYFLAIQMVQLSSKGTPRNPVVRAYYEKRKAEGKTSQQALICISRRLISIIYGMLKNGTEYRMPVVENAGEKL

SEQ ID NO: 369348 - protein, 362 aa, unidentified
MKKGIREMESEWKQRPERTVGIDLGDRFSRYCVLNRDGEVLEEGQVRTGAEGFRRHWEGELRQRIVMETGTHSPWISRLLQSFGHQVIVANARKLRAISQNESKNDRQDAEMLARLGYCDPKLLAPIRHRSAERQRDLNLLRARDTLVRARTMLINATRGLVKSAGGRLPAAASDYFVARVTAAVPAELEAATQPLLHQIAALSAAIRRLDQAIEKLGERYPEMVRLRTVPGVGPVIAAAYVLTLDGVDAVERSRSVGAFLGLRPRQSQSGNSDPEHNISKTGNPYLRRLLVQAAHYTLGRFGPDSALRRWGLKLAAGGKRAKQRAVVAVARKLAVLLHHLWRTGQDYRNFPEAAAVAGSAV

SEQ ID NO: 369349 - protein, 332 aa, unidentified
MMIENYVGIDVSKLSFDVFVRENSAHKQFKNESVGFELFTQWLKKQVGHSLNTVLICFEHTGLYSLPLAMFLETGHIPFAMIPALEIKRSLGITRGKNDLVDSKRIAEFAYRFSDKISTTKLPAADIRKIHSLLTLRDRLMTSMKGYTVSRNEMLRVMQKEDIPELFSSYESAITSLQDEIGKLEQAIKAIIKGNEQLRSTFELITTIKGIGFIIASFLIVYTYNFTRFVNWRKFACYSGIAPFEYQSGTSVHGKTQVSSIANQQVKRMLHLAAMTAIHFDTELREYYIRRQADGKSKMAIINIIRNKLVARVFAVVKRGTPFVDMKRYAVR

SEQ ID NO: 369350 - protein, 414 aa, unidentified
MRVVHERCAGLDVHKRTVVACRIVPAKDRAWQVDIRTFGTMTDDLLSLHDWLAEAKVTHVAMESTGVYWKPVFNILEEDFDVLLVNAKHIKYVPGRKTDVKDAQWIAELLQHGLLKASFVPEPAQRELREVVRYRTHLIQERVREVNRVHKVLEDANLKLSSVATDIMGVSGREMLAALIAGKDDPEALAELAKGRMRSKIEELERALTGYVKDSHRRMLSWHLRHIDELNALLEEVEQEIDQLIRPFDEDNLMARLDTIPGVDRKTAQIIIAELGIDMSRFPTAGHAASWTGLTPGKNESAGRNRSSRTNKANRYLKAALVQAAHAAGRSKDNYLTAQYRRLAARRGKKRAAVAVAHSILVIAYHLIERGTEYVDLGATYFDQRKKDTVQQQLVKRLEKLGFKVALEPLESAA

SEQ ID NO: 369351 - protein, 338 aa, unidentified
MKLYAGIDLHSNNSVIDLLDETDKVIYNKRLPNNLPMILNELSPYQSQIEGIAIESTFNWYWLVDGLMAAGYHCHLVNTAAVQTYSGLKYTDDNHDARWLAHLLRLNLLPTGYIYPKDDRAIRDLLRKRSQMVRMQTTNLLSIHNLIARNTGGAIKSNRIKRMKPEDVSLQLPNEDHALALNCNLSILHQCQEQIKILESAILNRIKLRPEFQFLLTVPGIGKILALTIMLETGDITRFEKAGNFASYCRCVQSKRISNGKKKGENNRKNGNKYLSWAFVEAANYSIRYSDVIKSYYQRKCAKTKKVIAIKAVAHKLSRACYYMMRDNVQFDVNKAFS

SEQ ID NO: 369352 - protein, 321 aa, unidentified
MGAIWVGIDASKRCLDVAIRPAGKMLSIDNNDAGIKELVRTLVKCSPELIVLEATGGHEYAAAYALMKAGLAVAVVNPRQVRDFAKAVGKLAKTDPIDARLLAHFAEAVRPPARPVPDQQLDEIGHLVTRHRQLIEMIVAERNRRMSSRGTARCDIDATIRFLQGRLDKVDEQLQTLIAKHPEWNAKAELLHSVPGVGPVLVSSIVAELPELGTLNRKQIAALVGVAPFNKDSGQSRGRRRIWGGRGHVRSLLYMSVVAGLRFNPTIKDFYKHLIAGGKAAKVALVACMRKLLVILNAMLKNRQPWRPVAVLAAANGLGMA

SEQ ID NO: 369353 - protein, 359 aa, unidentified
MRSLNSFDKRGGSIMKDIKVLGIDLAKNVFQLHGADARGNGVLKKRLSREKLIEFIASLSPCLIGLEACGGAHYWARTFERMGHRVQMMSPQFVKPYVKSNKNDANDAEAIAEAVTRPTMRFVPIKKIEQQDVLLVHRARELAIKQRIAQANQIRGLLAEYGIVISKGFSHLEKLPEILERYEHQLTAVSKEIFLHLHEQFQVYKKQVEDYDKKIKQQANDDPRCQAIQNIEGVGPITASAIVATIGDPKTFKNGREVAAWLGLVPKQHSSGNKVTLGGITKRGDRYIRMLLVHGARSVVNICENKTDRKSQWVADKKKRCGYNKATVALANKNARVIWAMLATGECYRKADTAETQVV

SEQ ID NO: 369354 - protein, 494 aa, unidentified
MATRRATTDTQTQPRSAYRRRKARARARAARAHEAEERRVEGLPVTQAHAAGIDVGSRSHWVCVGAGAGDPAACVREFPAHTAGLHQLLDYLRQHHVTTVALESTGVYWIPLYELLESNGFEVLLVDPSYTKQVKGRPKTDRLDCQWIYRLHSVGLLAAAFRPDEKTCQLRSYLRQRANVIRYAGQHIQHMEKALEQMNLKLREVISDITGVTGQAILRAILKGTRDPQKLARLRNQKCKASEAEIAQALHGSYRDEHLFALRQAYEAWQFYQKQLDQVEEQIQQQLARMKQDRALPPLKPRPRTSGRKPNQPRFDVRTALYYVVGIDLTEIEGIAELTALTIISEIGPDVSKFATVKHFCSWLGLCPQLKKTGGRVKSSRTRPGVNRAAVAFRLAANSLYASKGALGAFLRRQKGRLGAPQAVTATAHKLARIVYLALKHGLAYVRQNQQEYAAKVREQQIKGVQRRARQLGLEVIEKQPSTSTAAQTAAVPC

SEQ ID NO: 369355 - protein, 311 aa, unidentified
MSEFIGIDVSKARLDVSAHGGSSFAVENTEADIGRLCEQLKALEPELVVMEASGGYERLCVAALAAAGVPVALVNPRQVREFARATGVLAKTDRLDARVLAHFAAVVRPPVRPLPDAQHQVLEELLARRRQMVAALVAEKNRLGLARTRLVKRTVREVVSTYERLLELIDRELDELIKASPLWREKEDLLRSFKGIGPVSARTLLAELPELGLLNRKQIAALVGVAPIARESGSWRGRRSIWGGRGQVRAILYMATVTAMRANAQIRVFYLRLRQAGKPAKVALVACMRKLLTILNAMVRTQTRWQPPSAA

SEQ ID NO: 369356 - protein, 384 aa, unidentified
MTGTSGNQPARARIRGSERTAGEQCNGYEGRAEQSEGARPAKGVDIAKATLEATAWREGRAVRLGTLAQTADGWVALRDAVVGLQGSPAVSAGRGPEDADREPVALVREPTGGYELAFALWARRQPGWQVHRPNPARVRARRQGLRAKTDRQEALLFARFGAQPTLSVWQPLASEVSELDPVLRRREEVADGLRRERQRHEQLGVRPAASRTVQASVERLLQTFENELADLERAIAEQVQRHATLQAAEQRLRRVPGVGARVALPLLVACERYHALAGGQGTAKGMVADGGLDPQPHASGVSVRHRALISRQGDRLLRARLYMGALGALRGENPLHAFYQRLVDRGKPKKLALIAAARKLLAWAWAVFSSGQPFDAAKTVKLTA

SEQ ID NO: 369357 - protein, 349 aa, unidentified
MQITTIGLDIAKNVFQVHGIDAAEKVVVRKQFRRGQVLRFFEALPRCRVGLEACATAHHWARELAKLGHEVRLMPAKDVKAYVRRNKNDAADAAAICEAVRRPIMRFVGIKSADQQGRLMQHRTRDLLVRQRTQVINALRAHMAELGIVAAQGHEGLKKLVAIIADEKDERLPADARASLIVLTAQLQALQTMIRVIEKRIIAQHRASEASKRVATIPGIGPLGASAIIATVTDPSAFRSGRDFAAWIGLVPRQDSTGGKPKLGPISKQGDRYLRRLLVVGAHSALRRAKQSPQNYPWLVQLLARRPFKVVAIALANKMARVAWALLARGGRYRAGGGSTYRAPQLAAA

SEQ ID NO: 369358 - protein, 411 aa, unidentified
MPVFCGIDWAEDHYDVTLVDDAGAVLARKRISDDSVGYQVLVGLLGEHGDRQDDPIPVAIETPRGLLVACLRRTGRKIYAINPLSVARYRERHSVVRAKSDRVDAELLANILRTDRHAHRPLPADSELAQAIGVLARAQQDAVWSRQHIANQLRSLLREYYPAFLEAFQDRRPHGLAHPDARAILAIAATPTQAARLTRPQLAAALKRAGRQRGIAAASIRLQAIFRRTSLHQLPLVEQAMGHQALALLLQLNAAAQAEHELAEATRVAFQQHRDSAIFTSFPGLGELPSARLLAEIGDDRTRFADARGLKAYAGAAPVTRASGKKLVVLHRTVKNNRLAATGYLWTFAAIRLSVGARAHYNRRRLAGDRHAAAQRNLFNRFLGCLYYYCLQNGQTYSEAHAFPTADALAA

SEQ ID NO: 369359 - protein, 345 aa, unidentified
MRPRSRFQVVVSKSRFFFHKSVLMNKYKEIFGVDISKDVFDVYGSKSGHDQFNNDALGFKSFLKSLPKESLVVMEATGYYHYRLAQFLFKQLILVSVVNPLSVKRFIQMKLAKVKTDKSDAKAICEYGQINEVPLYTALTGVQSECLQLFRLLDSYLKKRTATKNKIHGEDVLGIPSKYVYRSLIRIKKYLDNEVLGIEKKLLSLVKQEQQVQLTLLTSIPGIGLKTALFMIVITDGFDKFENAKQLCSYVGITPTIRESGSSVRGRSSISKVGNRKLRNLLFLCSFTACKHNKRCREIYERIVNKGKSKKLALIAVSNKLIKQSFAIAKSGNPYDEKYVSVLPK

SEQ ID NO: 369360 - protein, 328 aa, unidentified
MDTPATATATAIARVLRVIGCDVGKAKIVVFDTLTGRTREVANEPEALEGFVRELDGNCLVVCEATGGYERNLLVAAAEAGIPAHRADARKVKAFIRSLGRIAKTDAIDAQGLARYGQERHHDLALWQPPADVLEELQTLVRLRRQLVGYRTALTNQLKAPGGNAAKPHLQDLIDTTAESIRKIETDLDTLVEQDLKIARRVEIISEIPGCGLLTAISIAALIPEIGTTTKRRIASLAGLAPHPYDSGEHHGYRRTRGGRPEIKQILFMAAMAARNHNPELKAFYTRLVKNGKKPLVAITALMRKLITIINARIRDAEKTPQPQPELS

SEQ ID NO: 369361 - protein, 352 aa, unidentified
MNVIHYIGFDVHKKSVSYCVKDAAGKILEEGKLRATRQALRQWAGDRTEPWHGAMEATLFSGWIYDTLKPFATELQMGHPAMMKAIGASKKKNDKIDARQTADLVRCNLLPACYVAPTEIRELRRMLRYRNVVVAQAVRMKNKMSGLLMEVGAEYNKQRLHGKKYFTELLGSLEEVPESVKDLLRLSRGALELFETTQKRILDRLQKEPRLVRRLEGLQSIRGVGVVTALSWTLEICDPHRFPSIADAVSYCGLTSALVSSADKQQRGPLSQQRNAHLQTVLIEAAKLAPRWNSQLAAVHEREMNRGNRNRATLAVARKLVAYLLAVDKSGKPFQVQTPPAPATETEVPAVA

SEQ ID NO: 369362 - protein, 349 aa, unidentified
MTTVALAPEIVIGGVDTHADIHVAAACNGVGKVLGTKAFPTTPAGYRDLLSFLNDFGEVQSVGVEGTGSYGSGLARHLATEQVQVLEVSRPNRQVRRAHGKSDVIDAIAAARAVISDQAKVIPKSHDGVVEGLRALQIVHRSAHKARTQTLNQLHALIVTAPEPIRGQLRGLGRPQMLTTCQGYRPGDRDDLASITKLALRELATRVADLDEQIKRVETRRHRLVRAHAPQLLAIFGVGPDTAATLLVSAGDNPDRLHSEASFAALLGASPIRASSGKTKRKRLNRGGDRQGNSALWHIVITRMATQPATKTYVERRTTEGLSPAEIIRCLKRYVAREVFNALPQELRT

SEQ ID NO: 369363 - protein, 465 aa, unidentified
MKNKSDTTKKKKQKITINPDWEQINPDAAGIDIGSREHWACVPPNRQPQNVRKFGTFTGELEALADWFEQCGVKTVAMEATGVYWIPVFQILERRGFKVVLVNPRQTKNVAGRKSDVQDCQWIQRLHTYGLLQASFRPGDAYCVLRTCLRYRDELITARATQSQHMQKALQAMNVQLHHVLSDVTGVSGLAIIGAILKGERDPAKLATLVDYRVRASQQTIQKALAGDYRSEHLFVLQCAFELHHTYEEKVLACDQRLVAEVAQLPRQVDPVLKPIPPRKEGRAAYKDKLCGQDMREPLYEKIGVDLTAIEGIGITTALTVLTEVGPDLSGFSSEKKFASWLGLCPDNRISGGKVLSSRTRRVINRVSDALRIAAMTLERSQSALGAFHRRMKARLGAAEAVTATAHKLARLIYRLIKHGEAYVRQGMDDYERKFHAGKLNHLKKTAAAMGFELTARQPLTLPVS

SEQ ID NO: 369364 - protein, 348 aa, unidentified
MTMVGGFDVHRKQITFDYVDDDGLVRWGQIRPATRKTLRAWLGEHCPDGDAEFALEGCTGWRYVTEEVASAGVGVHLGDPAEIAVARGPKKRAKTDRADARLLRTLLLEGRFPESWIPPVHVLEIRTLGRLYCTLMDERRAWQQRIHAQLFHQGCPPIRALLSAAGRDALARVDLSAAGRQYVDTALRRIDELSTEIGPLRTQLVNFARRQVGCQALQAHYGIGWLCAAIIWAEIGDARRFTSSDQLVRFAGLDVTVYSSDGKRSPGHLSRQGSPELRWAAFEAAKCAARRSSPDYAYYHQLAAKRDGHNGKNPTLAVERKILRRCYHTLRELGDAALALPIPEEVAA

SEQ ID NO: 369365 - protein, 322 aa, unidentified
MIEEAVYVGVDVAKSALDVAVTDSGETWQFVNDDEGISQAVHYIASVKPSGIILEATGNLEMPLAAALQASRMPVAVINPRQVRDFACATGALAKTDTIDARIIALFGARVKPEIRPLPNQKVCEMRNLLTRRRQLIEMLTAEHNRVSQAGDGIRSCIETHIKWLETALSNINDDLDNQIRSSPSWLEKDNLLKSVPGVGKVVSSSLLIELPELGKLNRRKIAALVGVAPLNRDSGTMRGRRTVWGGRAKLRAVLYMAALVASRRNPIIAAFYQRLLNAGKAKKVALVACMRKLLTILNAMMRTMTVWQPEIILRRASVETS

SEQ ID NO: 369366 - protein, 415 aa, unidentified
MRSNDKVVCGIDVHKKFFVAALLTAMGECIIERFANNQTGLLQLKDWLLRYYCQLVAAESTGIYWYPLFLTLEESIDVVIVNARQIKAIPGRKTDIIDAQWIAQLARNGLIKPSRVFRGNDRELRKLTRTRQKLIQERTDHINRIHQILESVGIKLSSVLTNILGKAGRFVLRSLLDGITVEKIIERIPVARIRKKKEALLEALHTNISSVDRLMLEQHLELIQIIDGKVAEIDAEIQNGFHGRKEDLQILKSMPGIGNTAAATILAEIGNYKDFPSAEKLAAWCGIVPSVYQSADKLRTGPITKQGSRQIRWILIEAAHSAARSKNTKLHRYFMRLNRRIGYVKAIVALAHKILCLIWHLLHNHEFYEESNSSTKHETNFSDPENLQRRERSAINLLTRLNYVITKPTNELVLP

SEQ ID NO: 369367 - protein, 338 aa, unidentified
MKLYGGIDLHSNNSVVALLDEQDQLVYQKRLGNDAQGILAALAPYQEAIEGLVVESTYNWYWLVDALMDAGYPVHLANTAAIVQYSGLKYSDDDSDARWLGKLLRLGLLAEGFIYPREERAVRDLLRRRSRLVQQHTANLVAVQNLMARNRGRSLSANAVRRLTPEAVAQLLPDANLALAVQSTLLAMRAQEAAIDLLERQACAQVQLRPAYRHLLSVSGIGKVLGLIILLETGPVRRFAKVGNYGSYARCVGSERLSNGKRKGRGNTKNGNKYLAWAYIEAANFAVRFNPTIKRYYQRKRAKTNGVVAIKTVAHKLARACYYILRDGTDFEVTRAFS

SEQ ID NO: 369368 - protein, 424 aa, unidentified
MKVTYQTCCGVDVHKSFLVATIVKTTGGIEPSYQKKRFSTFNNSILEFKQWLLDNHCHDVCMESTGKYWVPVFNLLEDKINVVIANPKWVKAVKGNKDDTKDSKWIGDLFRLGLVKGSYIPCKKVRILREYTRYRYKLVSCRSSEKNRYQNALTVCNVALDSIVSDIFGKASTSIIDYLLEQSGTSINHEEIASKLLRSLKSKEDAVIESVEGYQMTDAQKYRMRLVRAHMDYITAEINDVDKMIENMISSNPDFENAVQFLCTIPGVKRDSAITIISETGTDMSQFSSSKRLCCWAGLTPGSNESAGKKKSVRITRAGVYLKPALVQCAHAAVKSDKSPYYKKKYESLVKRRGKKRAIIAIARMILTAIYQMLSTGEQWNPSDLYKIDMPVALVEKQKAKAIKQAKKLLQREGLLPPDEPLAS

SEQ ID NO: 369369 - protein, 338 aa, unidentified
MKLYGGIDLHANNSVVVVLDEQDRVVYQKRLPNHLEQILHQLSSYQGAIEGLVVESTYNWYWLVDGLMEAGYRVHLANTAAIQQYEGLKYTDDHSDARWLAHLLRLGLLAEGYIYPKEERAVRDLLRKRGQLVRQKTANLLSLQNLLTRNTGVSLSGNRIKQLSMADLERLVPEADLALAVRSTLAVMHCLATEIVVLERTVKERAKLRPAFTQLLSVSGIGDILALTIMLETGDIGRFATVGNYASYCRCVGSQKLSNGKRKGQGNTKNGNKYLAWAFVEAANFAVRYNGQIKRYYQRKKDKTNGVVAIKAVAHKLARACYYVMRDHVPFETAKAFG

SEQ ID NO: 369370 - protein, 347 aa, unidentified
MDIFIGLDVSLASTAVCVLGDRGKILKETDVASEPEVLVSFLKALPCEITGIGLEAGPLSQWLHKGLTEAGLPAILMETRQVKAALKASPIKTDRRDAQGIAHLLQMGWFSAVHCKSVPAQETRVLLTARKAIQKVLIQLELSVRGVLRNFGLKMGPVSKGRYDQRVRDLAAGNTVLKAAIEPILRARAELRRELAGFEKMVRDQAKIDPICRLLMTMPGVGAVVALTVKAAIDDPTRFKRSRDVGPWVGLTPGRDESGERSIVGAITKVGDAGLRAALYQAANVMLHHGGPNWLKSWALRLAERRGKRRATVALARRIGVVLHRMWVDGTGFRFTRDEAMALRQNA

SEQ ID NO: 369371 - protein, 369 aa, unidentified
MDKAITYVGLDVHKDTIAVALAEAGVRGDVREYGKVANTPAAVRALATKLLRVGNALRFCYEAGPCGYGIQRQLSLAGHDCVVVAPSLIPRKPGDRIKTDRRDAINLAKLHRAGELTAVWVPDPAHEAIRDLVRARLAAVRSLRQARQQLSGFLLRHGRHYNRPAWTLMHRRWMAGLRFEQAAHHIVLEDCIAAVESATARRDRLEAHIEAALPDWSLAPVVGALQALRGMALVAAATVIAELGDITRFANPRQLMAYLGLVPCEHSSGAARRQGGITKAGNGAARRMLIEAAWSYRFPARISREQLLRQEGLAKPIRDTAWKAQERLCRRYRKLARTGKSPTVVTTAIARELAGFAWAIAKHVQAANA

SEQ ID NO: 369372 - protein, 329 aa, unidentified
MMNASELFFVGIDVSKNTLELALDNKSDTSCFSNDDKGIAALTAAIKVRSAEDKSKVGAIVLEATGRFERQAAATLCAAGLPVMVINPRQARDFAKAMGFLAKTDAIDARALSHFASTLYQSEKRDSLWMRLPDPEQIALQELVTRRRQLIEMRVVEDNRWFLSSKIQRKSTDKVRNVLNKEIGSIDHTIETQLKEHFADKLRLIEQCKGLGVSTQATLLAALPELGKLSHKAISKLVGVAPLNCDSGKYKGRRFTWGGRADVRSALFMDTLSATRYNPLIKTFYQRLLTNGKKKKVALVACMHKLLTILNAIMKSGKPWDNNFSSNFA

SEQ ID NO: 369373 - protein, 365 aa, unidentified
MLYLGIDQHKRQLTVNLRSEDGSVILQRQVSTQWEKVRAFFADLAAKAQPEGGFFAILEVCGMNPWLLAILKEHGCRETVVIQPTERSKQKTDRRDAGELAHTLWVHRRQFLDGNHPLGLRRIQPPTPQEADDRQLTVLRARLTRKRTAVLNGVHKILSKHNLEQACPTKKFQTKKVRRWLTELELPVLDRMELNLLTPQWEQLDEQLEAVEAKLAERAAADEQVKLLETVPGMGHYSAVAISSRIGNVERFKHADSLANFFGLTPGCRNSGEATKRLGSITKRGSKIVRYLLNQAVIKILRYDGAMRTWFKRIKKRRGAKIARVAVMRRLVTIIWHMLKKKQKYRYDSPIKRHKEFDAYEGSAA

SEQ ID NO: 369374 - protein, 383 aa, unidentified
MEVVHPTCAGLDVHQHTVVACARVGAGSAVTRDVRTFGTTTQELWALSDWLTAHGCTHVAMESTGVYWKPVWHVLEGSVELVLANAMHIRNIPGRKSDVNDATWIADLLAHGLLRGSFVPPAPIQELRDLTRTRKQLVREITQHTLRIQKTLETANLKLTGVLTDILGVSGRAILQALVAGETNPDRLAELARGRLKASRADLVAALHGRVTAHHRFLLQLHLAQIDALEGAVRAVEARLGDALAPFRAAVDRLITMPGVSETVARVLVAEIGVDMTRFPTAGHLISWAGLCPRLDESAGKRRSTRTRPSNPWLKTTLVQGAWAAARKHDSYLRAQFLRLKSRRGPKKAIIAVAASMLTAAYYMLRDGVDYRDLGAAHFDRRT

SEQ ID NO: 369375 - protein, 330 aa, unidentified
MSILAGQVDFVIGVDTHKDTHTAAVVDALGGVREHATMAAGAAGYDAMLGWAREAAPGRRIWAIEGTGSFGAGLTACLLAAEEWVCEVDRPKRPSRKGGAKSDQIDAARAAREALAAKHLGQPRRRGSREATRVLQITRKQAAEIEARAIRHLRNLVINAPEPLRARLRLLSGARLVTTCAKLRWAPSQSVEWNATMSALRSTAVRAQAAAREAAELEKQLAILVNEEHPQLVAEMGVGPVVAARLSCAWSHRGRMRSESAFARLTGTAPIPASSGQVVRYRLNPGGDRQRSAPGRGQERPRNLPLPKAIPQPAPVPGDGIRLDEQIFGP

SEQ ID NO: 369376 - protein, 411 aa, unidentified
MDLVYPRCAGIDVHKRTAVTTIGWVDEQGQRRRKTRTFGTMTAEIEQLAAWLVEHRVTHVAMESTGVYWRPVFNLLEPHVEVVLANAAHVKAVPGRKTDVRDSEWLLDLMQHGLIRGGFIPEAPIRALRELTRYRTGVIEERTRALNRIQKVLEDTNIKLASVVSDILGVSGRAMLEALIGGETDPEVLAGLARGTLRKKHDALVQALQGRILDHHRFLLRTLLAHVDQLTASIAELNAEIARRLEPYAAAFDLLCTIPGIKRRVAEVVLAEIGTDLGRFADARHLCSWAAICPGNHESAGKRRSGRMRHGNRWLRGILVQAAWAAIKVRGSSFGARFRRIARRRGDKRAAIAVAHSLLTVVYHVLTRDEPYRELGGEYFDRRKPEHQARYYARRLAELGFDVTLDPVTAA

SEQ ID NO: 369377 - protein, 343 aa, unidentified
MQVTTVGLDLAKRIFQVHGVDAAGKVVIRRRLQRSEIAAFFADLPACLVGIEACATAHHWARLIGASGHQVRLIPPSYVKPYVRRSKTDAADAAAICEAVGRPSMRFVPVKSAHQQAALLHHRARDLLVRQRTMLINAIRGHLGEFGIIAPAGRHRVADLLNLLQGADDAEVPALAREAVQSLFAELSALEIRIKVVEAVIMREHRSNAVSRRLTTIPGIGPITASALAGTIADPFAFKSGRELAAWIGLVPRQHSSGGKQKMGRVSKQGDRYLRRLLTVGATAVMRRLPGKTDGLSLWVRALLDRRPFRLVSLALANKMARIAWAIMVKPETYKASAMTAAA

SEQ ID NO: 369378 - protein, 371 aa, unidentified
MKQQTKSSNITVGLDLGDRRHRFCALDERGEVVEEGSICNDRVSLRKLAGRYHGALGVMEAGAHSPWISRFLEALGWRVVVSNPRKVRAIYQHERKSDQRDALMLARIGRMDLALLYPVRHGTAEAQQDLLRIKLRDSLVRARVAVINSVRFTLKSLGYTVRNPSSARFHKVVMEEVPESVREMITPSVQALAELTARIKMLELEINTLAQMKYPQSAQLQQIPGVGPITALYFVLKIEDPNRFAHVRDVGAYAGLCPRRDQSGESDPQLRISKRGDAYLRRLLVSAAHYILGPFGPQSALRAYGLMLAADGTARAKKRATVAVARKLAVLLLSLWKSQQPYQPFPGACLNGEQEDRRSGTIALHRMEATD

SEQ ID NO: 369379 - protein, 347 aa, unidentified
MTLAAISVLGVDLGKNVCSVVGLDASGKVVMRRKVRRETLIDLAEKLPPCIVGMEACCGAHHLGRVFAAHGHDVRLMSPEYVRPYVKAQKNDDRDAEGIAEAATRPTMRFVDLKSQDQLDVQTLHRSRDRLVGERTALTNQLRAILLERGLIAPKGRRKLEEFLAELMDERGGADLSPRMVLLVVDAREQWAELDRRIAAFDDEFVRWAKENEEARRLTTIPGVGAIVASALVAAIGHGESFDHGRDLAAWLGLVPRQFTTGGKPKLLGISKRGNKYLRKQLIHGARAALPHVAERDTPLGRWAKALMTRAHHNVAVVAFANKLARIAWAVLRRGGRFAAAGTPAAA

SEQ ID NO: 369380 - protein, 413 aa, unidentified
MDEMEEVVMHDAYVGIDWASAVHAVCALDGSGRRKARFLVEHTEEGLDRMVDRLGSFGDRARVPVAIERPDGVLVDRLLEAGHPVVPVKPAAIKAYRSGETPSGAKSDPGDAEVIAEYLRLRVDRLRVLRPFSEHTLALRQTTRTRTRLVRRRVRATNHLEATLDLLWPGALAAFPDLTTQVAGRFLSRYPSPEAAAHLGPKRMAGFLGRVGYSGTNYRSADQILALLRGAPAGVGSGPLSEGCEAVVLAQVEAMVSLCNAIRTLDRSIGSQLDEHPDAEIFLSLPHSGKVNAAQMLAEWGNCREAYETPDAVAALAGMSPVTRASGKHRVVAFRWACNKWLRSSIATFADNSRHGSPWAAEVYRRAVERDCSHPHAVRVLGRAWVRVIWRCWVDGTPYDVDRHGAARELAAA

SEQ ID NO: 369381 - protein, 332 aa, unidentified
MNNFYFIGVDVSKKKLDFCVMFENKVVHEEVVANHPKAITALIHHLEDEFGISNAQMLVCAEHTGQYTYPLVCACEAVECKLWLENPSDIKYSSGVQRSKNDRVDARRIAVYAARFEDKVRLYERPDQKIERLKQLEAERSLYVVDLAKYKAQMKDQKEYMPESIYKDKEKRMKKLMKYLQEVIDSITEEMEDVVNSTEVLSRQYKLLQSIDGVGPVVALNMIVVTEAFTRFDNARQFNCFAGLAPFSYTSGSSQHSRARVSHRADKSIKTLLHLSAVSIISRADGEMKEYYLRKVEEGKNKMTVINALRAKIVARMFAVIKRNDFYKPIFS

SEQ ID NO: 369382 - protein, 349 aa, unidentified
MNTHITIGMDLGDRDHITVVFDADGNEMQISKIKNTKSAIRRYFSVYKKATVAIEAGTHSPWISAVLKEMGHTVYVGNPRKLRLIWDSDDKSDERDARMLAMVCRVEPRLLWPIKHRSAEAYSDLSLIKSRYVLVKSRTALINHARGIVKSCGERLPSCSAQRFTNRCRDLIPQQLNSAIEPVMSIIEQLNLQIRQLDRTINQLCLSRYPEAKRLQTVNGIGPLTSLAYVLTIEDPKRFSKSRQTGAYLGLTPRRDQSGQSDKQLPITKAGNCYLRQLLVSCAQYILGPFGPDSDLKRFGLSIAARGGKNAKKRAAVAVARKLAVLLHRIWLSGEDYQPFHQRRLSRAA

SEQ ID NO: 369383 - protein, 338 aa, unidentified
MIIGCDFHPRFQQIAFVDLETGECGERRLSHPEEAERFYRSLASRKVEIGLEATGNFRWFRRLIHELGYEFLLGDPSQIRALNPRRQKTDKRDARHILNLLLEERFPAVWQPPEEDLRQLLLHRCRLVRMRVRIKNQLDSMAKNEGLLDGRGWSAKRRRQIEALPLSGWEHRRRADLLYLHDQLDEQIEPLEKAVREAAENNPQSCLLMTHPGVGPVVSLTYVLTIGDWKRFQRSRELASYLGLIPSEDSSGDKRRMGQISKQGNRLLRWLLVQAAIKAQRHDARWHRQYLRLSLNKHHGVAKVAIAHKLAVRLYWMLRSGQNYTQIMERGSHAGQSV

SEQ ID NO: 369384 - protein, 373 aa, unidentified
MPRYSTAFGMDVHLRSTTVCALDAETGEAVTRRFRGNPWGEVAEWMSGFPGPSLAAYESGYLGFAPQRELSALGVDCVVAAVSKVPRSAADLSSKNDRNDAARMAKAILSHDVTPVWVPSPEIEGLRDLAAAHDAATARLAAAKQRLLAFLARRGYVYGGTTPAGNPRRYWTYGFLRWLDKVRPADDGGIRALAALRNEVEAADETREALLAEYRAAVAAGPLSAEVEALQSIKGCGFALAAAFASEVGDFSRFRSGRQVTAYFGLAPKQRSSADSVRLGGISGAGNALVRRLAVEGSWRYAQAGHQPKLMPKGSGVPLEIRMHGRKGSERLLRRREEMLERGMPQAKANAATAAELVRWLWALGMMCREAGE

SEQ ID NO: 369385 - protein, 412 aa, unidentified
MQVVHARCCGLDVHKKSVVACILLTHEDGTVQRQVRSFGTMTVELLALADWLTAAGITHVAMESTGVYWRPVFNLLEDEARTIVLVNAQHMAAVPGRKTDVRDSEWLADLLRHGLVRASFIPPAPIRDLRELTRYRKTLVQERAQEVNRLQKLLEGATIKLAAVATDVLGLSGRDMLRALISGEQDPEALAQVARGKLRAKLPALRQALQGRVQPYHLILLTRILAHIDVLEESLAQLQAEIDTRLASCAEAVALLETIPGVGPVAAATIVAEIGTDMSRFPSAKHLASWAGVCPGNKQSGGKRLSGKPTDGDPWLRGVLGEVAQVIARTRNNYLNAQYHRLARRRGTYKAILAVAHSVLVIAYHILRDKQPSNDLGADYVDKLDAKRIERHHVRRLEQLGYAVTLAPASAA

SEQ ID NO: 369386 - protein, 349 aa, unidentified
MEAYDGPQIVGMDLHRRRSVLVRMRPDGQKLATARIDNDPAELRKQIARAGECPRVVLEAAYGWYWAAGALEAAGAEVHLAHPLGVKGFACRRVKNDEKDAADLADLLRMGRLPEAWIAPPEIRELRELTRYRIKLVHIRTSCKDQVHAVLAKLGVPVTCTDIFGVWGSTWLDELRLPQPYAGKITSLRKLASELTAEITLLEKVIADLLEHHDGYHALQQLPGIGKVLAAVIVAEIGDIRRFRHPGQLCSWTGLTPRHRESGTKIARGHITKQGSKILRWAMVEAIQRQPAGNPVRQRKDAIIARRGKEARNIAKVAAARQLLTCVFYAMRDGQVRSLTARAAAKEAA

SEQ ID NO: 369387 - protein, 412 aa, unidentified
MKDLLEISCGLDVHKEKIVACILTGPLGKPTRSEIREFSTLIPDMIALRHWIVSKNCHHVAMESTGIYWMPIYEILEDAFYGDITLLVVNARHMKNVPGKKTDMRDSEWISTLLRAGLLNGSFIPEKRIREFRDLNRYRKSVIRDITSQKNRIEKFLQSSGFRLSSFISDIFGASGRNIILHLIEHGQIDKTALDSCLKTKTRNRIDEILMSVNGTLSEHQKAFLKILMTHYDSLKKHLAEIETSLEEDMAPFALQVEQLNSIYGISTTASCAIIAEIGIDMKPFKTAEHICSWAGLCPGNNESAGKRKSTSVTKGNPYIKSMLCEIAWVIAGKRNTYLSAWYWRIKQKKGAKKAIVALARKLLVIIYTMLKQGTLFDESCFETRRKHCEQKQLSRYIRELEKHGYHVEAQS

SEQ ID NO: 369388 - protein, 402 aa, unidentified
MNSVGIDISKGRSTIAVMRPFGEVAISPFEVRHTDSELSELARRLKSLNGETRVVMEATGNYHAPVAKQLHDAGLYVSVVNAKLVHGYGNNDLRRVKTDRKDAIKLANYGLDRWLTLPRYIPEENTRLLLKNCYRQYRQYSKVQTVLKNNLISLLDMTFPNANRLFNSPARADGSEKWVDFVAEFWHCECVSERPLKSFVNKYWRWCRKHGYNFSEEKAHAIYDEASGHIGVMPKAETTKLLVEQAVSQLSATSAALAVLKQEMQSLSSQLPEYPVVMEMFGIGPTLGPQLMAEIGDVRRFYSKKALVAYAGIDAPPNDSGDVIGRHKSMSKVGASSLRRTLFLVMSVYLQNSPPNEPIYQFMNRKRAEGKPYRVYMMASANKFLRIYYATVKAYLEILEQI

SEQ ID NO: 369389 - protein, 348 aa, unidentified
MASPIVETRSITGGVDTHADVHVAAALDPIGGLLGVREFPVSPAGYARLLEWLGGFGTVCLVGIEGTGSYGAGLARHVTTAGVRVVEVDRSDRQDRRRQGKSDPLDAVSAARAAQSGRARGAPKGRDGSVEAIRALMVARRSAAGERTQTINQARALIVTGPDDLRARFARHTVAALVAELASLRPRPGSTVGYATRIALRELGRRAQFLDAQLERLDELILPLVTARAPGLLALYGAGPHTAALLLIAAGDHPERLRSEAAWAHMCAAAPIPASSGKTVRHRLNPGGNRQANHALWRIVFTRMGSDPATRAYVERRTAEGKSKAEIIRCLKRYVAREIYPHLRAAAG

SEQ ID NO: 369390 - protein, 411 aa, unidentified
MNAVGIDVSKRKSTVTIWQPGDKVILAPRDYRHTQSSINELIATIKSLDGETKVCMEHTGRYYEAVASWLSAAGIFVSAVNPWLIKDFGNDSIRTPKTDKADAKKIARFTLDRWAKLRQYSRMDELRNQLKTMNRQFGFYMDQKTAMKNNLIALLDQTFPGANSFFDSPARPDGSQKWVDFVYTYWHVDCVRGKSLAAFTEHYKSWCKRKGYNFSASKAEEVYRAASDLIAVFPKDDNTKMLVRQAVSVLNVTSETVEALRVKMDQTASQMPEYDVVLGMDGVGPTLGPQLIAEIGDVTRFEHRGALTAFAGVDPRKKESGDYERRSNPTTKKGSPHLRKTLFQIMDGLIQRSPQDNPVYAFMDKKRAEGKPYYVYMTAGANKFLRIYYGKVNAFLSPKEDGEAEADESDS

SEQ ID NO: 369391 - protein, 345 aa, unidentified
MEPMYYIGLDVHKRKISYCVKDSGGKVYAEGSLPATRIDLDHWMKTLPHPWSAAMEATMFTGWIYDHLKPHAAALKVAHPLMLRAIAAAKKKNDRIDANKICDCLRCDFLPECHVAPTAIRERRRTLRYRNLLVRQMVQMKIKISSLLMEAGVSYNKQRLHKAGYFRELLASNPDIDEGLRSLLRLCRETVVRLGKTESVLVRSLEGDPLLVERVERLMTIPAVGPITALTWALEVGDVQRFSSIKKAVSYCGLCGDEQSSANRVRRTPLSKQRNKHLQTTLIEAAKMAPRYSPALALVYDREKLKGNANRATLAVARKLVAYLMAVDRGQRNFLVIENQARTAA

SEQ ID NO: 369392 - protein, 372 aa, unidentified
MSDSNKTVFVGLDVHKDSIVVAVAEAGRGPARAVATVPFDLKVLRRILEKLGPKDAVSCCYEAGPTGYGLARSLHAAGWACDVIAPSLIPKRPGERIKTDRRDAAKLAVHQRNGELVAVAIPDEACEAIRDLERARDDAKKAERVARHQLGKFLLRHGRRYPGKTAWNDTHRAWIVAQEFAEPAQKYVVADGLAAVESATLRVAQLTERLRELVATWDRAPLVKALQSLRGVEFVTAVTVVAEVGDFRRFATAGDFMGYVGLIPTEQTSGETRRRGRISKTGNAHVRRLLVESAWHYRRQPRMSKALRERSVAIAPGVRAIAWKAQARLHNRLKKLLGRGKHPAEAVTAVARELAGFIWAIGQEETLLGTSV

SEQ ID NO: 369393 - protein, 371 aa, unidentified
MPDVISNQPADVRLWVSLDVHKLSNVAATLPPAGGKPELQRIETTEKAIRRFIQKLGGPKGLAVCYEAGPGGFELYRLLARLGVRCDVVAPSLIPVRAGDRVKTDRRDAKKLVSLYRGGLLRFVAPPTPETEGLRDLLRCRDDLRCARTAARHRVTKQLLRHGRIYRDGKHQWTGKHRDWLTRQQLDDPLAHAALEQMLVHLDGIERQLATLDARLEQIARSERWASQVQILTRFRGIATLSALGLIAEIGDFARFSHPRELASWLGITPSEYSSGDQQHRGHITKAGNRHARRLLTEAAWHYRHPPRRPKTGPEPDQRAWQAQLRLYHRHRHLTAQGKRSTVVNIAIARELAAFLWAAMTDQPHRQEAAA

SEQ ID NO: 369394 - protein, 405 aa, unidentified
MDAATPSRVAGLDWAPRLHAVCVLDPDGQVRARFDVPHTGTELRGLTRRLVKLGVGQVAIERPDGPVVQALLAAGLGVVVIPGRQVKALRGRYGTAGNKDDRFDAYVLADALRTDGHRLVPLVPDAPETAALRVVSRARKSLVATRVALANELRANLEIAFPGAATLFSDVDSPIALAFLRRFPSVTQAAWLTEARLAAFLRRMGYPGRKAAGELLGRLADAPAGLTGPEGEARAMVTLGLVAALDTVRAQIEELEGEVVERLGTHADAAIFTALPRSGRVRAAALLAEIGDCRARFPDAESLTCLAGAAPSTRRSGKHKKVVFRFACDKKLRAAVMDFAGDSRHDNPWAAHVYQQARARGHGHAHAVRILARAWLRVIWRCWQDHTPYDPARHGSYQRLIAQQA

SEQ ID NO: 369395 - protein, 362 aa, unidentified
MALLTGEAGRAMRIQELEEVPMTIVGGFDVHRAQITFDYLVTESGEVRTGQIAPANRLVLRKWLRQFDGEDVAFAVEGCTGWRFVAEELRRAGHAVHLAEPADTRTLRGTKKRAKTDRADARHLRQLLMQDRLPESWIPPVEVLEIRAKARLYVALMDERRAWQQRMHAQLYHQGVPAPGRNLLTEDGRERLAKAKLSPAGRQVIDVGLSAVDHLTTLVDPLRDELKAFAPRQRGCRALMGIYGIGALIAPIVWAELGDTRRFSSSEKAVRYTGLDITVWSSDGKRHGPGHLSRQGPPALRWALFEAAYIAARPSSPDHAYYLEVKTRQGSNRAALSVARKLTRRAHHVLRDLGDTAWKKAT

SEQ ID NO: 369396 - protein, 393 aa, unidentified
MPQTSPTDRVVISVDPHKASWTAAAVDTALQPLEVIRVAVSAEGYRRLRRFAQRWNNHSWAIEGAAGLGAPLTQRLHADGIEVTDVPAKLAARVRVLSTGHGRKTDEADAISVGIAALTATRLNTASVNAAITALRALVEHRDDLVKTRTQTINRLHVLLTHLTPAGAPRGLTADRAADILRQLRPREPAAKTLRSLAVDLIAEIRALDRRITKAAVDINAAVESSGSTLTELSGIGTLNAAKILARVGTIQRFRSADAFASYTGTAPIAASSGDETRHRLSRAGDRQLNCCLHTMAISQISRDTPGRTYYRRKRAAGMSHREALRCLKRRLSDAVYRQLLRDAATLEGAGPAGHTGATPTSCAAGSHPITSTSDKSLTGPAKPHPTTSDRTA

SEQ ID NO: 369397 - protein, 345 aa, unidentified
MNYYAGLDVSLEETAICIVDETGAIVRELRAPSDPESLISAFNGVALPMVRIGLEACSQSAWLHQGMARSGLPVLCIETRQAKAAMGAMPNKTDRNDARGLAQIIRTGWYRQVHVKSAPSRMSRSLLVARRTVLCKVRDMENAARAVLRESGLKVGAPGRKLFATRVRELAETDPSLADIIEPLLAIIAAMHCQLERLTRRVLEAVRVEPICRQLMTVPGVGPLTALAFRATVDRPERFRRSRDVGAHLGLTPRRYQSGETDVQGRVSRCGDELARTLLYEAAHTLLTRCKKWSALKAWGMGIAKRRGMAKARVAVARKLAVILHRMWSDQTEFRWGKVPAGQIA

SEQ ID NO: 369398 - protein, 388 aa, unidentified
MTDRRVNTLPAATNDDVVRCLFAIELSKSCWVVAANTPLSDRISRYSVKACDGRMLLELIERVRSRVARETGRVVEVITCYEAGYDGFWLHRLLEAHGVRNHVIDPASLQVDRRARRAKSDGIDVERMLRSLMAYLRGEPKVWSVVRVPSVAEEDGRRLHRERDRLVGERVQHVNRIKALCALHGIYDYEPLRRQRWARLEELRTAAGAALPARLNAEIKRELQRLELVLEMIAAIESERDAVVADSASSHPNAEKIRHLHKLRAIGPELATVLVGEVFYRRFANRRQLASYVGYTPSPFQSGGMAHEQGISKAGNAKARTIGVELGWLWLRYQPDSDLSIWFRSRVGTMTGRIRRITIVALARKLLIALWRYLETGVVPKGAVLKAA

SEQ ID NO: 369399 - protein, 418 aa, unidentified
MKKHSKSSQRSEPTLKRRKARGPVQLDAKEVLAEVLGKLTGKLDPPAVSTSAKENRRRNTVGPNRDRLTVGVDLGDRWSQYCILGLEGETLAEGQLRTTQEDVREFFQALTVARVVIEVGTHSAWVQDVITEWGHEVLVANPRLMEGSKRRKRKSDRIDANKLARLGRVDPQSLYPIRHRSREVRQDLVVLRARDALVSVRTELINTTRGLVKSMGTRLPRCSSPSFADKVKDAIPVEVGEALLPLVQLTETVNDCIARYDQKIEELGQKKYGHTTLLRQVKGVGPITSLAYVLTLEDPQRFSSSREVGPYLGLVPKQEDSGDSQPQLGISKAGDRMLRRLLVGSSQYMLGAFGPDTDLRRYGLRLCERGGKNAKKRAVVAVARKLAVLLHHLWVTGDVYEPLHHTGAETRTAQATAA

SEQ ID NO: 369400 - protein, 447 aa, unidentified
MPDASPSRRRRARLKVVNPRSAGIDIGSRFHVVAIPTELDDEPVRKFLSFTSDLKRMVEWLLAVNITTVAMESTGIYWVPLYEILVAHGIEVFLVNARHAKNVPGRKTDINDAQWLQQLHSYGLVRASFQPDPCIAKLRAYFRQRDVLVRYRSSHQQHIQKALMQMNLQLHHVVKDITGLTARRIIDAILSGERDPKKLAALRDRRCKESVETIAAALDGNYQEEHLFELKVAVEMFDVYSAKIQECELAGQSVLQELAGDDYVEPKRQASDSRIKGNGFSFNPQELIKSVAGHDLLVLPGLGPATVITLISECGLDMTRWPSAKHFVSWLGLSPQNKISGGRVLSSRTRQGTTRAGSAFWIAAVPLSRTSTALGAFQRRLSARVGKSKALIATARKLAILYYKTVRYGMEFQEHGDLAYQQASRERQIHGLERRAKALGYQLVATG

SEQ ID NO: 369401 - protein, 417 aa, unidentified
MRMEVVHPRCAGLDVSKKDAKACVRIQGKGGRRTESTVTTWGSMTRQIMELRAHLLEQKVMCVVLEATGDYWKPFYYLLEDAPFETILANPTQVRAIPGRKSDVSDAMWLADLGAHGLVRHSFVPPPPIRELRDLTRARTALTQERTREWSRMEKLLEDAGIKLSSVTSHLTLVSVRLMLDALVAGERDPKVLAELAKGTLRRKLDLLNEALFGRFNDHHAFMVDLHLGVIDQLETSIKQLDERIEVMTAPFQGLCDLIATIPGVNEVVAQVVVAEIGTAIREDFPTPGHLASWAGVVPGTNTSAGRTKSTKARPGNRHLMGALGMAAQTITHSKGTFLNAKYRRIAARGGAKRANVAVQHSILVAIWNMAGTGEVYSDLGADYHRNRNPERAKRNALNQLQALGFEVSLTPLPEAS

SEQ ID NO: 369402 - protein, 339 aa, unidentified
MYVGLDVHSETSFCVILDQDGEIVAERNLNNDPFEFADFFDGVLADFDGPVEAAMEATTDAYFVQVILDDLGIPVRLAHPRKLRLIAESSVMTDARAAFILADFLRMGSLPLAYLAPAEVMQSRELSRGRQSLVVSSTRYKNKVSAMLHRQGLKCPVKDTFSKAGREWLAGLELPMISDMMLRIYLKVIDMLGEFIAECNAMLRQLAEHDERIQRLQQIPGIGEVFGPMIIAEVGDIQRFWDKTKFVAYCGLAPTVHQSAKTTHRGSLRQDCNHWLRFAFIEAAQSCGRHPGPYQDYYQRKLEERDSKVAKVATARRLCRLVFAMLHSGEDYRADYQAA

SEQ ID NO: 369403 - protein, 482 aa, unidentified
MKTKNSPTLAVGIDVHKKRHYARVKIRETREIISPILKIYNSKRGLDFLLEKVNHLMEKYQAKGVIFALEPTGIYWKPLGYALHDRGCLVHLVNPVQVHYKRKEEDPAANKNDKIDPGLICDLACDGKSNPARFMLGIFRLLQKTVRNRRDLVLGLSSKKIKLKTVIYELCPELVDAFTDIAGRVSMAILRFSPSIDLLESTPLEELSSIFRIYGSHKTKISPEKLLSQVRFSLGIRNDNQAHIKQIQMILEQIDLLKRQISILEKDINGYLKELGQTLTSIKGIGPILAAEVIAEVGDIDTFSSGRQLVKLAGLDTVESSSGETKRRRYISKKGISSLRTTAVLAAFSLIKSCPPFTDYFLYQTKVLAKKPMQAIIAVADKFLRVCFYMLKNKTSFDPKRIGTGNLRTKAKFLNQSLEVSLDSKEIVNLDLNLLDIFSKSPKVVLFDEEDPTWVKIRVNSKVETFDLEEPRGRILALLNAL

SEQ ID NO: 369404 - protein, 317 aa, unidentified
MNKDIKYFGIDISYLVFDVTDSNGNYYQFKNNASGFKKFTKLLDNNSHCVMEATGYYHYQLAYYLLESGFKVSVENPLSVKRFIQMKLSKIKTDKSDSKLICEYAQKVDLKLWKGNTKDEMECLQITRALSVYTKQSTMLKNKLHGEAVLGQPSKLVVTSLKRSLRQLKKEIDTIEEKLLLLVNEVHKDVLTRLKSIPGIGKKTSLMLVVLTDGFDRFKSGSELCSYAGLTPIIRQSGSSVNGRARISKIGNQKLRNLLFMCSFKACKAIYDRIVAKGKRKKLALIAVCNKLLKQAFSIAKSGLIYDDTYRSILVKN

SEQ ID NO: 369405 - protein, 346 aa, unidentified
MKILALDLGKFKTVACEYEAESARHRFVSVVTTPQALHDLIVEVEPDRVVIEICSIAGWVCDLVRTLGIEIQVANTSEEVWRWRKVRRKNDRRDALKAAQLSAVNQLREVYVPEKEVRQWRALITYRQRLVQRRTKIKNHIRDLLQREGKMMARRQGAWTRRGLAQLEELAQPLSNVETAELWRGELALELTQLRAVQQQLDTVEEKLNVMGATDARVQLLQTIPGVGPRLAEAIVTLLVDPARFRKAGEVSAYIGMVPKELDSGETGRRGRITRQGNRVVRSLLVEVTWVGLRHNPWVREIYQRISGGKKSRKKIAVVAVGRKLLVRCWAMLRHGTPWHWQPTNT

SEQ ID NO: 369406 - protein, 421 aa, unidentified
MGKRREAGVGVVLARVAGLDVHKKLIVACVRVLGEGGQVRSELRRFGTMTADLLQLRQWRGERQVTHVAMESTGVFWRPVFNLLEGHGEVWLVNAQHIKQVPGRKTDVKDAEWIAQLLQCGLLRPSLVPPAEQRQVRDLTRHRTKLVQQRNAVANRVQKVLEDANIKLGAVASDVLGVSGRAMIEALISGQEDPVALAELAQRQLRGKIPELQRALQGRVTAHHRFLLRELLTQYDALQGAIARVSERVAEVAPRPFQAATQRLDTIPGVAERGAQAILAEIGTDMSRFATAKHLASWAGRCPGNHESAGKHSSGKPARGNRWLDAILTEVAHAAARTKGTYFQAQYHHLAPRRGKRRAIGALKHSLLTTIYCMLRDGTPYADLGADHFTRLNPAQRIRYHVRKLHELGHKVTLSPLSDAA

SEQ ID NO: 369407 - protein, 323 aa, unidentified
MTRTICGVDVASKSLEARIGQQGAAASFPNTPEGIAALGAFCQAHQVDLIAMEATGGYEQQTFALLSQQGLPAAILNPRAVRQFAKSMGSLEKTDRIDAGMIAWYAEVKKSRPASLAPQSQQHLRALVTRLRQLTDIRTAQLNQQRLVTDPAVHASFRKILAFLAKQIGDLEQRIAKLIEQDPLWRELNQAFRTIKGVADRTVARMMAEMPEVGTLSNKTISKLAGVAPMANDSGQYQGKRKVRGGRPAVREILFIVASVVGRHEPDFIAFQHRLRAAGKPPKVVRIALAHKLLVRLNAKAREVRDRIMAPASPPSALLLETI

SEQ ID NO: 369408 - protein, 343 aa, unidentified
MQTMTTIGLDIAKSVFQVHGVDAGGQVIVRRQLKRRYVLTFFQKLSPCLVGIEACGSAHHWSRELQALGHTVRLMPPAYVKPYVKRQKNDATDAEAICEAVTRGNMRFVPTKTAEQQSGLVLHRARHLFVRQQTSVINAIRAHLAEFGIVAPVGRHGVEELLDVVTDPNDKRVPDIARACLSALGDQLQSIKKHVLEFDRLIRAWHRSNEMSMRLEAAPGVGPVLATALVAAVADPKSFRSGRNFSAWIGMVPKQHSSGGKNRLGNISKQGDRYLRGLFVAGALSVIRYAKVHGTKHRPWLTALLTRRPTKVAAIALANKIARMVWAMMATGERYKEPVALAR

SEQ ID NO: 369409 - protein, 488 aa, unidentified
MSSPKPRQKPRRLRTPGRFRKGAAAETLSIRHAHAAGIDVHAKEHWVAVPPGSVPPRSLARTVGADAPSSPSGSPHLPAHVRRFGTCTADLEMLADWLAQCGVTTIAMESTGVYWIPVFELLERRGFEVCLIDPRQTRQVSGRPKTDVRDCQWIQRLHSYGLLAPSFRPADEVVVLRSYLRQRQMLIGYAGQHIQHMQKALEQMNVKLAEVVSDVTGKTGMAIIKDILGGERNPRRLAKNRDDRCKHTEAQIARALYGNWREEHLFALQQAVQLYEVYQQQLHACDARLQSCLAGFADKSQGRTIEPKPKRLRHRYSNDPTFNVRGLLHRMSGVNLTVIEGIDDTTALTVLSEIGLDMSKWPTEKHFCSWLGLCPQHQGSAGKIKSRHIRPGGNRAARALRMAGQGCHHAKNALGAFYRRIQARCGGPRAVIATARKIAERVYRLLKFGHEYVRQEIDVYEKTYQARLVHTLQRKARELGYRLEPVTA

SEQ ID NO: 369410 - protein, 374 aa, unidentified
MATMRARHNRRERDVERIIERCAGLDVHKTSVTACVRIPHDESEGLHQEIREFATTTRGLLLLRDWLASFEVRLVGMEATGVYWKPVYYLLEDDFECWLLNARHLKNVPGRKTDFKDAEWICQLVEHGLVRPSFVPPKEIRELRNLTRYRKAQIEERTREVQRLEKVLQDARIKLSSVATRVLGASGRAMLDALVSGTTDPEVLAELARGRLRSKLPALRDALEGRFSSHHALMVGKILAHVDYLDESIGDLSTEIERVIAPFSDKVELLDTIPGIDRRTAETLIAEIGVDMSQFPTHRHLASWAGMCPGNEESAGKRRLGKTRKGSKWLRSALTKSAHAAARSKGTYLASQYARLRGRRGPKKPPWRSGTRSW

SEQ ID NO: 369411 - protein, 349 aa, unidentified
MDITTIGIDIAKRFFQIHGVNANGKTVLRKKLIRDQVLNFMSNLPKCLVGIEACGGSNYWAREITKLGHKVNLIAPQFVKPYVKTNKNDRADAEAICEAVSRPNMRFVAVKSTTQQDILSLHRVRERLVKNRTALANEIRGLLLEFGYIIPQGIHKITTKLTEILDEGSLTHISHQTFSDLKEEFIENDKKIKDIEKRLKEIANNLNMYQKLKSVPGLGLITATALIASLGNVTNFKNGRQLSAWLGLVPKQHSSGGKEQLLGISKRGDVYLRTLLIQGARSLLNAKFRYTTEEQRSNKDFSKFTAWMLILEEKRGHNRTVVAIANKLARVVFALLSNNYDYDENKVCI

SEQ ID NO: 369412 - protein, 311 aa, unidentified
MTNLICGVDVSAATLDARVGRSGAVGRFANSAEGVAELAAFCRDHEVGLVAMEATGGYERQAFGLLWAHGVPAAIVNPRAVRRFAEAMGFLEKTDRIDSGIIAWFAEAKRIVPQPPANEAQRTLAALVTRLRQLTQLRVAQKNQRRLVREPSVLSTIDELLGLIARQSKAIETQIAKLIEQDPLWHKLDATFRDIKGVAGRTVARLLADMPEIGTLSNKAAGKLAGLAPLARDSGTLAKKRAVRGGRSGVRSILFVVADVVRRHEPDFSAFHRRLTDAGKAKKAIRVALAHKLIVRLNAKARDVRSAISPG

SEQ ID NO: 369413 - protein, 345 aa, unidentified
MPIVGGLDIHRKQITFDYLDTVTGEVKRGQIAPADREHLRAWLARFAGRGDVGFAVEGCTGWRYVAEELAAAGIAAHLGEPADTAALRGRKRHAKTDKTDSRHLRVLLAEGRLPECWIPPAQILEYRALLETYHDLRAEHTAWVQRIHAVFFHQGAPALGEGVLRTEQGLAALRVAAAAHLSPAGQLQVATALEVLAAVEARMEVLRVQLRFAARHLTGARVLAAQLYGVGPVTALALTCWLAGAGRFSSSRKAVRFTGLDVTVWSSDRKGPPGRLSRQGPPMLRWAVYEAGKTHARASAPDHAYYAAVKDRKNSKRAALSEARKIVRQACHILTELGDDALTTA

SEQ ID NO: 369414 - protein, 405 aa, unidentified
MRFIGLDVHLDFCEVAICEAGRVRSGGRVPTSPQGLELLANSLAPDDSVALEATGNALAIARSLEPHVARVVVATRTELRAITEAKVKTDDRDARTLARLLAAGLLRGCWLPDEPTRALRRRLARRAQLVRQRTRAKNEVHAVLMRTLKGRPPMSDLFGRGGRVWLGELELPADERETVDGCLRQIDFLGAEIAILERGIAEHALGSDAIKRLMTVPGVSLMTAATFIAAVGDVRRFRDPGKLVSYLGLDPKVRQSGSGPARHGRISKQGASEVRHMLAEAAHVAVNTAGPMRAFYERVRVRRGRQIAIVAVARKLAVLFWHLLTSEQDYAFQRPSLTRKKLRAVELRAGATPTPGRRDLATKNTYSQREHRERERELSEHAEIAYRRLVTDWKATAPNKDAAVT

SEQ ID NO: 369415 - protein, 329 aa, unidentified
MGTPTVQSDSSAKCWVGIDVSQDWVDVVVLVEERSEKQLRVRRSAEALGQLARQLLAYAPQGVVLEATGGLEGAVISALAAGGLPVMRINPKRVRDFARAQGLLAKTDALDAHVLALFGCRMQPPLRPWPEAERLQLAAWVARQQQLILERASERTRLHQAGEPELKKSIQRVIVFLGKELARLDVQLNAWVQRSDLWKEQETLLRTAPGVGPKTARVLLAQLPELGRLNRRAIAALAGLAPFACDSGHWRGKRRIRGGRSSVRAALYLASWTSIRVPGFLRNFYQRLVASGKPRQVALIAVARKLLLALNEMMRSHTPWRASENSVSA

SEQ ID NO: 369416 - protein, 320 aa, unidentified
MNSYVKSTKIFVGVDVSKATLDIYRADTKEALQIENSDEAIAVFCLQLEKKKRSVMVVMEGTGGYEYLLVKHLASHKIEAAVINPRRIRDFAKGIGLDAKTDPIDAKVISKYAEVVVPKPMATKSDHELKHGALVARRNQLLELITQENNRLKQSWDDDAKQSIRVVLEVLKKQLKHIDSQLAKMLKSDKANQRTIEILQSVKGVGPVMVSTVIAELPELGKLNRGEIAKLVGVAPINRDSGKKSGKRFIGGGRGQVRRVLYMATIVAIRHNLAIKAFYAHLKSQGKASKVAIVACMRKFITILNLLIKTDQLWENKTSV

SEQ ID NO: 369417 - protein, 392 aa, unidentified
MVISVGIDVSKDKHDCFIVNSEGEVLADVFTIQNTRDGFNFLLQKIQDCTTPQDKIKVGLEATGHYSYNLLGFLLDNGLPTYVLNPLRTNLYRKSLSLRKTKTDRVDARTIATMLLSDAGLKPYTDTAYHNEELKSLTRYRFDKVKERAKLKSSVSRLVCILFPELEKLVPSLHTASVYTLLEEFSGAKQIAAAHLTKLKALLETASKGRYKRDMALEIQDAARNSIGSWMPAKSLELQHTIRLIRELDVEIAEIEEQIQSIMDELHSPITTIPGVGFRMAAMILAEVGDFTRFDSPDKLLAYAGMSPSTYQSGQLKNCYPHMEKRGSRYLRYALYNATKYVCHWNPTFAAYLAKKRAEGKHYNVALSHAAKKLVRLIFAMEKSRQPYCSAA

SEQ ID NO: 369418 - protein, 345 aa, unidentified
MIIGCDFHPSWQQIAWLDSETGESGERKLVHASGEAQQFYRQLAAPALIGMEATGNSQWFIELVQDLGHEIWIGDAAQIRASYVRKQKTDKRDAAHILKLVVEGRFPRLWTPDREQRDLRQLVLHRHKLVEIRSRVKNELQHLALNQGMQRKAKLWSQAGQKLLRELPLKPWAACRREDLLGLLTMLNQQIGTLDQAVQQAADQHPQAKLLMTQPGVGPNTALAYVLTMGDVSRFPRGKQVASYLGLIPREESSGGRQKLGAISKQGNRLLRSLLVEAAQIAVRYDPGLRKQYLHRCHQKPKGVAKVAAARKLAVRLYWMLRTGKPYPEIVRIESSPRVALVGAR

SEQ ID NO: 369419 - protein, 408 aa, unidentified
MKDSRKRYIGLDVHKHYLIAVGVDEELNVVLPVRRVEFSYLEAWLKKTLTKQDEVVLEMTTNTWQLYDELVEYAGSVLVVHPPHVALITRSQVMNDKIAASILARLLAKGLLVGVWVPPQDIRELRGLVAQRKKMTGLATQAKNRLHAVLQRHHWLPPEGNPFQASQQKWWLALPMGPLERVNVQSDLDTLQFAEKQLTQLTSRMAEIVNQNEEVTRLLQLPGFGVVTALTVWAAIGDIQRFEDAQHLVGYAGLGTRVHDSGMTSRSGRITKAGRRDLRVVLTEAAQVAANSHPHWKAELARLQPRLGRNKAIVAIARKLLVAVWYILAQHKTDRFAQPDAIAQKLLKFAYQLGKEKRPAGQSAAQFVRQRLDVLELGQELISIAWGAKKPIPLPPSTNKVSDVPNTK

SEQ ID NO: 369420 - protein, 311 aa, unidentified
MTDDTIGIDISKVTLDIHRLSDGKMMSFSNCPAGFKALSKFCAKTRVTRVIYEATGAYHSGLERALGGYLPLVKVNPLQARRFAQAQGVRVKTDAVDARMLAVMGNAFALEPDETATKIQHDLKELRSFRSGLVKDRTSIISRMKTQTLAVTRRQSKARLAQVDKQIAEINAEVDRLIRSNGTLAHSMKILRSIPGIGVVCAATILIEMPEIGSMDRKQVASLTGLAPMTRQSGQWRGKSFIQGGRKVVRDALYMPALVAMRHNPDLSVKYQAMIKAGKPPKVALTALMRKLIELANTLIKADRNWVKKGA

SEQ ID NO: 369421 - protein, 368 aa, unidentified
MSKQSHYKVGCDAHKHYSLFAVLDHRGKPVEQTRVNHEPGAIRAFVSRFPPGTPVALETVGNWYWIVDEIEQAGCVPLLAHAQMAKKMMGHVHKTDKLDAQGLAILQHLGSLPTVWIAPGEIRDERELPRTRMALSKVRTMLKNRMHSTLAKYALSLDTQSDIYAPKWRPQLMQLFCSFPDETRRCMQQELELLDQVQEQIHRLEARILERVRVTRTIQLIQSVPGPAEILSIVIDREVGSIDRFPSPHHFASYSGLAPKVKASGGKTHYGKMIKAANNYLKWAFIEAANVVVRQRQHPNWRQKYVVALFERTRHRKGHAVAVGTVARYLAEATYWVLTKGEPYREPSPWPPQGLKSAVSPKQGQART

SEQ ID NO: 369422 - protein, 378 aa, unidentified
MAQLAQEAFAAFLGRDWADAKHDVGLQATGTARREFLSFAPRPEAIDAWVQTLRTRFHGHPVAVCLELNKGPIVSALRPYAFLVLFPVNPLTVARYREALTPSRAKDDPTDAELQTELLLKHRDKLKPLQPQSPAMRVLAQLVAHRRRLVGDKVRCTHRLTSTLKNSFSQGLQWFPEKDTAIFGDFLSRWPTLKAAQLARRSTLAGFFRVHHVRAVDVIDTRVQAIKSAMALTTDDGVITPNVLLVHALVAQLRVTLQAIADFDNAIAQRAQAHPDFPLFDALPGAGAVFAPRLLVAFGAQRERCTSADALQKYAGIAPVTERRGKKSWVHGRLQCPTFLRHTFVEWAAESTRHAFWAQVYYQQQRDKGKAHQAAVRA

SEQ ID NO: 369423 - protein, 386 aa, unidentified
MQKPHDDSKACRTAFVQDNTLVAVIEMSLSSWLVAGMIPGVSREPLKKIASDAEDLLQLLYRWRDEAITAGKEITRIAVGYETGRDSFWLARWLRERGIDAHVIHATSVAISREHRRAKTDRIDTAMLRRGFLGWLRGEPGHCSMAIVPTVAEEDAKRPHRERDSLVHERTSIINRMKAILIQFGVRNFNPVLRKAREKLDALRTPEGIPLPPNTVAALRRNMERLCIIKEQIKAIEQTQLQCLERDPEERMNAIIFLLVRIIGLGVETAQQLAHEILFRNLRDRKAVARYSGVTGSPDESGSKRREKGISRSGNGRVRKILIQLSWRIVKFHPESDLVLWFKSRTQNARGSRKPMIVALARKLIIALWRYVNTGVVPEGFKLRSA

SEQ ID NO: 369424 - protein, 355 aa, unidentified
MTTIGVDLHKDSLTTMVLDDHGTILERRDLPTKCRHQIRDYFASFGPHCQVAVESVGFYYWFWELLHPHVHRLVLADPAGVRAHAGRKAKTDRHDALLLATLLRENRLPMAYVPTENIRALRELVRHRHSVARSLARERRALRWLALKNNLPGPTTFTSDRAQKWILSQESKFSPAHRLAAHQRLDQIIALERHVADADRAIVHHLAGEPTLQHQVQLLATIPGIATLTAATILAETGDITRFDNPDQLGAYAGLAPRVSQSGQTVHHGRISKHGPPILRWVLQQAAWVAIRTDPHARQLYTRIGKRAGTKKAATALARKLLIYAWSVARRQQPFHWPGEPRPLDTPAGGPSYDI

SEQ ID NO: 369425 - protein, 346 aa, unidentified
MTHSTTVGVDLAKNVIQVAVVSARGKELSNRSLTRKKFAEFLAKQKPSLVAFEACATSHYWARAAQRHGHEVRIIPAKFVAPFRQGHKTDSNDALAVAEAARRPSIKEAPMKTVEQQGLQAIHRSRQLLIQECTALSNHLRGLLMEFGVIIPPGFASLLRAVPEALEDGDNELPDLYRPTLHRMYTRLLELREDIEAMTREVEVLVKQHPICSRLTALEGIGPIGALLLYATLGSGTAFSGGREFAAYLGLAPRQYSSGGKTTIVGLSKKVGNCRLRSILILGARAYTYRLKEPKSAKDRWLKNAIDRNGHSRAAIALANKNVRTAWAMVTQGTEYQRRGQLKVAA

SEQ ID NO: 369426 - protein, 415 aa, unidentified
MGAAGAARGHHSKEAALHHRRLVGIDLGIISAHTVRVLAGDGSVVCRRKAVPTVASLTETEQAALQGAAPTTRLEVVLEPTGPSWLPIAVFFTSRGHTVYRVSSARAHDLRRVLSRQAKSNGIDADTLARLPLVDPAGLHPLALPSAERAALDRRVRACDRLTQQGACHKRRIKDLVRQLLPTSPLAGELGMADLAVLERFGADPHALLAAGPGRLARLIGKASGGQHGQQRATHWLAAARAALQLYGDHPAVAFTDLAAEVHTEVRLLRATQAELAAHATQREYCYRWVDPLGLARSLPGLAEVGGPALVATMGDAHRFAAASRFRSFTGLAPRASETGNTDRKGQPISKAGNRLLRTTWSAPPTPPAARTPSSPASTTCRWSSAARTTSARSAWSPPTWPSGPGRSWTGGCRM

SEQ ID NO: 369427 - protein, 427 aa, unidentified
MIPAVIERCAGIDIGKKLVVACVMTGAAETEGQWEIREFGSAVAELKRLRDWLCEHGCTHAVMESTGSYWKPVFNILEGAVEVVLAQPEQVKARKGHKTDRKDSWWLAHLLRHGMIRPSFIPPRALRELRDLTRRRKKVIQHGVSEKNRVEKVLEDANVKLSSVLSDIFGVSGQLMLEALLNGNGDPEQIAQFAQRQAKKKIPQIIASLEEHQMSDHHRLLIRLSLDHLRFLEEQITQLDAAIHGKLEAAGLTASCELLQSIPGVDEVGAAAILAETGSDMKQFPNEKHLCSWAGVAPGNCKSAGRDLGGKINHGNRWLKGVLTECAWAASRSKEGYLRDKFWRLAVKSRNTAIVAVAHSILILVYGVLSRAQPYQEQRDLPSQERQRMRLIRHHIRRLGRLGIKLRVSSRKSTCKHPQVYDATLAT

SEQ ID NO: 369428 - protein, 339 aa, unidentified
METLYCAVDLHSNNGFYGIVEKSGKRVFGKRLPNEIDTVLEVLDAFKEHIKTIAVESTYNWYWLVDGLMSHGYDVKLANPAAMEQYSGMKNTDDKTDAFFIAEMLRLDILPEGHIYPKDERGIRDMLRRRIFFVQQRTSQILSLQNMLSRLSGSSFSIREIQKMKIDDFMRILKDDANMFIAKQNLDMIRTLSEKIKMFEKYILPNAEIKPEFQNIMSVPGIGKILGLTIMYETGDIGRFKKAGNYTSYCRCVKAEASSNNKKKGNNNRKNGNKYLSWAFVEAAHKMKQYCPPAQKFYDRKYDKKCGALATKALAAKMTKAVYYILKNQEEFDVKKIFG

SEQ ID NO: 369429 - protein, 432 aa, unidentified
MNQTENEFVAWIGIDWADKKHAWAMRIQDEPPIQFGELEHTPEAIETFFAGLAARFSGRRVAVALEQSRGALIFVLSKYEHLVLFPVHPNTLDHFRKSFYPSGSKSDPGDAALILELLCKHSERLRPFQPDTVETRTLQFLVEARRDAVDDRTRYMNRLTAQLKAFFPQVLTWFGRVDSAITGEFLLKWPTLDHLKRARPKTVAQFLKDHRLSDESVAEIQASIQQAVPALRDQAVLETGQLIVKQLVGQLAALREAIAEQDARIDVLVKAHPCYRIFSSFPGAGAAMLPRLIAAFGTDRERYRNASDIQRYSGIAPVTETSGTQRWVHWRWACPKFLRQTFQEWAWFTTRNCQWARAHYDRQRDRGASHQAAVRSLAFKWIRILFRCWKDDAPYDEARYVSSLNRRTGKPQPVKILLKTESGFTRLAGISA

SEQ ID NO: 369430 - protein, 388 aa, unidentified
MEPASIQPTAVRIDLGAIFVSLELSRSAWLITSLSPGSGEKMSKHVVAGGNVAELLERFEQLQQKARLRTGKLFPIVTIQEAGLDGFWIHRVLEAHGIESYVVDAASIATSRRRRRAKTDKIDGEDLTRTLLAFKRGEPRVCAMVRAPDPSDEDRRRICRERKVLIAERVRHVNRVKGLLFTQGVSGYQPLRKDRRQRLEELQTGDGRELPKHLKAQINRELDRLELLLEQIAAVESERNSLLSMEDQPAVEATSPAAMLLSLKGVGAELAAVLWTEALSRHFDNRRQIAAYAGLTPTPWMSGTIDHEQGVSKAGNPRLRTTMIQLSWLWLRNQPASALSRWFVDRVQSNGGRLKKAAIVALARKLLIALWKFVTAGVLIEGAVMKTA

SEQ ID NO: 369431 - protein, 343 aa, unidentified
MDYFAGLDVSVKETSVCIVDDAGKIVREARVASEPEALLQALANNSYRFKRVGLEAGPLSQWLYSILAEAGLPVICVETRHMRAVLKAQINKTDRNDARGIAQMMRVGLYRPVHVKTLRSQKLRMLLTHRKLLQSKAIAIENDLRATLRNFGLKVGTIGTVKYETRIRELVENLPDLAVLVEPLLIVRRVIREQLGILHRRVLAIVRDDDVCRRLMTIPGVGPVVALTYRVTVDVPARFRNSKAVGAVFGLTPAKYKSGESDRTGAISRCGDEMMRMMLYEAAQSMLVRAAKWSWLKAWAMKIARHRGMKKAIVALARRLAVIMHRIWVDGTDFRWTREVAAA

SEQ ID NO: 369432 - protein, 367 aa, unidentified
MRSIIYVGMDVHKDTIAIAVFRDNNRNVEFERTIRNEPGKIRKFFNKLKEKGESILSCYEAGPTGFDLYRILEGMDITCYVAAPSLLPRKPGDRIKTDKRDAILLAKVLRNGEIVSVHVPTRSDEAVRNYLRMCNNTKSDLKKQKQRLLMFLLSIGIKYETGKRYWTRAHIKWLKALEFEEELSKSVFDEYYIAICELEEKIARLKEKIEEIATEASYVEKVSKLRCFKGIDTLTALTFVSEIGDFRRFRKAAEFMAYMGLVPSEYSSGDKRKQGSITKAGNSRLRKLLIESSWHYKYYVPSKRLTMRRKGQSSETIAYADKAGRRLSKKYKKLLLRGKMSQKIVTAVARELSGFIWGMMAGETSLV

SEQ ID NO: 369433 - protein, 403 aa, unidentified
MNAVGIDVSKGKSMVAIMRPFGEIVSAPFEIKHTASDINSLVELINSVEGESRIVMEHTGRYYEVLAHQLSEANLFVSAINPKLIKDFDNDSLRKVKSDKADAIKIARYALDKWQNLKPYSIVDELRTQLKAMNRQFHFYVKQKTAMKNNLINLIDQTYPNANTYFNSPPRSDGSQKWVDFVYTYWHVDCVRKMSLNSFVKHYQNWCKQKKYIFNKSKAEEIYTKATELVPVFPKNEITKRIIRQAIAQLNSTSATVETIRILMNETASKLPEYPIVMQFKGIGPSLGPQLMAEIGDITRFTHKGALTAFAGVDPGVNESGSYAQKSVPTSKRGSSNLRKTLFQVMDVLIKTMPQDDPVYQFMDRKRTQGKPYYVYMTAGANKFLRIYYGRVKEYLSVLPDPS

SEQ ID NO: 369434 - protein, 343 aa, unidentified
MDFSIAGMDLAKNVFHVVLFDRRFKEVHKRTLRRGQVLAFFANTPPVRIGMEACSGSSYWGRELGKLGHEVTLVAPQYVKAYLRGNKNDYNDARAIAEAATRPGMPTVPVKAAKDQDIQALHRIRSQCIRDRTALCNSTRGLLAEYGIVLPQGVTTFCRRLPEILEDEGNILSSFFKQLLARRYEQLKELNGHIDFYTGELKRISKEDEACQRLQTIPGFGPIVASAFGSAIGDGRAYSKGRDVAASLGLVPRQHSSGGKQVLLGISKRGDRYLRCLLVHGARSAVIHASRKDDRLSRWINRLRQKRGLNKATVALANKMARIGWAVLRNNTSYQPSFGPSAC

SEQ ID NO: 369435 - protein, 359 aa, unidentified
MARTSQSDSTRQVIVGVDTHKYIHVAVTLDQHGARLGELSVSADSKGYQQLHDWARAYGRVKTYGVEGTGSYGVGLAKFLRRAGVRVLEVNRSDRQLRYQHGKSDPLDAESAARSVLNGTATNVPKSAEGACEMIRQIKVARDGARKARSAALIALKSIIVNAPSEVRESLAGLTTAALVQRCASYRPGDVDSVHSSTKHTLRSLARRWVSLGEEIVEHDRLLDRLTEEAAPTMREAFGIGPDVAAEMLIVFGDNPERIHSEAAFAKLCGVCPIPASSGLTNKHRLYRGGHRQANAALYRAIVVRMQYHAPTIAYVSRRTEEGLTKKDIIRCLKRHLAREIYQRVMADHRARLSLADAA

SEQ ID NO: 369436 - protein, 456 aa, unidentified
MQRKTSSRRKRDFAPVHPHAAAVDIGATLHVAAVSPQCDPEPVRTFGTFTGDLHRLADWFEQCGVKTVAIESTGVYWIALYEILDQRGFEVVVVNAREAKQVPGRKSDVSDAQWLQRLHEYGLLRASFRPKGEIATLRNYLRQRERLLEDAAAHIQRMQKALTEMNVQLHHVVTDVSGVTGLRIIRAIVAGERDPDTLAAYRNPCCKASAATIRAALVGNYREEHVFALSQALELYEVYQAKVAACDARIEAVLERLKAASPPATAPLPPPRSTQRQANGPAFPAREALHAILGVDLTQIHGLGPYLALKLVGECGTDLTAWPSAKHFTSWLSLAPHNKITGGKVLSSRTQRSANRAGALLRLAAASVGRTQTALGAFYRRLAARVGKVKAVTATARKIAILFYKMLRYGMDYADPGASSYEERYRQRVLSNLRRRAKSLGYVLQEANITPSPAVS

SEQ ID NO: 369437 - protein, 342 aa, unidentified
MTLARIGIDLAKNVFEVHGVDERDKAVIRKTLRRGEVGVFFANVAPCLVAMEACSGAHYWARTLMDLGHDVRLISPQFVKPYVKTNKSDLNDAEAICEAASRPSMRFVTIKSGEQLSIQAAHRVRSRLVGNRTSLANQIRGILAEFGIVVARNIAALRRRLPEILGSDTDALDQMTRSLMLDLQEELVVADSRVRTYDRRIRQLSKSSEVCQRLERIEGIGPLTATALVAAAGNAASFQNGRQFAAWLGLVPRHHSSGGRTRLLGISKRGDRYIRTLLIHGARSALGRIRYKSDPRSQWLRKLCGRRPYNVAAVALANKNARIAWALLRHGEAYDQRRTVAA

SEQ ID NO: 369438 - protein, 359 aa, unidentified
MQSNKKSFKGQKIFVGIDVHKKTWEVAILTESGFMKRHPQEASAKVLFDFLRKHYPDGEYYAVYESGFSGFATYYALEEFGIKCKVVHAADVPATQYESIMKTDRVDAERLARALKKGDIDRPVYVRERDNIDDRAVIRIRKVIQKQLSGYKARVKHMLHCNGVELPDRFSKPTSHWSRAFITWLMQDVKLLSKTRTSLNLLIRQVETIRGTLLEATRELRKLSQTERYKHRFELLMTIPGIGQNVAMSILTEVWDVKRFSNENKFAHYLGLIPTCHDSGERKTDGVKTFRGNKHLGPMIIEACWVAIYKDIGLGACYADYKKVMKPQKAIVKVARKMSNIIYSVLKNDKVYEPYQWDK

SEQ ID NO: 369439 - protein, 335 aa, unidentified
MREITTVGVDLAKSVFTVHGVDAAGRTMLRKTVRREKLMELIAALPPCLIGMEACGGAHEWARKFQACGHRVGIMMARFVAAYRKSSKNDGNDAEAICEAVARPNMRFVPVKSAEQQAILSLHRVRQGFIEQRTATINRIRGLLAEFGVVLPQRADQVRRAAVIMAEDLPVLAREAIADLRAHLTYLDARISHYERQLLALARQLEPARRIQAVPGIGPLTASALTASIACGHEFTNGRQFAAWLGLVPRQYSTGGKVKLGRITKRGDAYLRTLLMLGARAVLQSATQKTDRLSRWALAVRMRRGYHRAIIAVAAKNARIIWALLAKDREFVLPV

SEQ ID NO: 369440 - protein, 341 aa, unidentified
MGQTTTIGLDIAKHIFQAHGADAGGHVVFRKRLRREKLLEFFAAQPSCMVAMEACAGAHHWAREIGALGHTVRLIPPAYVKPFVKRQKNDAADAEAICEAAQRPTMRFVPIKDDAQQANGVLFRARDLLVQQRTQCINALRGHLAEYGHVFAKGAGHVQTLISKVEDPGFRLPDSARAILKLLIATLGALDVQIKELDVEVRRRSKEDPVARRLMTIPGVGPISATAVAALAPTAEGFRAGRDFAAWLGLTPLQKSTGGKQKLGAVSKQGERTIRRLLIIGASAVVRTACVKGAEEGSWLGRMLSRKPRMLVIVALANKTARIVWALLARGGEYRAPVPAV

SEQ ID NO: 369441 - protein, 343 aa, unidentified
MQIRSVGIDLGKTTFHLVALGDNGKVLLKKKFTQKQLIAFTANLQTTLIGLEACGGAHFLGRTLREQGHDVKLIPAQFVKPFVKSNKNDFIDAEAIAEAVDRQNMRFVPIKTDDQLDLQALHRVRDRLITRRTSVINQLRAFLLERGLVFAKSPAKLRERMPEILENADEDLTPRMRNLLALLWNEWKDLEQQVDDLNQEVELIASSHAACQRLRQIPGIGPLVATAIVAAIGNGAAFRKGREFAAWMGLVPKQYSTGGKAKLSGISKRGNLYLRKILIHGARAVVLRSKRERIAMGAWMTSLETRAPRNVLIVATANKLARIAWAVLSSGQDYRAGQELVAA

SEQ ID NO: 369442 - protein, 342 aa, unidentified
MKDTMIGVDLAKNVFQLHGASMTGEVKFRKKLTRPQFMAFMADHPAAVVVLEACGSASYWARELSKAGHEVKLIAPQYVKPFVKRQKNDAADAEAIVVAAQRPEMRFVPPKTEEQQARAALFRARERLVHQRTELSNALRAALYEYGHAVPQGSVHLKRIVEIIEAETCDLPDLAREEARDLLEQIAEKTVRIEAKTRKIAAQAALTPTARRLQTMPGVGPMTALAVEAYAPAMATFKCGRDFAAWLGLVPRQMSSGGKERLGRISKAGQSDIRRLLIIGAMSRLNWMGARSIREGSWLDRLRARKPKMLVAVALANKMARMIWAMLTKQEDYRDPVPAGAT

SEQ ID NO: 369443 - protein, 343 aa, unidentified
MQTVTTIGLDIAKSVFQVHGIDAEGKVILRRQLKRRYVMAFFQKLPPCLVGIEACASSHHWSRELQACGHTVRLMPPAYVKPYVKRHKNDAVDAEAICEAVTRANMRFVATKTPEQQSCLTLHRTRHLFIRQQTSVINAIRAHLAEFGIVAPVGRNGVEQLLGVAADSNDRRLPEVARACVVALGAQLRTLKVQILEFDRMIRAWHRSSEASRRLDDIPGVGPALATALVASVADPKMFRSGRDFSAWIGLVPKQNSSGGKDRLGNISKRGDRYLRSLFTIGALAVIRYAKIHGTKHRPWLTALLARRPTKVAAIALANKIARMAWAMMARGERYKQPAALAA

SEQ ID NO: 369444 - protein, 434 aa, unidentified
MTDSHSTAAARILVAIDVAKAKHDVLVELPGGGRKKMIVRNCLDEFQQLAAFLKSLEGRCEIALEPTADYHRCLAYFLGTQGFQVRLVSSIAVARTREALHNSWDKNDPKDAQVILYLLRNHTTQRFYDPVLEQTNDLQELSKTHHQVSLRKTRLQHSLLNHYLPLYFPEAERFLCTTRAGWFARLLIAFPTPEAVTSLSEEKFITRAAKLLRTKHSKERVLRSFYAKARESIGIPVSLDSQAVATFRLLLNEHLDLCGKRAELEKTAHELLKERVDYQILRSVPGIGPIIALTVLAEAGDLRRFQHERQFLKFCGLDLATAQSGAFRGRSQLSKRGNSRLRAALWLAATVASRMSENSIRRKFDRYIKVNPTDADLRRKAYTACTAKLARTIYGLVKHQQHYRAYHEDAVPVPDGRTRSHGPLGPAASAAVTS

SEQ ID NO: 369445 - protein, 401 aa, unidentified
MEGPIVSIDVSNGNSHYMCFIKNNKRFGKVKKIDHDIEGFKRLLEDIQKLEAETNEKVCAVFEATGVYTKPLERFLSKNSIKTYIINPLESARKRKEEIHNKKTDKLDPISISKVYYDKEEMMELTKKDETHNWLRKKNRLYEDQLNHLRKYKVTFQNQLSICFPGYLDLFKDGYSDIPMTILKKYPHPDLLKNKKAETVARYLEKNTCHTHKVSLEYALKIIEFAKKTYPGCEKDDVEVEIFKILLDKVIETQRECEKTLNEMITVASTLEEYRYISSIDGIGPNLAARIIAEIGDIEEFKSREALVAYAGLDPHIYQSGDQDGKHLKISKKGNKYLRCLLFLAVGCSIRGAKDNPVNRFYQKKKQQSNPLNSKAAKTACTAKLLKIIYGICKNKTTYER

SEQ ID NO: 369446 - protein, 455 aa, unidentified
MQAPVEIAVDEVEQVVARVAGIDVAKASGMVCTRLPHESVPGRRVTRVWPVKSTTAALGELADQLREQGIERIVIESTSDYWRPFFYLLEAAGLSVWLVNAAQVKHVPGRPKTDKLDAVWLAKLAEKSMVSPSFVPAEPMRAVRDLARARFDLVEDRARVKQRVEKLLEDALIKISSVLTDVHGASGRAMLEALIAGQRDPKILAELARGRARARRVELEAACSGRFTDHHARLARLLLDQIDQLGKHIDTVTTLLDEAIAALPAPVPDPTGGSTADAGTPGPSTVDTGPAGYACAVERLCQIPGAGPDSVRAVIGEIGLDMSVFGTARRLCSWAKVSPRTVESGRKKSRASTGKGNRYLKAALGQMAVGAAKTDTFLSERYRRLVKRMPKAKARAALARSILVIIFHLLADPTVEFADLGADFYTRRIDKERRAHQLTRQLQALGYTVALTHAA

SEQ ID NO: 369447 - protein, 367 aa, unidentified
MKKVSTGAGRQAKNFSEQKLTIGLDLGDRSSWYCVLDEAGVILLEQRLSTTPKAMREVFGGMPHSRIALETGMHSPWVSRVLNELGQEVIVAHARNVRLIGESRKKDDRMDAQTLARLARIDPELLCPVKHRSAKAQADLTVIRARAGLVRARTALVNTARGLAKSYGERLRGCSVRNMNPEKAQGLSPELRTALEPLLAGIESLSERIRECNQGIERLAQESYPQVALLKQVKGVGTLIALTFLLTLEDPHRFRKSRDVGCYLGLQPGRRNSGQSEPQMHISKEGDPYLRTLLVQGAHHILGPFGADCDLRRWGLKLAERGGKNGKKRAIIATARKLAVLLHRLWVSGEVYEPLRNSHPAALPAAA

SEQ ID NO: 369448 - protein, 335 aa, unidentified
MYYVGLDVHYRTSTYCILNDNGREIKCETIRGHWAKLLDRLSIIKGKWTVCFEATCGYGYLYRELSRIASRVMVAHPGQLRLIFRAKRKNDRVDSRKLAKLLYLDEVPQVYVPGEDTQSWRELIEHRRRVVDRQTACKNAIRSLLRGHGLIAPKGLWTKKGLAWLCQSQMPTSASGLKRDLLLEELDAAKRGVRTVTKALDKIGRRHPGVTVLLTIPGVGMRTAETIAAYIDDPKRFGRGSQVAAYFGLIPCQDASAGVNRLGHITKQGPGTARKYLVEAAWQGVYRSPKIRAYFERILRGKKERRKIALVATAHYLLRCMHAMLIRCEPWRDVA

SEQ ID NO: 369449 - protein, 306 aa, unidentified
MSYGVGIDVSKSWLDVHVHGLGHGARFGNTPVGYARLLAWLSPHALRLVVLEATGGYEQAALDALHAAGLPMVRLNPRQARDFAKATGQLAKTDTLDARVLAQMAAVLELMRYQPAEPWRRQLAQYRQRRAHLVMLLQQERQRLSQLSDAWLQQQARTAVRHWQKMLGEVDARIAGQIAAQSDLAVLRQVTGVGPVLLATLAAQLPELGRVDGKAIAKLVGVAPLARDSGSMRGARSIWGGRASVRQALYMGALVAVRFHPDLRTFYQRLRAQGKVAKVALVAAMRKLLVILNAKMRDQMAATAAT

SEQ ID NO: 369450 - protein, 409 aa, unidentified
MQVVHERCAGLDVHKRTVVVCVIAPEGREVRTFGTMTRELLEMADWLLGKRVTHVAMESSGVYWRPLFNVLEGRGVELLVVNARHVKAVPGRKTDVKDAEWLADLLRHGLLKASFIPDRSQRELRELVRYRKTLVEEHARMVTRIQKVLEGANIKLSSVASNVVGKSGKAMLEQLAAGNEDAEAMAELAWSNLRSKRGQLREALVGSMRAHQRFMLQSHLRLVEKMEAEIESVNAQLEERMRPFESQIGLLDQIPGIGITSAQQILAEIGVDMSRFPTAGHLASWARVCPGLNESGGKRHPASTGAGNPWLRSTLIEVALAAVKAGRRQPNFFSARYHRLSARRGPKRAAMAVAHSLLIAIYNMLRNGSYFVDFGPTHYDQRRRDLIAKRSVRRLEELGFKVSIEEAVA

SEQ ID NO: 369451 - protein, 346 aa, unidentified
MNTNEKNQSYLYHVGVDLSKEKFDAVFLDSSSEHQHKVFDNNKAGIKRFISWLEGQEGFSYHRALICMEHTGLYSRELVKAMVSLNAFVWLESPLQIKKSLGFLRGKNDKIDAYRIAYYAQKYADKARLVQANNEVLQKLQDMLAARDRLMKAKGQLQRPLKELKRIDPAMYQYLLKINRPVIKQLNKSLVQIKKEILDIIHSDEKIKRQYLLVTSVQGVGMVLGVQLMVYTHGFSRMKNGRQLACYAGVAPFEHTSGTSIRGRTHTSNYANMALKSTLHLAAISSIQHNPDLKRYYERKVSAGKSKMCVINAVRAKLLYRVLAVVRRGTPYQNVIVFQKVCLSKN

SEQ ID NO: 369452 - protein, 415 aa, unidentified
MEIIYPRVAGIDVGKREVAVAVRTPGEGPGQRRQQIRKYRTYYQVLREMVAWLVEQGVTHVTMEATGVYWKPVFHALCEAEQIEVLLVNARHVKNVPGRKTDVKDSAWLAQLLECGLLRGSFIPPKEIAAIRELTRYRKKLIEERTRELQRLSSVLEDGGIKIDSVASSITTLSARDMIEALIAGERDPRVLAELARGRMRNKIPDLTMACAGRFGDHHALLARMHTDQIDHLATMIGVLDHRIEEVTDPFAEQLKLLQSIPGIGERAAQVIISEIGADMARFPTAAHLASWAGLCPGNNESAGKHKTGRTRKGNAEVRTILTECAWSAGRTGTYVGAQFRRLHRRFGKMGGGKAAIAVAHTLIVIIWHVLHDRASYLDMGSDYFTRYHNPEARKRRLVHDLQSMGYEVTITPAA

SEQ ID NO: 369453 - protein, 348 aa, unidentified
MIIIGVDFHPEFQQMASVDTDTGEFQEKRLAHREDAEKFYRALAGQKVRVGMEASGHGRWFERLLSELHFELWIGDAAKIRTKRVRKQKTDRQDAQLILQLMLEDRFPKIWVPSGENRDLRQLLWHRHRTVQARTRIMSQLQAVALNEGLRCKKRLWRKHGREQLESFRLAPWASRRRRDLLELLDRLNPMIAELSQAIEQEAEKFPEARRLRTHPGVGALTACAFVLIIGKADRFECGKQVASYLGLVPLEDSSGNRRRLGHITKQGSSMLRFLLVEAAQVTARSLPEWRSKYFHLMMRRGRKIAKVAMARRLAIRLYWMWRKGWDYEQVKKFGSHAGQLGTGRGVQ

SEQ ID NO: 369454 - protein, 424 aa, unidentified
MSEDDVKGWSERAAFAGLDWASDHHDVVVVDRQGKVCEELRIEDNAEGWARLRERLSRYPGLAIAVETSYGTAVERLVEAGYAVYPVNPKAAKRYRERKAPSGTKTDFLDAWSLADALRVDGHGWRVLRPDDALTVELRLLCRDEISLIEQRTALVCQLRAALREYYPTALEAFEDWTARGAWVFVERFPTPQALVAAGRRRWEKFLHTQKLYHSRELYDKRLKLFADGMTFCGGQAITNAKSLLAKSLVVQLRVLEDQLDEYRRRIGERFAQHPDHDLFGSLPGAGAKLAPRLLAELGDDRGRFDSAEGLQCYAGTAPVSYQSGKIRQVRLRRACQKTLRATVHLWANLSRARCPWAEAYYRRKRDQGQSHACALRCLGQRWLKILWKMWQTRKGYDPELHQRNQVKHGSWVIALEPAVATRS

SEQ ID NO: 369455 - protein, 355 aa, unidentified
MSDEKYIGLDVHQATISVAVRDSQGNIIMESILETKASTILDFFAGLRGRLSVTFEEGTSAAWLYDLLKPRVAEVLVCNPRKNAALKQGNKNDKMDARKLSERLRLKDLQSVYHGENGVRMLRELARSYLTIVKDLTRVMSRVKALYRSWAIPCAGRDVYYTRHRKEWLDKIQEPGVRGRAERLYQQLDMLQHLRQQARRELLAESRKHANTAKLREIPSLGPIRCALAVALIQTPHRFRSKRQLWTYSGLGLETRDSGEYHIVQGQPRKRKKQAFVRGLNKDYNHDLKGLFKGAATRASVQPGPFQEFYQRSLAKGIKPTMVRLTLARKIAAITLTLWKKGEDFDIHKLNTQAA

SEQ ID NO: 369456 - protein, 350 aa, unidentified
MQVQHFYKFIFQNKSMKNYKMTIGIDVSKLKLDVWLMENPKDSKQEHFIVENNEKGINQIIKTVKKQKYSIEDCLFCFENTGIYSMPLSYHLSEFGADYWVVPALEIYRSKGITRGKNDKNDAKEIAFYAFTHLHKLKLNTLPEKEIAQLKALFTEREKLVKSIKIMDTTKENEGFMPKEIIKEVTKINAQTVVLLKKQLKLVEEKMTEIVKQSEKIKEVQKLVCSVPGIGKQTALYLIINTKCFEAFDNWRKLACYAGIAPFEYSSGSSIKGRTKVNNLADKKMKSLLQMCVMTAIKNDKELKKYYNRKKEEGKNSKLVMNNVRCKLLARVFAVINRGTPFVNTQKFAA

SEQ ID NO: 369457 - protein, 359 aa, unidentified
MDGQDETIQSIVGGVDTHKDLHVAAVVDDLDRVLDTQSFATTRQGYRMMLAWMRSFGELRRVGIESTGSYGAGLLRYMQSADVEVLEVTTPDRHDRRKRGKNDDLDAANAAHAAFAGQRTVTPRSRNGMVESLRVLKACRKSAVNARRIALQMIQNTIIAAPDRLRDQLRSMTRMQLIRTLAAWRPDLTAYRDLEAAYRISLKSLARRYLELHDEIADFDVMIAAIVQELAPELIARNSIGHNSAAQLLLTAGDNPERLKSEASFAALCGVSPVPASSGKTVRHRLNRGGDRAANSALHIIAIGRLRTDERTKTYVARRVAEGHSKLEAIRALKRYIAREVFSIIMRRQKDINATRIAS

SEQ ID NO: 369458 - protein, 468 aa, unidentified
MRCHFPQRILEQILDQPNRSRRRRLKPVKSRAALSITHPNAAGLDIGSAAHFVAVPPDRDDEPVREFPSFTADLERMADWLKACGVDTVAMESTGVYWIPVFELLEARGFAVLLVNARHVKNVSGRKSDVLDCQWLQQLMTYGLLSGAFRPAEQVCVLRALWRQRDMLLRSQSRHVQHMQKALTQMNIQLANVISDVVGETGQKILRAIVAGERNGPVLGAMKNVRIQASVDDIAKSLQGNWRAEHLFALKQALAAFDFIGTQVTECDREIEQQLHSLAAHDGEPAKGKQRGRRRNSPKFDLRTQLFKMCGVDLTRIDGIDVTTALAVVSEIGVDMTRFPSIKHFTSWLGLCPGTKITGGKVMSSKTKRVANRAAQALRLAAAALRTSQSALGAYFRRMCSRMDKPKAVAAAAHKLARLIYTMLTKGEEYTDQGQDYFEERYRERVLRNLSQRAAKLGLKMVAIEQLA

SEQ ID NO: 369459 - protein, 315 aa, unidentified
MTKPLCTVNVGVDVGKDQLDVLLLERDRALTVPNEEPAIAALIRTLSRYRVERIVIEATGRLEQPFVRAALAAGLPVIVVSPLKIRRFADAIGQLAKTDAIDARLIAQFAATVRPIARPPSDANAQAIKDLTVRRRQLVALRTMEKNRRQIMPQELKASIDRIVETLNAELKTLEQLIDHAVDAHAPSRHKRELLTSMPGIGNAVAATLIGDLPELGSLNRREIASLTGVAPFNRDSGKLRGKRRIRGGRAHSRTALYLSAMVATRFNPDIKRFYERLLSAGKHKKVALTACIRKIITALNAMIRDNSPWQPAMT

SEQ ID NO: 369460 - protein, 414 aa, unidentified
MLDTVFIGIDVSSRTNVVHVMDHVGNKLWSDEYMNSAPGAETLVAHLLKDPRCDKAFYRFGLEATGVYGKGVAMFLRETPKIHPSRKAVHVLNPKHVKRFRDSYSDLPKDDFTDAFVIADSLRFGRIAAKEVVVEDKYLALQTLTRWRFQCAHELTREKNRYLQNLFQKFSSMVQQQGTSDQLFSDLYGATAMNLVDDFEDVDQIAYTPLEELTAYLMEQSKNKFAEPEELAKDIRKAARTSFRLPKAIQDSLNQVLAMQTNVIRFYEKQLKDLDKVIERQMQAIPNTLMSIPGIGPVYAAGLIAEIGDVKRFENEAALAKYAGLTWTKHQSGTFTADYTRLIQGGNRFLRYYFCQAANKVRQHDPDYQAFYRKKLRETPRTPHKRALVLTARKLVRLVYVLLRDQRLYKLPLR

SEQ ID NO: 369461 - protein, 454 aa, unidentified
MTPIYRRCAGIDVHKKSISVCVRVLAGAEESKTESTSFGTFTSDLKEMAEWLKARKIRHVAMESTGVYWKPVWNVLESTKWKFDLLLVNPQQARALPGKKTDRGDSERISGYLQQGLLRGSFVPPKPMRELRELTRRRTHWQGDRNRVINRIGRLLETANIKLGSVISNIVGQSGKAILNAISSGESNPKVLARYTSGRLKCTAQDLERALEGRYDDHLRWSLRQLLEELDALDRRVLAVEVRIGQLTRDLREVMARLCTLPGVDVTTAHTILAEIGTDMSQFPDARHLASWAGLCPGNSESAGKRFSGRTRKGNRYLRRILIQNAWAVAHMKDCALTALFYRVASHAGMKKAALAVAHRILTLAYYIIRDGTEYREAGGEYYDRHNPTKTAARLTRRLERIGFEVTLTPRPAFAQPHKIAPPPGQRCKQCNAWRIACIHVKPRQAPPPGALSN

SEQ ID NO: 369462 - protein, 318 aa, unidentified
MKKTFFCGVDVSKDKIDVCFLTSIASEKAKFETLPNNYDLIQVYFNSFKNDEILVVFEATSNYHLALQKALPDLNIRYNVTNPYKTSLFLKHLSTIKTDVNDSYGLAVYARTFKSEILPDKYNAEYLQIKSYNSTLNLLQKLNTQLKNFKQSQKLVKNSVVDEVIENLIKEIAKLQSMLQKLAFDLVKKTIPETEEIIKSNKGFGIDLALNLFPQLHFNRDKSEKQFVSFLGLSPRIFQSGSSVHRNQKINKMGSSNIRRILFMSALCAIRFNEKFKARYDRLIANGKKKMVAIVAVMCAIVRYLKSLFPFNAEIKAI

SEQ ID NO: 369463 - protein, 412 aa, unidentified
MEVLYACCCGIDVHAKMLVACLLKPGKKEVRTFSTMTEDLLRLLDWLTQEGCTHVAIESTGVYWRPVFNILEGGMEVMLTNARDAKGYKARKTDVIDAEWLADLLRHGLLKPSFIPPLPIRELRELTRYRESLVREQTALANRIQKLIESANIKLGQVASDALGVSGKLMLRALAAGETDAEKMSHLARRALKRKQPQLQQALEGRVTPAQRWILGQLLDQYDQVEAALQSVAERIRQEVDSSADPFVPEAIKLLDTIPGVGETVAQIIVAEIGVDMDRFPTDHHLASWAGMCPGNNESAGKRKSGKTTKGSRYLRAALVQAAWAASHQKGTYLAAQYKRLVKRMGKKKALVAVGHSMLVMVYHVLQNRTRYQELGGDYFDRRNVAKQRKRLIRQLESLGVKVTVEEIQQAA

SEQ ID NO: 369464 - protein, 394 aa, unidentified
MKRPCVAVDVSKSKSHYQGWINIDKKCGNAKCIEHSKIGFQEISDKLKELEGITNEKPVVVFESTGVYHRSLQQYLDDNEIDYIIISPLASAKVRKSNIRATKNDKRDCKTIARAYFEKEFPLHQESDEIYDNLREMNRYYHYLTEQLKKCKVQFKLLLDIVFPKFDLYVEDYSEIPMALFSKYHHPDEIKNKHPESLAKYLESKTCHHYNYCLKEAISIIKYCNECQSGCSKESIDCRLFGEVIEQIKSKVEEQELYLQKIIDLAKELPNYELLLTIPGISNNLSARILAEIGDISRFPRAKSLVAYAGIDPNVYQSGENDGLHLRITKKGNKELRCLLYLAIHNTIQGNNVISNYYHKKIATGLASKVAKVACMNKLLRIIYSMCKTGVIFQ

SEQ ID NO: 369465 - protein, 338 aa, unidentified
MKLYGGIDLHSNNNVVALLDEEDRVVLRARLANEPTAVLEALAPYREAIVGLVVESTYNWYWLVDALMDAGYRVHLAHTAAIVQYSGLKYSDDDSDARWLAKLLRLGLLPEGYIYPKQDRAVRDLLRRRMRLVQQHTANLLSVQNLVARNRGASLSANEVRHLTPEAASRLLPDPNQALAVQSNLLVMRAQDAAIDLLEHEVLAQVKLRPAYRHLLSVSGIGTVLGLTIMLETGPVERYAQVGHYASYCRCVGSAHLSNGKRKGQGNTKSGNKYLAWAYLEAANFTVRYNATVKRYYQRKRAKTNGVVAIKTVAHKLARACYYILRDGTDFEVSRAFG

SEQ ID NO: 369466 - protein, 369 aa, unidentified
MVKASTFVGLDVHKNSIVIALLRPGQATPLEWKVRNEPGAVHRLIRKLEHEDGVQCCYEAGPTGYVLKRQLDRAGISCQVIAPSLIPVKPGSAIKTDRRDARKLAELLRAGMLTEVQPPTEDEEAVRDLTRSRDDAQRDLTRARNRLAKFLLRRGCVYAIDRKPTWSQKYRSWLRALRFERVADQVIFEDYVLAVEQVEGRLEALTDRIEHFAEQEPWHERVQALRCFHGINTVTALALVAEIHDPRRFTHPRRLMSYLGLVPRESSSGMRERRGGITGAGNRHVRRLMVEAAWHYRHKPVVGRALRLRRREQDPKAIALADRALRRLTLRQRRMLYQGKHPNLVNIAVARELVGFVWNVLHTRATTQA

SEQ ID NO: 369467 - protein, 327 aa, unidentified
MSKIWIGIDVCKRRLDVAIRPVGEMLSFDNDEAGIKRLTKALRKHPAQLIVMEATGGHEYAVAHSLMKAGLSVAVVNPRQVRDFARAVGKLAKTDPIDAKILAHFAEAIQPPIRPIADEQLEEIGQLVTRHRQLIEMIVAERNRRMSVRGIVRRDVDATIEFLKDRLGKIDEQITALITEHPEWKAKAELLNSVPGVGPVLISSIVAELPELGHLNRKQVAALVGVAPFNNDSGQFQGRRRIWGGRSHLRSLLYMSVVAGLRCNATIRAFYKHLLIAGKPKKVALVACMRKLLVILNAMLQSQQMWRADVGGLKVEEPLGLTLDPLR

SEQ ID NO: 369468 - protein, 459 aa, unidentified
MSQAKKKKGGRRKVLAAGVLQQLQNINVNAAGIDIGAEEHFVAVPEGRDEVSVRKFSAYTAELEALADWLKGCGVTTVAMESTGVYWIPLFELLDRRGFEVKLVDARHVKNVSGRKSDVLDCQWLQQLHSYGLLEGAFRPPDEICVLRSYLRQKEMLIQASSQHIQHMQKALQQMNLLLHQVVSDITGYTGMTIIKAILAGERSPWKLAQNRHALCKRSEPEIAQALKGNYREEHLFALRQAVELYEIYRQKIADCEAEIIAQLDTYPDATDDQTPPPAKPSNHSARVRSGTDVRELLFKKAGIDLFAIPGLGADTLLTLTSEVGFDLRAWKTVKHFTSWLGLCPGTRISGGKVLAKKRKRKLNRAAQAFRTAAVTLGRSQTALGAFFRRVKARTGGIQAVTATAHKIARIYYSMLTEGTAYFEIGQQAYEERYRERTIVNLERKAKSLGLQLVPSTAS

SEQ ID NO: 369469 - protein, 347 aa, unidentified
MNYIGCDCHISTLDCAVVNERGHETKKQKINTGVKGLMGFVKSIPKPRKIIIEEGTLASWLLEVCTAYGEELIITDPKTNRWIGRADQKNDTIDASKLAQLARGGYIKQIHHPIGHRRRFRELVMLYHATVKSQTRIKNQLKGKFRQDGIKCSGETVYFAKFRNEWKKKLPQDKVVQVMVEGLWRQLDQVHEVKEELLGHIRKQSRQYSEIKRFKQIPGIGPVHAATISAIVETPHRFANKKKLWMYAGFGLAERTSGEKVYSRNLTRNFNRLLKDALKQATEAAISARDNQFRRQYLRLTLEKGMPSHRAKLTVARSMLATIFGIWRSGEDYDSTIDKKRTESDNT

SEQ ID NO: 369470 - protein, 401 aa, unidentified
MKTVLSVDVAKNKSVIMLMNSDGEILIDTKEIKHNLQDFDKVKEQINEIKPQNLTVFMESTGTYHLPVERYFKENGFNTLVINSLTTKNNYDTIRKTKTDKEDCYRLAKLFFVNEVEYHDLSKKDLYANLKAMTRQYFYLLQNNVSCKNRYKRLINICFPELEKIFKSTRIYEDTALNFIKEFTHAEIVREKRIDALYNNLYKTNGRNLNFYKKLATTIKTASANSYPGVDKEHEDVKNLSYMAKIVQNNNNIINELRQKMIETAKQSPYYKIINSFYGIGEILTAEILGELGDITRFDSPKEIIAFCGLDPTIKQSGKSINVKGAISKRGNKYARYILFNCSQMVVKLGASNYPEHPVYIYYQNKKAEGKHYYESLTACSTKILRMLYSMCKNNKTFLSD

SEQ ID NO: 369471 - protein, 414 aa, unidentified
MIYPKMRYTYVGVDSHKETHTAVFLDCFFTKLGEITFENLPSTFDNFLNDAQKFLIDGTVFLFGLEDISSFGRTLVVFLKANGQAVKHVNAQLVAAERKNFQTIVQKTDSIDATCAARVLLSMFDSLPNADTQDIYWVLGSLVTRRNLLVKNKSSAKKQLHSFVTPHYPNYRQFFNKIDSKTALAFFEKYPSPALLNCTTAPELTAFLQETGGKYNYPFEFAQNMLATLQNTTVQYQEYRNAAIQSTIRQIHFNLMEIEKLEKVMETFFKEFDCTLTTMTSIDIVTATKMLAYIGDIKKFPTPSKLARYAGIAPITYASGKKDLQYANQRGNRKLNNLFYQLAVRLSLPSGSSRKILNSFFHDYYNRKISEGKTKPQALKCVQRRLINIIWGMLYRNEEYYNPPIYDLPKDEMP

SEQ ID NO: 369472 - protein, 423 aa, unidentified
MPYRIAGIDVHKKKLAVVVADVEVEDEYQFERRWYGSNPEQLQLLAEWLIQQQVEEVVMESTAQYWKPVWGALEQYWKPSCEKREGAGRMSGTLHLAQALSNRGRRGRKKDFRDAERLLKRLVSQELTLSFVPHAEHRLWRTVTRTKYQLRRNKVRLHNQLEALLEEAHIKLSSLVSDLLGASARRMLQALAEGETDPAALAALADQRLRATSTQLRDALGACTELNPVYRRLVKMVLEELQWIEQQIGQLDQEMASLLGQHQDAVRRLAEVPGLGVDSAQQIIAEVGAKAATFASAKNLSSWVGACPGEEETAEVNYSARSPKGNRHMRRLLNQAANAAVKVKGSIFEIVYRRLVPRLGHNKTIGAIAHRICQLIWIILNKGVRYEERGPAVSENSRRARTSRMIRTLRKLGYRVELHANPA

SEQ ID NO: 369473 - protein, 348 aa, unidentified
MPSISEQTIRVVGIDIGKNSFHIVGLDERGAIVLRQKWSRGQVSTRLANLPPCLIGMEACVGAHHLARRLQALGHHARLMPAKYVRPYSKGQKNDFRDAEAIAEAVQRPTMKFVAVKTADQLDLQALHRVRERLVSQRTGIINQIRAFLLERGIAVRQGQRFLRAELPQILGAPSDVLSPRIAHVIEGLCDDWRRLDARIDELSAEIKNLADADSACARLMSVPGIGPIISSAMVAAIGTGDAFTKGRDFAAWLGLVPRQMSTGDRTILGRISKRGNRYLRVLFVQAAWVVLIKPTTWQRHGLKAWIEAAKKRLHHNVLAVALANKLARIAWSVLARGRAFEVTSQAA

SEQ ID NO: 369474 - protein, 352 aa, unidentified
MTVTIVETATQVCAITGGVDTHADVHVAAALDAIGGLLGVQEFPATPAGYARLLGWLGGFGTVSLVGIEGTGSYGAGLARHIAAAGVRVVEVDRADRQDRRRRGKSDPLDAVSAARAAQSGRAAGAPRGRDGLVEAIRALMVAKRTARSERIQTINQARALILTGPDDVRTRFTRHGPAELVAELAGLRPRPGSMVRYHTLLSLRELGRRAQFLDAQLERLDELITPLVTARAPGLLALYGVGADTAAALLIAAGDHPGRLRSEAAWAHLCATAPIPASSGKVTRHRLNPGGDRQANHALYRIVITRMSSHPPSRAYVDRRTKEGLSKKEIIRCLKRYVAREVYPYLRTPGS

SEQ ID NO: 369475 - protein, 357 aa, unidentified
MYHGLGAQAREIGLMSKLTMGLDLGDRYSQVCAVDAEGVVVREARVVTTAAALVAACPAGVSCRVVVESGTHASWVSRTLTAAGHEVLVANSRKLRWLRGNERKSDQVDATYLARVGRWDPTLLAPVPVRSAAADEALRLLRARATLVRSRTRLINHVRGAVKTSGAALLPRCDATSFARRVRAVLPPTLAPALGPLLDEIARLTAMIAQYDRWVEQLAAQYPVTTRLRQVTGVGALTALAFVLTVDDPRRFANGRAVGAYFGLCPRRRDSGTSRPQLGITKCGDGLVRQLLVQAAHYILGPFGPDCRLRRWGLRLAERGGANGKKRAIIAVARKLAALLYALWMHEAVYQPLPTGD

SEQ ID NO: 369476 - protein, 347 aa, unidentified
MTSPLKYAVGLDMAKNKFDACLASIDPAQKVTIKSSKSSVSNTLKGFGEMESWMKKHIAVNVPIVFCLEATGIYYEPLAWYLHEHGYSVSVLLPNKARHYIQSLGLKSKNDKIDAKGLSMMAVQQQLKLWQPVSTQIYRLRQLTRFYQQLQESRTMYRNQLQSFAYSRLQNESVMGPLKDIVSFVEGQIKEIAVAIEQALQEDPVLWEKAENIATIKGVGTISIATVIAETNGFELFENLSQLVSYSGYDVVQNQSGNRVGKTRISKKGNNHIRRILFLPAFNVVKFKVNPFLNLYNRVYERTKLKMKAYTAVQRKLLILIYTLWKRNEAFRNDIHPEMGARLLSFR

SEQ ID NO: 369477 - protein, 356 aa, unidentified
MTRIAQLEPTRVTVGVDTHRDVHVAVALDQLGRRLGEIELATTRAGYQRLLAWAERFGAVEAFGIEGTGCYGAGLARHLGARKVLVIEVMRPNRQTRRRKGKSDPTDAEAAARAVLSAEAAGSPKAGDDLVEMIRVLRVARQTAIKARTQAINALRSLLVTAPPELRDELRALSTSRLVGKAARLRPGPLDSPLTASKLALRHLARRYQALEAEITSLDTQLAQLTAAASPRLLEAFGVGADTAGALLVAAGDNPERLRSEAAFSMLCGSSPINASSGKTNRHRLNRGGNRQANAALHRIVLVRMRYHQPTRAYVDRRTSEGKSKREIMRCLKRYVAREVYTALTQPGEQKLARAA

SEQ ID NO: 369478 - protein, 355 aa, unidentified
MDKIKYIGLDVHRDTISAAVLNESGRLLQQSVLMTRTAAILDFIGGVRGSLHVTFEEGTHSAWLYDLLSRRVDKLVVCNPRKNALLKSGNKGDAIDALKLADLLRAGLLSPVYHGETSALEVQQLARSYLMLTEDTTRAMGRLKAVFRGQAISCTGRKLYGPKHRGEYLAALGGCALRRRAERLYQQLDALQQLRRDARHDLIVECRKHVEAKWLQTVPFLGPLRAAVLIGRVQTPHRFRTKRQFWTYCGLALETRDSAEYRVTDGQLERKKRPAQVRGLNWNYNHELKNVFKGAANAASTGQGVFREFYLGLLKKGMRPEMARLTLARKIAAIALKIWKKGESFDAEHLKSQAA

SEQ ID NO: 369479 - protein, 339 aa, unidentified
MNLYAGLDLHSSNTYIGVLDQQFNRIFKKRVSNELDLILKTLEPFRARLKGLVVESTYNWYWLVDGLMDAGYACVHLANPSAIKQYEGLKHSDDQHDAFFLAQLLILDILPQGYIYPKETRPVRDLVRKRLFLVQQKTAHILSLQSLLARCCGQRVSSNQLRKVTGYDLRQWLKEEHLVLSAQANLDNIVFLKQQIGRLEAAIQNQVKLSKAFNCLLTVPGIGKILAMTIMLETGDIHRFATVGNFASYCRCVSTQRLSDGKSKGSGNRKNGNRYLSWAFTEAAQMARRFNSRFRSYYDRKAAQTNSILATRALSNKLARVCYYIIRDQVEFREELTAH

SEQ ID NO: 369480 - protein, 313 aa, unidentified
MAQIVPHVGIDCCDERLDVHVHPLDIVFSVTNDPAGWRELDRRLCAAQAQVVAIEASGGCERDVCRFLLKREYSVRLVDPYRVRQFAKAAGRLAKNDRIDAAVIALFAATLPTRPMVRHKHLERLSELVTARAQLIEQMTVAQNQGRLREDAVLRRMDERRAKALQADIALLDRHIAECVEASTELKARNAILRSMKGVGPVLAHTLLALLPELGELTRKQIAALVGVAPFEDQSGKRQGVRFIQGGRAAVRAPLYMAALVAGVHNPILKPFRDRLRQAGKKPKVAIVAVMRKLITTLNALVRDGVKWQPKTA

SEQ ID NO: 369481 - protein, 349 aa, unidentified
MIRNKPRGATVYGIDLGKNIFHVVGTDSAGNVVQRVKFRRDTLRAFFERAERAVVGMEACPGSQWLARKLQAMGHTVRIIPAQFVKPYVKSHKNDTIDAAAIAEAVTRPTMRFVQVKQPEQVDLQSLHRIRDQMVGSRTRLICQMRAFCLEYGVAIRQGAGLFKSDLPRVIADECNDLTPTMRRLLNELFEDLMRLEKRIAQVTREIEALAARDEKARRLMTIPGIGPLGATALLAAAGNGQQFKKARDMAAWLGLVPQQYSTGGKTQMFGISKRGNRYLRRLLIHGARSCVMHLDRSRDRLGAWLRQLHSRMHVNKVTVALAAKIARIAWVVLNRPGAIYERRDPALA

SEQ ID NO: 369482 - protein, 362 aa, unidentified
MNYVGVDIHKKYSVLCAVDERGRKLREARVEGNAPFGFAQFFSGLGGPSKAVVEACWNWGRIHDELEELEGIEEVVLAHPYKTRLIADAQIKTDRLDAYALSTLLRGNLVARAHVPRRETRVRKNLLRQRLYWARLRTMLRNRIHALLDRQRSLELPQCSDIFGVRGLSFLRRLELPETDAALLREQLALHDLIAQQMKAQEKRIGLEFGSEAMHQQLLSVPGIGPTLAAVIACEVDSIERFSSAEKLCAYAGVVPTTHSSGGKTSHGQLLPFCNKWLRWALIEASWVAIGCSPYFGALYKQHRARGKKANSAVLIVARRMCRIIWQLLHEKRDFEKRPLRPNFNFPGCSVVRLTAATAARP

SEQ ID NO: 369483 - protein, 317 aa, unidentified
MTYTSRFIGIDISKSSFDICVLPDMHSASFSNDAGGIARFIAFLAQLDGIERLVVEPTGGYERSVVHTLLAARLPVAKVNARQIRQFARACGQLSKTDRIDAFVLADYARRMETKDLAPSSPAQVVLIDLVSRYRQLSHMIVQEKNRLEKLGARADATARAWIEETLSFLLQQRQSVVDAMEACLQSDEDLAVKAKVLMSLKGIGLRTACLLIAGLPELGLLNKGQIAKLVGVAPINRDSGLMRGKRMIAGGRKPVRDALYIAALPAIRFDPAMKAIFERLKAKGKPGKVALVAVMRRMIIILNAKMRDYRATVIDA

SEQ ID NO: 369484 - protein, 418 aa, unidentified
MTFVSKGVVPAGRPFAPKARVSAREPVLQIGPPPSSPRLRRIRGLVSLRYQGQSETIQGRGAGTTAYSTEAVMDKFDPCGIEVSAQELVVALSRDGRAERLRSFPNTAEGHAALLRYLHSGSQRVRVALESTGLYGLDLAYALHRDAQIDVMVANPRAVRHFASALMQRSKNDRLDAEVLREFAARMPFQAWVAPSAHCFALCAVTRRLETLTEQSTAEKNRLHAASLSVAFPPAVRRDLQRSVRSIQRALARLTREAQRILEQDPLLNSSYHLLLTAKGIGPTSALRLLAETALLSEDLDVRQWVAYAGLDPREYQSGSSVHKKVRISKTGNRHLRRALYMPALVAVRHEPHLRAFYHHLLAQGKCKMQALVAAMRKLLHAVYGMLKHRQPYDGAKLYRLAENLYAPSSGHCSAEAA

SEQ ID NO: 369485 - protein, 371 aa, unidentified
MTDMTKYVGLDVHKATIAVAVAEDERGGEVRFFGTVANDDDEVRKLVKRLAAPGATLSFCYEAGPCGYGLQRLLTKLGQPCIVIAPSMMPRRPGDHVKTDRRDAMTLARLLRAGELTAIWVPDEAHEAVRDLIRARRSAQEDATAAKQTVRSFLLRHDRRFEGRSAWTKMYWRWLSEQRFDYPHQQLAFEELQKRVLEAQARVVRLESALGEAVASWHFAPLVRGLQALRGIQLVSAATLVAEIGDLTRFDNPKQLMAYVGLVPSEHSSGARTHRGRITRAGNAQARTTLVEAGWSYRLPAREERRYRERVADLPEDVQAIGWKAQVRLCQRFRRLSATGKPQPKVTTAIARELVGYAWDIARRMAPAMAN

SEQ ID NO: 369486 - protein, 292 aa, unidentified
MTSEKYVGLDVHKATIVAAVQDASGKCLITSVIETKAETIRAFIKGLAGTVRVTLEEGTHASWLFDLIKPLVAEVVVCNPRQNALLQSGNKSDKIDANKLADLLRAGLLKPVYHEAHGTQTLKQLAQCYETFVSDNIRVMNRIKALYRGRGVDCSGTGVYCESQQKDWLAKLEGPGARSRAQLLYTQLESVKKLRRQARNELIKESRRHAASKLLTPVPGLGPVRVALILATVVTPFRFRTKRQLWTYVGLAVVTKDSAEYEIVGGRVRKRNKPRSTRGLNRNYNRRLKKVF

SEQ ID NO: 369487 - protein, 375 aa, unidentified
MKEKVRFLGLDVHAETIAVAVAEPDGEVRSLGSIPNRGESIRKMIRKLGTAEKLRACYEAGPTGYVVYWQLAELGVHCDVVAPTLVPVKAGDRVKTDRRDAEKLARCYRSGDLTAVWVPDEGSEALRDLVRAREAAKQDQMRARHRLSKFLLRSGQRAPTGVRPWTRPYLIWVAQLRFTQPAQESTRQDYLHEVEHMRARVTRLEEAIMEAVKLASPALQQVINDLQALRGIADISAVTIAAELGQVSRFGSARELMGYCGAVPSEDSSGRRIRRGSITKTGNAHLRRIVGEAAWSYRRPPCIWYGLRRRQESISEEAKEIAWKAQHRLHKRYMRLGAAGKPQGKIITAVARELLGFIWAIGTKAETTVSQRVAA

SEQ ID NO: 369488 - protein, 478 aa, unidentified
MQDRRLVGIDLGITSAHTVRVLAGDGGLVCRRKAVPTVESLGEVEQAALAGAAAGTRLEVVVEPTGPAWLPIAVFFAARGHTVYRVSSAKAHDLRRFLRRHAKSNGIDADTLARLPLVDPAGLHPLQLPDAARAALDRRVRACDRLTRQAADHKRRIKGLVRQLLPASPLVGELGQADLAVLERWADPHGLVAVGRARLQQVLASASAGQQGAQRAEQWLAAARAALELYGDHPAIAWQDLAAEVHSEVRLLRATQAELAAHAREREACYRRVDPAALARSLPGLATIGGPALVATMGKASRFATAGKFRCFTGLAPKASETGQTDRKGQPISKAGNRLLRTTLVRAADHARRQDPQLARIYWTQMVQRGKDHLGAVCVVAAHLAERAWTVMDRATPYVICDTDATPVTPAQAKQIIAERWTVPEEVRRRRRHKKGKAPQQVLQGHVHGAQGATRRPSPSSATLGQPPSRVKPTQPQP

SEQ ID NO: 369489 - protein, 346 aa, unidentified
MMIIGCDFHPSWQQVAWLESETGETGEGKLLHARGDAKRFYEQLSGPVLIGMEATGNSQWFIELVEDLGHEIWIGDAAQIRASYVRKQKTDKRDAGHVLKLVVEGRFPRLWTPDREQRDLRQLVLHRHKLVEIRSRVKNELQHLSLNKGMQKKRTLWSQAGQKMLRELSLKPWASCRREDLLGLLQMLDEQVGKLDTAVTEAAEANAQAQLLMTQPGVGPNTALAYVLTIGDVSRFRRGKQIASYLGLIPREESSGGRQKLGAISKQGNRMLRSLLVEAAQIAVRFDPQFRKQYLHRCHQKAKGVAKVAAARKLAVRLYWMLRTQTGYPEIVRIESSPRVPLVGAS

SEQ ID NO: 369490 - protein, 346 aa, unidentified
MDYCGIDLAGVSSYVYVTDARGKKLTSGEVATDKAAFEQRLKRFVRGGLSIAIEAGNQTAWVYDALVEMGAKVTVVNPAKVKLIAESRRKTDKIDAKILCELLRIDALPHPVHVPDRKTRALRGLLVARRQLVSARTKVCNVVRGMLRQEGIRLPARALSSFVGWRRLLGQGFEQPHLCTVVATYADSFVVLTDSIRDIERELAEYERRDNRAARLQTMPRVGRIAALTFLAAVDDVHRFPSSRKLVGYSGLAPTVRSSGERTEYGSISREGRRELRAVWVQIAHLVAIDTSRATRPLRTWFNKVARRRGRKTAIVALARRLLVIAYHVLREETVYDAARLKRKAA

SEQ ID NO: 369491 - protein, 407 aa, unidentified
MPEQVETTHVVGIDIGMESCTMSCLTMDKRQVIKATSFANALQGFDWLFERLEGLGVAPKQILVGLEATSRYGENLLQALLKRGYQVCLLHPAQMHAFAQQRGLRAKTDQLDAATIARALLSGEARFGYVPSEQVATYRELMRLQKQLSDDVVRYKNEIHALLVVLFPEFTQVFVDPTRPTALAVLKRYPSAQAIAQTGVETLSKFLHELTPRHYGRPTAQELVRLAKASISSGVAVAARASSLRILCDQLEHTQKNLEQLQREIDQLLHQDPKAKGMLSVPEFGPTTVAVLRAEFGDLNRFTRIDQVVAYVGLDLQVKQSGKWKGQTKLSKHGSGRVRRILYLAALRSIHLEASPFGAYYRRLVARGMQKGMAVVAVMRKMLIVAVHLIQTEERYDPGKVAKQAGS

SEQ ID NO: 369492 - protein, 310 aa, unidentified
MDAIYVGIDVSKDRLDVHVRPSGEAFAVTRDGKGLDALVERLRALLPTLIAVEATGGFETIVAAAVGGAGLPLVVVNPAQIRHFAQALGKRAKTDPIDAAVIALFAEAVKPELRPLPDEAQRLLSELVSRRRQIIEMIVAERQREKRVANTRIRKGISRHVRVLEKELPEIDGDIGTLVRGSPAWREKEDLLKSIPGIGDVLARTILAELPELGTLTRREIASLAGLAPFTRQSGRWKGKSMIAGGRSAARWALYMAALVASRHNPLLKAFYRRLLAAGKPKMLALIAVARKLLTTLNAMLRDNKKWQHA

SEQ ID NO: 369493 - protein, 339 aa, unidentified
MHAMPVGIDIAKSVFQVHYVDPDTGEIVNKALKRAVFLEHFSNRNPCLIGIEACGGAQHWARALTLLGHTVKLMPARFVKAFNIGNKNDAADAKAIWLAVQQPSKSVAVKTEAQQAVLALHRMRQQLVKFRVAQSNNLRGLLTEYGEVMGTGRAALNAAFPVVLARLVDRLPAVLIDTLRDQWKGLAELDKRISEIERRLGQWLKQDAGVKAIAEIPGVGLLTATAAVATLGDANVFRSGREFAAWIGLVPRQTGSGGKVALHGISKRGDTYLRTLLVHGARSVLRLQKDPNSWTEQLRGRRPLNVAIVAQANKTARTIWAILAHGTTYEQGHVSTRPA

SEQ ID NO: 369494 - protein, 410 aa, unidentified
MEVMHQHCAGLDVHKKTVVACVRLASEGKVVTEVKTFATTTQGLLTLSDWLSENGCTHVAMEATGVYWKPVWHVLSDGEVELVLANAAHVKNVPGRKTDVSDAAWLAELLAHGLIRASFVPDGQTQELRALLRTRKQLVRERTRHVQRIHKTLEDANIKLDAELSDVLGKSGRAILNALVAGETDPVRLAALAYPNVKSPQAQLREALRGRLTSHHRFLLQLHLGQIDSLDAAIGTIDREVEDSLAPFRAAVDLVRTIPGVSTLGAEVIVSEIGLDMSRFPTVGHLLSWAGLCPRNDESAGKRRSSRLRKGAQWLKTTLVQCSWAAKNKKGSYLQAQYLRLKSRRGPQKAICAVAASILTAVYHMLKDGTVYQDLGPDHFNRRSKITQTQRLVRRLEHMGFAVDIKPIAA

SEQ ID NO: 369495 - protein, 390 aa, unidentified
MIYVGIDIAKLNHFASAISSDGQELMKPFKFTNDGDGFQMLDSRLTDLSYEDNSIIIGLESTAHYGDNLVRYLVACNYNVCVLNPIKTSLMRKDNIRKTKTDKVDTFIIAKTLMLQTSYRFVSFYDLDLMDLKQLGRFRQKTIKQRTRLKIQLTSYVDQVFPELQYFFKSGLHQKAVYALLKEAPTPQDIASMHLTHLSHLLVAASHGHFKKEQAKELRVLAQKSVGANDSALSIQITHTIAQIELLDSQLNSVEAEMTEIMKFNDSVIMTIPGIGYINGGMILGEIGDIYRFSSPSKLLAFAGLDPSVYQSGNYSARRTRMSKRGSRALRYALVNAAHNVVKNNATFKTYYDKKMAEGRTHYNALGHCAGKLVRIIWKMLTDGVEFNLD

SEQ ID NO: 369496 - protein, 350 aa, unidentified
MQGNGRWIGLDLSKETYEMCYFDQKGKVGRSGGETTKGGRAKLYAKLKAEDIVAMEVNSLAFVMEKEMRVIGCTVVILDASQLSIIYSSTKKTDKEDALKLARLIKIYEKEDLPIVDVPTEKEYYRRKLTKECKTLKDDRTQEINRLHALFLQCGITTMKRSNLQTDANRQKELPQLFGYESGQAQRVCERLTLLETQIKELEQTIAKECKADKDIERLKTIPGVGDKTALAFTAYVGDGKRFNNGDEVANYLGLVPRVDCSGSINRYGHITKKGNRIVRALLYQAAWSIVRSKHGGALKAKYFYMTEHGKGKKISITAIARKMAKLLYLVMKNKQMVYQELPTPDLQAG

SEQ ID NO: 369497 - protein, 376 aa, unidentified
MLSFYGAILVPKPHRKESIMYINKISHNESKEQTKFYIGIDVHKKNWAVTIRALGMELQTFSMAPSPKDLAKHMKRRYPDGLYVSAYEAGFCGFWIHHELVAHGIVNRVVHAADVPTTNKEKVHKQDKVDSRKLARELENGGLNAIYIPSSEHQQLRTLCRSRKSCTEQSTRIKNRIKGNLAYYGIALSDSETTRHWSAAFIHDLEGLCVEDTAQSASLRFLIEELKEHRFRLSRITRELKRFCKKSGYAKTLKHLLTVPGLGFITAATLITEIIDINRFKKIDDLCSYVGLVPSTHSSGDKQRINGLTPRKNKRLKHLIIEAAWVSIRKDPQLLETFSGLIKRMTKTDAIIRICRKLLNRIRYVWKNQTDYAMAF

SEQ ID NO: 369498 - protein, 370 aa, unidentified
MGKYSEVFVGIDTAKKKHAVAIADAGRDGEIRYLGEIDSAPATVERVIKKLASKYEKVRICYEAGPTGYGLYRQIITLGHECTVVAPSLIPKKAGDRIKTNRRDAVTLARLFRAGELTSVWVPDAVHEAVRDLVRARDTAAADVRKKRQQLLSFLLRHGRIYSGSKHWTQAHARWLATQAFEHPAQQIVFQDAIDAIEDCVSRLHRLEEQLYAIVPNWSMAPVVDAYQAMRGVSFIVAVTFVAEIGDVRRFENPSQLMAFLGLVPSERSTGDNVRRAGLTLAGNRRARRALVEGAWTYRYQARVSAKLQKRLEDIPKPVRDIAWKAQVRLCARFRRLAAIGKKRPVIVAAIAREMAAFLWAIGQHVAPAS

SEQ ID NO: 369499 - protein, 424 aa, unidentified
MRSIALDVHRDFCEVAIKDESGLRLAGRVRTSLEDLRLFAQSLAADDQVALEATGPAQAIARILEPHVGRVLIANTRKLRAIAESKVKTDKLDAKTLCELLAAGFLPAVFSPDEFTRALRRRLQRRSKLVRSRTRAKNECHAVLARNLKGRPPMTDVFGKAGRAWLAALELPADESETVEGCLREVDFLDSEVGLIESELARQGLCSGEIRRLMSVPGVSLVSAAAFVAAVGDIHRFHSPKRVVSYVGLDPRVRQSGEAPARHGRISKQGSPEARHMLCEAAWVAVRTPGPLRAFYERVRARRGAQIALVATARKLSVLFWHLLTREEDYAFGRPSLTRRKLRGLELKAKDGRRSWPSGHALSTKSERAREAEFAEQIETAYRRFVQDWQPKPKSGAGATRGRASSKPTSGKQRGRASVPNSAL

SEQ ID NO: 369500 - protein, 346 aa, unidentified
MEISAIGLDLAKYVFEVHGVDGSGRVVLRRQLRRGEVEKFFARLAPCVVGMEAGSAAHHWARVLMRLGHEVRLMPAQYVRPYRKRHKNDAADAAAICEALGRPSMRFVAVKTAEQQAVLMQHRVRDQLVGQRTALINALRGHLAEFGIVAARGRAALGRLRAVLAQADDSRVPALARGALCELAGQLESVEARIGALEAAIVAWHRENEASRRLATIPGIGPLAASAIVATVGDASQFATARHFAAWIGLVPNQHSSGGKPRLGRITKAGDAYLRRNLIHGARAVLSWRRRRPPSPAAWLGALLARRHVNVVTVALANKNARVAWALLRRGGTWRGDHQTSVAAPA

SEQ ID NO: 369501 - protein, 356 aa, unidentified
MNNRKYIGMDVHQASISIAVSDAAGKVLMECIIETKAATVLEFIQGLRGSLWVTFEEGTSAAWLYDLLKPHVAKVVVCDPRKNALLKAGNKNDRVDARKLGELLRAELLTPVYHGESGVRALRELSRGYLAVSKDLTRVMNRLKAIYRSWAIPCAGQQVYSPRHRAAWLEKLREAGVRRRAEQTYQQLDFLMGIRKETRKELLAESRKHPARELLEQIPRLGPIRVALLIALIQTPHRFRTKRQLWNYCGLGLRTRSSGEYRYAGGQLQHARKPPALRGLNVNHNHDLKSLFKSAATQAGASKDDPLGEFYQNLLARGMEPPMARLTLARKIAAIALKIWKKGERFDPAKLKQQAA

SEQ ID NO: 369502 - protein, 308 aa, unidentified
MTTIYTGLDIAKLNLQLHLAGRVHDLPNTAAGHRRLLKLLAAQPGAHVVCEATGGYERDVVAALHEAKALVSVLNPARVRHFARATGQRAKTDDIDAAVLSAYGQALQPKPTVPRTEQEQQLAELIRRRVQVLEILVAQRQQAERLTMPTLRRQAQSLVRRLERDVEQIEEQLQALRAQAATLNERVQKLEAITGVGAITALGVLAELPELGTLNRRQAAALAGLAPHPRESGQWHGRRSIGGGRAPVRRALYMAALIAAHSNHQLKEFYQRLRAAGKPAKVALTAVMRKLIVLMNHILKNPNFALQN

SEQ ID NO: 369503 - protein, 392 aa, unidentified
MYIVGIDIGKNHHEASIVSPEGKQIGRSLRFATTHKGADSLMSFIFKNIGNSPCVFGMEATGHYWYPIYSFLKAKGYTIYVINPIQSDSLRKMYIRQTKNDSIDSFLIAEVIRFGQFGTTSMADENILAMRQLCRYRDSVISSRTEIKLRIDTIMEQIFPEYEKQFSSLWLSTSMGILEKYLTPENIENAPIDELFEIIKDKSHNRLTRAKAISIKEAAADTFGIKIAQDTFSFQLKQLIDRMNFLDKQIEALDIEIMKYYEQFDCYLHTIPGIGIIGAATILAEIGDISRFKNSSSLIAFAGIDPTVRQSGEFNSTHNHMSKRGSPYLRHAIFLAATTCSFHNSPLNAYYKKKRDQGKHHLTATGAVARKLTTVIYAVLRDSKPYEPKKFC

SEQ ID NO: 369504 - protein, 370 aa, unidentified
MKRRVRVKVGKMNSIVAGIDLGDRESLTTVLSPVGDVTDRFTFPMNEEGYAYFASRVPKEARVAFESTIMAYPIMRALRIHGYMDVTVAHPKTLTWIVKSKKKNDRVDSLKIAKLHMAGMLPESHLLNKDEQIVRDLLVQRAKLGVEIGRLKNSLIGYLKREGVYDSLPKTGDNFSVKRRDAIHSLRFNDDRDLVLGTMMDRLEFLEQQCIPLESKVRENARLSDDVKILMTIMGVDYYLASLVSSFIGDVNRFPSDDHLASFFGIIPASRDSANVKRRGKMTKDGSSTARWALSIMVDTVMQHNDPIKDYYLGVKNRTGSGKLAHVATMRKLTRMLYHMLKTREHWKWENPQLTERKMARLQMDGGDGP

SEQ ID NO: 369505 - protein, 340 aa, unidentified
MYYTGIDLHKKTSFITTIDARGKIVTRANLQNVEEDILAYFANLGDETKIVIESMSSWYWLYDLLTGNGLDVVISNPVKTKAIASAKIKNDKLDSHMLAQLLRADLISTVHVSSLETRKLKELLRHRSRLVRDATRMKNRIHMLLMKNNFSSPFSDLFGVKGLSYLKEIDLPDYHRQQVETYLLLYEKLQEQIEPLSKIVRALAKENHIAQLLMTIPGIGPITAMFIVAEVDDISRFRSYRNLASYAGLVPSLDASAGKEKRGRITKQGSRYLRTALVEAAQAAARMQNCRLRIFFRRRIVKAGYQKAIVATAHKILQYAFYIWKNQTPYQETYPVCVTR

SEQ ID NO: 369506 - protein, 363 aa, unidentified
MTSMTPTTGSVTGGVDTHGQTNHAAALDQLGRQLGDQEFPTTPDGYRALLRWLRGHGQLELVGVEGTGAYGAALARYLRAQGASVVEVDRPDRRARRARGKSDPLDAYAAARAALAGTATGTPKSRDGRVEAIRMLRVARSGAVKARSQAINQLKALLITAPAALREQLRHLSTTTLLATCAQLRPTVELADPEQAAKTALRRLARRHQHLSEEIAAADAQLKTLVTAAAPQLLALSGVGVEVAGQLLVSAGDNPERLHSEAAFAHFCGVAPVPASSGRTHRHRLNRGGDRAANNALYIVVLGRLRYDPRTRVYTDRRTKQGLSKPEIIRCLKRYVAREMFTALTARAVDSPPATTSTLSTAA

SEQ ID NO: 369507 - protein, 351 aa, unidentified
MRKIAYLAIDVHARRCVLGHMDFDGIFVGNKTFPTSEQSIIEALKAIKAKEKYLALEESNLAYWAAQTAKPYVTEVICSDPKENALIYRSANKRDKVDTEKLCRLLRLGELKRVYHPENDERAIFKAAVQHYIDLRDQQVVLKNKIKAMYRHWGVIDVAGEAVYSAAKRHDYLKRIKHLHIGNQLCRLYFLMDQTESMQKKALKAMKQLGRKYPEIKEFKRIPGIGEILAHIFDAFIQTPERFANKRQLWRYCRLGVTDRSSDGKPLGFKRLDRSGVSELKSLAYQAWLSAIKTDNEVRRFYSNSFGRTLSRVHARLNTERKIIAVMYGLWKRGGAYRPQLFLDSPKIGVV

SEQ ID NO: 369508 - protein, 419 aa, unidentified
MTRRIAGIDVHKRVLMVVVLSVSEDGAAASTREKTKCGTLSTELEELRQWLREKGVTEVVMESTAQYWKPVWLALEGGFELGLAQAWSNRAPRGKKSDFRDAERLARRHLAGELTMSLVPGAEQRQMRELTRRTAQLNRELVRIQNHIESLLEPARIKLSSVLSDLFGATGRRILQALAQGESDPEKLAALADDRIRCSPARLAEALRGSRTPMQRRLLKQMLQDAELAEAHKKELEEMTGELMKQHSGAIRRLTGVPGIRLRTAEDVIAEIGPDARAFPSAARLASWVGACPGREESAEHNHSARCAKGNMSLRRALCEAAQAAVNTKNCRFQQKFRRLLPRLGYAKAIWAIVRLLCIVIWNILHQGADYIERGGQTTPGAIRRRAQRLNKELRAAGLSLIIVPLTSQTRTISAATPV

SEQ ID NO: 369509 - protein, 417 aa, unidentified
MKKDNKFGKKSELGTKPAKSGNTGQRETKEVLGELVGRLREKLNPKVASVSPAEEHRRGDLKPNLDRLTVGVDLGDQWSNYCILDLEGETLAEGKLRTTQQDFAELFQCLSSARVVIEVGTHSPWVEEVIGHCGHEVVVANPRLMEGSKRRKRKNDRIDANKLARLGRVDPQSLHPMEHRSREVRQDLVLLRARDALVAARTELINTTRGTVKSIGRRLPKCSSRSFASQAEKELPVEIREALLPLVQLADKLSDCIKEYDRRIEEMASEKYGHTKLLRQVRGVGPITSLAYVLTLENPERFTQSRDVGPYLGLVPKQEDSGESQPQLGISKAGDRMVRRLLVGSAQYILGPFGPDTDLRRYGLRLCERGGKNAKKRAAVAVARKLAVLLHRLWVTGEVYEPLRNSLSLPSVATTAA

SEQ ID NO: 369510 - protein, 343 aa, unidentified
MQFFVGIDVSLDSSSICVIDERGVIIKEGKTDSDPTAIARFVRHKGRKIEHLGLETGSLSQWLHAGLSREGFRVTVMEARHVRAAFAAMRVKTDRNDARGIAQLIRLGWFKAVHVKAPSAQETRTLLNGRRFLVDKLTGIENSMRASLRNFGLKMGHVTRSKWAARARELAVGIPALELVIESLLRVRDALRQELRTIDRQLLDEAKADPVVRMLMTAPGVGAVVALTFKSAVDDPTRFKRVRDVGPWLGLTPSRYQSGRTDIVGHITKAGDAGVRTALYEAATTVLSRVTRWSTIKNWGMRVASRSGAKRARVAIARKLAIVLLTMWRSQTPFRWSATQASA

SEQ ID NO: 369511 - protein, 453 aa, unidentified
MPKTRSSEPQILTRMNPGAAALDIGSTMHMAAVNPDTDDMPIRAFGTFTHDLHDLAVWFRSCGVTSVAMESTGVYWIPAFEILEQYGFEVILVNARYAKNVPGRKTDVNDAAWLRQLHSYGLLRGSFRPNAQVATLRAYLRQRERLVEYAAAHIQHMQKALMEMNLQLHHVVSDITGVTGMKIIRAIVSGERDPDVLASLRDVRCHSSVETIRASLIGNDRDEHVFALSQSLELYDFYQAKMLECDRKLEASIASMTVAPEAPLPPLPKVRTKTKQTNAPSFDVRAALYGLTRTDLTQIHGLGSSLTLKLIGECGTDLRAWSSAKHFTSWLCLAPGNKISGGKVLSSRTRRSSSRAAALLRLAATTIGRSDTALGAFYRRMAGRIGKQKAVTATARKIAVLFYNALRFGMVYRDPGAAAYDERHRGRVIANLQRRARSMGYELAPMTAGNCVS

SEQ ID NO: 369512 - protein, 390 aa, unidentified
MERPVKRNDLSRSLIAFDQASTLVAVAELSLGNWLVAGLVPNLVRQPLKKLRSDPEALLGLLLRWRDQATKAGGRIKRIVLAFEAGRDGFWLARWLRARGIEVYVIHPASIPVSREHRRAKTDRLDAGLLMRAVLGWLRGEAKHCSMAAIPSIAEEDARRPTRERETLVREQTRAVNRIKSTLIRFGIRTFKVKLRQASKHLEGLRGPEGEPLPANTMAELRRDLARLQLIRGQIREIERARLERLKRAPRQGTHPMMRMLARIMGIGIETADMLVHEVLSRKLRDQRAVARYGALTGSPDESGSKRRERGLARAGNARVRRGMIQLAWRWLMFQKNSTLAEWYRARTTGATQGLRKAMIVALARKLLIALWRYVTIGEVPAGAVLRPVT

SEQ ID NO: 369513 - protein, 351 aa, unidentified
MSQNPNTSIAVVGIDIGKNSFHVVGLDQRGAIVLRQKWSRGQVEARFANMPACLIGMEACVGAHHLSRKLNELGHSARLMPAKYVRPYSKGQKNDFRDAEAIAEAVQRPTMKFVATKTADQLDLQALHRVRERLVSQRTGIINQIRAFLLERGVAVRQGLRFLRAELPRILATPPDVLSPRMVRVIECLAGDWRRLDERVESLSGEIEAVARLDAGCERLMSVPGIGPIISSAMVAAIGTGDVFTKGRDFAAWLGLVPKQISTGDRTILGKISKRGNRYLRVLFVQAAWVVLIKPKSWERHGLKPWIEAAKKRLHRNVLAIALANKLARIAWSVLARGRTFEARKVNEVAA

SEQ ID NO: 369514 - protein, 453 aa, unidentified
MDKSSKKKTSVKRITQFEIIRPNVAGIDVSDNHGMMVAYPINETEVAIEEFGCYTEDLRCISATLKLHNIESVAMESTGVYWIPLFLLLQEDGFEVYLVNAKHVKNVTGRKDDESDAEWIQKLHRCGLLSASFQPDNQTRSLRSVVRHRNSMVRTRATYLNRMQKALEQMNLKIHTIISDIDGKTGLAIINAILSGERDGEKLADLCDHRIKASREEIIKSLEGFWLDEHIFELSQCYKLYDFHNEMIKECDLKTGTLLQEIIKSKNNGIMPQLGKLKRKRNYKNDINIDVTNYLHELNKVDVVSTEGITGISEITALTIYSEIGDNLHRFKNEKHFTSWLGLAPNTKISGGKIISSRVPKKKHHAGQVFRMAALSLCNHKGPLGDYYRRIRSTAGKQKAIVALARKLAVIYFRMMTTKEEYNPQLLIDYQGKWRERKIRNLEKYLNKLKESV

SEQ ID NO: 369515 - protein, 492 aa, unidentified
MKPKPKRKSVYRSQNATLRALFERAGEPRKVLCVPLDYAKRKHVALVCDGHGDILKGAFPVDNNPAGVAYLIEQISATARHRKIPKNQIFLGGEDEPAYVANFTAALREAGFLVMRVNAHEAKENRETHAASTDQLDLIGIAKTLLSRRARSSGDSSPENPAYHHLRELARCRRSLVRQQTATANRIHALVDQLFPGFLDDSKTGITAFCEASIELMKDRFSAPEFAKRKPTALAKTLRRSLVHHPDEAAAKIINLARSVLPPAPNRVATLQRTLKATVDLHQCLSRNAGELRTDAALTLATTPYAMLTSIRGIGFVLAAGVAGELGDPAALGTTDSLCCYAGIVPKTLQSGGPDSPPVQGRVSPRCNRILKDWVVQSAQKIHLYGVPEHKDRITRWNAEGRSGLYAGARHYLRLLRSLVKNQVPYLAPAGRARSAAPEDIAAASQDTWKVMQNKWRTIPGGLDLMLDEAHPLGFWRRVIKETHDIQLPTRL

SEQ ID NO: 369516 - protein, 383 aa, unidentified
MFHSPSADASFSDSTHTIFLALELSRRSWLVALHAPDAAKIELHRLPAGDGQAVLDLLARIQTRVERRTSASPHVSCCYEAGRDGFWLHRLLEAHGVSSHVMDPSSLQVDRRARRAKTDRLDAQALLRALMAWSRGEPKVCSMVRPPSPDEEDARRPSRERATLLQERIRLVNRIQGLCATQGIADYEPLRPDRRRRLPQLITGDGRPLPPRLSEEIAHQLDWLELVLRQLAEVETRRDAEAAAAKAATSSKLGALLHVKSIGPELATVLAKEVFYRCFASRRHVASYVGLTPSPFASGRRSREQGITKAGNARARKALIELAWLWVRNQPDSALAGWFRSRVGSATGRVRRIAIVALARKLLILLWRYVETGALPADVVVKP

SEQ ID NO: 369517 - protein, 356 aa, unidentified
MARMAQLEPTHVTVGVDTHRDVHVAVALDQLGRRLDQIELAATRAGYERLLAWASSLGVVAVFGVEGTGCYGAGLARYLGARRVLVVEVMRPNRQTRRRRGKSDPTDAEAAARAVLSGEAAGAPKAGDDLVEMIRVLRVARSSAIKARTQAINALRSLLVTAPPELREQLGARSTSRLVDKAARLRPGHLGSPLAASKLALRQLARRCQTLEAEITSLDAELVQLTAAASPRLIETFGVGADTAGALLVAAGDNPERLRSEAAFSMLCGSSPIKASSGKTNRHRLNRGGNRQANAALYRIVLVRMRYHQPTRAYVVRRTSEGKSKREIIRCLKRYVAREIYTALTQTSGQKLARAA

SEQ ID NO: 369518 - protein, 353 aa, unidentified
MVSPKHHRRTAMEYFAGIDVSLEQSSVCVVDGAGKIVRETKVASEPEVLVRFFRGLEIGVTRIGLEAGPLSQWLHAGLVAAGFDVVLLETRHVKAALSAMVNKTDRKDARGIAQLLRMGWFRPVHAKSPGAQEVRALLVARKLLQTKLLDVEFSIRGILRGFGLKMGRASKGQFVARVRELALGHPMLELITEPMLRAREALRTAYASLHGEVLAIAKPDEVCRRLMTAPGVGAVVALTFKSAVDDPGRFIRSRALGAYFGLTPKKYQSGERDVTGAISRVGDAMVRVTLYEAANIMLSRVTRFSSLKRWALDVAKRRGLKRAKVALARKMATVLHRMWIDGTTFHWGKQAVV

SEQ ID NO: 369519 - protein, 402 aa, unidentified
MEIYCGIDWSERHHDVAVVDRAGVLLGRRRITDDLAGFTDLTALLAEHTGDEFTAVDVAIETDRGLLVAALRAAGHRVYAINPKAVDRYRDRHAVSGAKSDPGDALVLAHLLRTDRDQHRPLAADTELGQAVSVLARAHQDMVWARQQDTNRLRSLLREFFPAALTAFADLTTKTALTVLAAAPTPAAAAALTRANLIALLHAAGRGTRPADAARLVEVFGQPQLHQPPAVEDAMGEAVRAIVRTVAATSESIKDLEKALNASFEQHPDAEILDSLPGLGLVLGARVLSEFGDDPNRFTHAASRRAYAGTAPITRASGRHRAVLARHIRNRRLADACYLWAFAALTKSAGARAFYDRRRAAGDHHNAALRRLGSKLIGQLHHCLHQRQPYNELLAWTQPEPA

SEQ ID NO: 369520 - protein, 377 aa, unidentified
MKRIKFVGLDVHAETISVAVAEQGGEIRSLGVIPNREESIRKLVKKVGPVEELRFCYEAGPTGYALYWQLTRMGAKCEVVAPTLVPVKAGDRVKTDRRDALKLARNYRAGELTAVWVPDAAHEALRDLVRAREAAKKDELRARHRLSKFLLRHGRRPPMGVKAWTMKYLEWVKREVHFEQLAQEATLLDYLHEVEHGAARIARLDGAITEAVKSAPPQMRAVIEALQALRGIAHVSAVTVVAELGELSRFSRAKQLMAYGGIVPSEDSSGERTRRGNITKTGNAHLRRVVVEAAWAYRHRPSVGATLRKRQEHVSEEVKEIAWKAQQRLHERYRKLLAKGKNKGVVVTAVGRELLGFIWAIGIQVETAQKESLQRAA

SEQ ID NO: 369521 - protein, 465 aa, unidentified
MRTDNKLWRNRKAKKELARRLQSENPGLEVVHPHAAGIDVGNSAHYAAVRPDRDSQPVRRFECFTADLYRLADWLQNCGVKTVALQSTGVYGIPLYDILEERGFEVYLVNARHTKNLPGRKSDVQESQWLLKLPTYGLLNNSFQPTVKIRMLRTYWRQRLQHVTGAATCVQRMQKALTQMNIQLANVISDLSGVTGQLIVRAIVGGERDPWKLAELSHPRIQASRAEIAKSLEGHWRQELIFVLQQEMEMYDTYQRRVAECDQELHKHLRAFADTVSPPGKEELPPKKKKKQNKNNPHFHLAEELQRITGVDLTRIDGVDVMVAQTVISEVGLDMSPWKTEAHFASWLGLCPDNRISGDKVLARGTRHVLNRVATALRLGASTLLKSQTYLGAQYRRLRTKLAAPKAITAMAHRLARLVYRMLKYGQHYIDKGAEYYEQRNRQQQIDFVRKKAALLGLQVTPAHG

SEQ ID NO: 369522 - protein, 462 aa, unidentified
MGRKGKRTKGIEEAHPFAGMSHVNPDAAGVDIGAIEIVVCVPGENNTQIVKAFGNYTVDLLAIGAWLNEHKIKTIAMESTGVYWIPLFEVLESMGFKCLLISSRSLRRVPGRKSDIIDAQWIQTLHSYGLLESSFRPQADLVALRTMLRHRAQLIEHRAPHIQHMQKAMLQMNVQLSQALSDVMGETGQAIIRTIVKGERSPQVLAGFRDPGCKKSEEEIGQALTGTWREEHLFVLKQSLELYDFYTQQVEVCDKEIDRMYAMIRPDWEMGELPPIPKKKLHTHSKNAPKSAREIRAHLKRINGVDLSLVDGFGVSLAQIVTMEVGSNVSEKFPREKNFCSWLGVAPKHEISGGKVLKNKTLKTKNRAGQAFRMAAQSVKNSKDSVFGVMYKRFRARQGPSQATVSTAHAIARVVYRMLKYQVEFETINVNEYEKKYEEQQVKYFKKKAAKLGYQLVPVVPA

SEQ ID NO: 369523 - protein, 312 aa, unidentified
MFEGKVVHEEKTANHQSAIMSLLRNLEEDYGITSGQMLVCAEHTGQYTFPLACACKSVECKLWLENPAEIKYSSGVQRGKNDKVDAKRIAIYANRFQDKVQYYERPTEDIERLKQLESERTLYVTDLAKYKGQMKDQKDYMPKALYERKMKRLQALMDDLEEAIQAITDEMDEVIASCPVLSRQRELLMSIDGVGRVVATNMIIATEAFTRFVDPRKFNCYAGIAPFYYSSGSSQHSKAKVSHRADKVMKRLLHLAAVAVTHRVGGELKMYYERKVAEGKNRMSVINALRAKIVARMFAVIKKNEKYKPILS

SEQ ID NO: 369524 - protein, 448 aa, unidentified
MFTMHYKRLLTLIDSVSSYLSVGLDVGADFTWMSIALPNGSFIGKPFKIVHSDPRSRDLAVAKIKEAQETYSLKSRCFLESTGIYHIPLLCFLRDKGFDCSVINPIITKNSTNINIRKLHNDKFDSKKAALVGLNVSLKTSIIPDDSVVDLRNLVRDYYYLKDLQSAVALKLTAELKVSFPAYAKVFSKVTTQSSLKLLSSYPLAEDMLAASKDDIVKIIRSTARFGEAYALRKYDTIIAAAQDAAVFGRALPSNAVRIRLYIDTYQEYQKHLDALLKALHETVDRLQDTLIYDQICLLQSLRGIGFLSAIVLIAEMGDFKLFSSPKKLYAYFGLDPAVKQSGKLNGDKVHMSKRGSSLARRVLHMVALNNVKVDKGSGTPVNPVVYDYYTRKCSGKKKTVAMGAVMHKICNIIFAMLRDNKPFEVITPEEHCRRFAAEHPDKIRKAA

SEQ ID NO: 369525 - protein, 344 aa, unidentified
MTSMNFIGFDIHKKTISYCVKDAAGEVLAEGTILSTRQSLDVWMRTLCEPWTVAMEATMFTGWIYDYLLPHAAAVKVAHPLMLRAIAAAKKKNDRIDACKIADCLRCNFLPEGYMASTEIRERRRTLRYRKLLVRQNVQWRNKVSQMLMESGVVYNKQKLHKVGYFKELMTTNPDIGEGLRPLLTICRETIVRIGKTEGALVRSLARDPLLSDRVQRLMTIPAVGPITTLTWVLEVDDVARFGSVKQAISYCGLCGAERSSADMVKRMPISKQRNKHLQSVLVEAAKLGPRLSPDLALVYETEKQKGHANRATIAVARKLVAYLLAVDRSGREFVVAGERREAA

SEQ ID NO: 369526 - protein, 393 aa, unidentified
MIYIGIDVAKHKHDCFITNSDGEVLRDGFTIENSMAGFRELYDAILSFAPNPDPQNIRIGLEATGHYSNNLVEFLLSKELNPVVLNPLSTNLFRKGQSLRKTKTDKSDARFITMMLITEDYKPYSPVSYHIRELKSLTRHRFRLVHEKSRFKISYSRLLDIVFPELHSIVWSISQKSMLLTLLELPNTKIISQCHLSHLSKLLEKHSHGRYHREKAIELRELARNSIGDSSPALAFELQQTIRTILFLQDQIDSVDQQIKSLMQELDSPIMTIPGISYTLASIILAEIGDVQRFDSPAKLLAFAGLEPSTFQSGNFTSTHATMVKRGSKYLRWAILHAARLICMRDPIFRAYMDKKLHEGKHYYVALSHTAKKLIRVIFYMLGSNQRFLIQAA

SEQ ID NO: 369527 - protein, 672 aa, unidentified
MVAVMIGIDPHKGSHTAVAIGAGEQPLGKLRVRASASQAECLLGWAAAWPERTWAVEGAGGLGHLLAQQLVAAGERVLDVPPKLAARVRLLQAGDTNKNDPNDALSVAIAALRSKTRREVAADDYAAVLKVWAKRHRDLSRARNQVACRLHAVLCELVPGGFSKEITAGQAALVLAAVAPAGAVAQARCKLAGQFLEDLRNLDAQLRLTKKKLAAVVGASRTTLTQIFGVGPVIAGTVIGDVGDILRFASRDHFAAYNGTAPIEVSSGGRITYRLSLRGNRRVNHAIHMAAVTQIRNWHSDGRTYYDRKIAEGKTHKEALRSLKRRISDAIYARLQADARQAAAVSAKGPGGQPGNDSDSSAAGSHPGHQLFGQATPGPTASLRPPPGTSPPGHRNRGQRRPAKPLTAKRTRSGRLMSPHRSWAHFGAAAPDGSPGSPGRFTRFRRARMRNASTRRRGRPRPRPAFVLKRGRPEGTPASSRGGARWGLAGGAGITGAHADFHLRDLQVLVELDGDQRAAGLGHVHLVHAVTGVGLDPVDGATRNSLERRRTERRGCRARYGLLVGTDRLGAAGSRRPRVTAARGRRGAAACRGSTRGCAQRAGEDATADDARSQQTHGTCPPFLAPAGVRRVGHGVISFLPWPPTWRPWHQRASATCPLRQNGLCPAYDHFL

SEQ ID NO: 369528 - protein, 412 aa, unidentified
MKNIKEVRLLISVGVDVSKGKSTVCILKPYGEVIMSPNDYEHTLSDLKKLADQMDSFEDEIHVTMEATGNYHFPIATYLKKRDYDVRIINPLEMKRYRCQGIRNPKTDSIDAFMIAQYGIDFWFRPFQDYVVGDKRIELKTLGMQYFKTMKTRQDRYLVLESVIDRALPGIGGVLNGYDKSTGKDKKSDFVYDFYHAKKITVYSENRFCDRYESWSTKKGYRYSEKEARQLYSIAKDSIPTLPSSENTKLMVQDAVKILREVDAALHDILTRMNETAKCLPEYTTVMDMKGVGVSIGPRLIAEIGDPRRFHSAKALIAFAGIDAPPYQSGKFTGTERHMSKRGSRVMRKIGFELMDTINKHQKLYAGDPVCEYFLAKRAEGKKYRVAMFAAYNKFLRIYHSRVSAVLNGNVK

SEQ ID NO: 369529 - protein, 317 aa, unidentified
MQNGPELFVGIDIAKARLDVATCGRAQQAWSLTYDAPSLHALAERLAGLAPTLVVMEATGGLETDVCITLAARGLPIVVLNPRQVKEFARATGRLAKTDRIDAGVLADFAQKLRPEVRPLPDEQQRALDALLMRRRQIVDMIVAEKNRRAQAPRLIALEIAEHIAFLEARLEAANLDLRKRVEANEAWCARDALLQSVPGVGEVTSRTLQASLPELGQLERRKIAALVGVAPFARDSGTLRGTRHIWGGRADVRSVLYMATLSAIQRNPVIRAFHQQLIARGKTGKVAIVACMRKLLTILNSILKHQQPWSPRLAAA

SEQ ID NO: 369530 - protein, 398 aa, unidentified
MTESSDYESVQVFIGVDVGKDTHHAVAVNRSGKRLFDKALPNDENKLRSLISDLKQHGQILLVVDQPATIGALPVAVARSEGVLVGYLPGLAMRRIADLHAGEAKTDARDAVIIAEAARTLPHALRTLKLADEQIAELSMLCGFDDDLAAQTTQASNRIRGLLTQIHPALERVLGPRLDHPAVLDLLQRYPSPDKLASLGEKKLATQLCKLAPRLGKRLAADITRALTEQTVVVPGTNAAVVVLPRLAHQLITLRKQRDEVALEVEQRVLAHPLYPVLTSMPGVGVRTAARLLTEVTCRAFASAAHLAAYAGLAPVTRRSGSSIRGEHPSRRGNKTLKRALFLSAFAALRDPISRAYYTRKMSQGKRHNQALIALARRRCDVLFAMMRDGTFYTPAAS

SEQ ID NO: 369531 - protein, 342 aa, unidentified
MKIHTIGIDLGKTSFHVVGLSERGEVVVRKRFARKQLLRFTANRSVQRIGMEACGGSHFLGRALEQQGHDVRLIPAQYVKPYVKTNKNDYIDAEAIAEAVGRPTMRFVPIKSDDQLDLQSLHRVRERWVMRRTAVINQMRGLLLERGITVRKGRRHLEAALPEILEDAEANLSGALRFLLAQLGLELEQTAQRIREADAAIEGAVRENEACRRLVEIPGIGPVTATAVIAAIGNGAAFHKGREFAAWVGVVPRQRSTGGKPTLLGISKRGNAYLRRLFVQGARAVLQQKARQSAGLRAWLEPLTARTHHHVACVALANKLARTAWAVLRSGEAYRSPHPAAV

SEQ ID NO: 369532 - protein, 438 aa, unidentified
MLEVVPVSKRRAYRAVAVKNVSLENVLQSGPEGAVTVGMDVGKDEIFVVLRWVDATFERPWKVRNPLEVKLLVRILTELNRRRCLTVGMESTGTYGDSLRQALTDAKLSVHRVSGKATHDYAEIFDGVPSQHDGKDAAMIAELVAFGKSSPWPFEHKEANDAEMAYWVDWLDGQQQIEMLWLGRLESLLARHWPEATTLLKLSSATLLQTLARYGGPGGLAEDDGAARRLAGWGGPKLTAKKIEKVIRSATETVGVRQNAQDVRRIQEYATLALEAYRQTQKAKRALERLAKGNEVIQRQAEAVGVATACVLWVALGDPKNYPFAAAYRKAMGFNLKVRSSGKHKGKLKITKRGPSVVRRWLYFAAMRMVQRPEVKPWHEAKKARTSDKATPSLVAVARKLALAMHVVGARGERFDPGRLFPGCPLPRGSSSARGEAA

SEQ ID NO: 369533 - protein, 345 aa, unidentified
MKSYIRIGVDLAKNVFQVHALSEEGTPALQRKLSRAKFLDFFQNIAPSQIGMEACATAHHWARALQALGHEVVLIPPAYTKPYVKRGKNDAVDAEAICEAMSRPGMRFVPVKTVDQQALLGLHKQRELLIKQQTMAVNALRAFLAEFGLIAAKSIERVPHLLAIGRESKMLPATAKARIEIDAEVLCTLAKAIDGLEQEISRHHACNPVSQLLDGVPGIGTLIASAVVAYVPNPEHFRSGRDFSAWLGLTPREHSSGGKSKLGRISKQGNPYLRKLLVLAATSLLRVQPQRRGPLAEWVRELLARKPARLVTVALANRLARILWAMMKSGEEFRMIIFARGVAAA

SEQ ID NO: 369534 - protein, 414 aa, unidentified
MDTIYARVAGLDVHQKFTTVGVRCRLETGKLFAEVRTFGTMTRDLLALADYLEALGVTHVAMESTGVLWKPVWNILEGRFTLLLVNPRRVKQVPGRKSDVSDAEWIAHLLQCGLLQGSFVPKRELRELRDLTRCRAQLVSEQTRVANRVHKVLEDANIKLGAVASDILGKSGRAMLWALNRGERDPDKLADLALGRLRAKIPELKLALEGHFREHHQFLVEHLLGHLDDLERRIEEISQRIAEHLPSILDDERLRRLDAIAGVNRTTIENVVAEIGVDMSQFPDEHHLSSWAGICPGNEESAGKRLRNRTTRKNRWLRRAITEAAWAAGRTKNSYLGALYRRLAPRRGKNRALIAIGHSLLVIFYHMLKYDVEYQDLGVDYFDKREPERLRNYLVKRLQLLGYQVCLTPQTDAA

SEQ ID NO: 369535 - protein, 412 aa, unidentified
MLPEEICCVVGIDVAKASHVVCALEAPSGAVRLKSTSIAASTAGYAQLGQWLREWGEPQTLLIGMESTGSLWEPLYDTLTQAGYRVLLLNPHQTASWARSLGLRATTAGSDARTLARGLLAGWARASTVPSETIQALRTLSRARRDLVETQSAARQRLHDELVPVFPELASHLPEHADLGAPAVLRWLSVYSSAQAVARAHLDEISRVLQDVSAGRWGRSQAQALQTLAEHSAASTRAVAARSVVVRTLALHLLDLHTRLAELETALADLLKDDAPSQQLQGKVPGLGPPWTATIRAELGDVSRFTRVDQVIASAGLEPRTHESGRYAGQKRLSKQGPGALRHALYMATLVAVRFRPEWQLRYQRLLDRGRAKKEALTILSRKLLKVISHLLRTGASYDPACISPAPLAGQA

SEQ ID NO: 369536 - protein, 350 aa, unidentified
MLIIGCDYHPSVQQIAFVDTDTGELRERRLGHREEAEQFYRELKQQNLTVRAGMESSGHSRWFERLLQELGFELWIGDPAEIQSKRVRKQKTDRQDAQLLLRLMMEDRFPRIWIPDAVNRDLRQLLWHRHRLVQMRTRVMNQLHVVALNEGLRRKKALWRPAGRAELEAIALAPWATRRRQDLLDLLDQLTSKIQQLTQALEEEVEKRPVTRLLMTHPGVGPLTALAYELVIGTPERFHCGKQIASYVGLVPEEKSSGDRRRLGHISKQGNALLRFLLVEAAQVTVRSQPQWRSKFLHLAMRRGRKIAKVAMARKLAVHLYWMWRKGHDYGRLQKFGSHAGEPGNRDGVQ

SEQ ID NO: 369537 - protein, 331 aa, unidentified
MDEVRRFVGIDVAKVALDVFIGSVGAAFSVANDEVGIRELLRQLEPADFVILEATGGLETPVASALAAAGIAVAIVNPRQVRDFARATGRLAKTDRLDAEVLARFGEAVRPEARRLADEQGQALEALVNRRRQLVEMLTAEKNRRARAPKVLHRSLDEHIRWLQRRLSGFDDELGELIRNTPLWRERDELLRSVPGVGKVLSSTLLAQLPELGMLNRKQIAALAGLAPFNRDSGSLRGSRCIWGGRAQVRRVLYMATVAGVRSNPTIRTFYLRLRANGKHAKPALVACMRKFLVILNAMLHHKTHWQTPALTSPTSTLSPLLGAVSEHGCF

SEQ ID NO: 369538 - protein, 344 aa, unidentified
MGEVSTIGLDIAKSVFQIHGVDADGAVVIRKRISRPKMVEYFAALPPCVVGIEACPSGHHWSRRLQALGHTVKLMPPSYVKAYLKRSKNDANDAAAICEAVTRPSMRFVPIKTKEQQAALMLHRARQLLVRQRTMLSNAIRGHLSELGIVSAKGRKGTGALLEIIADAEDGRVPPAARGILDVLARQYSAIGAEIGSIDRSIVAWHRSCEASRRLEEIPGVGPIVATALVAEIGDWKAFGSGRNLAAWIGLVPRQQSTGGKDKLGSITKQGNRYLRWLLVAGAMAVIRYAQKHGTLKRPWLGRLMERRPTKLAAVALANKMARMAWAIIVHGDRYREPKPLLAA

SEQ ID NO: 369539 - protein, 358 aa, unidentified
MQRNKISFKGQKIFIGIDVHKKNWDVAIAPEVGNVKRHTQKASAKELFDFLKKHYPDGDYLAVYESGFSGFSTYYALKDVGIECKVIHAADVPTTQYEEVMKTDRVDSVKLVRSLKAGLLKGIYIREKENIDDRSVVRIRKTIQKQLSGYKARVKHMLHCNGVSFPERFEKPGSHWSKAFLKWLKEDVTLLSSTRNSLDLLIRQVETIRLTLLEATKMMRSLSQTERYKHKCDLLMTVPGIGFIVSMCILTEIYDVKRFHNEKEFAAYLGLIPTSHSSGDKVVHGEMTFRGNKQLGPMIIETAWISICKDAGLGSLYLRYKERMKPQEAIVRIARKLSNIIFAVLKNETQYVSYNMCK

SEQ ID NO: 369540 - protein, 447 aa, unidentified
MAQRNRAFSTAALNLTHPNAAGIDIGSASHFVAVPPDRDEQPVREFASFTAELERLADWLTECGVDTIAMESTGVYWIALFELLDARGFRVVLVNARHVKNVSGRKSDVLDCQWLQQLMSYGLLRGAFRPADGVCALRALSRQRAMLLRSQSRHVQHMQKALAQMNIQLANVISDVVGETGQKILRAIVAGERDGRALAQMKNVRIHASAEQIAKSLQGSWRAEHLFALKQALDAFDFCATQLAQCDTEIEAQLRRLHAHDGELAQGKKRGRARNAPKFDLRMLLFQMCGVDLTRIDGIDVTTALVVVSEIGADMSRFPSDKHFASWLGLCPGTKITGGKLMSGKTKRCANRAAQALRLAAAALRSSQSALGAYFRRLCSRMDKPKAVTAAAHKLARLIYAMLTKGEEYTDQGQEYYEQRYRQRVLLNLSRRAQQLGMKLVAIEQPA

SEQ ID NO: 369541 - protein, 411 aa, unidentified
MHKEVQMQVYIGIDWSESKHDVVAMNAAGAVLAQLTIPHSIEGFLQLTDLQEKLGMHSEDCLIGLETAHNLIIDFLWSRGFGQVFVVPPRVVKSSRTRFRHSAARTDLSDALVIADCLRTDRGRMQPWHPDSLLTQQIRAKVSLIHHLTRGVGRLYNRLRDVLLRYYPAALDVFGNQSKVWLAFICAYGSPEKAQKLTFEDFRLFARQHRYPNPALLPAAFARLQAPQPVASATIVMVYEDETHTLARLLLEMKMSKEKALKELKNLFDQHPDAPIFDSLPGAGDLLAPALLAKFGDDRDRFTSPASVQALAGTCPVTDASGKRRVIKFRRACDREFRRITQQWAKASLGKSVWANAYWLKVYSRRGYASHAYRCLANRWLAILWRIWQDGVVYDETYHLQQRAMHSKACN

SEQ ID NO: 369542 - protein, 398 aa, unidentified
MDQDRFDVFVGLDVGKEHHHATALNSAGRRLHDKALPQDEAALREVFDKLTVHGSVLVIVDQPATIGALPVTVARAMGIEVAYLPGLATRRIADLHPGNAKTDARDAFIIAEAGRTMPHALRRVGGDDDLIADLAVIVGFDDDLASEVNRVSNRIRGMLTQIHPALERAIGANIGHPAVLALLAKFGGPTGLAAAGRRRLTTTTKPLAPRMHTWLVDAIIKALTEQTVVVPGTRAAELVLPQLAAQLQGLLAQRAAAAKQVEEALDAHPLSQLLMSMPGVGIRTAARLLLDVGDATAFPTAGHLAAYAGLAPVTRRSGSSIRGEHPSRAGNKHLKRALFLSAFAALHDPDSRAYYDRKRAAGKKHNAAIICLARRRVDVLHAMLRNGTFYQPRTPAAA

SEQ ID NO: 369543 - protein, 428 aa, unidentified
MKYNTQNAKIASITEKTLIVGIDVGSGTHFARAFDWRNYEYTKKPFEFSNSEEGFQAFKAWMEELLVKQGKTAVIPGMEPTGHYWFALGKLLQDNGMKPVHVNPHHVKKSKELDDNNPNKNDRKDPKTIAGLVNEGRFSYPYIPAGIYAEIRSLSNLRFQAQEELTRAKNRIARWFSIYFPEYKDVYRDLKAASGRMVLQAAPLPEDICKLGVEGVNRIWREAKLRGVGMKRAKTLVTAAEHSIGSKEAPEAARIELRNLLNDMDVYATRVEELLGTIEEKLKEIPYIDKLMAIKGVGLLTVSGFIAEVGDIKRFDDPKQLQKLAGYAIVANESGKHKGESRISYRGRKRLRYVLYEAALSLVGRNPEFRRIYEYYKTRKDNPLKKMQALIAVACKVIRVFYVILKKGVDYDPEKMMGDIRRPEHQAA

SEQ ID NO: 369544 - protein, 401 aa, unidentified
MKRLSGGIDIGCESHHIIILDEEDNFLYNQKVAHKLNEFSENIKLFKQIEKKEGGKLSFALEGKNGYSTPLDRILLDQGFTLYNVDNLKLKRFREAFAGEWRDDERDSLMLSKMLKLKDYINSERERVFIKIEKPSLITESLKLLSRHQQTLIDEKIRLINRLGKKLLEVCPQILELGKLKNKKIIAILAKYPDFSKYKRITLKSLLKIKGIGKKGAFFLLKRLNNIEYMPGLTDIYKTIILSYAKRIVQLQREIEDIDKKLDEIGKKNKEVNHLKTIPGVATKLASRFIGEIGNINRFPSEKQLAVYCGVACVDNNSGKVTKARAVYKANKICKKTLITMAGCSIRFSPQCKAYYLKKRAEGKSHNHTLRCLARQLIKVIYRMLTEDREYIVRKDLKKVA

SEQ ID NO: 369545 - protein, 341 aa, unidentified
MKNKSFIGIDISKNVIDVSIFCEETPIKDFSHDVFNNSRKGFGEMCTWLKQNHVVLSNSLFGMEFTGSYSMELEKFLNTRNYQFCMLSTHVVKHYPMGPKDKSDKIDSAKIADFLYRYNGTECVKPYNMPDKTMQRLKALMNERKFLVEQRTCFMNRRQLCITKEDAQLYDGYIKKFSRDIENIELEEQKLLATDDSLLSTYKNLLTIPGIGFVNAINVIVITRNFTAFETARQYASYVGVAPHFRTSGTSVKWRPRPSARCDGQAKADLSMAATVVVQYDAELQSFYNRKLGGKQDSDTKRKALNAVKFKLVLRMFAIGKQNRKWEPLDSKSSNEKLAIS

SEQ ID NO: 369546 - protein, 350 aa, unidentified
MNHKEVSMERYYYIGLDIHKRVIAYCMKSIDGCLVDQGKINADRQSLEIWVKSLPGAWIGAMEATMFTGWVYDFLKPYAIALKVAHPEMLKAITAAKKKNDRADAEKIADLLRVDLLPECYMLSEEIRELRRILRYRTHIVRTAVKMQNKMSGLLMEVGVTYSKRRLHGKKYFCELLERVDEIPPSVKELLQLSRSGYEMFCSFQKRLVTTLRTNQLIRDRVNRLMTIPGVGEITALTWVLEMGDSRRFSSIRKAVSYCGLCSAQKESAGKEQRGPISKKRNKHLQTILIEAAKLAPHWNQHLAIIHERELKKGNRNRATLAVARKLVAYMPAVDNNQTDFKITSEIQAA

SEQ ID NO: 369547 - protein, 326 aa, unidentified
MEHELHYIGIDTAKEKLDVDVLRPDGRHRTKKFANTTKGHDELVSWLKGHKIDHAHICIEATGTYMEPVAECLYDAGYIVSVINPALGKAFAQSEGLRNKTDTVDARMLAEFCRQKSPAAWEAPHPLERALRALVVRHQALTDMHTQELNRTETAREVQRPSIDAHLLWLEAELKRLEKQIKDLTDDDPDMKHRRKLLESIPGIGEKTSAVLLAYIGLKDRFAHARQFAAFAGLTPRRYESGSSVRGASRMSKAGHVSLRRALYMPAMVATSKTEWGRAFRDRLAANGKKGKVILGAMMRKLAQVAYGVLKSGVPFNASRHNPVAA

SEQ ID NO: 369548 - protein, 320 aa, unidentified
MAKPIEPIRIGIDVSKAELVIARSDSKSLEKIANTPRAISRWLKTLPGGTPLAFEATGAYHRTLASLAHQAGFALYLLDGYRLNRYRDGIGNRAKTDPADARLILRYLSKELSELKPWVPPHEAFYRIQSLLRRRASLVHTRVALTQSLGDVPELKNASKRLSNNIKDIERLIERCLKEAMAEVGWRPDAQRCKAIEGIGDLTSVALANTFHRGEFKSSDAFIAYLGMDVRVRDSGKQVGRRKLTKKGDPELRRLLYNAAMSARRTKAWAGQCETYLSQGLKTTQALVKLARKLARIAFALMKNQSTYRPKVPVTCCAVP

SEQ ID NO: 369549 - protein, 342 aa, unidentified
MECYVGLDVSLKQTSICVVDRTGSVVREGVVDSNPEAISAFVRSKAPNTVRIGLETGPTSTWLWTELKRLGLPVICIDARHAKAVLKMQINKSDRNDAIGIARIMQTGWFKEVHVKDIDSHSVRALLASRALLVKIKRDLENHVRGLLKNLGLVIGRAKFNVFAMRAEELIEGRPELIAAIRPLLEARNAVEQQVSELDRKVMKLARHDAQVRRFMTAPGVGPITALAFKATIDDPARFARSRSVGAYVGLTSRRHASGEVDWTGRISKCGDAMLRSYLFEAAGVLLTRVPKWSAVKAWGVRLAKRNGLRKAKVAVARKLAVILHRMWIEGTEFNWSKEIAA

SEQ ID NO: 369550 - protein, 347 aa, unidentified
MVIVGIDAHKRSHTAVAVDEAGRKLGQHTSGTTSEDHLALLAWAEQFGTERLWAVEDCRHLSRRLERDLLGAGEPIVRVPTKLMARERNSARSYGKSDPIDALAVARAAVREPDLPKAQLDGPARTVRLLIDHREHLVAERTRVINRLRWHLHELDPGNEPPARTLWRPKHLTAVSAQLDQLDGVVARLARALVERCRQLTEQIHVLDDELEPLVKHLAPALLDLCGCSTLTAAKILGETADVRRFRSRHAFARHNGTAPLPVWSSNHARHRLSRTGNRQLNTAIHRIAITQARHHEPARQLLQRRRNGGKNKAESIRILKRRLSDVVYQALRADARPSPPSRLKAA

SEQ ID NO: 369551 - protein, 344 aa, unidentified
MQITTIGLDLAKSVFQVHGIDAVGQVVVRKSLRRMQMLPFFSKLRPCLIGIEACGTSHYWARKLIELGHEVRLMPPAYVKPYVKRGKTDAADAEAVCEAVTRPTMRFVPVKSPEQQAALSIHRTRDLLVKQRTQLINMLRGLLAEFGVGIPKGLERALLMARQVIDGKAPEVPIEAARIATTLSQQALDIHARLREIDRDLAIWLRGNDIARRLMTIPGIGPVGATALAASVTDPHQFRSGRQFAAWLGLTPLQKSSGGKERLGRISKMGDKYLRKLLIVGMTSLVRRAKYAPGKVDPRLADLLARKPTRVATVAMANKTARVIWAIMARGETYRAGHRPALAA

SEQ ID NO: 369552 - protein, 350 aa, unidentified
MLIIGCDYHPGFQQIAYVDTETGEMQERRLGHRQEAEEFYRALKQQQIRVRVGMEASGQARWFERLLAELEFELWIGDAAKIRTKRVRKHKTDRQDAQLILSLLLENRFPRIWVASWENRDLRQLLWHRHRMVQMRTRLMNQLQAVALNEGIRRKKGLWREAGRKQLETVALAPWASRRRRDLLELLDRLNPTITDLTQLIEQEVEKYPTAQRLMTHPGVGALTALAFVLIIGEAERFECGKQIAAYLGLVPEEDSSGESRRLGHISKQGSGLMRFFLVEAAQVTVRSDPEWRNKFFHLAMRRGRKIAKVAMARRLAVRLYWMWRKQWDYEQLKKFGPHAGQPGTGVGVQ

SEQ ID NO: 369553 - protein, 347 aa, unidentified
MDTIGVDLHKRETQLCIGQVDGTITEQRIVTSRERFTAVLGHRPPARILVEASTESEWVACHLESLGHEVIVADPNYAPMYATRSRRVKTDKRDARTLMEACRAGTYRPAHRLSAARRHVRAELAVRDAVVRTRTRYVALAKALVRRDGLRVPSSTAERVGAHLEGLAVSPALAAELAPLLTLLPPLNASIAAADQRLAELEHTDPSVALLMTAPGIGAVTASALVATIDDVQRFASAHQFEAYLGLVPGERSSGELRRIGPITKAGNRRARWLLVEAAWRILRSKDAAGAPLRGWARPIVARRGSRIAVVAVARRLAGILYAMWRDGAPYDAGKIRRPRARQSPAA

SEQ ID NO: 369554 - protein, 382 aa, unidentified
MALPESEHYVGIDWGSTEHAVCVLDGAGRAKSEFTVTHTAVGFEQLVRRLARFGDAEDVPVAIERPDGRLVDLLLEAGHPVVPVKSNAIKAWRDAEVLSGAKSDPGDAMVIAEYLRLRHHRLSAARPFSDETKALRTVVRTRDDVVRLRVMATNMLSALLDAFWPGAKSLFADVESPIALEFLTRYPTPASAASLGEKRMAAFCTKHGYSGRRSPEDLVRRLRRAPSGVADGHHSEAGRDAVTALVAVLKTLSTVKKDLDRSVTSHLSQHPDGRVFTSLPRAGQVNAAQILAEWGDSRTAYDGPDSIAAFAGVAPVTKASGRMRGVSYRWACSKRFRQAITTFADNSRHASPWAADIYERARKRGMDHPPMPSGSWPAPGYV

SEQ ID NO: 369555 - protein, 315 aa, unidentified
MSVTKQVVGIDVSKHHVDVCVRPGATRSRVATRDLVAWAQEMAGKNINLAVLEATGKYERPVFDALCEAGIPTALVNPRQIRDFARADGTLAKTDRLDAETIARYGEVIEPTACVPRQARQRRLEEFVERRDQLIEARKAEKNRLDKTQAIKVLDEIEDHIERLTEKIKMYEDEISDLIQAETEKANAVSLLQTMPGVGFITAAVLITRVPELGTIGRRKIASLVGVAPFSRDSGNYRGNRTTWGGRKKARRTLFMAAFTAMRSKSSLGAFYKSLKDQGKPSKKAMVALMRKMLIKLNAMLRTGTAFEDTATATT

SEQ ID NO: 369556 - protein, 341 aa, unidentified
MRRFIGVDLHKNSFTVCYMRKDGERDLKTFKVSPADVEAFKATITKQDEVAVESTGNTGYFAREIKESVSRVRIINPIQFKIISESVKKTDEHDAITIARYLSKGLIPEVRMRSKEEAKLASLIGTRDKFVKLRTTLKNKIHNILNASGIVTTKEMFSGDKSLDKLLSMGLDQADLFEIRIIVDQIKSLNKSIDEINRELTDRGKKLPGHKNLTSITGIGDLSATILLNTIGNVDDFGDDKKLAAYFGIVPRVAVSNDTSHYGKITKRGNKIARTALVQSTLIAIRYNHYLRRFYFKLKAKKGSGKAIIATARKLLTIVYRTLKNDWVFEDFNKFKLAVTV

SEQ ID NO: 369557 - protein, 342 aa, unidentified
MTCYVGLDVSTKETAICVVDEAGARVWEGKSRTDPDVIADVLARKAAGAVKVGIETGPMTVWLWHALAGHGLPVVCLHARHAAAALKLQMNKTDRNDAFGLARLVRSGWYRPVAVRSMATHRLRALLITRDQLVGMSTALINKIRGLAKTFGILVGPGKGGTFERRVRSTLPDDPVVAALFESLLTMLGTLRERQRDIARQLGRVARQSGVCRLLMTMPGVGPLTAVSFMTTIEDPHRFRRSQDVGAYLGLTPRRYQSGEVDINGRISKCGDRLTRKLLFEAANVMLSRTSQPLALKDWGAAVGRRSGFWKARVALARKLAVILHRMWLDGRSFEREANTMA

SEQ ID NO: 369558 - protein, 463 aa, unidentified
MARKNKGKKHKKPVRSLKTIQPDAAGIDLGSREHWVAGPPLKDDTPNVERFGTTTPELLRLANWLKEQGVKTVAMESTGVYWIPLFEILDSRGFEVILANARQVSHVPGRKTDMLDCQWLQLLHACGLLRGSFRPSDDICRLRALIRERNTMIDQRSDWVRRIQKSLDQMNVCVHHAVSDITGVTGMAMIRAIVNGERDPRTLAQMRDRRCQKSEEQIANELTGNWRAQHLFNLRQALKMYDQFCEVVAEYDAEILAYIKSLQPGVDDDGSLPPPASKSKARNIAKKAQEPMRQALYQLTGFDLTTIDGIGVDTAAEVISELGADFSSFPDEAHFVSYLRLAPNLSISAGKKVPSKLKGTTTSRVAAALRMSALAVRNSKTALGAFYRRISRRKGASVAVFATARKLAQIIYRLVCHGQAYINIGAKAYEAQFNNRRIKYYTKALKDLGYKVKPLAVAESLTA

SEQ ID NO: 369559 - protein, 321 aa, unidentified
MNKNTEFFGIDISKDVFDVFSLEMGHNQFSNNEKGFKQFIKKLSKGSLVVMEATGYYHYCLAQYLYEKGYVVSVVNPLSVKRFIQMKLSKVKTDKSDAKSICEYARNNEVPLYTAKDKSQAECLQLLRLMDTYVKHRTAMKNKLDGEKVLGIPSKAVYRSLSRTGKHLNKELVLLEARLIALVKEEQQEQLRLLKTIPGIGEKAAILLVVFTDGFSKFENSKQLCCYAGITPTIRQSGSSVRGRSRISKIGNKKLRNQLFLSSFTACQYNKACRELYERIVDQGKSKKLALLAVCNKLLKQSFAIAKSGMPYNENFVSKLV

SEQ ID NO: 369560 - protein, 346 aa, unidentified
MEQIIRIGMDTSKHIFQLHGVDAAEQPVLRKRLRRKEVLAFFAKLPPTVIGMEACGASHYWARELGRLGHEVKLIAPQHVKPYVKRNKNDGRDAEGTCEAMSRPTMRFVPVKTAEQQAALMLAGIREALIARRTQLSNTIRGYAAEFGLVAAKGLDKIEPLLAQIAQDENLPTLARELFAMQGHQYAQLQTELKVIEAKLKAWHRANAASRRLAQIPGLGPIGATALVMKTPDPHAFSSGRRFAAWLGLTPKDHSTAGKTRLGKITRAGDEVLRRLLVVGATAVIQQVRNGRGRPSPWLLALLKRKPPKLAAVALANKIARIAWKLMTTGESYNGARMPGASAFAA

SEQ ID NO: 369561 - protein, 359 aa, unidentified
MQTQRKELNFEGQNIFVGIDVHLKSWNVSIFTEDLFHKTFKQPANAATLSTYLKLNFPNAIYHSVYEAGFSGLHAHYELTNLGIHNIVTNPADVPTTDKEKRRKTDKVDSNKLARSLRSNDLKGIYTPSQDILEDRSFVRVRSSIVKDQSRLKNRLKSMLYFYGIEFPVEFQKSTTHWSKRFMVWLKTVQLKSHSGNMALAMLIKEAEQLRALLLEVNQELKLMSLSEKYAKNMEFMRSVPGIGLVMGMQFMSEIETIHRFENTDKFAGMIGIVPDCHSSGDNDQIGEITPRGNFYLRSALIESSWIAVRIDPALSRAFSEYCKRMEPNNAIIRIARKLSNRIYFVLKNEKKYETRIVK

SEQ ID NO: 369562 - protein, 344 aa, unidentified
MSIVGGFDIHRKQITFDYLEVETGQVWCGQIAPADRAQLAGWLERFAGRGDVEFAVEGCTGWRYVAEELTRAGVVAHLAEPADTAALRGPKRHAKTDRADARHLRQVLADRRVPECWIPPGQVLECRALLGLYRDLRVEHTAWVQRIHAVLFHQGVAPVGDLRTVQGRDALRVAAATHLSAAGQVQIATALDLLATLDEHLDAVHRRLVHAARHLAGARVLTERLYGVGPVTALALTCWLGGAGRFSSARKAVRFAGLDVTVYSTGGKRGPGHLSRQGPAVLRWCLYEAGKAHARRTATDHGYYAQVKDRLDGKRAALSEARKIVRHACHILTELGDDALTITN

SEQ ID NO: 369563 - protein, 377 aa, unidentified
MEYCTTIGVDVSDRTSKICVMTKTPAGERRIVKETTCATTRAGFAECLAKFDRGWPVAFETGTHCRWMERHIRSLGFRVIVANPAKARISGDPMSKNDRNDARGLARLALADTSLLFPVRLRSESCQRMLRLHESRQLLMRMRTSAVCQIRSFAKSMGFRLPDVSPERFHELDRSGWPGDFERTVWPMVGAVKTINQKIAAYDSLIEDLAEEPGFKAMVCRAMEVYGVGILGATALVAAIDCDPGRCEHARDVGPYLGTTPRTFQSGESDPQLGATKAGNDLVRRVLVECANVVMKSNAKDTDLKLKGLRIGARGGKIARKKAKLAVARGLAVTVIALLKDPSRKYVPLSDAGRAGFERYRAEQAGLPERSGRAAAV

SEQ ID NO: 369564 - protein, 450 aa, unidentified
MPIKRNKVAPLPVIEPNAAGIDVGATQIFVAVPGDRDPEPVRCFETFTVELEKLADWLQQCRIQTVAMESTGVYWIPLFQILEKRKIDVRLVNAYHVRNVPGRKTDVEDCQWIQHLHSVGLLRGSFRPDDEICSIRSLWRHRENLIQLATVHLQHMQKALDQMNLQIHHVISDLSGTTGLAIIDAILAGERDPQILAKLRDWRVKASEETIMKSLVGDYRQEHLFVLRQSLEGYRRYQKMIQDLDEEVKRRMVRLPSMIDPAVKPLRKERNPRKKPRRTEPLDLRLELYRAFGVDLTQVPGINPLTAQVLLTEIGPTLSRFPTAAAFCSWLRLCPEPKISGGQVLSSRTRPTKNRAALALRLAAQALHKSQTYLGDYFRRMKARLGPAKAITAVAHKLARIVYHLITNQLDYDATVFQDQERRVMERKLSRVLSQARELGLHLAPEQSVP

SEQ ID NO: 369565 - protein, 342 aa, unidentified
MTTYHIGADVDSRITELAVLGGRVIKYFTVPTTIPPLLEVLKSLPSRKVLVMEEGPMADWLCRSLRPVVDEMVICDPRRNKLICQDGDKTNRIDAKKLAELSRAGMLRPVYHSDSQDRICLKQWVSLYLDRVAQAVREINKIRARCRMWGIRPARGALRNAAVRDPWLKTLDAGLAGQLRLLFLAFDAMSEIVSRCRKELARRAKKYEIVAHWQEMPGVGLIRAVAFLAYMDTPWRFASRKKVWRYCGVGLQRFASGTDKWGREKVGSLRLAWAVNKRLKNVVMGATMSAINQGDNVIAQGYKERIAKGMTPGNARHTAARKQLDRMMAIWKTGSTYSPDLA

SEQ ID NO: 369566 - protein, 342 aa, unidentified
MTLYIGVDIHARQQTLSYLDTNDGTTGQVELQHERDDIKGFYSKFQGEVIVGIEACGYTNWFEELIEQLGHKLLVGDAAEIRRLARRRQKNDRRDADLLLDLLVHNEFPALFRYSKESREVLRQLRYRHKLVKLRTMVANTLHALAINAGLSLRAKLLTKGGRQQLRALPLSAISQQQRDELLSLADELTRRIQAVEQWLQTQAQSDPRVLRLQTHPGVGLLTSLCLVHTLGDLSRFASTRKVAAYVGFDPMEDSSAERKAYGGISKAGSRLLRYLLIEAGQTAAKDDEHLKQFYRRLRPRRGKARAKVAVGRKLLIRCFIMGRAEIDYAEFLRHGQKEEAE

SEQ ID NO: 369567 - protein, 413 aa, unidentified
MEHKTITAVGIDVSKGKSTVAVRRPGGEVVLTPFQVEHDAAGLSGLVRTLQNLDGDIRIVMEHTGMYWRPIALALKEAGFFVSVVNAILIHDFSDNSLRKVKTDKADSMKIANYALSFWAELRDYSPEDETRQMLKMQNRLYLRTKKSSVVLRNGLISLLDQTFPGVNTLFDSQPKRSNGHFKWVDFVKRFWHKDCVADVSLAAFSDAYRKWCTRSGYRFSQSDAERLHAAARNSVATFPKNDSTKLLITQAVDSLNAVYDALYILRGEMLRLASLLPEFDVVMEMQGAGEVTGPQLMAEIGDVRRFTHKGSLVAFAGMDAPPFQSGTFDSKSRRISKRGSPHLRKTLFVVASTILQHSDPANPIFQFMDKKRAEGKHFYVYTVAGAAKFLRIYYARVKAHLMALDAGTSTAA

SEQ ID NO: 369568 - protein, 352 aa, unidentified
MWIIGCDLHTRYQQIAALNQATGELRELRLEHEGDAVRKFYAALPAGAIVGIETTGYTQWFQSLLAELHHELQVGAAAEIRAASIRQQKTDARDAQLLLQLLLEKRFPRIWRPSPEDREIRRLLWHRVKMVRMRTMLSNQLQALALGQGVRCGKKLWTHRGQHQLANLPLGRFSSEQRRDLLGLTQRLDQRIATLNREVDRQAAQRPDAVRLQQQDGVGPLTALAFVLTLGPAARFRRSKQVVSYLGLNPREYSSGGRQRLGAISKQGNTLTRWLLVEAAQTAARRDPELYRVYLRLKQRRGARIAKVAIARKLAVRLYWKLRTPEPEANAQWVGPQSSPCTSMVKETSSHS

SEQ ID NO: 369569 - protein, 415 aa, unidentified
MLLANTALYVGTDISEKVNRTRFYDAGGKEIGTRLESVNDLPGSCELAKQALRRAALSGAGEIMWGLEATNLFWWHLATFLTTNPELLARGLKCYTFNPRQVKKFKESYPDIGKDDWTDAMVIADRLRFGRLPAECYLDERYQPLQRLTRYSRHLVRQLVREKNLALSYVYLKLSAYSIEKPLSDTFGAPSQEILEGYLTPDEIVAAPLEDLAALVKEHSRGRVAEPEEVARVVKQAANRSYQLPKAMVEPVNLILSSSLTTLRTLKGQLRPIEKAIATELAATPPQTLATIPGLGPVLSAGIVSEIGDIGRFEREESLAKFCGLTWRRHQSGEFEGEQRPLTKTGNAYLRYYMVEAANSVRMSCPEFGSYYQKKFREATRHKHRRALVLTARKLVRLVPSMVRSGRIYRPPATR

SEQ ID NO: 369570 - protein, 315 aa, unidentified
MTASPVVGVDVAKDRLDVAVRPSGETWSEANDDAGVRALVARLRPLGPALIVCEATGGFERAAIAALAAAGFPVVVANPRQVRDFARATGQLAKTDQLDAAILALFGERVRPTPRPLPDAAAQLLDAVLTRRRQLLEMLVAEKNRLGFAPKPLHRGIQAHIRWLERQLDDVTKELAGLIEASPVWRAKDDLLQSVPGVGPIVSSTLLGELPELGTLSHKQIAALVGVAPLARDSGTLRGKRMVWGGRASVRTALFMAAMCGRRWNPTLKVFYDRLKAAGKPTKVALIACARKLLTILNAMMRDQSRWTSNVQYSC

SEQ ID NO: 369571 - protein, 402 aa, unidentified
MNAVGIDVSKGKSMVAIMRPFGEIVSTPFEIKHTSSDINSLVKLIKSIEGESRIVMEHTGRYYEVLAHQLSEANLFVSAINPKLIKDFDNDSLRKVKTDKADSVKIARYALDKWQNLKQYSVMDELRNQLKTMNRQFGFYMKHKTAMKNNLIGILDQTYPGVNTYFDSPARSDGSQKWVDFASTYWHVDCVRKMSINAFIDHYENWCKRKKYNFSKSKAEEIYGKAKELVPVLPKDDITKLIIKQAVDQLNSASITVESLRTLVNETASKLPEYPVVMAMKGVGTSLGPQLMAEIGDVSRFTHKGAITAFAGVDPGVNESGSYEQKSVPTSKRGSSDLRKTLFQVMDVLIKTHPQDDPVYQFLDKKRAQKKPYYVYMTAGANKFLRIYYGRVKEYLASLPES

SEQ ID NO: 369572 - protein, 470 aa, unidentified
MSKGSGTTRGDRRRNARRARLRQVLPRDGAVIGIDLAEDKQAIAVVDHDVRVLARKTVRVKAFRLGEALDWAVGQARAKGFTHVTVACEPTGPRWLQVQRLCAERGLPLVCIQPLMSHIAREQQDYTTHKTDEADCVLIARLAVELHCYLPEQLDETWAHLRHLGRRRAQLITAATASAQRIRDFLSVAWPAVTETCAQPLESVTWLAALQVVTARCGADPGRLAAMGQEAFTALVRGAVPGWGGKKGWGTICGRIFAALTSTEGVVVSSRRGLLRRCADELGDLQRARAQLRAVEADMVAVLAELGLSRLADIPALSAVGAAAILAETGDPRRYDSSSSLVKHAGMSPSDNASGAFYGEAHISRRGRPGLRLAVWRAVWPMLRYNPVMAAKYAAMTSAADDAAQAAASQADAGSRQVTAAAAAARARRARARVACAASLLRWIYSMVVHDSSWDPGVASGTASCPAEAA

SEQ ID NO: 369573 - protein, 334 aa, unidentified
MDKITTVGIDLAKSVFSLHGVDAAGQVALRRTVRREQLVELVAGLAPCVIGMEACSGAHEWARRFQAFGHTVRLMAPKFVVPYRKSGKNDGNDAEAICEAVTRPSMRFVPVKSLEQQALLAMHRVRQGFIVERTAIINRLRGLMSEFGVVLPLRSITVRRQAAEAAEALPVLARRAIDDLLEQLRELDGRIDRYDREIEAQARLSDAARRLMQIRGIGPTTALAIVATVGNAREFKNGRQFAAWIGLVPGQYSTGGRTRLGHISKRGDAYLRNLLVQGARSVLNTAGAHQDRMSRWARELQPRRGYYRTLVAIANKNARIAWALLARNEDLRAT

SEQ ID NO: 369574 - protein, 341 aa, unidentified
MKLYGGIDLHSNNSVFNLIDENANVVLKKRINNNLEAIILLLEPYYDAVEGLVVESTYNWYWLVDGLMDAGFKVHLANTAAIQQYSGLKYGDDDSDANWLANMLRLGILPEGYIYPKEERMIRDLLRKRLQLVQQRTQNLLSMQGLYARHLNMKLNSDQVKRLSEKQLMIDFSDLNVRLAVNANLVMLLCLTKQIKQIERTLKKQLKLRTEFVNLTTIDGIGLILALTIMLETGDISRFNKVGQYASYCRCVNGGRYSNGKMKSKTNTKNGNKYLAWAFIEAANFAIRFNDTVKRFYQRKLAKKSIVIARKTVAHKLARACYYVMRDQVEFDVNKAFGYSK

SEQ ID NO: 369575 - protein, 421 aa, unidentified
MRGLRGNRVKTVKEGTLIATVDIGLTSNTGYCTTLDGRGTKPFRFDNTKEGFEKFWCLTVASKNRFGCDEVLVGYESTGPYAEPLVHYLANKQVKIVQVNPMHTKKMKEVHDNSPLKTDDKDPRVIADIIRLGHALTVVVPEGDAAYLRRLNNARERHVGEQTALLNQLQQLVFLIFPEFKTVLKNMKGKTAQHILKRYTTPERIGILSKEALGEEMRKRSRGKFGIKEAEALIGLARETVGIQEGLDGIFMDIRHILMQLEAEGRFISEIEAEMEATLERIPCSARLLSIKGLGTVSVAGLIGEVGDFSKFSTQSEIMKLAGLDLYEISSGKKRGQRRISKRGRGLLRKILFYAGIQMIRKNGIMYDYYARLTGRGMERMRALIAVSRKLLRIIHAIVRDNRDYVGQYHAPDRRVIKVAA

SEQ ID NO: 369576 - protein, 420 aa, unidentified
MKAFDIDDFAALVGIDWADKKHDVCEHVIGTRKYQYSIILSQPESLHDWAMSLKKRYPGQSIAVACELTKGPLIYALSKYNHLTLFSINPSTVAKYRKAFSHSGAKNDPSDAFIQTEILEQHMNKLDVIRPDSVNVRALAQLLEYRRKVVQDKVDLTNRITATLKNYYPQVLDWFKEKDTMLFCGFLQKWPSLEAVKKARKQTIMNFLNRHHSRYPAVNEKRVEEIKSAFALTDDRGVIEPNQIMIEVLVPQLKCLLESIERLDKEIKQRYKKQNERKIFDSLPGAGPQLAPRIMVAFGSDRSRYQSANDLQKYAGIAPVIEQSGQKKWTHWRYSCPKFLRQTFVEWAGQSVRYSFWARAYYEQQLSKGKPHNTIIRSLAFKWIRIVFKCWQTNTPYDESKYLKALKRQGSPLLKFAVDS

SEQ ID NO: 369577 - protein, 340 aa, unidentified
MKLYGAIDLHSTNNVTVVIDEQDRVVYQKRLPNDLTLILMELSVYQTELQGIVVESTYNWYWLVDGLMEQGYKVHLANTAAIQQYEGLKYTDDHSDARWLAHVLRLGVLPEGYIYPRADRPVRDLLRKRSQLVRQRTTNLLSIQNLVTRNTGESLSPNQIKGLDVQQVDELLPNGDLALAVKANLSVMCCADEQTEILERTVRDRIKLRPEFSFLKTVPGIGQILALTIMLETGDIRRFPSVGNFASYCRCVGSQKVSNGKRKGKGNTKNGNKYLAWAFVEAANFAIRFNSKIKSFYQRKKAKTQGVVAIKAVAHKLCRACYYIMRDRVAFDLIKAFGQK

SEQ ID NO: 369578 - protein, 404 aa, unidentified
MEVVHVRCAGLDVHKATVVASVRVPGSRRGERHSETKTFATTARGLTELAQWLIGHGVTDVAMESTSVYWRPVYAVLENTVHVILVNARHVKMVPGRKTDVRDSEWLAQLLECGLLRASFVPPPPIRDLRDLTRLRKTLIRERGHHVNRIEKTLELAHIKVSGVVTDLMGKTGRAILQALSAGSDDPDQLAEYAQGLLRKKRAALREALVGRLTPHYAFLLQQHLALIEALDTHIATLDARIDEAAALAQTMPGVAGRAAQAILAETGVDMTPFPTAAHLASWARLCPGNHESAGKRQPTTTGKGATWLRATLQQVAWAAIRTKQSYYRALYHRLKARGGAKKAIVAVQHALIVALWHMLKHRVVHHDLGADYFERRDPARLRRHHVRRLEQLGYDVVLVDKAA

SEQ ID NO: 369579 - protein, 350 aa, unidentified
MDHIGIDVHKKESQIYILAEDGEIIERRIRTEGERFAAVLGARPRARILIEASTDSEWVARCLEALGHEVIVADPNFAPMYATRSRKVKTDRRDARALAEACLLGACRPAHRLSDAQRHVRGRLGVRDALVRTRTRYIALIRALLRQHGYRVASGSAEGFTQRVRDLPLPGRLLSVVAPLLAVMRPLNQQLAYSDATIEHLAAQDPRVPRLRSVPCIGPVTAAAFLAAVDDAQRFRHAHQLEAYLGLVPREYSSGETQRRGPITKAGHSRTRWLLIQAAVSILRRHPPLAEELRTWALRIAARRGKQVAVVARARRLAGILYALLRDGSVFAPHHVRAPRPTTAAALVNM

SEQ ID NO: 369580 - protein, 352 aa, unidentified
MPKRTRVVIGGVDTHGRAHHAAVIDQQGRLLGDREFPADRAGYRQLLGWLRRHGNPDTVGVEGTGSYGAGLTRYLLDQHVAVVEVDRPDRRTRRQRGKSDPIDAEAAARAVLAGTASAPAKRRDGVVEAIRALRAVRSGAIKARTAAINQLKGLLVSAPAPLREDLDQLSVAALVATCARLRPDEAALADPVQASKAALRAVAWRIHQLDEEIGLADQRLAKLVGRAAPRLLQLHAIGVDHAGQLLTTAGDNPERLRGEAAFAHLCGTAPVPASSGKTHRHRLHRGGDRDANRALHLAVVVRMRWCPRTRAYAERRTRDGLSKPEIMRCVKRYLVREVYHALVADFEALNAT

SEQ ID NO: 369581 - protein, 365 aa, unidentified
MQTVNRRETLFVGIDVHKDTHTAVALSPFGEKVFEMVVGNEVKDFISLIEKTKVEAEKSGLVPSFGLEDVHSWGERLSSFLAEEGLPVVAVAPILVDHRRQKATHPEKNDSLDAQGVAQVMIQRIDSLPVYKLTEEAQKAKQIRELSLEREWLVKERARLKNQLHILLHRIHNTGYRSKFKDPFSKKALRYWMRSVPKDAYAILEQRMKRAVRRLLDLREEIQEIEDELETMMKENGQTLSTASGCGTVIAAEIIGEIGDFNRFHSPGSLAKYAGCAPREHSSGKTIRWRKTRSGNRRLNRSFHRMALSQISRSGNDAARAYFKRKVSEGKTKAQALVCLRRQLVNVVWMMMRHKTEYVYPQENV

SEQ ID NO: 369582 - protein, 340 aa, unidentified
MRNVSTIGLDLAKNVFQAHCADAAGAVKFRKKLRRAQVLEFFAAQPPCTVAMEACGGSHFWGREIGKFGHRVRLIPPAYVKPFVKRQKNDAADAEAICEAAQRPTMRFVAVKSEAAQGAAVVFRTRDLLVRQRTQIINSLRGHLAEFGLIVAQGPAHVAKLIMAVQDPEQSLPEAARPILRVLVDMLGLLDQRIKLLDVAIARRAKEDEVARRLMSIPGVGPVIATAVAALAPPAETFKRGRDFAAWLGLTPLQHSTGGKQRLGATSKMGERTLRRLLIIGASSVVRWAARKGAPAGSWLASMIARKPAMLVRVALANKMARVIWALMAKGGTYRAAVVA

SEQ ID NO: 369583 - protein, 326 aa, unidentified
MQGKVLPERSAEERVYVGIDVCKDWLDVYLHPTGRSLRVANGRDGIRRLIRELSKHPVGLAVMEATGKFHRLAHRMLCAAGFAASVADPLRARLFAEATGQLAKTDRLDARLLAIFGETLRPQAMPPASQTMEALQELLRARQAASAEGVALQNRLGAAATSFLQIELKRRIKSIDIHIARLDAEIARLLDADPKLKRRHTVLMSIPGIGPVAAITLVVELSELGVCSGKAASLMAGLAPLACDSGDRNGQRRIRAGRPQVRRALYMAALAAARYNPDLAAFYKRLKAAGKKPKVALTAVMRKLVVLANILVSQDRMWQPKAPESA

SEQ ID NO: 369584 - protein, 339 aa, unidentified
MNFIGVDLHKKLITACVMNEERTIVARKTLYCDQPDQITTFFKQHQPFQVVVEATASYLWFVERVEPLAEKVVLANPKKLRVIAESTKKTDRLDAQILAEFLARDMIPRAYMPTPRQRQHRILVRHRQHLRSQMTSIRCKIRHLLADHNADRKDLFSKACGKAYLKQVALGDAERFVLRQLWSEHEHYQAQMLALTKKIKAFAAKAPQREAEARMILKTAPGVGTVTAEVILSELGDISRFKNAKAVSAYAGLVPVVKQSGGKRSRDLAISKEGSGLLRWALVEAAWRLVHTSVRWSAVFARLRKRGGNKRAIVAVARKLLCVLYAMLKTSTPYKVMAA

SEQ ID NO: 369585 - protein, 403 aa, unidentified
MQHMAGIDLGNEEHRFVVVDGDGVQLEQRRIIHSEDGLQLLVRRLLGLAVVRVALERPNGLVVDRLLEAGIAVVPVHPNQLAAARERYRSGGGKSDGFDAYVLAELARTDMHRLRVLEPDGDETRALRALTRAREDLVGQRVALANQLRAQLEAFWPGASRVFKEIDSPIALAFLERYPSPIDARGLGEKRLAGFLARHGYCGRKGASELLARLRLAPEGRTGELEAEARREIVLGLVAALRAIVEQIKLLTSQIRGAIDAHPDGQIFRSLFRDPRSVVTAAELVAEIGDRRERYDTRARLEARAGHCPVAIESGKKKVASFRWACNRRLRDAIAVLADNSRKHNPWAQKIYADAIARGCNHPHAIRILGRAWLRVIWRLWHDRTPYDPSRHGSLTRLLAVEG

SEQ ID NO: 369586 - protein, 355 aa, unidentified
MNSEKYIGLDVHQATISVAVLDSTGKLVMESILETKAATILEFFAGLRGTLSVTFEEGTWAAWLYDLLKPHVAKLVVCNPRKNALLKDGNKSDRIDAHKLAELLYLNKLSSVYHGETGVRMLRELARSYLTIVKDLTRVMCRLKAVYRSWAIPCAGRDVYYTRHRAEWLGKIKEAGVRRRAERLYQQLDMLQYLRQQARRELLAESRKHAITVKLRQIPSLGPIRSALAVALIQTPHRFRTKRQLWAYSGLALETRTSAEYCYVKGGLRRSKKQISIRGLNKDHNHDLKGLFKGAATRASVLPGPFQDFYQRSLDRGIKPTMARLTLARKIAAITLTLWKKGENFDADKLKSQAA

SEQ ID NO: 369587 - protein, 326 aa, unidentified
MLEGVNGKEDWILEESVFVGIDVSKATLDMVMRPSGSRESIPNQEAQIGELVRRLSTLPVSLLVVEATGGVERRIVRALAAAELPVIVVNPRQVRDFAKATGRLAKTDKIDAEVLAHFGEAVRPALRSLPAPASEELRALIARRRQLTEMLTAETNRLTHSAKAVGKRIVAHIRWLEVELDRVDSELDQSIQQSPIWREQEDLLKSVPGIGPIISRTLLAELPELGKLNRRQIAALVGVAPLNWDSGMMRGRRAIWGGRATVRAALYMAALVASRCNPKIREFHRRLRAGGKAPKVALVACMRKLLTILNAMIKHRTRWSVIAEAQ

SEQ ID NO: 369588 - protein, 357 aa, unidentified
MAKRTTKMVPVTIGMDLGDKYSQVCILEGDRAPRVRRVPTKTAAIAGFLSDFTSTVTVIIEAGTHSRWVSHLIKQSGHSVYVANPRNLRLLTHSHRKSDATDAELLARIGRADPKLLSPIQHRSMDAHADLLVIRARDTLVRQRTKTVNAVRGMTKTFGVSLPRCSPATFPEKVVEIIPESLQPALAPLLKVIEGLTKLIRRYDRKIVGFVEFYPELAPLTELPGVGPITAAAFLLTIEDPKRFKNSRAVGAYIGLTPRQHQSGEKDPQLRITKRGNSYLRRLLVLSAHKILQKRSADCDLKTVGLAIAARGGKNAKKRAVVALARRLAVLMHVLWRRGEVYDPHHRDKLSAVRATA

SEQ ID NO: 369589 - protein, 458 aa, unidentified
MNRKRSKPKSDRSMPMVHPNAAAIDIGATMHMAAVRADRTPEPVRSFGTFTTDLHRLVDWFTECGVETVVMESTSVYWIPIFELLDARGFAVFLVNARDAKHVPGRKTDVSDAQWLQRLHSYGLLRASFRPKGQIAELRAYVRQRERLLEYAASHIQHMQKALTEMNLQLHHVVADVTGATGLRIIRAILGGERDSKVLARLRDYRCHSGVETIEKALTGNYRAEHLFALEQALALYNAYQEKASACDARIESVLKELSISRGRNAGPLPSPRRRLHRKANGPDFDVRTALFNLLGKDLTQIDGLGSYLSLKLIAECGDDLSAWPTAKHFTSWLCLAPSNKISGGKVLSSRTRRSGSRSAALLRLAAVTVGRTDTALGAFYRRLSARIGKAKAVTATARKIAVLFYNAVCHGMEYVDPGSSYYETRYRTRVVENLHRRAKAFGFALQPLESKAGAVVS

SEQ ID NO: 369590 - protein, 395 aa, unidentified
MQVMHPVCCGIDVHQKSIVCCILDGPLTSNEPKKYQTTFGTTTKELNAALDWLLEHQVTHVFFESTGQYWIPLFNIFSDSDLELVLANPQHIKNVPGRKTDVKDAEWIAQLGRCGLINQSYIPSQEVLQLRYLTRYRLSVKQRLTQIKNHIHVILQRANIKITSYLSDIFSKTGQALLTLFIDGEVINENNVENCIHGRIKASTRQLIEAMEGKLSTVDRFLIKECMEEYKLQKKISDELNKEINEYILEHFPEEYQLLLTIPGISDNCCATILAEIGPNVDAFKTDKKLASWAGMCPGSNESAGVKKSSHTTQGNKYLKQALVMSVLSVQRAKEETFSLFYQRISSRGSKMKAIIACGHKMLRIIYKILQSHQPYNSQKALGLRQQTNALSLTI

SEQ ID NO: 369591 - protein, 351 aa, unidentified
MNVNHYIGFDVHKKSISYCVKAADGTIVEEGTLRATHLALREWAEKRREPWHGAMEATLFSGWIYDTLKPYAAELQMGHPAMMKAIGASKKKNDKLDARKTADLVRCNLLPVCYVAPREIRELRRMLRYRNLVVAQAARMKNKMSGLLMEVGAEYNKQRLHGKGYFHELLDTIEEVPESVKDLLRLSRGALEMFQTTQWQLLDRLQKQPLLAKRVTVLRSIRGVGEVLALTWALEVGDPQRFPSVGDAVSYCGLTSALDSSADKQKRGPISKQRNAHLQTVLVEAAKLAPRWNPQLAAIHAREVQRGHRNRATLEVARKLVAYLLAVDKSGKPFQIRTTPVTVEQEVQGVA

SEQ ID NO: 369592 - protein, 385 aa, unidentified
MSELNDLSRSLTSLEQDKTIIAVIEMSQSSWLVAGIIPGIERHPLKKLEPSEEELVRLLMRWRTEATKNGHTITRFAVAFEAGRDGFWLARWLRARDIETYVIHPTSVAVSREHRRAKTDRLDTGLLKRVFIGWLRGEPDHCHMAAIPTLAEEDAKRPNREREGLVRERTRIVNRMKSCLARFGIRKFNPTLRKAPERLATLGMPEGVPLPPNTLLELRRDMARLRFVMDQIKEVEEARAQRLEQAPQEKTHAMVRLIARVIGVGIETADMLVHEILSRQLRDRRAVARYAGLTGAPDESGNKRREKGLAKAGNARVRRGMIQLAWRFLVFQKDSALARWYRTRTESAGKKRKTMIVALARKLLIALWRLVTIGEVPAGVVLRAA

SEQ ID NO: 369593 - protein, 353 aa, unidentified
MIHVGIDLHSRNMTLVAINDNGKVLSEEKLTNTPSNLGRFFGHFTNPIQAVVECTSYWYWVADWCNANQIPLTLAHAKMLKAISYAKVKTDSVDARTLAELLRAGLIPEAHQCQPDRRDLRELTRARLRMIGRRSGLQSSLWQLAAKYNVLVQDVGWRYLDKLGNFLAEQLPRVAWTEAELLLDQIRRTQDHILVLEAAIEEQITFTKEVQQLKVLPGFGVVCAWTVAAEIGDITRFPSAKQFVSYCRLVPGSKDSGGKHRHRSKNKDGNRYLRIAFNQAAIIACRDYPVVKEFYKKITRRSGKHVARTVVGKELAKIVWHMLSKEEDYKGFKGRMTKVTTQTYWPQPISPGA

SEQ ID NO: 369594 - protein, 344 aa, unidentified
MYFIGVDHHKQWSVMSVLGDVGPEIKFGKVDNRGEAVRRFLGDYQPFKAVIEAGYSSYVMADLLRELGGEVTMANPGELKAIAHARIKTDKRDARTLAELLRGGLIPEVTQRAPENRRAQRVMRLRAFRVEKRTELKNKIRVLLAQQREAIRLELERREEGLFSEKGLEFLGRLELPQPDQMILEDYLESYREGQEHLRKTDGLVEKLYAELEEARRIDTVPGFATTLSVLVAVEIGDINRFVSAAHLHSYAGVIPTTHASGGRTYHGHITKAGNRWLRWAALEAVFPATIASVELRGLYSRLARHKNPNVAKVAIARRLLTIIYRVLKEKRNYIVGMKNPSAA

SEQ ID NO: 369595 - protein, 331 aa, unidentified
MKKNQIIIGIDVSKATLDCFIRQIKHHFIVENNPKGFAILIETIFKLTGCNKEDLLICFENTGKYSKMLSVFLQSQEILFVMAPALDIKKSLGITRGKNDKIDACRIANYAYEKRESLIPTNLPGEKIDKIKSLLSLREKLIKHRTAYKNGMSDLHDCFREGETSMIKDIQQRLINGLNYEIDKIEEEIENEINSDTLMKKNFELIVSVRSVGKIIGYYLIAYTENFTSFINPRSFACFCGIAPFADSSGTVTGKSRVHPYANKQLKSLLNMAALTAINIKGEYREYYNRRIAIGKNKMSTLNIVRNKIVFRVFSVVKRGTPYVDLYKFVA

SEQ ID NO: 369596 - protein, 393 aa, unidentified
MSLDHHFAEPTAIRTNLGAIFVSLELSRSTWLITSLSPGGGEKMSKHGLSAGNIAALLARLSELKQKAFARTGQSFQVIVIQEAGLDGFWIHRVLQSEGVESHVVDAASIAISRRRRRAKTDRVDGEALVRALLAYKRGEPRVCAMVRTPTPEEEDRRRLCRERKTLTNERVQHVNRIKGLLFCQGISDYEPLRRNRRQRLDELKTGGGRPLPPHLKAQITRELDRLELLLGQIEAVEIERDALLSAMKPDGMNADAVRSPPAMLINLNGIGPEIAAVLWSEGLYRSFANRKQVAAYAGLAPTPWQSGSVAREQGVSKAGNPRLRTTLLQLAWLWLRHQPQSALARWFHERVRRNGGRLRKSTIVALARKLLVALWKYVTAGVVIDGAVVRAA

SEQ ID NO: 369597 - protein, 398 aa, unidentified
MKTNSFNFFIGIDISKDKFNYAILDDSMKLINEGNLNMNTDGFNFFNKILKTYPDSFIALESTGNYHLNLLSFLSLNKYTIALINPLLIKKFIQSFSLRKTKTDKIDALIIAKYAFKNIENIHSLVPSITDDILALARTREELSKQIAKTKTQLKNHIVLLFPELTTNYNIFTDFILSILERFPSAHSIINAPEIKIKALFDNLCKRGRKPKLTYDKFIELAKNSIALYSENYEFVVKLDVQRLKFLNLQIRKITKIFLNQMEKLKKNDMDIMKSIKGISDITSAHFLVEIKNINRFENKRKLAAFAGIDPAVKQSGNSLKKGRISKKGSKSLRRYLYLMANSLIRSNDYFKNYYQKKKSQGMHHRKAIIALCNKLVRILFALLSNNQKFISSFHNSL

SEQ ID NO: 369598 - protein, 408 aa, unidentified
MSQVVIGMDPHKRTATIEVMAGDEAVAGQGRYATDAAGYAAMLAEARHWPQRMWAIEGCQGIGRHIANRLLADGEHVVDVPPKLSARTRLFATGQGRKTDATDAHSVALAATRMQGLRPAVDDQQLAVLRILADRRRSLGEDHTRMICQLHRLLLELIPGGAKKALSAAQAKALLARVRPRDAAGRARRMVAAELISDLERIHQRKKAANKELNELLKASTTTLTTLHGIGPSGAARLLVEVADVTRFPDKAHFASWNGTAPIDASSGDQVRHRLSRAGNRQINRVLHIMAVVQLRNPTEGRAYYDRKVAAGKTPMEAMRALKRRLSDIVYHQMITDARAAVTGPGGHVGTATGSSAAGLHPAAGTSEKSLPGPATSDPTPPRPARFSGRSAASPPRRTAAAVKRPFA

SEQ ID NO: 369599 - protein, 417 aa, unidentified
MTSPPETIPIEHYIGIDLHKHYVMVGGQNEQQEWILRPRNVQMSRFRDWAAKNLKPGDVVVIEATGNTWDIYDIVAPLVTKTVVAHPGKVRQIAEARVKTDKEDIKRLITLLIADIVPEVWVPPLHVRELRSLVSFRWRLTKQITMSKNRLQSVIQSFNLNPPEGKVLADKNQSWWEQQEFSELTGFQVQLDLQIVEQLEAHKALIDQKLAELSNTEPWASEIVFLMQIPGFGIIFSMIALAAIGDISRFSDPKKLVGYAGLGAGVHDSGKKHRDKSITKAGRKELRWALVEASWGAVRSDPYWKTQYEHLKKTKHPNKAIVAVARKLLVSVWHILSHREPYCHFDDDTIAYKMLIWSQRMDEKALNGMTRQQFAKYGLLRLGVGEDIIRIVKSGLPRRLAPAEEVYQLKPELRPSG

SEQ ID NO: 369600 - protein, 431 aa, unidentified
MYRELFPLRQALSLELKANLPPAVPGIDSEHLLQSYLDRLTMYVGCDVADQILTFFAVDTAGEELGHLSAANDPQGFEQVWDWLEDLRSQHGLRIILLAMESTGVYYWACWDFMAQRPNLARVLYNPRTTEHMTEVLSKKVRNELVDAYALAEQVRLGSTPEVVLSEDADLLTARFCSRAARDLAGQINRKKNQLRDLVRAYNPAIRQVFPGSKFHHQAVYALLQQYVFPDECVDAGVKAITAILEAHCRAAFDSQHAERLVALCRDTLSRPIGREQIRQRVHHLIDDITTCQKRKSFFNKTGYRLIENRPETSLLRDAIGAGPSNTLALVSEVGDVQRFKSGEHLASFLGLTTSKHISGTTVFVSKHITKQGSPNARYAAVNVALHLSQRVPKYQQMYERIKNRKPPRKGHYIALVAVARDFVTNVLYDM

SEQ ID NO: 369601 - protein, 332 aa, unidentified
MKILETIGIDVSKETLDVIIHTAGLISQFENSTKGYKMLSKWVMKNVTCPIENLLFAFEHTGLYSFPLSVFLSENGYSFIMIPGLEMKRSLGLKRGKNDKIDAKAIALYAFRRKEEVTPYQLPSEELSELRRLLSLRERLVKHRAGYQASLKENERFLKKSDNHLFFEVHKKVISELNKQIVKIEKELDDLIKRDDQMKNMYDLITSIDGVGPQTAMFMIAFTNAFTLFKDWRKFASYSGIAPFPYQSGTSIKGRTKVSHLANKKFKSLLSNCAASSILSNPEMKAYYTKRLKEGKHKMSTLNIIRNKLLARIFAVINRNTPYVNTFKYATC

SEQ ID NO: 369602 - protein, 354 aa, unidentified
MSQTLNAAIAVIGIDIGKNSFHVVGHDERGAIVLRQKWSRGQVEVRFANMPPCLIGMEACVGAHHLSRKLNGLGHDARLMPAKYVRPYSKGQKNDFRDAEAIAEAVQRPTMKFVATKTADQLDLQALHRVRERLVSQRTGIINQIRAFLLERGIAVRQGQRFLRAELPNILATPPDVLSPRMVRVIEGLAGDWRRLDERIEGLSSEIETVARQDAGCERLMSVPGIGPIISSAMVAAIGTGDAFTKGRDFAAWLGLVPKQMSTGDRTILGRISKRGNRYLRVLFVQAAWVVLIKPKIWERYGLKPWIEAAKKRLHHNVLAIALANKLARIAWSVLARGRAFEACKLDEVAIQPA

SEQ ID NO: 369603 - protein, 332 aa, unidentified
MSNCIGIDVSKTSINVHIPKSNQDLVLDNSLKGFRTFYSKLKKIYKKEIDNIIFIFEPTGSYSEALRKYCSEKNIKCFIINPKQFSNYAKALGVEVKNDIEDARVLSRALNLAKDGQVKVPVFNEDVEQIKELMSYYKFTKKQTIQQKNHLEALMSKDGNKFSIRELKKSIEESIKKEQKIIEQVQTLIDSTDEYRVAYENITSIKGIGQIAGIVLLHLFLKYPEANQRQITSLTGLNPIYKQSGTSVQSGYRIAKSGSSLYRSVLFMSVFTAVQHDKNYKSFYERLKSKGKHTTSVQIAVMRKIILTAHSLYKNNKKYDEDFNSKEDSSLE

SEQ ID NO: 369604 - protein, 370 aa, unidentified
MLNATTFIGLDVHARSIKAFGFNVITGEEFSSSFGYDHVAVSDWISSLPQPAKCVYESGVTGFDLQKKLTQDGIDCVIGAVSKMIKPAADKKKKNDRNDAKFLARMLSVGNITEVWIPDDECEAARDLVRALEDATEEVKRSKQLLSKFLLRHGLIFNEYSPTGQRKKNWTLAYWRWIKEIHFKEKTDQKTFEYYIDRVKASLEEKKRLEDLVKELTCLPRWKKRVDSIRCIKGIDIISAANLVFEADEFSRFKNARAFASWLGLTPSEYSSGESVIRGGITKAGNKHLRRILVESSWHYLYASPSAKDLTKGQSPDPLARRHANKGTRRLTERRRYLLERGVQKNKANIATARELAGWVWAVGKIVEDN

SEQ ID NO: 369605 - protein, 353 aa, unidentified
MAYLEPVRVTVGVDTHKHVHVAAARDQLGRRLGVTIAPASGAGYGELLAWARGLGEVQAWGVEGTGSYGAGLVRFLAAAGQRVLEVNRPDRQARRRLGKSDPVDADAAARTVQAGEATGIPKAQDGTVEMVRSLRVARQTAVKARTQAINAIKALLVTAPVELRERLDTLPTTSLVRQAAALDPGEVATPTAACMLAVRSLAVRYQQLGVELQLLTRELDRLTLRHAPALRELLGVGPEVAAELLVCAGDNPARLHSEAAFAALCGTSPVEASSGQTRRHRLNRGGDRHANAALHRIVIVRLRWHQPTRDYVARRTTEGKTKKEILRCLKRYIAREVFAVLHQLAQQDQPTAA

SEQ ID NO: 369606 - protein, 358 aa, unidentified
MNKLYLGVDLHKQSCWVTVLDADGHLRESRKLGTEKWELLEFFGQVEKPAAVAVEATFNWYYFLNVIEPLGLELHLVHPWKTRAIASARIKHDKLDSRVLAELLRTGFLAEAWIAPRAVREQRQLLRYRVHTVRWATRAKNSIHGILNRNGLRAPLRSAFGPQGRQFLGEVELSGTDRWEVDGQLARLDLLGQQLAELDREIRRHCRTSPLAQALETIPGIGPFIAWLLIAEIGDIQRFPSAKHLASYTGLVPSLYASGEHRWGGAITKQGSTVLRWALVQAAHRAALSPRFQAFYQRQRERHGAGKATVALARKLAVIAYYRWRQTLHEMSPLTPDRKVRERSCAGAWSEDRPLSSD

SEQ ID NO: 369607 - protein, 340 aa, unidentified
MSEVITIGIDLAKNVFQVHGVDADGAVPFRRQLRRRQVLAFFKKQPPCLVGMEACATAHYWAREIAALGHEVKLMPPRYVKPYVKRNKNDAADAEAICEAVTRPTMRFVAVKSAEQQSVLMLHRTRELLVRQRTMLVNAIRAHMAEFGVVARTGLPQVKELLAVITDEADERIPLLARTCLEGLARQLLSLEREIVGAEKRIHAWHRTNEESRRLETTPGIGPITASALASSIANPSIFKSGRSMAAWIGLVPRQNSTGGKERMGRISKQGDQYLRWLLVAGAMTVIRHAKRRGTTDPWLADIIADKPTKVAAVALANKNARIAWALLRHGGTYRRPATA

SEQ ID NO: 369608 - protein, 416 aa, unidentified
MISHLDSVDYKAFIGLDWADDKHDVCVQDEDTGKREFAVIQHNINEIESWAKGLYQRFGGQIAIAVELSKGPIIYALQHFYFFTIVPINPTTLAKYRTAFKSSKAKDDPTDAEFALELMLRYPEHFKPLELQSIQMRKLMFLVEHRRKLVDDKQRINNQIINVLKQYYPEVLEMFDHRDSQAFCAFVLRWPTCQHAKRVRISTFSKFFHVHGIYKLANIERRISIIQNATPLTDDEAVVGTHSTLAVIYAKRISEAMANIHHYDKLISDVMSELPDAVIFEGLPGAGKCLSPRLLAAFGDRKDRFNSAKEVQQYTGIAPVTQRSGKKMWVHWRWHSSKFLRQSFIEWADHSRRESYWANQNYLKQRASGSTHQVAVRALAFKWIRIVYRCWKDSKPYNEVRYLNALKERGSPLVTG

SEQ ID NO: 369609 - protein, 386 aa, unidentified
MAHSTNIPQHSIDYDQTLILAIELSNKSWVLAAQVPGLSQTKAKRTIEPEKNHLLAAIEGYRIRAATAGRSVKRVITSYEAGWCGFWLARWLMAHGIEVHIVQPSSVPVDRRMRRGKSDGIDAELLLRTLLAWLRGEPRVCSMVPIPDEADEDARRCVRERSELVSERVGLVNRIGAVLATLGADGYNPLLQSRRRRLTELRTGLGDPIPPNALAKIARLLTRLELVLAQIAELELERDAVARTDAPDQAAKMIQQLVSLRGIGVQSATVLVREAFVRRFANDKALGSYAGLTSTPYSSGSIDREQGIGKAGNRRLRTVMVELAWLWQRYQPGTSQVVWFRQRVGSTGRRVRKVMVVALARKLLIALWRFVIDGVMPEGAVTKPSI

SEQ ID NO: 369610 - protein, 410 aa, unidentified
MSHRVAGMDVHKKVLMVVVIDSQDAGWSAKRKRFGTVCSELRLLSEWLREQGVEEAVMESTAQYWKPVWYELESQMRLHLAQAFSNRAPKGRKHDFRDAERLVRRLLAGELTLSLVPTGEQRSWRTMTRMKTQLTEDQSRLHAQIESLLEEMRIKLSSVVSDLLGVSGLRILTALAAGQRDARKLAGLRDERLRASEETLVDALSGHFEPYQQQLLGFYLQRYQLIQQQIEQLHAMIGRAMEQHQQAVRRLAQVPGFGVNSAQQVIAEVGVQASTFASAAHLASWVGTCPGKEESAEKNRTSRSAKGNRYLRRILNQVAHAAVKKQGSRFQIVFRRLLPRLGYKGAIWAVAHRLCRLVWKILHHQIDYIETGSEPNPKAKQQRARKLLHALRKLGYDVTIPNLHPAGAES

SEQ ID NO: 369611 - protein, 351 aa, unidentified
MEMFIGLDVHASSTTMAVVSQTGKQLRSQVMSTSAEAIIESLKALRGELHLCLEECAQSSWLHEVLSPHVAELVVIGLGERSQGPKSDAQDAFSLANKLRLRDYKTAVFKPQSSYARLRYLSRAHRQVVSDVTRVQLRIKALLRSRGVAAKGKQLYSSEGRQPVIVALPGQARAGIEVLFQAYDALQPVRRAAERELVQELHRHAISRVLETCPGFGPIRVAEVLATVVSPQRFRTRQQFWSYCGLGIEMRSSSDWLQLPDGSWQRAPILRTRGLTRRYNRGLKAVFKGAATSMLALYGPDEPLRKNYQRQLTAGVKPNLAKLTLARKLAATLLAMWKQQQVYEAKPPATD

SEQ ID NO: 369612 - protein, 364 aa, unidentified
MAQVRSWAGLDVHAREVVAVAVDGETGELVARGLPGQTRAVVEFCAGLPGPTRVAYEAGPTGFGLARALRAAGIECVIAAPGKIERPPQDRVKTDRRDAERLVRLLMIDGLHEVRVPSDQEEALRDLVRAREDVRGDLMRARQRLGKLLLRHDIRYQEGASAWTTRHRAWLDTIELGERGAQAALSDYLGAVDALVIRRDALERAIGELVPGSPWADTIARLRCLRGIDTLSAVGLCAEIGDWRRFDRPGRLMSYLGLVPSEDSSGERRHQGSITKTGSRHARRLLVEAAWHYRRRPARGHALQRRQTDAPADVLAISWQAQQRLYRVWQRLDGERGKRRTIVAVAVARELAGFCWAITRPRPN

SEQ ID NO: 369613 - protein, 342 aa, unidentified
MKDTIIGVDLAKRVFQLHGATKTGHVEFRKKLTREQFRRFMAEHPPCVVVFEACGSASYWAREMAKLGHEAKLIAPQYVKPFVKRQKNDAADAEAIVIAARQPEMRFVAPKTEDQQARAMLFRGRERLVHQRTELVNALRAVLYEYGHVFPAGISHLKRIEALVEDPTCDLPALITAECRDLLAQIAEKTDRIDAKTKALKELAAGTDTARRLQTMPGVGPLTALAVEAFAPDMAQFKRGRDFAAWLGLVPRQHSSGGKERLGRISKAGQTDIRRLLIIGAMTRIMGRARHKIPADSWLGRMLARKPKMLVAIALANKMARQLWAMLTKNADYKDPVLAAAA

SEQ ID NO: 369614 - protein, 312 aa, unidentified
MNNVFIGIDIAKDSLDIHVAPTGDSWTSKHDAKAIQDITDRLIAYEPASIVLEATGGLEILLAASLASAGLPVAIVNPRQVRDFARAMGVLAKTDSIDAEVLALFAEKVQPECRPLPSDEDRALKELVSRRQQLVNMRTMETNRQHTIQSRQVAASIQVVIDTFNQQLDDIEREIQHRIKASPVWRAKEKLLKSVPGVGDGTATMLIAMLPELGTLNRRQIAALVGLAPMNRDSGKFRGKRMIVGGRAAVRAYLYMPMLTAIRLNPVIKQLFDRLTAAGKEFKVAITACMRKLLTILNAIMRDLRPWQPITP

SEQ ID NO: 369615 - protein, 456 aa, unidentified
MVVRPRLADWSAPLQIITLCRTRKREGRMAVFRFGGAVGRGFFEGRVAMEAIIERCCGLDVHKDIVVACVLIGPADGKARKEIRTYGTTTAQLEQLRDWLGQIGCTHVGMESTGVYWVPIYAVLEEHFELIVGNAAHMKNVPGRKTDVKDAQWIAELIRCGLVRKSYVPPKWQRALRDLTRYRRKLVEAQASERNRLQRLLETCNVKLASVATDVFGKSGREMLRALIKGDESPEQMAQLARGRLRKKLEQLVLALRGKVESHHRFMLEMQLGRVEDIEANIAVIDSKIDEAIAPHRAVMERLMTIPGVDRVVAMTVIAELGIDMNVFPTPAHAAAWAGVCPGNNESAGKRMGQQKRRGNVHLATALVQAAMAASKTKNTYFKARFWKLAGRAGTKRAAVAVAHSILNAIYHMLKGSVDYKDLGGDYLDRFLNRRSEQRLVQRLRSMGYEVRAQTA

SEQ ID NO: 369616 - protein, 353 aa, unidentified
MRIIGCDLHSRQQTLAMLNLETGEVEECVLLHEGDKVRDFYGALPRPVQVGIEATGSMQWFLELMEELQIECLVGHPAKIGAQEPRKQKHDRRDAQLLLRLLVERRFPAIWMPTAQQRDLRALLRHRHLWVRMRVRIQNALQAIALSHGLRPGAKLWNQEGQQSLRELRLAPHTRARRNELLRLYRHLQKKIERLDRQVAEVAEKRPLSRLLMTHPGVGPITALATEVYLGDATRFPDGKALSSYVGMIPAENSSGEKRRLGRLTKQGNAMLRFLGCEAVGHAVRQDVELKRFYTRKLAQKGLGKAKVAAGRKLGIRLWIMLRDQIDYHEFCRRGRQCGEAHAERPAREHSPA

SEQ ID NO: 369617 - protein, 352 aa, unidentified
MNSIDYIGFDIHKKTICFCAKAQDGRILDEGTIPARRTDLSAWAKQRRRPWWGAMEATLFTGWVYDHLKPLAQELKVAHPAMLKAIAASKKKNDKVDARKIADLLRCDLLPECYMAPSAVRELRRVLRYRNLVVRQATRMKNRIAGLLMETGTLYNKERLHGKAYFSELLGSLREIPASVIELLRLSRAQLEFFATIQKRLVKGLRADAGLRERVQRLQSIRGVGEILALTWALEIGEVQRFPSIAEAVSYCGLTSAQHNSAGQEHRGPISKQRNKHLQTILIEAAKLAPRYNPQLAAVHEGGLKRGHRNQATLAVARKLVAYLMAVDKSGKPFQVRASAGEEVSKDEQPVG

SEQ ID NO: 369618 - protein, 316 aa, unidentified
MEAAVYVGIDVSKARLDLALGPAGELLSAANDASGIAALRERLLSLAVARVVLEASGGLETALVAELGAAGLPVVVVNPRQVRDFARATGQLAKTDALDARVLALFGERLRPELRALPTEQERELKALVARRRELVEMITAERNRLARAPKVLRKEITAHIRWLEQRLMERDRDLDRMLRGSPLWREREDLLRGVPGVGPVLCATLLAELPELGRLGRREIAKLVGVAPLNRDSGTLRGKRTVWGGRGQVRAVLYMAALVAVHHNPLLKTFYQRLLNAGKPRKLALTAAMRKLLVILNAILKTHTPWSEHAPLQNC

SEQ ID NO: 369619 - protein, 376 aa, unidentified
MIFVGTDVAKDKHDCFIISSEGEVLADVFTVSNSREGFEHLLQTINTCTGIGNSKIKVGLETTGHYSYNLLGFLLDNGLTTYVINPLHTNLYRKSQSLRKTKTDRVDARTIASMLMSDVSLKPYTNIAYHNYELKSLTRYRFDKVSERAKLKTSVSRLVNILFPELEKLLPTLHTASSYALLSELPSAKHIADVHLTHLTNLLYTASKGRYNRDRAIQIRETARNSIGTYMPAKALELKHTIKLIRELDSEIDEINIAIKEIMDKIDSPIISIPGVGLNMAAMIIAKIGDFNNFDSPDKILAFSGLSPSTYQSASSIIAMLTWKNEVLDIYDMLFLMLPSSFVIGTLFSSIILQKTLGRPSVTMLLFLTLPRNWFV

SEQ ID NO: 369620 - protein, 325 aa, unidentified
MEKLYMGMDIHKEKLAGCIMNKNGEIKREHIFPSTKKALERFLLNIPSTDITIAIEACGMWRGVHQILSDMGYHVKLANPKKTHDIACKKKTDKVDARILADLLRTHYLPEVWIPDTDTLGYRDITRHKSNLTRLRLQVLGKIRGYLLRKGVKYTKLSTEETLKRLEKLDSDIKNLVHVYRFIKKEEREVVRRIKRISQNKKETMLLMTMPGIAEFSALMIIAEIGDIKRFNSPKTLVSYAGLCPGIYQSGDTTKNVRNNMVNKWLKWIIYECSGRASMLTPKFQNYYYKLKEKKGFKTARRATARKMLTIIWYMLTRNETYQAS

SEQ ID NO: 369621 - protein, 353 aa, unidentified
MYYSGIDLHKDMSLITTINENGVLLSQRKVPNHKAHIITYFNQVSPQGSDHKAVVESTANWYWLSDLLTEQGIDLTLAHAKYLKAISYAKVKTDKVDSHTLANLLRLDMVPEAHQISQDLRPIRDLMRARLSLVVKKTSCRNSIHRLLAKYNLNLPQYPKPSDFALLKSKLLPEPKLQLSILEEQLQLIVRQIKTLEQSIHPKLIPNPDIQRLLYIPGIGKILAFTIYLEVDGIERFTSVNRFFSYCRLVPGADNSNRTVKHKSSKDGNKYLKMAFMEASVRAVQYFKEIKSFHQSKARKKHKHIAKALVAQELAKITYHVLESQTDFNHMFRGVPLSRHKTTKWPRLASPGA

SEQ ID NO: 369622 - protein, 355 aa, unidentified
MNSEKYIGLDVHQATIVVAVTDSSGKLIMESILETEAATILQFFAGLRGTLAVTFEEGTWSAWLYDLLNPRVDKLVVCNPRKNALLKDGNKSDRIDARKLAELLRGNQLKPVYHGENGVRMLRELSRSYLTIVKDLSRVMNRLKAVYRSWAIPCAGRDVYYRRHRAQWLDKIREAGVRRRAERLYEQLDMLQHLRQQARRELLAEARKHAITAKLRQVPYLGPIRSALAVALLQTPHRFRTKRQLWAYSGLALETRISAEYRMVEGQVRRSKKLLCIRGLNKDHNHDLKGLFKGAATMASVRPGPFQEFYQAALAKGIKPTMARLTLARKIAAITLTLWKKGESFDAEKLKSQAA

SEQ ID NO: 369623 - protein, 395 aa, unidentified
MFIVGIDIAKRSHEAIIIAEDGQVVRKAFSFRNNCTGYNLLLEQVRRLTLVKSQIVFAMESTAHYWLALYARLLKDGYAVMVLNPIQSHSLRELYIRKAKTDARDSLIIADLVRFGRCKASNVPQDKILALRELCRSRAYLVDMAADLKRKLIALLDRIFPEYESLFESVFSKASIAVLSKYSTPQKVKNAHLGKLTDILMESSNGHFGEWKAHQLKEAACSSFGIDDSGGVYSTLLGMFLEQILSLTAQADSLEKQISVFFQEFNNPLTSIPGVGTVLAATILSEIGDITRFSSADKLLAYAGLDPSVKQSGEFKSYQNRMSKRGSPYLRRAIWLASTVAVHRDPMFQTYYEKKISEGLHYMNVIGHVSRKMTAVIFAVLRDGQPYQPILQSAG

SEQ ID NO: 369624 - protein, 307 aa, unidentified
MTYGIGIDVSQTWLDIHVHERGEEQRFPNTRQGFAKLTMWLRQFQTGQVVLEATGGYEQAALDALFAAGFEVVRVNPRQARDFAKACGQLSKTDRLDARVLAHMAQVLKLTPYEPPAMWQRQLTEYQQRRHQIQMVLQQERQRTANLTDNWLRDQARQSLDYWQKQLKDMDARIAELVAAQPQAQALRALKGVGPVLLATLLGQLPELGRLNGKAIAKLVGVAPLARDSGLLRGRRSIWGGRASIRSVLYMSTLTAIRYEPRLREFYQSLRQRGKQGKVAIVASMRKLLVILNARMRDYLSACREGA

SEQ ID NO: 369625 - protein, 377 aa, unidentified
MSKLRFVGLDVHAETIAVAVAETAGEIRPLGVIPNRLESVRKLIQKLGPVQNLRACYEAGPTGYVLYWQLTQMGVACEVIAPSLIPTKAGDRVKTDRRDAEKLVRCYRVGELTPVWVPDADHEALRDLVRAREAAKKDQLRHRHRLGKFLLRHGKRPTDAGKAWTQKYLNWIRIHVHFEQPALEAALQHYREEVDHIAERLAQLEQAIDEAVKQAPPAIRAVIEALQALRGVAQTTAATVVAELGSLSRFASPSQLMGYSGLVSREHSSGNRVQRGAITKSGNAHLRRVLVEAAWAYRHRPNVQGQVLRRQKSLALSEEAKQIAWKAQQRLHKRFTRLMARDKQNNVVAIAISRELLGFMWAIAVHTEAQHKQAKAA

SEQ ID NO: 369626 - protein, 317 aa, unidentified
MNSKNNQNEINVGVDTGKTQLDIYIRPLDIYFTVTNDEKGIKEALKEIKKHKPKRIVIEATGRLEQAFIIACAKHELPFVIANPAKIKKFAGAIGQLAKTDKLDAKLIAYYSEALKPNLSTLKPATLRLMSDLMSRRCQLMEMRTMEKNRLQIMPKEIISSINPVLTVINNQLIKIDKKLHKLIESCDEYKIKNDIIQSVPGVGNVVAFSLLSNMPELGYITNKEAAALVGVAPINRESGSYEGKRMIRGGRHQIRTAMFMSMMSAMQCNPVFKTTYLRLVAVGKPKKIAIIACVRKMVVILNSMVRDGVYWDPKMS

SEQ ID NO: 369627 - protein, 335 aa, unidentified
MRFMYFLGIDLSKLKLDLSLFDGEEELFNEKRKNEIDSIEEILDELIDRFQLNKNELLICAEYTGNYSYPLVRTALKKGLNLWIENPATIKWSSGVQRGKSDKIDAKRLAIYAFRFQDKARLVTVNDPIIDKLKYLQSERELLVADRAKYLAQIKDQPNFMPRTIFEEKKKRLDTIIKSLSKAIKIIEEQVKNLINQTTCFKEQMEIMTSINGVGDQLATYMLIATEGFRKFNNPRQFCCYAGIAPFRYTSGTSQRSKSKISHRADKKAKKLLHMAALSSVKSNHEMKIYFNRKVKEGKNKMTVLNAVRAKIVHLIFALIRENRKYDHFYINQFA

SEQ ID NO: 369628 - protein, 461 aa, unidentified
MKNKYSNPKNKKVKKIVLQENWEKINPNACGIDVGARELWVCVPSDRDPESVRCFGTKTPDLQEMAQWLKACRIDTVAMEATGVYWIASFQLLEREGFKVVLVNPRQVKNVTGKKSDVMDCQWIQKLHTFGLLGASFRPADPYCVARTYMRLRDDLVAGSTTQIQLMQKALHQMNIQLSHVLSDITGSSGQAIIEAIIAGQRDPIALAELASRRVKSTKAEIAKALIGDWRPEHLYCLAQAHQMYLRYQLDINHCNAKLADELEKLPNKVDPKLQPMPPKMDRKKEIDEKLRLGLYCKFGVDVTAIEGIGPTAALTLLTEVGADLSAFASEKRFCSWLGLCPDNRISGGRVLSSRTRRVVNRMADVLRMSATTLKSSQSALGAFYRRMVAKLGPAEGITAVAHKLARLLYSLIKHGHAYVRTGMEQYEQKNADRKMKALRKMAQSLGVQLLEPQPVTTGVS

SEQ ID NO: 369629 - protein, 346 aa, unidentified
MNITTIGIDLEKSCIQVHCVDVHGKRILNKKLKREQVVPFFSNRPACLIGMEACGSAHFWANKLQALGHTVKLMAPQFVKPYVKTNKNNTADAEAICEAVSRPNMRFVPIKNSEQLAVLAMHRARQGFVKARTAQANQLRGLLAEHGIIIPKGIRHINQHLPDILEAGDNGLPGRFRQLLDRLSAHFKELDKQVRELDVQLQSWHQDSPASQKLAKIPGIGPLTASALVATIGDAKQFQNGRQLAAWLGLVPRQHSSGGKPTLLGISKRGDTYLRTLLIHGARAVLRVVKSKAQHAGSWLEGVMARRNHNVAAVAQANKTARIVWALLANDREFDAQYGTGTILAA

SEQ ID NO: 369630 - protein, 342 aa, unidentified
MQAVTIGLDIAKSVFQVHGVDADGRVIIRRQLKRRYVIAFFDKLAPCLIGMEACGSSHHWSRQLQALGHTVRLMPPAYVRPYVKRHKNDATDAEAICEAVGRANMRFVPTKTTEQQGGLVLHRTRHLLIRQQTSVINAIRAHLAEFGIVAPVGRHGMEELLHVVADVNDKRLPEVVRACVGALGGQLRMLKAQILHFDRMIMAWHRGNETSKRLDALPGVGPALATALVASVADPRAFRSGRDFSAWIGLVPKQSSSGGKQKLGSISKRGDRYLRGLFTAGALAVIRYARLHGTGHRPWLTALLARRPTKVAAIALANKLARMAWAMMARGQRYREPLALAA

SEQ ID NO: 369631 - protein, 347 aa, unidentified
MGIDLGDRTSHICVLDEGGTVVERGKVQTTREGLRKRFEERTRMRIALEVGTHSPWVSRLLKGLGHEVLVANPRKTRLIYQSRGKQDPVDAEALARIARLDPKLLYPVEHRAESVAQDLAVLRARDALVRTRTQLVNHVRGAVKATGHRVKKCSTRTFTGQAVGEIPEEVREALSSVVKTIEVVSRQILALDGRIRELGKTKYPETALLRQVGGVGPIVALAYVLTPEHPGRFRKSRAVGPYLGLVPARSQSGDSDPQLRITKEGDAFLRRLLVQSAQYILGPFGEDCDLRRFGRALSARGQRNAKKRAVIAVARKLAVLLHRLWKSAEVYEPLRKTGAPWDAAVAA

SEQ ID NO: 369632 - protein, 341 aa, unidentified
MNTTTPYQLFVGVDIAAKTFAASWAADPSALPPTRTFAQSPDGFATFREQLATTSVAPSATLVVLEATGSYWVALAVSLHQSGYHVCVLNPGLLALYARSLPRRAKTDTLDAQLLLRFAIERQPPTWTPPPQVYHELRQRLLVRDGLQEMRTQARNQRHALVQWPIVIEAAIAQLDTLIADLEARIATLEQEVAKVPSDGAWAASALLLDSIPGLGVITIAYLLVGTLNFSVASTPEQLSAYVGLAPMRYESGTSVRRQAKIGHSGNGRLRTALYMATLSAARHNPIIRTFYTRLRTGGKPMKVARCAAARKLLHLAWAVVSKQQPFDATYQEHQCEQQMV

SEQ ID NO: 369633 - protein, 427 aa, unidentified
MKKIKIDYLSTLFVGIDIGSRTNVISALNFDQDFLIRMVPVANAQGGAEQMEEMVAQVLSQHHEFKAVIIGLESTGFYGVHIANYLSTSEKLAPFSTKVYCLNPNEVKQYKKSFNSLDKNDGIDSFVIADFARVGRIHTEPWRGAQYLALQRLTRHRLHITECIAREKTYMLNNIFLKFSEFAMLNKDEHPFSDKYGATAEAVLTDYLSTEDIVDASVDDLVAFISSKSRGRISDPEQTTYLLQKAAQDSYRLDKCLYEPLTVSIGCSFNCISAFEKELKAINGAIQRAVKGLNPTEYQILTSVPGIGPVYASGILAELGTIKCFKSNDALAKYCGIVWKENQSGEFEAEDTPMNKAGNRYLRYYMIEAAGSVIQHCPEYKAFYDKKFAEVRTHQHKRALALTSRKLIRMLFGLLANGKLYSVEKSR

SEQ ID NO: 369634 - protein, 374 aa, unidentified
MHMMHHRQVQYLGLDVHKAMIAVAIADASGAPSSYGSIANEPSAIRTLMTRLGGSDVQLHVAYEAGPTGYALHRQLTTMGIDCIVVAPSLIPKRAGDKVKTDRRDALKLARLLRSGDLTPVWVPDQAHEALRSLVRARADAKADQLRAKHRLSKFLLRQACWPPIGVRTWSQRYFSWLRQLEFEHLPDRIVFADYLAEVTAAGERTKRLEAALHQCAQTSSQLALIRALQAFRGIGFLSAVTLVAEAGDLRRFRTAPQFMAHVGLVPSESSSGGKQQRGSITKTGNSLLRHVLGEAAHHVRRAPRVSGALKRRQADVAPEIVELAWRAQLRLHARYRHLSLRVGALKALTAVARELAGFIWAAGQVLLEEPAAA

SEQ ID NO: 369635 - protein, 365 aa, unidentified
MSKDIKKPAGETRRYVGIDLGDKKSRVCILDEGGQVVLQEWVVTTPAAFFKRFHGETKMDLAMEVGAHSRWASDLLRRCGHRVVVADPRQIGLITKSNAKSDKRDARTLAQLLRVDARLLSPIEHRAEELQMDLTVIRMRDNLIENRTRLVTSVRGVVKATGGRLPRGETSSFPQQVGDLIPEPLRPAVGPVLEVIDRWNEAVYEYDCLLEHWAETRYEESRRLIQVKGVGTLTALTFLLTVGDKERFSRTRDIGAFVGLRPRLGQSGDNEPELRITKAGDGLLRKTLVECAQYMVGPFGQDSDLRRWGLKMIEAGNGSKRARQRAVVGVARRLAVLLMSLWKSGQTYEALRHSQARERVEEGVA

SEQ ID NO: 369636 - protein, 479 aa, unidentified
MNVNGKKAKNQEVIGNSAVNVLSREDLIRKIDAIKAGMQAATWREMETHGKFAKNDKLSFISDDMLILGCDVGSEIHYVRAIDTRGRELSREAFPFSNSAEGFQSAKDWALHIAAENNKSQIVLGLEPTGHYWFCLATWMISNDISVVQVNPYAVKQTKELEDNSQLKDDRKDPKLIANLVKDGNYGMPYLPEGVYADIRRLSMLRDQLTEDRIRSTNRLHREMKIYFPEYVDAFGKIDGSFALEVLKKAPFPEDIVEIGADGLKEVWHTAKLRGRGYSRADHIVSLAEKSVGLKRGIFGGREAVKLFAEQILELSMKIDRIEGMLHEECRRIPYMENVLEIEGIGENTLAGILAEMGDIARFDDVKEIQKLSGLGLVACSSGKHKGETKISHRGRKRLRYWLFQAAKSAVVHSEEFRSLHVYYTTRPENPLKKMQSLIAIACKILRVIFTILRTGQKYDPVKMLKDIRHPSPTAVVAA

SEQ ID NO: 369637 - protein, 343 aa, unidentified
MDHFAGLDVSVKETSVCIVDDTGRIVREVKVASEPEALLAVLTNPACHFKRIGLEAGPLSQWLFSALAEAGLAVICVETRHMRAVLKAQINKTDRNDARGIAQMMRVGLYRPVHVKTLRSQKLRMLLTHRKLLQSKAIAIENDLRATLRNFGLKVGMVGKVKFEERIKELVEDLPDLVVLVEPLLIVRRVLREQLGILHRRLLAIVRDDDVCRRLMTVPGVGPVVALTYRATIDVPARFRKSKAVGAAMGLTPSKYQSGEINRTGSISRCGDEMMRAMLYEAAQTMLVRSTKWSWLKAWAMQIARRRGVKKAIVALARRLAVIMHRIWVDGTEFRWTREVAAA

SEQ ID NO: 369638 - protein, 419 aa, unidentified
MSFKILKFNCCGLDVHKTWIYACIGITDSNNRTEYKQARFSSFTKGLNELCDWLAKYNCTDVCMESTGKYWIPVFNILEQHNLWVTLSHPKYTKPMKGNKTDRKDAKWICDLYMCGMVKPSFIPPADIRELRDLVRYRYKLTCMIAGEKNRAQNCLTVSNLKLDDVFSDVFGKSSRSITEQILQHPGEKFDVAHFVYGHCKTPIEEIQAAVDGAISKEQAVKLRQCLDHIDELNKHISEVEQEILCLSDKYEAALNLIRTVPGFNKNPMTAIQVLSEIGCDMSVFPTDKHLVSWAGCCPRNDKSDRKIKSTRISRAGSYFKPVLVQVANALIKSKKHPEFTNRYKRIKARRGHKKAIIAICRMILTAIWHILSDLKPYTPEGFLESRPVKEDKILSTSQALNLLRQRGYVIKDEPLAVS

SEQ ID NO: 369639 - protein, 356 aa, unidentified
MEQAHTTVGILIKKTMQTTKYFIGFDISADDFSASCITSPDNLVFSTQKFSNNFDGFEEFVSLLSKSNIKSSEAIICMEATGVYSEHLSYFLVSKEFTVCIEAPHKIKNKTKDSPRKNDFVDAQAIAEYAYRFTDKLSAWEPKDEILEQIQVLLSTREHLTVQMTANINALKTLKYKYYQTPLANQIYERTINKLKEHIKQIDNEIKNLIDKDNTFKNKVSLAKSVPGVGLLLAANLLVLTKGFTEHVNYKHTAAYSGICPYEQTSGTSLHKPPRSKKCGPAKLRKLLYLAALSVRTHNQNFKKYFLRKVAEGKNKKLVVNNIENKLLKIIFAVINSGVAYTDNYKSVNPALLKTA

SEQ ID NO: 369640 - protein, 419 aa, unidentified
MKVEYGNVAEDAVWAGVDTHAATNWLSVVDARGSELFSGEFATDPEGYRKLCDEIRRLGSPVAAGVECTGTYGAGLVRAMAAYGIACYEVITPGRPRRGPGCDKDDAADALRAAKQALSGENLAVPKSQDGWVEEVRNMTVAREELVKQCTSLANLALATVRKGPDEIRARLERLGTAKMMGVLAGWDEAEADPICDAVMFSLAAPGRVWAEARRSARLLEERIERTLKAGNPALASMYGCGPISAAMLAIAAGDNPERMGSEASFAALCGVSPIRASSGKVERHRLNRGGNRNANKALHIIAMHRMRTDPRTTEYVERRRAEGLSDREIRRCVKRYIAREAYRLIMHPYDVPIEGKGPEMRAERIASGVSQKDAAIALGVTASTLCDLELGHHQFRELALRYRQWIDDGFPLEAGIAS

SEQ ID NO: 369641 - protein, 344 aa, unidentified
MGEVTTIGVDLAKNVFQLHGSDAQGRVVLRKQLKRAQFLSFFVNLPPVLVAMESCSSAHHWARELSKLGHQVRLIAPQFVKPFVQGSKNDVSDAQAICEAATRPTMRFVAIKSIEQQSTLALHRARQGLIRARTAQINQIRALMGEFGWVSPQGPHQLLANLSAQLEQARETLPAVFIELIELLREQLLGLNDRIETITRLIVQAIGNDPVAQRLQTIPGIGPLSASALAASVGEVKSFKNGRSLAAWLGLVPGQHSSGGKAKLLGVSKRGDSYLRCLLVHGARSVLCSTMRASAKKPDAWIEQLKQRKHANVVSLAIANRNARIAWSVMAHGHSYEAERRQAA

SEQ ID NO: 369642 - protein, 439 aa, unidentified
MTVNVAIPLLIKVVILMMKLKYSICCGLDVHKNVIVATIVTTNRDGISEYKQKSFSTINSDIQRFHNWLIENNCYHVCMESTGKYWIPIFNYLENDIDVCLTHPKYVKAIKGKKTDKKDSKWIADLYKFDLVRCSFIPPKDFRQLRELSRYRFKLVCMKSSEKNRIQNCMTVSNVGIASVLSDPFGKTATEIMSYLLEHTADSMDEKAVRKLIKKGAKSKSDEIIEAIKGYHIETDQAKKLELARGHLEYLDNMITQTEVELYVRIKPYYEFVVFVSTMPGMTELSSTIVLAETGIDMNIFDDAKHLCSWCGLSPANNESAGKKKSVRIAKAGDYLKPMMVQCALAAIKNKKQPYFAIKYIRIKKRRGHKKAIIAIARMMMVCIYHMISEKKPFSPTDYEELMNPQNHVERVVLNENNVFTYLENLGYDSSKLVKRNDN

SEQ ID NO: 369643 - protein, 418 aa, unidentified
MEVLYPRCAGLDVHKDTVVAAVRLIEGDGTVRREVETFATTTPGLLALSDWLEQHDCPCVAMEATGIYWRPVWQVLAAEGPGEGRTLILANAAHVKNVPGRKTDVADAVWLSDLLAHGLIRPSFVPDAGTRAMRDLLRTRKQLVREQASHVQRIQKTLEDANLKLASVLTDIMGQSGRAVLAALVDGEADPERLRALVGSRVKASPEAIRAALTGRPGAHHRFLLGLHLGQIDALAAAIAAIDAEVDRDLGPFREAVGLLVTIPGVGNLTAEVILSEIGLDMSRFPTAGHLISWAGLCPRQDESAGKRRSNRLKKGAPWLKAALVQAAWAAVRKKRGYLQAQFQRLRARRGARKAICAVAASILTAVYHMLNDGTAYADLGSDHFRKTDPISRAKLLVRQIERLGFACSISAAPPVSI

SEQ ID NO: 369644 - protein, 341 aa, unidentified
MRIGCSNQLVFKRAISAKEAIMETVNPISQAQPFVSEEAATLFVSLELSRARWLVTSLSPGGSKISRHFVAGGASKDLLQLLADLRMKAERHIAASVKIVTIQEIGFDGFWIHRILASNSVESHVVEAASIAVPRRRRRAKTDAIDGELLLRTLMAFKRGEPRVCAMVVVPSPDEEDQRRLSRERKTMIKERIEHINRIKGLMACQGIAGFEPMRANAREKLGELRTGDGRAIPERMKAEIRRELDRLELLRRQIADVEAERDALLHAEEAPNGSPGAQLLKLRGIGPEFATVLWQEGLYRRFGNRRQLAAYAGLAPSPWRSGDMKREQGISKSGNARHDD

SEQ ID NO: 369645 - protein, 336 aa, unidentified
MNIKRIGLDLAKLVFQLHGVDHHERVVLRKTLRRSQMLVFFAQLEPCLIGIEACGSSHYWARELTRLGHSVRIIPPQFVKPYLKGNKNDANDAEAICEAVSRPGMRYVAVKSEAQQSMQAEHRVRARLLRDRTALSNEIRGMLGEFGLALPVGLAALRRALPEILSQQEQWDNRFIRLLCELAEELQILDDRLARYDRRLKQLAQDDDRIRRLQEISGIGPVTASALVAAVGDARQFKNGREMAAWLGLVPRQHSSGGKNRLGHISKRGDSYLRTLLIHGARAVLNACGNKEDRRSRWLQSVAERRNRNVATVAMANKNARIAWAVLSREEEYRVM

SEQ ID NO: 369646 - protein, 345 aa, unidentified
MNVNKDILLVVDYHAENLEVRIFNGATGEERTENCKTTQVNVLRLVEQAAQAVCPGGAVRWIMESTTGWARVKDLIGDRAGFDLVNVLQVPLPPKWRRRQTDKIDTGRILREALNGKLPLSYQPTAWWRQLRRLVDSREDLVRRQTAIKNWISSLLHHETWQDRSGLFTAKGLRRLARMDWPASDRLVLDIKLEELGQIDQWIQRVEQQMQAVYDRWTEAQWADEIRGVGMVTAVSLLAHIGPIERFASAEHLISYGGLAPGCSFSDGKGYNGRIGGGGTDSHIRYLAIEATTWLQQIPRYKSAYERTCRKRGKKIARIVIARMFLRSLYKMLREKVRFNQAPAA

SEQ ID NO: 369647 - protein, 328 aa, unidentified
MKYILGVDIAKDKFDCCLLGGEQKLEKTFSNNPRGCQQLMRWLAKAGSRPVELWACMEATGIYGEALLHFLFAAGLTVSKVNPAQIKHYARSLLARHKTDRQDAVLIAEFARERSHAGKLRVWSPPSPEQARLRALTRLLAARKEQLAREKRRAKMVDACLRSHLVAMMRAFDQLITQIEKEIQELVDAGPELKRRRDLLMSIPCVGPVTAHTVLAELPTEIRSARAAAAYAGLTPQREDSGRKIGRTRLSKTGNPRLRQAFFMPAVNGKNNPRLKALALRLEQKGKTGKQTVGACMHLLLRLCVGVLASGQPFQADWISRTSGRSPA

SEQ ID NO: 369648 - protein, 336 aa, unidentified
MPMYQLGIDVSKNTLDLCLLREGIKGRIKTRKLKNTADAAKVVAEWLKKQSCELDEVHIIMEATGVYHEPLAYGLHFAGARISLANPHRTREFARGMNILTKNDKVDAWMLACYGSLKEPEAWTPPPESVRYLRALLRRRDALVADSTREKNRLEKSVFTDSPDAVRASIENMLQELSNEIEHLDVLIQEHIKTHPELNQDFRLLTSIKSVGYLLGLNMLAILKSHSFESAEQAAAFLGVVPVERRSGTSVKGKPKLSKIGPPEIRTKLYLAALCGLRFNPVMKQMYTKLCQRGKSKMCAIGALMRKLVHWCYGVLKTQLPFDAEYNQQSHYKTTC

SEQ ID NO: 369649 - protein, 313 aa, unidentified
MSTSSEIFAGVDVSKSHLDLALRDSQKSWRFSNDPEGISKLSDLLIKHQPALIVLEATGGYEQAAFRSLSTRQLAVAIVNPRRVRDFARANGRLAKTDRIDAHNLAHFAQVVRPHPHPPSTEAQQRLTGLIARRRQLHRMITAEKNRLRNAQPVVLLQIQQHIDWLRQDLKNLDAQIKDLLQSDPDLKAKADLLCSAPSVGMVTAASLLADCPELGTLDRKKIAALVGVAPMNKDSGRKSGKRRIMGGRAPLRAALYMATLSASRFNPAIRPFYARLLKSGKVKKVALTACMRKLLTMLNAMMRDNKHWNPAL

SEQ ID NO: 369650 - protein, 353 aa, unidentified
MKSDKYMGMDVHQAMTVVAVLNADGKVILETMVPTEAAAIIRLVQNLSAPLRVTFEETTQAEWLYEVVRAYVTEVIVCDPRRNKLLGEGSKADKVDARKLADLLRTGMLRSVYHGHEATRKLKELVRAYETLSIDTQRTMGRIKAIFRGRGIRTPGRGVYQPKQREQWLEMLTEPGIHQRAAWLFEQLDQLRTLRRKAKQTVLTEGREHRAIGLLKTIPQLGPIRAAFIVATVDTPHRFRTKRQLWSYSGLGVVTHMSAEYEMREGRAVRSRKPIATRGLNPNCNHRLKETFISAATGGIRTEPYRSYLSRLQKGGMRAEMARLTLARKIAAIALRIWKKGETFDPKKLNWTT

SEQ ID NO: 369651 - protein, 336 aa, unidentified
MGQYVGIDLHRRSTTMVRMAEEGEVLGTERFVSQPFELAQAMAAAGPEPEVVLESTYGWYWAADVLQDLGAHVHLAHALGNNWGNRRGKNDVRDAQDLAAMLALGRLAEGWIAPPEIRELRELVRYRYSLIRHRTSAKAQIHGVMAKNGILPVKGELWGPTGQAQLDRLELPEAYALRLDSLRNLLDVYERAIAELDAHIHAQLKADPGYQAVMTLPGVGKVIAAIFVAEIGDITRFDSAKKLCSWAGLTPKHRESDEVVRRGVITKQGSPLVRWAAIEAVGNYRAKGNEKLRADYVRIAEHAGKYKARVAVARKLLTLVFYAMRDGEVRCLESAA

SEQ ID NO: 369652 - protein, 324 aa, unidentified
MLPTLGIDISKDSFHLELSINDKLRHRKFANRKEGFGELCVWLVKHKATQVHACLEATGPYSEALAIYLHQQGHTVSIVNPVQIKAFGQSELRRNKDDRPDAGLIRRFCEKQRPNPWTPPPVHLRELQALTRHLENLIETRQQQINRLEATNTKNVAKSLRKLVAHLDAEIKRTEQQIDDQVDRHPDLKQQSELLESIPGVGKRTAAKLLAEITDISQYKSARQVAAYAGLTPRNNRSGTIRGKTRLSKTGNARVRKALFFPAIVAKRHNPIVRAFCERLSSHGKNKMQVIGAAMRKLIHIVFGVLKSGKYFDPTHELLLNSVS

SEQ ID NO: 369653 - protein, 374 aa, unidentified
MNCTTFVGLDIHKDTITVAVAKEGREAPESLGTIINSPEAVARMVRKLGQPVKNLFFCYEAGPCGYGIYRQLTSMGAKCLVAATSLIPQRPGDRVKTDRRDAKKLARLLRSGELTPVWVPDEKQEAIRDLVRAREDAQKDILRKRNQISKFLLRLDIRPPHGVNAWTVKYRQWLNSLTFSHIAQGIVLKEYIHVLEEAEAMEKRLDKEIAVLANDSPQAPVISALQALRGVGLITAATVVAEAGDLCRFKSPKQLMSYVGLVPSESSSGGSRHQGKITKSGNAHIRRVIVESAWHYRRLPTIGAELKRRQEGQSEKVKAISWQAQHRLNLKFRRLTGRGKLSQTAVVAVARELLGFMWAIAQEISQQNILKRVS

SEQ ID NO: 369654 - protein, 383 aa, unidentified
MFHLMPESMFCRVDPLSTALFSNSYGIINLPEKEWVCTCKVDSSEAILLKVKLIMEERYFIMSVSILGIDIAKQKFDAALLVDGKTKHKACKNSVEGFETLSLWLGKQGIQQVHACMEATGNYGEDLAIYLHEAGHIVSIVNPARIKGFGQSELIRTKTDKIDAGIIARFCLVMKPEPWIPLSPEIRILRALVRRADSLTDMRSQEKNRISTAHESVIPLIEQHIVYLDQEIEKIRKQIAKLIKHNPNLKQKKDLLDFIPGLGKVTIPAILAELDNLNKFNHVREVVAFIGLAPKENLSGSSIQGKTRLCKIGHARLRKALYMPALVSIQCNPVMIAFYNRLKDKGKNGKVIVCAIMRKLVHVIFGVLKSGKRYDPYFKQNFA

SEQ ID NO: 369655 - protein, 336 aa, unidentified
MCGDQAPNKQVWSQNLNQFSSPGEKMKLIVGVDVGKYELVIYLFGKCYTITNEARAINDFLKTHLSAQSDTALVVFEATGGYENILRDCLIRKNYAYHMAHPNKVRHFAKSKGYLAKTDRIDAEIIAEYGQANDLKTDPPLQDEAYQRLKALLVRREQLIDERTQDNNRQDKNLDKLMLSSIKRHIKWINKEIQYLEKQIKQHVQGHPELKKQVDLYSSVPGVGQQTAMMMIVHLPELGKTDSKQLAALSGLAPMNNDSGKYRGKRRIMAGRSNVRKALYMATLTATRSNSLIKDFYHRLIARGKPFKVAMTASMRKLLLILNSVSKRQAVWANVL

SEQ ID NO: 369656 - protein, 345 aa, unidentified
MELHTIGIDLGKTVFHLVGLNLRGEVVVRKKFSRTQLLRFTANVHVGLIGMEACGGSHFLGRALREQRHEVRLIPAQYVKPYVKTNKSDYIDAEAIAEAVSRPTMRFVPIKTDDQLDLQSLHRVRERWVMRRTAVINQIRGLLLERGITLRKGRCHVGVALPGILEDADAKLSGALRMLLAQLKLELDHLDLRIDEADALIKKTAGENEACQRLVAIPGIGPVTATAVIAAIGNGGAFRKGREFAAWMGLVPREHSTGGKQKLLGISKRGNSYLRRLFVQGARAVMQQRTKQSPGLSRWLAQLTSRTHRNVAGVALANKLARMAWAVLAKNEPYRPPVLADVAAA

SEQ ID NO: 369657 - protein, 364 aa, unidentified
MFHFTTLFIGMDVHKESFLLCYYDMMANQFKHSTKVGPNVSYIVNYVNELRRLYGQDAEVLCGYEAGCLGFTLYHQLQAHGIPCIVMAPTTVMKEGSKRVKTDKKDAAQLAKALAFRSYRPVHIPTAEDEQVKEYIRMRTDHKVALKKIKQQLLAFCLRHDFRYTEGRNNWTQKHVRWLHSLNPKGLYAEILTEYLLTYEKLVDQIARYDARIEQLGQSDSYQEEVSQLSCFIGVKTLTALSIVTEIGDFNRFATAQHSASYLGLTPSENSSGDKERRGAITKAGNSHVRRLLIEAAQSLAKGTIGYKSKELERRQSGNRVEVIAYADKANERLRRRYRTLVLGKNKKQNVAKVAIARELSGFI

SEQ ID NO: 369658 - protein, 337 aa, unidentified
MKYCGIDLHSNNSMVVITDETDHVLYSKRHANDLSQILSALAIHRAELSGVVVESTFNWYWLVDGLRDAGYRVHLANTTAIKQYDGLKHRGDESDARQLAHLLRLGLLPQGHIMPKAARAVRDLARKRMQLVQQRTTQILSIESSLSRHTGGRMSSNNIKCLQETDLNAMQLGDMQTLGLKANVAVMQALQAQIDSLEKVLAKHCRTEPDYRLLKTVDGIGEVLATVILLETGSIERFADVGNYASYCRCVGSAHVSNGKKKGEGNTKNGNRYLAWAFVEAANFAVRYCEAARRFYQKKKAKRNSTVAIKAVAHKLARACYHMLKSKTEFSVERCFA

SEQ ID NO: 369659 - protein, 343 aa, unidentified
MERLTVIGIDLAKSVIQIHGSDSRGKCLIRKKLRRNQLLPFLGKLPRCLIGMEACGGSHYWAREIKQLGHDVKLIPPQFVKPYVKTNKTDVADAEAICEAVDRPTMRFVPIKGPEQQAVLLLHREREGLIKERTAVINRIRSSFSEFGVAIPAGPKRLRQWLSDSYGDVENDLPSTLNRLMLRMIDRLNYIESEIGDLDKEINDQNKSDERCKRLIEVPGVGRLAASAIVASVGDAKEFRSGREFAAWLGLVPRQYSSGGKQNLQGISKRGDAYIRKMLIHGARAVIRHMNRNNAPVDWLEDLMRRRHHNVVIVALANKLARTIWALLSKEQSYKRYEDTVVA

SEQ ID NO: 369660 - protein, 344 aa, unidentified
MIYIGMDVSCKSFVIHAIDKRKRTVCKEEIAPCKEALVGLLNRLGKEPKLVVFEAGNQMKWIAQTLMKIESVEVHVVHPNELKWISQSNGKTDKVDARKMAELARGDLLPRKVHIVEGHVRQLREMLSGRQVLQSKRVALINGIRAMMLQEGVKLPEKFFNRMDWRQRLEKSPVSEVTRMIIVAYMQGISGLQAAEEVLSERIVAIEDGRLKQLESIPGLGVLSSRVLLGALDDATRFDNKKSAAKYGALTPTVYQSGNVTHYGHICRDGRHEVRKVLLQCAHTVVRMKSYDSRPLREFFERIQKRRGKKIAIVALARKLLTIAYGILKTGTFFDPARLSLRPV

SEQ ID NO: 369661 - protein, 370 aa, unidentified
MQSIVYVGMDVHKESLSLCAVNSDTGEILGETKCALDTRMLGKFLATLRKKCGEQTKFVTGYEAGCLGYSWHNSLEELGIECHIMAPTTMYSSSKNKMVKNDRQDAKMIARNLMNGTYRSVYVPDAEDNSIKEFIRMRKSFKLAQKKIKQQINAFVLRLGFSFDGKSKWTEAYLNWLNKLPLTGHLKMVIDEYLIQYDELSRKIARYDQELENLSLSDKYAEPVQKLRCFKGINTVTGMVIHVEISDFSRFPTPTAFASYLGLTPNEHSSGNSINKGSITKQGNSAVRSTLVECAHSLVRGRIGRKSKRVNARQKGQPGKVISYADRAVERLQRKFFRLVAAGKPQNLAIVAVARELACFIWGMETQHLD

SEQ ID NO: 369662 - protein, 385 aa, unidentified
MLYVGIDIAKNKHDLACIDETGETIIINYRFANSYQGFHQLKLKLKQLSPITQDVQIALESTGHYSYNIIAFLRELGYTVFAYNPLIIKEFAKSHSLRKTKTDRKDALLIARKLRSDITPEYYQTDKLMDELKELTRYQNRLIQSRSKCKNLYIRLLDIIFPELHEIVSNLHNQFIYDLLTNYPSPQKLARAHSSSLLKIKRLTADKAHQIQEAAKQTIGNASPALSLELVQLIETIKHYDKQINQIQEEMNRLMTELESPITSIPGIGNRLGAIILAEIKTIHNFKNPNQLQAFAGLDPAIYQSGQMDNTGHMVKRGSSYLRYALIQAAKLISIYSPHFKAYLRLKISQGKHYNVAVTHVAKKLTRIIYHLLKTNQTFDEAKLR

SEQ ID NO: 369663 - protein, 365 aa, unidentified
MNFIGADLHKKSITLCVMDERLKILARKTVPCGQPDQIVESFRQFLPFKVVVEATASYLWFVELLEPLAEEIVLANPKKLRVIAESTKKTDRLDAQVLAEFLARDMIPRAYMPTPRQRQHRALVRHRQYLRGRMTSVRCKIHHVLADYNADRKDLFSARCGKSYFKQVALSDADGFVLKQLWSEWEDHQARLLATTRKIKAFIAKAPAREKEARAILKSAPGVGFVTAEVVLSEIGDVSRFGNAKKICAYAGLVPAVRQTGGKRSKDLHITKQGSGLLRWALVESAWRLVKSSPKWSALYSRLRKRCGSKRAIVAVARKLLCVLYAMLKTSTPYKIIPAATPAEPPEPTRKRLVRVSTAAQAVTP

SEQ ID NO: 369664 - protein, 346 aa, unidentified
MEHYVGLDVSLKLTAICVVDQTGSVMREGVVDSDPETIAEFVTSNAPSVVRIGLETGPTATWLWTELQQLGLPVICIDARHAKAVLKMQINKSDRNDAAGIARIMQTGWFKEVRVKDLDSHAVRALLASRALLVKIKRDLENQVRGLLKNLGLVIGRAKLNVFAVRAEELIEDRPELIAAVRPLLDARKAIEQQVDDLDRKVMWLARNNAQVRRFMTAPGIGPITALCFLATIDDPTRFKRSRSVGAYLGLTTRRYASGEIDWTGRISKCGDAMLRSYLYEAANVLLTRVAKWSTLKAWGIRLAKRSGLRKAKVAVARKLAVILHRMWIEGTEFKWSLKEAANQRA

SEQ ID NO: 369665 - protein, 403 aa, unidentified
MKRIKRIKRIIAVGIDVSKDKLDVSIYDGKNHITKIYTNKEEGIENLIRDSKEASKKIIDSELHFVMEATGTYHTKVLFTLTNNNYPVYVLNPLISKRYSEEQLRRTSTDKIASKLLAEYAYSSISSHLLGIQNERYNILVSSKFDKSNEDRLNLKILLRTLEGLKKTKTRILNQLEALNQYPDQLGIDAIKSLKSILEEIDKEIKNLENKISEIVKKEENRNLYEKLKTIPGIGDRAASAIIAYFGSFSSFDSPKQAPSYAGLTPLIKKSGKSVGAKEIYHISKIGSPYLRQILFMASLSAARYNDQCHILYERLLKEGKAKKLIYVAISCKLLRQTFGIIKNGRVYDPNFGLMDVEKGNNSNNNDNESIKDNKVNIPFPKNPCLYNPLINKQGTSRCVTGF

SEQ ID NO: 369666 - protein, 338 aa, unidentified
MNTITLLGIDIGKHTFHLHGQDARGHQVLRKKLNRNQLLPFLAQISTCKVAMESCGGSHWLARKIMEQGHHVQLIAPQHVKAYVTGNKNDFIDAEAICEAASRPRTRSVQVKTIEQQVLSTEHRLRKSLVNRRTAVINQVHGFLLEFGVVFPVGYAALDRLSGLMESRELPTRLISAIERMLEDIRQLTHEIKKLDVEIKQQLTQNDAGQRLQSIPGIGPLIASALVADVGDASVFKSSRDFAASLGLVPRQYSTGGETTLLSISKRGDKYLRSLLMQGAHAVLCRVDKRTDALGVWAKNLLARKHPNKVACALANKMARIVWVLLTKGGTFNSTLLA

SEQ ID NO: 369667 - protein, 365 aa, unidentified
MQTIHRSQTLFVGIDVHKDTHTAVGLSPFGEKVFEMKIGNQSDDFISLVEKTKVEAERAGLVPSFGLEDVHSWGERLSSFLVEEGLPVRTVAPILVDHRRSKTTHPEKSDSLDAQGVAEVMIQRIDTLPVYKLTEEAQKAKQIRELSLEREWLVKERARLKNQLHILLHRIHNTGYRTKFKDSFSKKALRYWSRSIPKNTDMILAQRTKRALRRVLDLREEIQEIEEELTAMMKENKQTLSTASGCGTVIAAEIIGEVGDVNRFHSPGALAKYAGCAPREHSSGKTIRWRKTRSGNRRLNRAFHRMSLSQISRSGNDAARVYFKRKISEGKTKAQALVCLRRQLVNVVWMMLKHRTEYVYPQKNV

SEQ ID NO: 369668 - protein, 343 aa, unidentified
MHTVTTIGLDIAKSVFQVHGVDASGQVIIRRQLKRRYVLAFFQKLPPCLVGIEACASSHHWSREIKALGHTVRLMPPAYVKPYVKRQKNDATDAEAICEAVTRSNMRFVETKTPEQQSCLMLHRTRHLFIRQQTAVINAIRAHLAELGIVAPVGRNGVEELLNVVADPADKRVPDIARACLAALGAHLRRLKEQILEFDRIIMGWHRSSEASKRLDAIPGVGPMLATALVASVADPKTFRSGRNFSAWIGLVPKQHSSGGKDRLGSISKQGDRYLRGLFVAGALAVIRYAKIHGTKHRPWLTALLARRPVKVAAIALANKIARMAWAMMARGERYKEPVALAA

SEQ ID NO: 369669 - protein, 339 aa, unidentified
MEIKRIAVDTSKHFFTIVGVDDRGQVVMRRELKRHQVEPFFKKQPPVEVVLEACGGSHYWGRTFLALGHRVRLLPPQYVKPFVKRGKNDRHDAMAIAEASARPGIHPVPVKSAQQQAEAMLLSVRELLVKQRTQLANAMRGHASEFGVIVGKGLGNADALVERADNDPSVPEPAKAMLAVLASQFNALLLQIADLDRKLLAEHKANPVSRRLAEVPGVGPLGALTLALTIEPKQFHSGRHFASWIGLTPKEASTGGKPRLGGISRQGNERLRQLLVLGATAVIRTAAKPGSRLASPWLVKLLARKPRKLAAVALANKMARIVWAMMRSGEAYRHKPAVG

SEQ ID NO: 369670 - protein, 388 aa, unidentified
MLLDHPSDGPTAIRTQFGAIFVSLELSRSTWLVTSLSPGHSEKMSKHSVKAGDLPELLKLFSELKQKALARTGESYRIVSIQEAGLDGFWLHRALQQEDIESHVVDPASIATPRRRRRAKTDRLDGETLLRSLLAYKRGEPRVCAMVAAPSPEEEDRRRLCRERRTLIAERIVHVNRIKGLLFAQGIFDYVPMRRNRRAALDVLRTGDGRVLPAHLKVQIGRELDRLELLLEQIAAVEREQDALLAASRPAGGTEGSNPVAMLLDLKSMGPNFAAVLWTEAFWRQFANRRQVASYAGLAATPWRSGGIVREQGVSKAGNPRLRTTMIQLAWLWIRHQPQSALTRWFNANSPRGRKRTIVALARKLLVALWKYVTAGVVIEGAVMKSAA

SEQ ID NO: 369671 - protein, 420 aa, unidentified
MTTLESTPAAAVLVAIDIAKVRNEVLIETPGHKRRRRLLVLNTRAEHDHLIEVLQAYGRPVVCAFEATGNYHRPIAWRLAEAGFEVRLVSSLALARTREALHNSWDKNDPKDAQVILHMLRIQATQVYHDPLRAGINDVQELSKTHEAIAAAKTEIQHRILTHYLPLYFPEIDRFRGNSRSDWFFAFLDAFPTPASITALTKEEFVTAAWDVVGRKVSKTQILMDIYETARSSIGLPLPLDAPAIRMFRMVIDEARSLIRQRNEIEAQADELLRHSQDYQLLRQIPGIGPINALTILAEAGDLRRFHHHRQFLKFCGLDLSTQQSGQYRGQTRLSKFGNAWLRRTLWIAGQVAIRQRENGFRHKFERYIARDRDNPDLRRKAMTAISAKMARVVHAVVKGGSDYRPFVEGRVPGGRTSVS

SEQ ID NO: 369672 - protein, 353 aa, unidentified
MKTYYVGMDVHKATIVIAVLDANGKVVSQTIIETSTQAVRDFFKSLRGEINITFEEGNHAAWLYDVVKPLVKELVVCNPKHNHLLKQGSKNDRIDARKLADLLRLNALRPVYHGEHGTRTLKELVRCYECVIKDLSRVQNRLKALYNSRAIPNRRGELYHISKRESWIQKQENAGRRMRAELLFRQMDELKVLKRAARKAMIAESRRHEAQQVLLQVPELGLVRVAQIIATVDSPFRFRTKRPFWAYLGLAVETRSSAEHEVTNGRVRRRKLKIETRGLNEDYNRRLKSVFKSAATHACSCGVYKEYYDKLVAGGMRPEMARLSVARKLAAAVLAVWKKGESFDERMIMSKAA

SEQ ID NO: 369673 - protein, 427 aa, unidentified
MAVVMIGVDPHKASRTAVAVNAAEQPLGRLRVRASAVQAERLLEWAQAWPERAWAVEGAGGLGHLLARQLLSAGERVLDVPPQLAARVRLLATGDVSKNDPSDARSVAVAALRSAQVREVRRDDHATVLKVRAKRYRDLGRARTQVACRLHQVLCELVPGGVSGEITAGRAGQVLASSAPAGAVDAARWELAAELTEDLRGAGTRIRETRKKAAAAVRAAGTSLTGLFGAGPVIAAAVIGDVRHVSRFPDRDHFAAYNGTAPIEVSSGGRKACRLSRRGNRRLSHAIHMAAVTQIRYRHTKGRACYDKKLAEGKTPKEALRALKRQISDAVFACLQEDARRAAAAAGKSPGGQPGNHSVSRAAGSHPDHRLFGQATPGPATHPTTLTAPFPAPLPSPASELPGPGPGAARPRGGARRASSTRPPASR

SEQ ID NO: 369674 - protein, 480 aa, unidentified
MKEIQRRCCGIDVHKNSVTVCVLAPVGQRHIESKKRKFRTFTRDLKQLRAWLKNCQVTEIAMESTGQYWRPLWNLLEGEFAKVMLVNPQHIKGLNGYKTDPKDAQWIADLLESGKLKGSWVPPRPIRELRDLTRQRVHVLEDLNRAKNRIEQLCQTGNIKVSSVATDLFGVSGRKMLKAIVEGKHDAGWMADYAKGQLRRKRGELELALEGTFTSQQRWLLEKELRQAEWLEGQVETLEKQIEREIVAFAEPIRRLLTIPGIERRTAWTIVAEVGVDMGPFSDAKHLASWAGLCPGNRESGGKRMSGRTRKANRYVKRAMCQAAWAASHTKNSYLSAFYRRMAIRKGAQKAIMALAHHMIVVIHQVLSRQEEYVEFGGDYYDQRNKPRTVARLVMRLSRLGYQVDLKPVESTPPAQAGAPDEAPADRSGEATAPLETGAKPKRKRGRPCKCAERGIICYHQTSVPVNLLIPQPASAGEFS

SEQ ID NO: 369675 - protein, 476 aa, unidentified
MKEHKKAKAKTKSEALKPIGEQERDSAGIDIGAKEIWVAVPPERAENAVRKFGAFTRDLNAIVQWLVQCGVRSVAMESTGLYWIPLYQLLEDAGLKVCLVNARHVKNVPGRKSDVRDCQWLQYLLSVGLLLGSFRPAQAICASRSIYRYRQNLLSMAGQHVQHMQAALDQMNIKLHHVIDDLTGATGQAIIAAILSGQRDPLQLAKLRHQRIQAAESTIVKALEGDWRKEHLFVLQKAWDQYQQLQQQLQDCDKELWQYTRELEACIRVVKAAKVVRLRPELVGVEPVNNQSGSKARKMRKKTSKNQPEGPWQQELERFFGVDLTAIPGISVLTGLTLMTELGNDLSTFKTEHHFASWLCLCPDNETSAGKVLRRRTRRSQNRVRYALRMAAYSLHRDKSYLGDKYRRLRTRLGAPKAITAMAHQLARILWTLITRQVPFDLSVFAHQQKLNEHRRLKHLVANARQMGYQLTPIAA

SEQ ID NO: 369676 - protein, 437 aa, unidentified
MPNVAYLGLDISQADVSVCFLLTDGREPAPRWTVANTQPGAERLSATVAQLCQTHQVAELRIGVEATGLLWWHLACALNAAPPLLAFRPQVYVLNPHLVATFRRNYGALPKTDRADAFLIAERLRFGRQLPPPFQVDVRYAPLQRLTRFRFHLAHNLAREKSYFLSFLFLTFSSFGQVQPFGDPFGATSSAVLSELTTEELAQQSLAELAAYLQTQGHGRFSDPEALAETLQQAARDAYRLDKVLAEPLRIVLSTTMANIRALTAQLKALDQTIAAELAAIPQTLDSVPGLGPVWSAGLIAELGDVSRFADDDAIAQFAGLTWPAHESGQFQAEDTPLSQRGNRYLRYYLVEAANSVRRHCPEYADYYAAKYAETPRHPHQRALVLTARKLVRLLDALLRTQTLYQPPAQRPTPAVPGPHAQRPQRQRRQRQADPVT

SEQ ID NO: 369677 - protein, 352 aa, unidentified
MNEYSTYLGIDLGDKWNYCCLLDQEGEVVRAFRVRCRSKELGELFEDIEVSVVAIEACTHSPWISRLAEAAGHKVLVGNPRKLRAIYDTEYKDDARDAEMLARLARFEPRLLHPIQHRVEQAQTDMVMLKARHALVSSRTKLINAVRGLLKSFAIRAEPCSTECFHKRVRALIPENLRGALFPLLETIARLTAGIRAYDKAIEQLSEERYASEMELLRSIPGVGPLTSLCFVLTLEEPGRIKRSRDVGAYLGLVPKRDQSGEVDKQLRITKAGDKYLRQLLVSSSHYILGKNRPDTALRRWGLKLAERGGKNAKKRAVVAVARKLSVLLHRLWVTGEFYRAFPGEEFVMGVE

SEQ ID NO: 369678 - protein, 344 aa, unidentified
MKISTIGIDLAKTVFAIHGVNERGRAVLKKVLKRDQMAAFFANLPACLVGMEACGSAHYWARKLQGMGHTVRLIAPQFVKPYVKTNKNDAADAEAICEAVARPNMRFVPIKTVEQQSVLSLHRVRQSFVRARTAQANQIRGLLSEFGLVVPQGIHQLAGRVPSILEDAANELTGSFRQLIQRLLEHMKELDRQVHNLEVQIRVLHRENEVSCKLARVPGIGPITASALVASIGDGKSFASGRQLAAWLGLVPRQSSSGGKNALLGISKRGDTYIRTLLIHGARSVIRAANRKENKEGWLYSLLQRRNPNVTAVALANKNVRIVWALLVHAREFRSDYMATPTAA

SEQ ID NO: 369679 - protein, 331 aa, unidentified
MTSLPNRTNETPLTVGVDVAKATLEVGFSDRNATLAPANDEAGHAALLAHLAALRAKGAVIGLIVLEATGGLELNVATTLQLAGYAVVIVNPRQSRDFARSMGVLAKTDRIDARVLAQMGQTLLQRDDLRKLIKPLPDERQRMLQALVTRRRQLLAMRIAEQQRASGPDRRMRRSLNIILKALDRELARLDKDMQAFIGEHHAELAALLNEVKGVGKATISTLLAEVPELGELNGREVSALVGVAPINRDSGAMRGKRTIFGGRPAVRKVLFMAALVASRHNPVIKVFYQRLLAAGKPKKLALTACARKLLTILNAMARTRKPFNVALHLG

SEQ ID NO: 369680 - protein, 365 aa, unidentified
MEEITTVGIDLAKEVFAICVLDQRGAVLERKVMRRAAFERWAATLAPCAVAMEACGSAHHWGRTFAARGHTARLIPAEFVVPFRQGGKNDGNDALAIAIAARQPTMRFVPIKTVEQQAILCWHRARAGFNTERTALINRLRGLLAEFGIVIAPSSDRLLKALPGLSTDQRVPLAVRALLLEAREQFAALHARLERCDVEIAAHARESEAARRVREVLGVGVLTASAFAATVPDPTLFRHGRQLGAWLGLTPRQHSSGGKTRLGDSSRCGDAYLRTLLVQGARSALQVALKTAPDKATHLQRWIAALYTRKGYHKTLVAIANKHARILWALLVRNQHYDPEAAQRHARAVKPMASPSTTAPAAVCN

SEQ ID NO: 369681 - protein, 313 aa, unidentified
MKKISTAKIKSQAANKKVTIGMDLGDRSSRYCLLDEEGVVIAEASTPTTKAGIAKVFGAMARCRIALEVGGHSPWVSRQLEAYGHEVIVANPQNVRLIGESTRKDDRLDARTLARLARIDPMLLSPVRHQGAEAQADLAVVRARRALVRARTMLINAARGLTKSFGERLHKCGAGQAGPTLAAELSPQIRAAILPLLAEVEALNQRIAAYDHQIEQLVKEHYPEVFRLKQVKGVGTLIALTLVLTVDDPNRFQRSRDVGCYMGLRPGRRNSGKSEPQLHISKEGDCYMRSLLSKERTTFSVPLGSTVIYAAGV

SEQ ID NO: 369682 - protein, 399 aa, unidentified
MLYLGIDQHKAQITVNLRNEQGNVVLQRQVSIDHDKVDDFFVKLKKQAGKARGFMAILEVCGFNHWLIKKLDDYGCKEIVLMQPEKTSNKKTDRRDANVLCELLWNNRKRLQNGERPNGIRRVFWPTPEDDEVRQLASLRQHIVKQRTKCINKIRGCLRKHNMEQDCPTKTFKTQKAKEWLKALELPMSDRLEIKVHLTVWDTLDAGLLQVETELAKRAETNKNSLLLTSIPGINHLGAVALLSRIGDIKRFPTPDSLANYFGVTPGCHSTGDKKQHMPITKAGSSLARGILNTAVNHVVRKDKAMKDWHKNIKKRKGSKTARVAVMRRLATIVWHVLKRQTTYQFRYDPIATAQTKTKPRKKSRSGFVRHDNNAVHVVKNKTVKTPSPPKRRTKANGP

SEQ ID NO: 369683 - protein, 373 aa, unidentified
MAYRHYWVGLDAGHLETAVCLIDAEGRILFEAICETKSGPIRDILRRFGVEAAQCLTIEAGNGTQMVRELRSYGFPVQVVDVRKSSKFLAIRRQKTDVHDARGLAELGRLARSMGSQVFVKPMEHQNIRTLINVRRTMLKNRARTDALIQSIFRLYGGNVKLLNGRGALAAEVNNQVRKMRQHGLEIGVNLQPLVEISEALREQISALDRQMRDIASNNPTCRNFQTIPGVGAVIALSFYSAIGDPHRFERSRDVGAYLGLTPTLYQSGATSRRGRISRHGNKLTRMHLITAATVVLCRIEIESRLRTWGLELAQRVGFLKARVAVARKLAVIMLGMWKSGSPFRADGEPSLFLQQEEAGLDPVLISGTQISL

SEQ ID NO: 369684 - protein, 342 aa, unidentified
MNASLYVGLDVHKKSISWCAKRADGALHSQGKVAANRRSLSEWAGSFGEPWIGAMEATLFTGWIYDYLKPHAAQLKVAHPLMLRAIAASKKKNDKIDASRIADCLRADLLPECYMAASEIREMRRELRFRNLLVGQAVKMKNKISGVLMEVGAEYDGDRLHGKKYFDELLGSLEDEVAPQSVQRMLKTSRAHLELFQAGSKSLINKLHEDPRLNERVERLQSIKGVGEVLALTWALEVGDPKRFGRIGQAMSYCGLTSAQSESAGISKRGPISKQRNKHLQKMLIEAAKVAPRWNTQCRAVHERELAKGNRNRATLAVARKLVAYLMAVDTSGKDFEERTAM

SEQ ID NO: 369685 - protein, 418 aa, unidentified
MDVMVERCAGLDVHRDDVVATTRVPGQGRRRFEQQSQTFKTTLPGLAELAAWLAAAGVTLVGMEATGVYWKTVFQALEDRFECWLLNAHHLRNVPGRKTDVKDSEWICQLVQHGLVRPSFVPPPEIRRLRDLTRLRTAQNNERTRTIQRLEKILQDAGIKISSVASTSYSKSARAMLEALMSGVTDPDQLAELSKGKMRAKIPQLREALQSRFTIEHHGVMVAQLLAHIDTLDTELQHLTERIELVLAPSTHTIELLSTIPGVQAHAAQVLIAECGLNMTVFPTVGHFVSWAGACPGHHQSAGRRKSGRTRRGPSWLTSQLTECARAAVRTKETYLASHYAQLRGRRGEAKAIGAIRHDLLVAYYHIVRDQVPYRDLGPDWQRKRYSAEHRARRLQRQLEALGYAVTLDKVEPSEPAA

SEQ ID NO: 369686 - protein, 340 aa, unidentified
MRQLYVASDLHGNNNLLGIIDGEGKRIFKKKLPNDPLLINDILKPFKEEIVGIVVESTYNWYWLVDALMEEGYKVHLANPAAIQQYSGLKHTDDKHDAFWLAEMLRLGILPEGYIYPKEERPVRDLLRKRGHLVKLRTSLILSLENIISRNFGRKLPVNDVKGLRKDYVTPLFEGKEDLALAGRVSKETIDFLTHQIRQIEGVVEKRVTLKEQYRNLLTLHGVGKILGLTIMLETGPIGRFETVGDYTSYCRKVPSQWISNGKRKGSGNRKNGNKYLSWAYAEASDFARRLHPESRAYYNRKMQQSNPAVAHSALSHKLARAAYYIMRDQVAFRPEKLFG

SEQ ID NO: 369687 - protein, 423 aa, unidentified
MMKLKYSICCGLDVHKNVIVATIVTTNKDGISEYLQKSFSTINSDIQRFHNWLIENNCYHVCMESTGKYWIPIFNYLENDIDVCLTHPKYVKAIKGKKTDKKDSKWIADLYKFDLVRCSFIPPKDFRQLRELSRYRFKLVCMKSSEKNRIQNCMTISNVGIASVLSDPFGKTATEIISYLLEHTADSMDEKAVRKLIKKGAKSKSDEIIEAIKGYTIETDQAKKLELARGHLEYLDDMITQTEVELYVRIKPYYEFVEFVSTMPGMTELSSTIVLAETGVDMDIFDDAKHLCSWCGLSPANNESAGKKKSVRIAKAGDYLKPMMVQCALAAIKSKKQPYFAIKYGRIKKRRGHKKAIIAIARMMMVCIYHMVSEKKPFTPTDYEELMGPQNHVESVVLNENNVFAYLESLGYDSSKLVKRNDN

SEQ ID NO: 369688 - protein, 359 aa, unidentified
MEYFAGLDVSMEETSICVVDQEGQVVLETKVASDPDAIFKALKKYAPRLRRVGHEAGSLSPWLQVELKQRGLPAICVEAWHMRAALSAMRNKTDKADARGIAHIMRTGWFREVHVKSDESYRLRLLLTQRRNLKRKFLDIENSIRHSIKTFGLKVGHVSRGRFEARVRELVAGDELIAGLTDCMLRARAALWQEYLRLHKVVIMVVRGDELCQRFMRIPGVGPISALAYKTAVDDPHRFRHSKTVGAYLGLTSRRWQSGTSIDVQGHISRAGDGEVRHPLYEAANIMLTRYRGFSSLKAWGLKIAKKRGHKRACVAVARKLAVIMHAMWRDGTEFRFKEPKEFAEGAVKGCPRIVGVAA

SEQ ID NO: 369689 - protein, 338 aa, unidentified
MKSHIGVDLHQRFCYLTALDASGKTRKQGQVANEGAALRAWLRPLPGPRQLVVEASGFWPAFARAVAPESERLVMVHPQRVKAIAAAKLKNDRVDSETLAHLSRCDLLPVAWMADEATQQLRLLVRLRITLGRQRARAKNQLQAVLHQEGFKKPVTDVFGKRGRAWLAGLELSAAGRVVVDTWLREVDHLDVELAAQTRELERLARADAGARFLQSVPGIGPYAAMVILAELGDVKRFQNKRALANYAGLTPVVRESAGKRKRGGITHQGSNTLRWIMLQVAQVAARCSPGARSYYAALRARKPAQVARIALARKLLTAVWALLHHGVCYDEALFIRS

SEQ ID NO: 369690 - protein, 340 aa, unidentified
MSLVLQSLLPFPDSCQGMSPHQQGRGTKMTEHCYGGIDVSKDRLDVMVLPDRKSFSVDNNAAGYSELVKRLRGLSIAAIGIEPTGGYERAVIRALLAADLSVRRINPNKLRQFGRARGVLAKNDRLDARLIAEYVAIMPTRVVQRDPATEQLAEVVTMRRQLCDEHVAVENQTAHLEDAMLRRLNKRRLARLAADILLLDRRMAQIVVSNANLTRRYELLTSMQGVGPTLAFTLVALLPELGQMSRKQIAALVGLAPYDFDSGRLKGHRCIYGGRLPVRNVLYMAALSACRYNPALKVFHHRLAATNKKPKVIIVAVMRKMITTLNAMLRDNVAWQPKSA

SEQ ID NO: 369691 - protein, 334 aa, unidentified
MSKQSENNTTQRKSNEAHFVGIDVAKDELVVHILPTNQQLTVPNSKEGIRVLVKRFKEIEPKQVILEATGGLERLLLTNLVANGIAATAINPRQARDLAKGLGELAKTDAVDARILACFAQLQCLPTRPVPTQETQEMNDLVTRKEQLLRMRTMEAHRLHAARQKAIRKSIEKIIETFDKQIDDIDARIEQMIADNPDWSEKDKILQSVPGVGAKTSQVLISALPELGTLNRQEMAALVGVAPFCDDSGKKSGARRIKGGRAPVRSALYMATFNAIRYNKTFKTFFDRLIAEGKKYKVALVAAMRKMITILNVMIRTKMHWKEQDALIQKEKND

SEQ ID NO: 369692 - protein, 369 aa, unidentified
MKMAIGIDVHKETSTAYAVYAGDSEEKGKQKEYLESFNKEFGRFTSTPEEYKRLMAFVRGHECHILLENSTKTHEVYWILKNGGLSVTVAHSTDLHRITRSVKKTDHHDSVELAGYMRRMLRGEVEFAVSFIPSPEWMVKREMCRGVLAEKEYLANTKKRIRAHLLLHGISLSREYEDIAVNTALIEMSIINDPYLRMLVRFADDAKKRVHMGEKTIEGMFSGNKTCELIDSVTGFGHTSAAYMSALIVDVNRFRSRSEFTASFGVVPKMRSSGESNPSCATTHRGDDLMRKRLMDCTRAHVRFEKDSVVAVMYNRLVNKGKSKREAQVAASRKLLTVVWSVLKSGVPYSSDSKVLKDAREMEESSAED

SEQ ID NO: 369693 - protein, 338 aa, unidentified
MNIATVGLDIAKQLFQVHGVDANGRVVLRKKLRRNQVAAFFANVSPCTVGLEACCGSHYWVRVLSRSGHRVRLMAPQFVKPYVKSNKNDANDAEAICEAVSRPHMRFVPAKSVEQQDVQSLHRVRSRLVSSRTALANQIRGLLAEYGIVLPQHISHLRRGLPRVLEEAENELTPFSRRLFASLYQELLSLQEKIDGLDEQIESVYRTSEPCQRVAAVEGIGPLTATAIVAAMSDGKAFKNGRQFAAWLGLVPRQHSSGGKPRLFGISKRGDTYLRTLLIHGARSVVARASRKTDRRSLWIADKRRRLGTSKACVAVANKNARIVWSLIAHEQNYRRAA

SEQ ID NO: 369694 - protein, 385 aa, unidentified
MNTATIAQPFIAEAQTATLFVALELSKATWLVALHAPDRDKLSQHRLAGGDVEALFGLIDKTRARAEAQLGKPVRVVSCYEAGHDGFWLHRLLREHGIENVVLDASSLLVDRRARRAKTDRLDVVGLLRTLMALARGERQVCRVVHVPSREEEDLRRQHRERERLVAEKGQHMARIKGLLMTQGIRAFEPGRRDWRERLAALRTAEGRVLPACLAAEIERECRRLWLVIEMLAAVEDEITSRLQSADELGAEQIRRLMALTGIGPVSAGVLVREVFYRDFSNRREVAHYLGLTPTPWSSGSVRHDQGISKVGNPRARHMAIELAWLWLQYQPGSALAVWFRTRVGAVKGRMRRIMAVVLARKLIVALWRYLVDGIVPQGAVLKTC

SEQ ID NO: 369695 - protein, 359 aa, unidentified
MEYFAGLDVGMEATAICVIDREGKVMLETSVATDPDTIFAALKPYVAKLRRVGHEAGSLSPWLQVELKQRGLPAICLEAWHARAALSAMRNKTDKADARGIAHIMRAGWFREVHVKSEESYRLRLVLTQRRNLKRKFLDIENAIRHSIKTFGLRLGKVSRGQFEVRVRELVADDPLIAGLTECMLRARAALWQEYVRLHKVVVTIVRGDELCRRFMRIPGVGPINALAYKTLIDDPHRFRHSKTVGAYLGLTSRRWQSGTSIDIQGHISKAGDGDVRHPLYEAANIMLTRYRGFCSLKAWGLKIAKKRGHKRACVAVARKLAVIMHAMWRDGSEFRFKEPKAQTGGSTTAAPKLVGVAA

SEQ ID NO: 369696 - protein, 356 aa, unidentified
MNVRRVQHFVVDGKEIFVGLEDSKKTWKLAVRSEGMLIHQASMEAKYSVLIRYLRNNFPNCTIHLIYEAGFKGFTLHDRLVEDGIDCVVIPPHVVTEPKVNRVKTDKRDAKRLALILENHDFRDVCHVPDRERREDRQISRTLIGIQKDIVRTRNRIRKLLDFHGIEVSLPDRWGRDEFRSLKKLSLPDPLRISLDVFLAQLEELWSHQITLRDALRTLCRKERYRKAFEIAVSLPGIGWFTAIRLVLELGEDLSHFTTGKKIASFVGLTCSEYSSGETEWKGRITGMGSGFIRATLIENSWIAIKKDPVLLAKFSRIWRASGSKKKAIVAVARMLIVRLRACIVLGAPYRIGVVR

SEQ ID NO: 369697 - protein, 384 aa, unidentified
MDVLMECCCGLDVHKDMVEACIIQGWLEEPAIYREQFGTSGKELSRLVGWLMEHECYHIAMESTGIYWRRVYETIEEEAPRWDCLLVVNARHMRNLPGRKSDVKDAEWIATLLRHGLLEHSYIPEKTIRDLREFSRLRRVLVQEKNRHINRLEKFLQAHGFRLSSVLSNMLCVSGRKLLNTLAQTGRLTPEDVLEAAGRRLKRPLEEVSEAVCGGLTQAQRSLLRLLLKKLAEDEEDLAYIDREMELIFAPYSREMELLDSIPGIDTLAAATILAELGPAPQESFPTPQHLASWAGLVPRNDESAGKVKSRSILPGNPYLKVILCQVAWIAVRARGSSFHAWFWSHQGKLGRKKAIIAVARKILILIYRLLERDQPYHPNYAAA

SEQ ID NO: 369698 - protein, 337 aa, unidentified
MKYSGIDLHSNNSVVTVTDEEDRVVAEKRLPNDLAKILALLSPWREELAGVVVESTFNWYWLVDGLQAAGFKVHLANTTAIKKYEGLKHSGDETDARYLAHLLRLGILPTGTILAPEQRAVRDLARKRMQLVRSRTTHILAVENITARQQSARISSNQVKQLTADAVDRMPWPEDVALAVKTNVAVIATLSAQIDLLEKRLQEKVGARTEYGLLTSVPGIGQVLATTILLETGPIDRFAAAGNFASYARCVDSVRTSNGKKKGEGNTKNGNKYLAWAFVEAANFALRYCAEAKRFYERKKAKTNNVVAIKALAHKLARACFHILKERKPFDVTRCFA

SEQ ID NO: 369699 - protein, 343 aa, unidentified
MYYIGLDVHKKTISYCVKDVAGHVHREGKIGSTRRELDAWINTLPQPRTMAMEATIFTGWIYDHLLPHAEKVKVAHPLMLRAIAAAKKKNDKIDASKIADCLRCDFLPECHMASTEIRDRRRVLRYRNLVVKQMVQMKNRVSGLLMETGVSYNKQRLHKVGYFGELMSTNEDISQAVRPLLNLSRGMIRRSGKLEYDLVSSLERDPLLRERLRRLRTVPGVGSITALTWALEIGDYTRFSSNKQAISYCGLCADEKSSADKVMRMPLSKQRNKHIQRVLIEAAKLAPRESPELAMIRERELERGNPNRATLAVARKMVCYMMAVERRQQDFVTAGELVPTEAA

SEQ ID NO: 369700 - protein, 343 aa, unidentified
MERYVGLDVSLKQTSICVVNQMGSVMREGVVDSDPEAIAAFVRSQAPGVVRIGLETGPTTTWLWTELKRLDLPVICIDARHAKAVLKMQINKSDRNDAAGIARIMQTGWFKEVRVKSLDSHATKALLASRALLVKVKRDLENQIRGLLKNLGLVIGRAKFNVFAIRAEELIDGHPELTAAVAPLLMARKTIEQQIADLDRKLHKLARQDAQVRKFMTVPGVGPITALCFKATIDDPTRFKRSRSVGAYVGLTTRRHASGEVDWSGRISKCGDAMLRMYLFEAANVLLTRVPKWSALKAWGMRLTKRCGLRKAKVAVARKLAIILHRMWVDETEFNWSTKKATV

SEQ ID NO: 369701 - protein, 413 aa, unidentified
MDKIYDICCGIDVHKKLIVACLNHKRKKELREFGATTRELMELAEWLQKNECEIVAMESTGSYWKPLYNIMESYGLHAIVVNPAHMKAVPGRKTDVKDAEWIAELLQHGLLQPSYIPSKDQRELRELVQYRKSLVGERTRELNRLQKMLEGANIKLSGTVTNINGKSARKILEYILSGNEIDEKKYDEMYEEKLIAHNLKASKEQILDDLKGFMSPLQRRMLKELLQHLDELNVHIENLNDEIDNFMKPEEKQASQVIQDVTGIGNTSAQTIIAVIGTDMERFPSDRHISSWAGLCPGDNVSAKKRKSGKIRKGNALLKSTLVLCAHAAVRHKSSYFHAQFKRISTHRGKKRAYVAVAHSILIAIYHILKDGVKYQDLGAEYYNQFNAERKIHAYLKKLQALGWEPPKEAVPA

SEQ ID NO: 369702 - protein, 423 aa, unidentified
MLGVGIDWAESFHDVALGVPGKGVIEQFRVDHGPAGVQRLISRCAELEPDPAEVRVVLETRHGLLVEALADAGFTVLPVNPDLVARRRGPAKKKDDSEDARICCLMALDAYLDLRQLIPHGEAGTELRAIARDDERAARDERRIGNRLRADLLAVFPAAIDISDGDLGAPVFLKLLERWPSAEALAAASRQEVEALARSARHGWPGRFADRVAGAMAAPRLAPRAAPARAKEGSIRLAAAQLLAIRAQRRAWERRMGELLLGAPRYGRSKTPKDPDPGKAFPGGEIYLSMPGLGDRLAARVAGEIGEHYEQFATPNALQCYAGRAPVTRRSGRSEFTVARRLAYNRPLGEAVQQWAFCSLTRSAWAREFYDEKIAAGDSRNGALRKLGNRWLEVLWHCLHKGACYDEAVHAANRKRNRPPAAA

SEQ ID NO: 369703 - protein, 352 aa, unidentified
MEYIGLDVHKQYSTVCIFDDLTGEIEHLRLNNSRAEFEELFSTYTNPKVVLESGRSSYMVYDTIEDFVSDIQMANPLQVKAIAWAVVKTDKVDAETLTKLLRADVIPQSFIRNRENRETLYLLRQRMFFVKARTMVKNRIHCIVDRQAEQVRNTKPDVSDLFGSKGKQWLLSLKLSSNESRMLKEMLEMLDFLNEMIRSSDRLVYKLLNEDPVAKRLSTIPGIGNFYAVLIRAEIGDINRFREDKKLHAYSGLVPSVSSSGGKTYHGRLPKQCNHWLKWALIEAVYPAIRKNLWLKDKYRRIAKRKNANTAKVATARLLMTLVYKIWKSERNFTIEKPLKDKLEHRTALSHS

SEQ ID NO: 369704 - protein, 338 aa, unidentified
MPQFSNFVGVDISSASFMACAGTTPWKLVVKPESFMNFEGGYVTFLDWLKEHNLRPENTVICMEATGVYGEGLAYFLSASGYTVAVEPPLNIARKFPVNASKTDWLDCQYIAEYACRYVDKLAFWQPRSDILEQVKVLLSTRQLFSVQITAHKNALHAVNRKKVLSEVAKKVHENIIAQIVKHIAEIDAEIRRLIDSDPTFKKTLLLLITIPGIGVQLAAHLIIMMQQSLDPRELASFAGIAPIQHESGTSIHSAPTSRHYGPPALRKLLYLAACSVRTHRKEFRQYFLRKVAEGKPGKLVLNNIQNKLLKIACAVVVSQKPFIPNYVSVNPLVLQNA

SEQ ID NO: 369705 - protein, 449 aa, unidentified
MREPQEIEDEEYEQVVERVAAVDVARASGMVCTRVPHPSRPGRRRTRVWEVDATTNAVIELGGQLAGEGIEKVTIESTSDYWRLFFYLLEAAGLTVQLVNAHDVKNAPGRPKTDKLDAVWLAKLTERGMLRPSFVPPAEIRRLRDYTRLRTDLTRDRTRHWQRLEKLLEDSLIKVSAVASTMDTLPVRDMLEALIAGERNPQVLAGLARGRMKARRAALIEALTGRFDDHHAELARMLLDQIDALTAQICTLTTRTEDLIAAIPAAQGVDADGTTGPGAGTGPDAARPDALTRLDEIPGISAHGAQIILAEIGLDMTRFPAAGHLVSWAKLCPRTIQSGAKNRSGKAGKGSPCLKGVLGEIAAAAARTDTFPGERYRRLVKRRGKLKALVAVARTILVIIWHLLADPDARYCDLGAGYYASRTGKDRKTRNHIRQLEAPGFTVTLAPAA

SEQ ID NO: 369706 - protein, 340 aa, unidentified
MNRTTYGLDVAKRVFQMYWIDADTGEIYNRRFSRQQLIEFLANRPAGRVALEACGSAHWWARKIQALGHEAMLIHAKFVRPFVQTNKTDAADARAIFTAANQPDMRTVAVKSEEQQAMLGLHRMRSQLIKFRTMQVNQLRGLLYEFGFIFKGGRKAGLAEIRARMAELEQMVPGLLWEAVNAQLARLDQLDAEVQALEQRIGHWHNAQAACNAIAAIPGIGPITATALVATMGQAQAFRSGREFAAFIGLVPKQSGTGGKLRLGGISKRGDVYLRTLLIHGARMALTRAKDKGAWAEALLQRRPTNIAILAVANKMARTAWAVLAHDRTYQRGYVSVKPA

SEQ ID NO: 369707 - protein, 419 aa, unidentified
MSFKIFKFNCCGLDVHKTWIYACIGITDSNNRTEYKQARFSSFSKGLHQLCVWLAKYNCNDVCMESTGKYWIPVFNILEQHKIRVTLSHPKYTKPMKGNKTDRKDAKWICDLYMCGMVKPSFIPPADIRELRDLVRYRFKLTCMITGEKNRAQNCLTVSTLKLDDVFSDVFGKSSRSITEQILQHPGEKFDVSPFVDSRCKTPIEEIQAAVDGNISKEQAVKLRQCLDHIDELQKHISEVEQEILRLSDKYEAALNLIRTVPGFDKNPMTAIQVLSEIGGDMSVFPTAKHLVSWAGCCPRNDKSDRKIKSTRISCAGSYFKQVLVQIANALIKSKKHFEFTTRYKRIKTRRGHKKAIIARCRMILTAIWHILTDLKPYTSDGFLESRPVKKEKVLTTSQALNLLRQRGYLIKDEPSPVS

SEQ ID NO: 369708 - protein, 407 aa, unidentified
MELSALYKCVIGLDVHQAQITACALIQQPDGSTRIEQRQFGGFARDRRELADWAASLRPDEVVMESTGIYWKSPYAALEAVGIRAKVVNARHVRHVPGRKTDVGDAHWLAMLARAGLLRASFVPPAALRELRLIARQRQKLVGQLASEKNRLHKVLTDSGIRLGVVVSDLHGQSARAMVKAIIAGQAPQQVLNLASRRLKASREEIFDALQGDLTASHRFVLDELMQHIEEIEARIDRFDARLLAGLESERGTLALLQTIPGVDLIGAAMLLVEIGSDMDAFGSADCLASWVGVCPGNNESAGKRKSGHTRKGNPYVRRLLCEFAHAASRTTSVFKSKFQALVVRRGYKRAIIAIGHKILRTLFFMLKRREHYRDCATDYEALSVQRNAPRWIKALTKFGFITPACA

SEQ ID NO: 369709 - protein, 385 aa, unidentified
MQKIIKQCVGIDIAKASFTTCVCKRMLSGETQTSPVESFENNKHGFNQFIKWHRKITDPSVEIIFLMEATGIYYESIAYYLHRLNLAVSVILPNKVKHYAKSLNIKTKTDIVDAHIIAQMGAERQLPLWQPPAPILKQLRDLTRLYTDLKKERTVYLNRLESENASEETLHFVINANRAILKKLEEQIKNCEIEIEKLIFAEEWLAEKIVKLMTIKGVELITFAIIIAETQGFALVNNRKQLASYAGYDIVKRESGTSVKGKTRISKKGNSRIRAALYFPAMVASRHNLDLKEDYQRINIGKSSKMIGMTALQRKILLLIYTLWKNNEVYKQNENQPSGNRKTNILLRQRKEVKKKVGNSLELPTQDELPYNLSTEVLLRQLQSS

SEQ ID NO: 369710 - protein, 320 aa, unidentified
MVEVSTIGLDIAKQAFQVHGADASGHMVFRRKVVRTKLMAFFSSQPQCLVALEACGGAHYWGRQIEKLGHAVRLIPPAYVKPFVKRQKNDAADAEAICEAAQRPNMRFVAVKDEAQQASSVVFRARDLLVRQRTQCINALRGHLTEYGYVVPKGATHVPALVAQIEDPNCQLPEGARGILRVLVSTLRSLDENIAILDVEIARRSKEDPAARRLATIPGVGPITATAIVALTPPIETFRSGRDFAAWLGLTPLQKSTGGKHRLGATSKMGERTIRRLLIIGACAVVRQACRCGAPEGSWLAGILARKPRMLGAVDERWGL

SEQ ID NO: 369711 - protein, 411 aa, unidentified
MRLCVGDDWAEDHHDIEVMDEAGTVLAAGRLPEGVAGIGQLHELIGRFVPAAGGDAEVQVGIETDRGPWVAALIAAGYVVFAVNPLQASRYRGRRGVSGAKSDGGDAHMLADVVRTDAHQLRPAAGDSPQAEGIKVLARTHKTLIWQRSAVVLRLRAQLLEYFPAAVAAFEDLDTPDALELLGKAPDPARAAKLTRAQVSAVLKRAGRRKITERAGAILAALRSPQLARPPALTAAYAATVRSLTAVIATLNEQVASLQGQVEAHFGQHPDAEIYLSQPGLGAITGARVLGEFGDDPHRYATAKNRRNYAGTSPITRASGKKKIVQARYVRNDRLTDALMLQAFAALRVSPGARAFYDQQRASGRQHNEALRRLASRLAGILHGCLKTRTCYDEATAWGHRENTPQSDAAA

SEQ ID NO: 369712 - protein, 436 aa, unidentified
MHEPEFAAYIAIDWADDRHCWQMWIPASQRSEKGWLDHTPQAIDRWAVGLQQRFAPAELAVCLEQSRGPLVYQLAKYAHLVLYPVLPATLARYRQAFSPAGAKGDPSDTALLLEILRQHRDHLRRLDPDTPETRLLALLTEQRRQLVDERTRHSNRLTACLKLYYPQPLDWIDDIDSPLGCDLLQRWPTLQQLQRVCPDTLRRFFAQHNCRSAARIEQRIQAIVEATVAVHDAALLQAGATATRSLVALLQTLNDRIAVVDQSIAELTPKHPEAYLFADLPGAGPVLLPRLIVAFGTQRHRFSSAAELAAYSGIAPVCRQSGHTKSVVFRRACPTFLRQTFQEFAACSKAKSTWARAFYQLQTDRGKKHHAAIRALAFKWIRILFRCWKDRTPYDEARYLRCLAQRNSPLPGAATAAECTDNEPDTLSDDDSKPAE

SEQ ID NO: 369713 - protein, 336 aa, unidentified
MERTQQYVGIDLHRRRSVIVRKTSTGEPIETVQIDNDPDVLAAELRKAGEHPKVLLEATYGWYWAADVLQAEGANVHLAQPLGNNWGHRRVKNDERDATDLIDLLRLGRLAEAWIAPPEVREVREHVRYRAKLVHLRGALKSQVHAILAKEGVAVPMSDLFGKHGGQLLDDVALATAFRVRVDSLRELIDRVDLELAMVEECAHGALSDDPGYRAIQQIPGVGPVLAGVFVAEIGDVTRFRSPSHLTSWAGLTPMHRESDSRSVATTSPSKARASCAGPPSAVIRQRGHTVVQAHHRRVAERRGSQIERVAAARKLLVPVYYGLRDGEIRCLARAG

SEQ ID NO: 369714 - protein, 430 aa, unidentified
MDEVGEQELLVERVAALDLGKAVLQACVRVPHPSRPGRRMQELRSFATTTSALLEMAGWLHRWGVTRVVMESTSSYWKGAYYLLEADGFECWLVNARDVKNVPGRPKTDKADAVWLAKVAERGMCRPSLVHPKPIRQLRDLTRYRRSLTQDRSRERQRAEKLLEDAQVKLSSVISDIFGVSGRAMLQALIAGQRDPAVLAQMARGSMRRKIPEVQDALRGFFTDHHARILAMMLDNVDRLTAQITVLDATIEEVIAPFAAQVAQLDQVTGVGLSAAQDLIAEIGVDMSRFPSDAHLVSWAKFCPLTHQSAGHKKNKGRGKGSPWLAGILGNIAATTARTDSFLGARYRRIARRRGKQKAIVAVGNSVLVIVYHLLSDPTAQFHDLGAGHYESRINRERRARNLATQLQAVTGQTIIIRDGKATIVEPQAA

SEQ ID NO: 369715 - protein, 417 aa, unidentified
MKDPPISIPWERYLAVDLHKHYLVIGGVNAHQEIVLGPRRMDLAAWPTWAQAHLLPTDSLVVEATTNAWDFYDHTQPLVGRLQVANAGKIALIAKTRVKTDAVDVLKLARLSAANLIPEVWVPPQVVRELRNLIAHRWRLTRMHTMTANRLQSLLHRYHFVPPAGELYWDSHRAWWDGLVVSPTERLRLRQDLATLDHLRPQLAEVDQELARLSTEPPWATAVPLLMQLPGFGLLTVMTVLGALGTITRFDTAKQLVGYAGLGASVHDSGQMHRGGRITKQGRKDLRHVLVEAAWTAVQRHPYWKREFEQLTARMAKGKAIVTIARKLLVRVWYVLTKQEADRQADPHMVGLKFFAWSWKLTAEQHGGLTRRQFVRYHLMQLGLGNDLTHIQRGGTKRPLASVEEVRQLRPDLRDAA

SEQ ID NO: 369716 - protein, 347 aa, unidentified
MDKCTTSLSVVTYAGIDYHKKFSVITLGDQNGKVVTTGRLSNDRQLIKKFFCEFPGVTCAVESCRGYEWFVDYLKELGLIVHLSNPYQTKQIAQSRCKTDKVDSRILMELLAIGFLPTCYQPTPEERALREQLRWRAHLVRYSTRMKIRIHSLLDKENCGSAIDLFGLEGQKFLKQVRLSPVRQALLEEHLLLLEHIDELVAKENTWVKKTAMANQQARLLMTIPGISYLSALIIIAELGDIGRFKRAAQVASYAGLVPSIYSSGNVRKTGAITKQGSKLLRWMLVQCAWRAVSCSHHLRCHFAMVSQRCGKNAGAVAVARKLIQIAYRVLRDQKPFASELLGKRVA

SEQ ID NO: 369717 - protein, 387 aa, unidentified
MPQQLDDLSRSLTPLEQDSTIVAVIEMSQASWLVAGIVPGIERHPLKKLEPSEVELLRLLMRWRAEATQNGRTITRIAVAFEAGRDGFWLARWLRARGIEAYVIHPASVAVSREHRRAKTDRLDTGLLKRVFLGWLRGEPDHCHMVAIPTLAEEDAKRPNREREGLVRERTRLVNRMKSCLVRFGVRTFKPTLRNAPDRLATLRTPEGVPLPPNTLLELRRDMARLRFVMDQIKEVEEARAQGLNQAPPDKTHVMVRLLARVIGIGLETADMLVQEVLARTWRDRRAVARYAGLTGSPDESGSRRREKGLAKAGNARVRRGMIQLAWRFLLFQKESALAQWYRARTADARGSTRKTLIVALARKLLIALWRMVTTGEVPAGVVLRAA

SEQ ID NO: 369718 - protein, 409 aa, unidentified
MRYYVGVDWADQTHAVWVVDESGTKITVRTVPHTAAGFSEWGRELDEWRAQGIERWAAIERPDGRVVDFLLDHGVVVYPVNPKALDRARDRFRQSGAKSDPFDARVLADFLRTDHRHLQALQPSSDAAQELKLLTEDCQRHIRQQTRLVNQLTATLKAYYPRALEVAELTTALAREFLQTYPTPEALTTLTARQWQRWARGRRVSAARIGALWAVLHQPQLPVPAHVVRAKARLMQSLVEQLTPVVTAVAQYRTAIDDFFARMPAAQWARTLPIGKHGITAPTLWARLGDAPGRWESFRHLQAQAGAVPVTKRSGKQRVVHFRFACDKSLRHVVDQVAFLSLLSSDWARAYYDQQRARGHAHHQALRALGAKWLKIIFVMWNRQVPYDEPYHLATMTRQQLRQRQTTIA

SEQ ID NO: 369719 - protein, 428 aa, unidentified
MNCTQNEKLNQVTPHTLIVGVDIAKFKHVARAQDDRGKILGKALTFTNTKEGFDAFFAWLEEMQHKHEKADVLVGMEPTGHYWLNLAYTLKERLVSFGVVNPLHVKRSKELDDNSPTKNDIKDARVIAQLIKDGRFSYPRLPMDQDAEVKAGITIRNQIVGDLQALQGRIYNWLDKYFPEFLTVFKDWSGKMALATLEHIPLPVQLNQTTPERVAEIWSTYGGVQRPSHKRIQRLQEAAGRSVGLTVGLQMAQREIAINIKRYKMLKEELHALEKQLEDLVLTLPGIAEMLTVPGVGMVTVIELYSELGDIKNFKNPRQILKYAGLNLRESSSGKHKGQARITKRGRAKLRALLFRTVMPLVRHNRAFKALHQYYTTRQENPLRKKQSLIVLCGKLVRVLHTVGQKQCPFDEERMIQDIPHLSLALKA

SEQ ID NO: 369720 - protein, 342 aa, unidentified
MNHVAIDLGSKESQVCIRRQDGAITEERKYPTRKLVELLATWEPARVVMEASAEAFRIADAAIAAGHQVRVVPGTLVRLLGVGDRGVKNDQRDAQHLSKASWQTDVPSVHIPSEQARELKSICGARDVLVASQRNLANNVRGWMRTQLLRLRAGTMATLPDRLRGHAASTGRPLPEHIERQLTMLTLVMEQVKAADKQARNLAAEHPVCRRLMTVPGVGPITSLRFVAAIDDPTRFSSAHRVQSYLGLVPGEHSSSERERRTGITKAGPMEVRRCLVQAAWAATMVRSVHPMLIWHRQLAERRGRPVAAVALARKLAGILWAMWRDGTSYQPKRAAQAPKAM

SEQ ID NO: 369721 - protein, 354 aa, unidentified
MEHIGIDVHKVESQICILTEGGEVVGRRIRTQRERFAAVVGGRPRAKVLIEASTESEWVARCLEELGHEVVVADPNFAAMYATRSRKVKTDLRDARTLAEACKLGAYRPAHRTSDRQRHVRAQLSVREALVQTRARYISLIGSLLRREGLRVASGNAVSFTKRVAGLALPGQLKSEIAPLLAVFVSINRQLVWIDTRLEHLAQSDETVERLCTAPSVGPVTAAAFSSTVDDAHRFKSAHQVEAYLGLTPSEWSSGEKQCKGHITKAGNNRMRKLLVQVAVSILRLRSPRTEALRKWSTGIAARRGKKIAIVALARRMAGVLFAMLRDRTCYIQAAMPEPSARLPELDSIDCYWQ

SEQ ID NO: 369722 - protein, 370 aa, unidentified
MSVYVGIDVHRKRSQVAVVTEDGTVQLNKNTVNGVEPILRLIGDLPAGTPVAFEAAFGWGWLLQLLEDYGFDPHLVHPLQCKAIASARLKNDKVDAAILAQLLRADLLPEAWIAPPAVRQLRALLRHRAGLVRLRTQQQNRIHAVVADFGYDRAGSYLTGPGRGWLAELELPAVSREIVTDALTVIDALALLTDRIDGELRQHAKADPRVKVLTTLPGVGQFTALVMLAEIGDISRFPSARKLASWAGLTPTVRGSDRVVRHGHISKQGSAWLRWVLNQAAQTAKRSPEFSATYAAIAKRRGTKIATTAISRKLITRAWHLLATAQAPGPAAPDASTATAAQPQTGRVTTPRASSLSRHEPATGRARSSD

SEQ ID NO: 369723 - protein, 381 aa, unidentified
MKKELYIGLDVHKDSITVAVAQGGRDGEVRLCGTISNDLHAIEKLLTRLRKAHAANPPIEVCYEAGPCGFVIARRLRQLGVPCSVVAPSMTPKRSGDRIKTDRRDALKLARLLRAGELKAIYIPEPTDEAIRDLCRARTDAVDDLRRSRHRLKALLLRHGYRYHGKSAWSQAHMRYLRELVLPHPAMKVILEDYLMAISAAQERIQRCETAMIDQLSSWRLRPAVDALMAFKGFQLLAAMITISELGALQRFNHPRQVMAYLGLVPSESTSSDKRRQGAITKTGNSHARWILIECAQHYAAPPKVSKELSHRQSGQPREVLALSWKAQNRLHSRFVRLAARRLMRNKIVVAIARELCAFIWALLRNQSCYLQIDEHLKQAA

SEQ ID NO: 369724 - protein, 374 aa, unidentified
MENSITYVAMDTHKKEHHVALHYPGQEEIVRFTIKNTTREITKMTQKVIKQAPGDVEFCYEAGVCGFVLKRRIESHGCHCAVIAPSLVPRKPGDRVKTDRRDALKLLTMFQAGLLTEVHAPDQQQEAARELTRCRQAAQENLKRVRHQLLKFLTRHGYLYSDGNHWTDKHIKWLRTLVFEESLLHDVFDNYFTELQHCIQRLSSLDNQVEKLAKSEPYQEVVGLLRCFHGIDTLSAITIITEIFDFGRFSSPGELMSYLGLTCSEFSSGEKQKRGPITRAGNKRVRRVLVEVCWHYRHPCTISKALRDRRKDQPQWVIDIADKAGQRLRKRYRHLTNCGKMPCKVTVAIARELAGFIWSVFKEYDARRIVKKAA

SEQ ID NO: 369725 - protein, 411 aa, unidentified
MKRVYDNCCGIDVHKKLIVACFKQGSEQEVREFGATTRELLELCRWLKDGDCEMVAMESTASFWKPLYNILEASELDAIIVNARHMKNVPGRKTDVNDAEWIADLLQHGLLQASYIPDKDQRELRELVRYRKSLVGERTRELNRLQKMLEGANIKLSGTVSNINGKSARAILEHVLTGESFDDAKYDEMYENNVISHRLKASKEEIIDDLNGVMSALQRRMMKELLIHLDELNIHIRNLDDEINNFMKPEAKTASVALQEMPGIGETSAQAILAVIGTDMSRFPTAGHLASWAGLCPGNNESAGKRKTGRTTKGNCLLRETLITCAHAAILKKDTYFYAQFQRISSHRGKKRAYVAVAHSMLTAIYHMLKDGVVFKDLGADYYNQFNRERKINACLRKLERLGYRAEIAAT

SEQ ID NO: 369726 - protein, 448 aa, unidentified
MTTKISLAVMDPLAAFVDVGSEQMHVSIAGESAEVFGTFTTELHRLRDWLRERGVKSVAMEATGIYWLPLYGVLESAGLKVSMVNGKQTRNLPGRKTDMKDCQWGATLHAHGLLQAGFVPPAQIRRLQDYLRLRGDHLSCAAACVQHQQKALERMNVKLHDVISSLVGESGIRIVEAILAGERDPERLLALCDKRIQNKKAERVKESLRGTWAEEHLFALRQAVENWQHYQRQIAACDQQIERVLRQISGPDESGGTEIKTKPLKRGGINAPQIEDLHHMLRKLCGGKDLTVLPAHTDYSLLQLLSEVGTDLSGWKTEQHFTAWLGLAPGSHQSGKRKGSVRRKRNRAGRLFCMMARSLAQSKNIALGGFYRRMAARRGGLIANIALARKLAELFWRVMVKGLDYAEAGLKAYEEQVLETKRRALSRLAKQLGRIVLPSLAELQATKS

SEQ ID NO: 369727 - protein, 346 aa, unidentified
MSLSSPTPRYQLYVGVDIAAKTLTAAWMAPGATPGRPLTVDQTPQGFTALQDRLLATGHPAATILVVMEATGSYWVGLATTLAQAGFVVSVVNAAQAHHFAKALLKRAKTDAIDAQTITQLAARLEPAPWTPPPAIYTELQQRLAQRDSLMTLRQQVRNQRHALQHLPVVISSVLERMEALIATFDAQIAAVEQEIEQAVTQDAAWATTATLLLSITGIGLLTAAWLLVTTLNFTICATAEEATAYAGVAPHPYESGTSVRGRAAIGHGGNGRLRTALYLATLSAAQHNPHIKPFYERLRAAGKPKKVARCAAARKLLHLAWAVATTGVAFDPLYQTHHACSGSST

SEQ ID NO: 369728 - protein, 311 aa, unidentified
MTKDSIGIDISKDTFDVHRLTTGAVAQFPNSPAGLRALLRWIGDDLPDLVVYEATGPYHRTLECTLAGVLPLVKVNPLQARRFAQARGTRAKTDAVDARILARMGVAFELAPDRPAEKDQHQLNELQSARIGLVKERARLLNRGKTQTLGILKRQSRARLGQIKRQLAELEAALLDLILECPKRARAFGILCSIPGIGQVTAVAILVECPEIGTMSRKQIASLAGLAPMTRQSGQWRGKAFIQGGRKYLRDALYMPALVASRHNPDLRRKYQEMIGVGKPAKVALTALMRKLIELANVLVMEDREWAQRGA

SEQ ID NO: 369729 - protein, 341 aa, unidentified
MKRPKYYVGVDISAENFMVAVGEEPWRVVAKGEEFRNKMEGYEKMKAWMKKRGIGEENAVLCMEATGVYGEGLAYYLQANGYQIAIEAPLKVKRAFMPTGHKNDRVDSQQIAEYAYRFYDELVYWKPREEILEQIKVFLEIREQYVVQKTGHFNALKALKRKVVQTPLAEALHERSIDQIKKNIKEIDAEIRRLIDQDPKYGDIIRLLMSVPGVGLLLASNMLLIIESAPDEVPPKQMAAYIGISPYEHRSGNSVYKPDSSRHYGPTKVRKLLYLASLSVRTHQEQFKKYFLRKVDEGKPKKVVLNNIANKLVKIMCAVVKTQTPYIPNYRSIHPSLYKMS

SEQ ID NO: 369730 - protein, 440 aa, unidentified
MAVRKREDEVFPNAAGIDVGASSHWVAVPAHVTQKSVREFGAMTDDLNGMADWLLECGVDTVALESTGVYWIPLYEVLEQKGLKVWLVDARQMKYVPGRKSDVLDCQWIQKLMSLGFLRAAFRPDAEVLVLRAVERQRELLIVEQGSWVQRMQKALVQMNIQLTEVLSDVMGMTGQAIIRAIVAGERDPKTLASHRNGRVKASVEEIARALTGNWREEHLFVLKQSLAMYDHFVAHLAECETKLQALLRDLGQKQVDLGKAPRAGSKMRTEFDDRQILANWAGVDLTRIDGLGLTAATKILTEIGVDLSRFASVKHFCSWLGLCPGTKISGGKVLSAKTKRSTNRVRQALKLAAMSLSHSKSALGAFYRRLCARMDKPSANTAVAHKLARMVYFMMTRGEAFVDQGQQRYEELQLQRSVAALKRRAKDLGFVISPVATTA

SEQ ID NO: 369731 - protein, 406 aa, unidentified
MADIIALDVSMGKSNVAWYHQKNCRGEFVFRHTQSGFNQLLSTVQAADHPIIFFEATGIYSSPVEHFCISHQLKYCRLNPLELHLKSENLRRVKTDRQDARKIALTVQGNLFRLTVPKSPRFARLHELSRFYNQLNNDWDHRLVQLHIALEQTFPELKQLFKNKTSKLALNIVELFPHPDFVKLLSRTKLKNRLIKSTDKKLSNMKGFKYADQLLKLAQDAYPAASQDSVQVDEVRYYCRLLIELTKQKEKIVKQMITTAQEDETFQYYVSFLGIGPQTAAQLMAELGDISRFDNANQLNAYVGIDIQRYQSGQGGHQDHINKRGNPIARKLLYFAIGNMIRQQHAAPNHIVDYYYHLKQKRPYPKLNKVAMVACMNKTLKCLLSMIKHHTKYRYRYTDSRSLVKN

SEQ ID NO: 369732 - protein, 445 aa, unidentified
MARKSQKRRLTIVHPDCAGIDIGSREHWVAVDPQRVEEPVRRFGTFTDELEALADWLAAVGVRTVAMEATGVYWMALYEVLDARGFELYLVNSRATRQVSGRKSDVLDCQWIWQLMAHGLLQGAFRPADAVCTLRAVVRQRETRVADQARSSAHLQKALRQMNIQLDQVVSDVTGKTGMAIVRAIVAGERDPQVLARLRDGRLRADEATVARSLYGNWREEHLFALAQALAQYDFLEQQIGACDRLLETLLERLPRQRVEVPAPRKGLRSEHRTKAQQSHLHQALCEVMGVDLTAIPTIGIDTALVLASEIGPDLERFPSQQHFCSWLNLAPSTRISGGKTLPGRPPKRFNRAGQALRQAAMSARHSQSFIGASHRARLARMDSAQAVKATAHQLARLIYAMLTQGQAYVEKGVETHEAQSRRRQLRALERKARQLGLELTTKAA

SEQ ID NO: 369733 - protein, 309 aa, unidentified
MIVVGVDVHKQSLTAVAVDEVGRSVAELTVGSALELVVWSVSLAAERLWAVEDCRQLTGALERALLAAGESLVRVPPKLMAPQRRAGRMRGKSDPIDALAVARAALREPRLDHPRSGEAAMRELKMLVDHRDDLVDERRRAQQRLRWHLHDLDPELAVPAGALDRTVWLDRVARRLSRAEQTVQVRIARELVGRCRSLTRTILALERELQARIDKTAPALLALPGCGALSAAKLLGEIGPIERFDTDAQLARHAGVAPLEASSGKHRRHRLDRGGNRQLNCALHRIAVTQARIHRGCPARRGFSAAVRV

SEQ ID NO: 369734 - protein, 349 aa, unidentified
MTIVEDRPVITGGVDTHADLHVAAALDPLGGLLGVQEFPATAAGYVRLLGWLGGFGDIALVGVEGTGSYGAGLARHLAAAGVRVVEVDRADRQDRHRAGKSDPLDAVSAARAAQSGRAAGEPKGRDGAVEAIRALMVAKRSARAERTQAINQARALIVTGPDELRARFAGHRPAQLVAAIAALRPRPGDVPGYATRVALRELGRRAQFLDAQLDRLDELIVPLVTARAPGLLALHGVGPDTAALLLVAAGDHPERLRSESSWAHLCGAAPIPASSGKVSRHRLNRGGDRQASHALWRIVITRMGSRPGHPATRAYVERRTKEGLSKKEIIRCLKRYVAREVYRQLRGSA

SEQ ID NO: 369735 - protein, 343 aa, unidentified
MTQYVGLDVSLKETKLHVLDEAGNRIWRGRCATDAAAIAAAVRRYAPRAVRIGLETGPLTTWLWTALRAEGLPMVCLDARHAKKALDMKVNKTDANDAEGLAHLVRAGWYREVRVKGRSAMLAKALLGARSQLLSMSLALENQIRGILKTFGRIVPKGAGGLFEKNVRALIMDDAEITAVIMPLLQARQVARGKCAALDRRIIRSVQGDATCRRLMTMPGIGPITAVAYVAALEKPDTFKRSRAVGAWLGLTPRRFQSGEVDYDGHISRRGDRQLRALLYEAAAVLLTRVRRESALRCWGLMLWKRLGFKRAATALARKMAVVLHAMWKSGTAFNPTLSAITP

SEQ ID NO: 369736 - protein, 304 aa, unidentified
MYGIGIDVSQATLDVAVHEQAFGQFSNDKRGFVRLIQWLKQWPITQVVLEASGGYERAALEALHEAGLPMVRINPARARRFAQATGRAAKTDRLDAAVLAQMAHLLPLTRYVPPAPWQRRLAEFAQCRRHLVQMRVSEMQRLRQLTDPVLITIKQRHLAQLSEDLKQLDKAIAEQLAAQPCWKNIGTLKGAGPILVSTLACELPELGTLGSKAIASLVGLAPMNRESGTWQGKRSITGGRAVVREALYMAALTAIRYEPRLRDFYATLKAKGKASKVALVAVMRKMLVILNARKRDAEAALVCT

SEQ ID NO: 369737 - protein, 423 aa, unidentified
MYSSTLCVGADVHLDKIVLRAVDKASGHEVIERFHVTNNLPGAQSATATIVQAATHLDYTRIEIGYEATGMLWIPFHRFLDTSPLLQPFDLAQVCFNPKLVADFKDALVLRGPKNDDRDAFDVAARVQIGHWPVSYVPGDFWQGLRRLTRYRFRLSRNLSREKMRFQSYAFLKCSDWKRVKPFSDVFGATSAALLTEFTAAELREMTHSQLADLITHRGRGRFYDPDATARAVQQALRSSYPIERQMDEMITVTLATGWEHIRYIKRLMKQMDQQISRYIEPVPNPLITIKGLGPVITAGLLAEIVDISRFPEHKHLAQYFGISWTKRSSGDSVSQNTRMTKVGNPYGRYYFVLGADHLRRFNLEYKSYYWRKYNEVSKYQHKRALVLTARKLVRLVHALLTKNVPYVRPRMPVDFQEDPLLQ

SEQ ID NO: 369738 - protein, 334 aa, unidentified
MQNITLIGIDLGKHSFHIHCQDKSGKALLRKKFTRTKLMQFLATCPPSVVVMEACAGAHFMARCISDFGHETKLISPQFVRPFVKSNKNDFVDAEAICEAASRPSMRFVQPRTETQQAMRALHRVRESLIRDKVKTTNQIHGFLLEFGISLPIGDAVIKRLSLVLAEHEIPEYLSRLLVRLHTHYFYLVEQIAELESELSQSINADDTAQRIMTIPGVGPITASLLSSQLGDGKQFSCSRDFAASTGLVPRQYSTGGKSTLLGISKRGDKNLRRLLVQCARSFMMRLERKHGKLAEWVREQLNKKHSNVVTCALANKLARIAWAITTQKKEYQA

SEQ ID NO: 369739 - protein, 458 aa, unidentified
MEGSYAGVDWASDKHDVLVADAAGEKLLAATFAHDEKGLRSLCRQLVRLKVQLVAVERPDGLLVERLLDAGLAVLALHPNQVAAARDRFRVSGGKSDGFDAFVLCELARTDHHRFRVLEPDSDATKAIRALTRGREDLVGARTGLVNQLRAELERFWPGPLHLFSELHSQISLAFLERYPSPTDARGLGETRLAGFLARQRYSGRQKPAQLLAKLRAAPVGRVGERELATRRGLVRGLVAMIKQLNEQIAELERQIATAIREHPDGRIFTSLFKGAVITAAELLAEMGDCRGRYPTRDTLAGDAGQAAVAIESGKRKAACFRWGCNKRLRNAFHTLADSSRHHNPWAQDLYAQACERGHDHPRALRTVGRAWSRIVWQCWQDGVPYDPARHRALQRHVTVTIPPSSGPVPDIAATQRMAGAAVTRRAARRGERGALDGKPASAKPVARPAKRHRGLMS

SEQ ID NO: 369740 - protein, 370 aa, unidentified
MENIIYIGMDVHKESFSLCALHGTTGEIVGEARCASNVSLVKKFVEKLKTKYGEDIKIKAGYEAGCLGYSLHNLLEQNGIDCDILAPTTMYSSSKNKMVKNDRFDAKMIALNLANGTYKEVYVPEEEDVAVKEYIRMLGDFKTSLKKIKQQIKAFLLRHGYIYEGKSSWTIAYMKWLKNLDLQGLFKETLDEYLLQYDVLVDKIERFSLRVEELSHSERYEEPVGKLRCLKGIDTTSAMTVHVEIADFTRFPTAKAFMAYVGLTPSESSSGEKISRSSITKQGNSTVRSTLVECANSLVKGTIGLKSKRVKARQKDQRSDVISYADRAVERLQRKYHRMMYQGKPRNVAITAIARELGCFIWGLETGKIH

SEQ ID NO: 369741 - protein, 345 aa, unidentified
MSNPTIIAIDLAKDVLQVCKVTSKNKISYNKTVSRKALKELLSREKDCLVAMEACASSQYWSRFALKLGLSVKAMHARHVKPFRTTQKTDRNDALAIAVAATQLTIKPTRILTIDEQGLQSLERIRDLQKSQCIAISNQIRSLLGEFGITIAKGDKALREAMPYIFEDAENELPHSLRAVLFSQWENYRHQVEHLDSITEHLEVEVQKNHQCQKFMKLEGVGPLGAVGLVIALGDGKAFTNGRAASACIGVTPVQHSSGGKENIGSIAKKSSGQRLRSVLFNGAMSVVSFLSKRAARTVKEQWLKALIERRGKKVAAVALINKNIRTAYAILINGTQYKPQLLEA

SEQ ID NO: 369742 - protein, 382 aa, unidentified
MILVGCDLHARDQQVAVLDTATGEIQEQRLTHDGPSVEQFYAALPGPVTVGIESTGYALWFHALLHRLGHEVIVGDAAKIRAMVVRKTKTDRRDAAHLLDLLRHDRFPTVWLPDPAVRDQRTLVAHRMRLVRMRTMVKNGVHAIALNYRLALGPSLFTRAGVAQLQALSLPPHTSCRRSESLELLRWLDTHIKGLDDQIEEAAHAHPEAQRLMTHPGVGPLSALATVLVLGSVIRFPTSKHVVSYVGLAPAIESSAGKHRLGRITKQGNALLRYVLGQAGQAAIKRDPDLRRLYYAVLHRRRSDRLPDVSRSSASGGAAKGVDADHALISAGLAKGADARDPVGGVPDLCHGLEDRLLIGTPHPRRSMRRRLHWTSCAYMRG

SEQ ID NO: 369743 - protein, 347 aa, unidentified
MPVTIGVDPHKASHTAATLDEHGHLLGQQRITATLEGYQALRQWAGQWEDRRWAVEGAHGIGRALAQRLVGDGEQVLDVPAKLAARVRVLSVGHGRKSDPHDAISVAIAARSVPCLRQVGVEDQAVVLHLLTKRRQDLVAARTQTINRLHRLLMDLVPGGARRNLTAKRGAALLAAVTSAGAPAVTRWELATELVADVRQLEERIATVEARIKTAVAQSNTTLLELFGVGPVLAARFLGEVGDIGRFPTKHHFAAHTGTAPLEASSGQVIRHRLSRAGDRKLNHALYMMAMVQVRRPSAGQAYYRRKLAEGKSPKEALRCLKRRLSDAVYRCLLADQHRQPSPVGLA

SEQ ID NO: 369744 - protein, 345 aa, unidentified
MIIGCDFHPSWQQIAWLDSETGETGERKLVHAAGDAKAFYQQLAAPARIGMEATGNSQWFIEMVQDLGHEIWVGDAAQIRASYVRKQKTDKRDAAHILKLVVEGRFPRLWTPTAEQRDLRQLVLHRHKLVEIRSRVKNELQHLALNKGMQRKAKLWSQAGQKLLRELPLKPWAACRREDLLGLLTLLNQQIGTLDQAVQQAAEEHPQAKLLMTQPGVGPNTALAYVLTMGDVSRFPRGKQVASYLGLIPREESSGGRQKLGAISKQGNRLLRSLLVEAAQIAVRFDPGLRKQYLHRCHQKPKGVAKVAAARKLAVRLYWMLRTGKPYPEIVRIESSPRVPLVGAS

SEQ ID NO: 369745 - protein, 347 aa, unidentified
MRFYTRTHKHYCGVDLHARSMYVCVMDQEGTVLVHRNLPCDAALFLATIRPYREDLVVGVECIFNWYWLADLCRREGIAFVLGHALYMKAIHGAKSKNDRIDSRKTAGLLRGQLMPQAYVYPADMRATRDLMRRRLHFVRHRGQLLAHIQMTHHQYNLPSPGRRISYRVNRDRVGEGFEDASVKDSIAADLALVDTYERVIGELELKVLRQARGHDHNSFQILRSLPGTGKVLALTILYEIHDIHRFPRVQEFSSYSRLVKCVHTSGGKVVGSGNAKMGNAYLKWAFSEAAVLFLAKCPEGRPLLARIERKHGKAKALSILAHRIGRAVYFMLARQRAFDLERFLRS

SEQ ID NO: 369746 - protein, 354 aa, unidentified
MKIDTNCVRILAIDLGKFNSVACLLDPHSGEFSHETVATERSAILALLRRHPCDRLVIEVGPSAGWIHDLAREQGLEVQVANPSHEAWRWRARRNKTDRADAVMLARMSAMGELPVVHVPDADTRSWRRLIHHRDKIVGRLTAVKNTIRATLHQEGMSWPAARSGWTLRSVATLREMASSPGEAVWKTILASELRQLELLGTELETIEEALQEISASRKEVALLQTIPGVGPRLAEAVVAIVDDPSRFRSGAEVGAYAGLAPRTMQSGAMHRQGGISKRGDGLLRKLLTQVSWLGLRHNPWIREVFQRAARGMKSRRKIAVVAAARRLLVWCWAMLRTGRAWRPPFELSSVAAA

SEQ ID NO: 369747 - protein, 449 aa, unidentified
MSQPQLIDDQEHERIFERVAAVDVAKASGMVCTRTPHPSRAGGRRATVWTVTATMGAVRTLAAQLVEQGIEKVTLESTSDYWRIWFYVLEEAGLDVQLVTASQARQLTGRPKTDKLDAMWLARLTEKGLLRASFVPPAEIRVLRHYARARTHLVQDRTRCWQRLEKLLEDALIKVSAVASTLTTVSAQDMIAALIAGERDPQVLAGLARGRMKARQAALAEALSGMFEDHHGELAQLLTEQIAFLDTRISQLTGRVSAQLAAIRDAWGIDPGGVTGPGAGLGSDAVVRAAAARLDEIPGISAELAASVIAETGLDMSRFPTAAHLVSWAGLCPPTSQSGPRTRHGKTGCGSSYLRGYLGQAAIGAARTQTFLGERYRRLARRRGQAKAQVAIARSLLVIIWHLLNDPAARYTDLGPAHYQSTIDKNRKTRSHIRQLEALGYTVTLTQAA

SEQ ID NO: 369748 - protein, 323 aa, unidentified
MQGKVQFEARSASPLYVGIDVCKDHLDVHLHPLDRRWRVTNDRDGLRCLKRLLAEHQVTLIVMEATAKYHRLAHRSLSQSGFAVAVVNPLRSRLFAEAIGMHAKTDRVDAKMLAILGDALGPQARPPAPEELEALQELVHARNAATAERTALANRLAASQTVFLRAELKRRIKSLEGHIERLDAEIAERIAADPALARRYEILISIPGVGAGVAANLLADLAELGFLDRGAIACLAGVAPFADDSGDTVGQRHIMGGRASPRRALYWAALSAKRYNPELRAFYKRLVENGKKPKLALTAVMRKLVVLANTLLKENRLWVDHCA

SEQ ID NO: 369749 - protein, 397 aa, unidentified
MIAVGIDISKAKSTVAVIDSDGTVLASPFTMAHTQPEMEAFVTYLKGLGEPTTILMEYTGHYHYPVLKKLQDEGFPVCIVNPYQMKKYGDVEIHKAKTDKKDALRIAAYALEKSYKLVPYSSMEQKYEDLKFLSRQYNQRISYVAKLKVQLIALLDQTMPGITRILPLNSRNPEKCALLLFIKRFKSFDEIHRIGKARFLASYDVLAKKASERSASSKGLSIYELAVDSITTRGEDPYIWLSQNQCVDLLSTTQNAADEIISQMRNIAETIPEYKVLRAMHGVGDRLGPIILAEIGDVHRFHSGKALNSYAGNDAPPYQSGQFESRNRHISKRGSSALRKACYEVMQALKLIKPQDDPVYLFMLKKEQEGKPFNVAKMAGVNKFLRIYYARAMELYK

SEQ ID NO: 369750 - protein, 355 aa, unidentified
MDQKKYIGMDIHQASISVAVRDAAGKLVTESIIETKATTILEFVRGIRGSLWITFEEGTSAAWLYDLLKPHVTKVIVCNPRKNALLNAGSKSDRVDAQKLSDLLRAGMLTPVYHGENGVRTLRELGRSYITVTKDLTRVMNRVKALYRSWAIPCAGEKVYSPRRRHEWLEKLSEPGVQRRAEQLYQQLDALRKIRREVRAELLLESQKHPAHQLLRQIPRLGPVRVALLIGLIQTPHRFRTKRQLWAYCGLALQTRASGEYRFSGGELQAAKKSPALRGLNVNHNHDLKNLFKGAAMHVSTSTDPLGDFYRNLLAKGMKPSMARLTLARKMAAIVLTLWKKGARFDPQELKQQPA

SEQ ID NO: 369751 - protein, 370 aa, unidentified
MNVTTFAGLDVHARSIKAVALDIVTGEVRSATFGYDACAVAEWVRSIDPGARCVYESGVTGFDLQKKLSSLGVDCVIGAVSKMIKPAADRRRKNDRNDAEFLARMLSVGNVVEVWVPDDECEAARDLARALDDAREDLRRQKQRLSKFLLRHGLVFDEKTPSGQRKGNWTGAYWTWIKGISFREKADNDTLAFYVDAVRRAEEDKRRLEKLVADEASRPRWKKRVDSLRCLKGIDVMTAADIVFEAGEFARFRNARSFAAWLGLAPSEHSSGEKVARGGITKAGNKHLRRVMVEAAWHYLNASPHSKGLAPGQAPDPAARRHASKGVRRLVGRRAALLERGVHKNKANVATARELACWCWAVGSMAEGAR

SEQ ID NO: 369752 - protein, 347 aa, unidentified
MQVTTIGIDLAKRVFHLCALDDRGEVAWNRRLMRDQLEAFLAQEPPCVVAMEACGGAHDWGRRFMALGHDVRLLPAAAVKPFCLRHKKNDRVDARAIAEASRRPELHAVPVKSLAQQELQTMVRLRAGLVADRTRLANRLRGLLMEFGLVLPQGLAALRRRYAELGTGATSRTAWTALSPATRALFDGLYEEILAKDERIKAIERQLIAHARDDRHCRRAMTVPGIGPIIATAFVAATDISGFAGGRGFAAWLGLVPRQHSTGGKPRLLGISKHGNRSLRALLINGARSLLWAARRQQQPSDRLTAWAKGLLARLHWNVATVAVANKLARILWAVLAKHTDYRPQPV

SEQ ID NO: 369753 - protein, 316 aa, unidentified
MDYFAGLDVSVKEISICIVDDTGKVVREVKVTSEPEALLAVLNNPAYHFKRIGLEAGPLSQWLYSALAEAGLPVICVETRHMQAVLKTQINKTDRNDARGIAQMMRVGLYRPVHVKTLRSQKLRMLLTHRQLLQSKAIAIENDLRGTLRNFGLKVRMVGKAKFEARIKELVENLPDLAGLVEPLLIVRRALRERVVILHRRLLAIVRDDEVCRRLMTTPGVGPVVALTYRAAVDVPARFRKSKAVGAVFGLTCSKYQSGEIDRSGRISRCGDEMMRVMLYEAAQSMLRSKKWSWLKAWAMQVARRRGMKKAIAGWP

SEQ ID NO: 369754 - protein, 465 aa, unidentified
MKKKTSKSEKEKGKTSIHEAWEKINPDAAGIDIGSREHWVCIPPGRREKTVRKFGTFTCELEALADWLQECGVKSIAMEATGVYWIPVFQILEARGFHVLLVNARQTKNVAGRKTDVQDCQWIQRLHTYGLLQGSFRPGDPYCVLRTYLRYRDELIGARSTQCQHMQKALQQMNVQLAQVLSDVTGLSGLAIIQAILEGQRHPAKLAALVDVRVRATQATIQKALVGDYRKEHLFELKSAFELYHTYEQKIQACDEQIVAETAGLPDKVDLSSKPLPARKQGHPAHKDKMAGQDMREWVYKKLGADLTAIEGIGITTALVILTEVGPDLSRFPSEKHFASWLGLCPDNRISGGKVLSSRTRRVVNRVSDALRIGATSLERSQTAMGAFYRRMKAKLGAAEAVTATAHKLARIVYRLIKHGEAYVRQGTVEAEKKYQERKLYALRKTASALGFELIAKQQVTQGVS

SEQ ID NO: 369755 - protein, 345 aa, unidentified
MDHFVGIDVSLESCAVCVVNTSGAVTREAKVACEPEALTAFLRGLDLDIACVGLEAGPLSQWLVRHLREAGFEAVLMETRQVKGALKAMPIKTDRRDALGIAQLIRMGWFRPVHCKSVSAQELRALLGARRTLQKSMISIELSMRGMLRGFGLKLGKVRRQRLPERVRELADGNEMLMAMVTSMLRGHAALRSELARLENRLRRIARADRVVRLMMTVPGVGAVVALQVKAGIDDPARFRSSKNVGPHFGLTPRREQSGERDVVGAISAAGDRNVRTALFQAATVMLYQSQAKSWLKAWGMQVAKRRGMKRAVVAVARRLAVVLHRMWSDGTKFQMTHPARIAAA

SEQ ID NO: 369756 - protein, 381 aa, unidentified
MIVIGADTHKATHALAAVDAGTGRARASREIKAEEPGHLQAVRWARGLDDDRVWAIEDCRHVSRRLEQALLAAGERVVRVPPHRMGASRKGERERGKSDEIDALAVARAVVKDGVEQFPVAYLDEQAMEIRLLFDHRADLVAERTRIINRLRWHLLEMCPELERSCKRGSLSESRALDRVERGLRKLPASARVRVAREQVRELRKLSREIDALHCELSVLVSAHRPQLLAELGCGALTAAILIGHTAGNERFRSEASFALQSGTAPIPCSSGQRVQHRLNRGGDRHLNHALHIIAITRAQHDPATKEYLNRKEAEGKTPKGALRALKRHLARRFHRLLSEPRRPISSEPRSTRTATASRPHQWPASPKRDPARNTQIARWA

SEQ ID NO: 369757 - protein, 467 aa, unidentified
MTPHKDFFLDPCPPAPAPTLPQSPVLADALQVCHPHAAGIDIGEAEHWVAVPPGCDPQPVRRFGTFTADLDALADWLIDCGVTTVAMESTGVYWIPLFELLEARGVQVLLIDPRQAKRAPGRPKTDRLDCQWLQRLPTYGLLAGAVRPADQVCVLRGYLRHRQMLITYAAHHMQHMQKALEQMTLKLTQVVSDITGVTGMAILRAIIAGERDPVTLAKLRNPHGQHDADDIAKALQGTWRAEHLFALQQAVALYAFYHQQVALCDQQITAHLETFADKSAGQPLPPKARRHTKTNEPRFDARTPLDRLAGVDLTTIEGIEENTALIILSEIGTDMHRWPSVKHFCSWLGRCPQHQISGGQVLSRRVRPGAHRVTVALRLAARSLHHSQSALGAFLRRMKARLGTPKAITATAHKLARLVSSLLQHGSAYVQQGLDAYEAQYRERKVTTMAKQAKALGYLLVPLVAQG

SEQ ID NO: 369758 - protein, 358 aa, unidentified
MRQVTKKSARSKGAGVGRGDAVYVGLDVHKRSIHAAVRVNGREVETGVLPARAGAVLAFLEPYRLGLKQVVYEAGPTGYGLVRRLRRAGVPADVVAPGKTPRTPGVSSKSDRLDCRALARFDEAGLLKRVAVPTVREEADRQVVRLRDQVMNKRRRVKQQIKSFLLQHGLREPRGLSDWTRASVAALERMKMAATLRFCLDILLRDLANLEAMLGEVNQAVRRLSRTRRHARRVDRLMKEPGVGPVTAMQFVTEIYQAQRFRNPCEVAAYVGLAPRVRQSGERRRDGPLLKAGRGRLRAMLVEASWVRVGRDPVAQATYRRLVRNTGCANKAIVGVARRLAIRLWRLLTCPQTDAPAA

SEQ ID NO: 369759 - protein, 419 aa, unidentified
MGKIIENCAGIDIGKRFLLCCVLTGSAAEEPRSETLRFEVTVAALQRLREWLTNKKVTHVVMESTGSYWIPVFNILEDHFVIVLANPEEVKNRKGHKTDRKDAEHLADLLRHDHVRSSYIPPKPVRDLRDLTRRRLQLTEDATRERNRVQKLLEHVNVKIGNVLSDIFGVSGLNMLLALLSGQATPEEIAQLARGQAKRKIPQVIEALEGHRMSDHERLLIRSCLRHLACLEEEVEELDGEILRRMQMPPFEAAYRLMQTLPGVGQLAAASILAETGTDLAPFPTADQMASWAGLCPGNRESAGIQKGGQTTHGNSYLRTALVQCAWAATRKQGSVFQARFQQLSPRRGQKRAIVAVAHQMLTIAYCMLKKGVPFRDAESIPRQRRRKRRAHHHLCCLRRLGLSVRVVADSNGVLGESV

SEQ ID NO: 369760 - protein, 441 aa, unidentified
MSEYFLGIDVSKGYADFILLDNNKNIIEKNFQLDDTFEGHNRLYSFLSSFIANIPNSHITAAVESTGGYENNWVSLLLKLQDDLPICVARLNPFGVSYSSKADLKRVITDKISAHSIAEYLINHSSKISLVEEDYFAPMRKQWIFIKLLVKQKVQLYNQLESLLYSANPEVLVFCKHGTPKWILQLLKKYPSAVNLSKASVSALTKIPYVTEEKALILINNAKSSVASQTDSITSSLLKSIVQQILSLDNSIAEQEKLLEHNCPLPEIGLLKSFIGIGTYSAVGLMLEIRAVERFSSAKKLAAFFGLHPVYKSSGDGIGGIHMSKKGRKEPRLILFNIARTAITFNPLIKEIYQKHLKTGMTGLAALGVVMHKILRIVYGMLKHNTRFNPDIDKHNSEKTIRTVIKPLELKHRRYQSFDSFAPVSRKQNKKREIQQKSHNG

SEQ ID NO: 369761 - protein, 355 aa, unidentified
MEKITRVETAWTIGVDLGDRRSEACVLDGAGSVVERFAFRSDREGLAKGFSGRARASVVMEVGTHSPWIARELERFGHRVVVANARKVHLISHSVNKDDRHDAEILARLGRADESLLSPVQHCSESVQRDRAILRVRESLIAARTMLINSTRGMAKSLGLRVSAGDASSFAARARKQLPEGLFAGLEVLLAEIGRLTDRIKELDRRIERLGRTRYPHTERLRQVRGVGPITALTFVLTLEDPRRWPRSRAVGAYLGLTPKRRISGDQHPELRITKAGDRYLRQLLVQCAHYLLGPFGADCTLRRFGLRLIAQGGKRAGKRARVAVARKLAVLLHRLWISGADYEPLRGAESPTIA

SEQ ID NO: 369762 - protein, 630 aa, unidentified
MLAIIGGAAFAGDNQSAKYIRMLAREAGTDSIDAVYFNPADTAFLEKGFHVQLNGQTVWLNYSHYYTGAVGPILPGTYNMENWIPFVPSAFLGYAGGNWSVFAGYSIPEGGGSLDWNPVTVIIPGPASIEGSLGASSATHAISLGGSYQITPMISLGVKGEVSIASDPYEADFLVTGGAATLKTSGTGFGGAFGVHIIPSTGFNISVTAETAQKIEMTETDSSGARHYVLTCPTSKTWVTLKRLENPAQSHNRGGQVMQEFSKYVGLDTHKDTIAVAIAEVDGGKPRYYGEIPNTPGAIAKLVKKLSPDGEVLTLCYEAGPCGYEIYRQLIRLGHKCDVVAPSLIPSKPGDRVKTDRRDGEMLARLHRAGELTPVWVPDQEQEAIRDLTRCREDMKAMELQARQRLNAFLLRHGKIYQSGRSRWTQAHFRWMEQVKFDIPVHQIVFQEYVDTVKQAQIRVAGLEEEMHKALPDWQLGPVVEALMALRGVKLVTAMTVMAELGDISRFDSPRQLMAFLGLVPSEYSSGKSQRRGGITKTGNGHVRRVLTEAAWSYRFPARKTAHLQRHAEKTSETVQAIAWKAQKRLCGRYRYLLGRGKVKVQACTAIARELSGFIWAIACEEMGRPVVMR

SEQ ID NO: 369763 - protein, 373 aa, unidentified
MASNNNQLNQGELTLYSMLISQKVVPVGVDLAARVFQVCYLTEKQQLKNKSLSRDAFLNFLKSPPFSKPMLVGFEACGACNYFARLVKSLGHRYKIMPPSAIKSFLGLQKSDKIDALGIFRGALCPSIKSIKARDEENQVLMNLLTTREQLLKQQTQSLNAQRAMLYELGVVCDAGASSIDTATAKLHDSLNESQSQALLYFDMIASSLKHSRDTIGSQLAEIDRLFKEVAKQSRTVQNLMTIPGIGVLSAITLYAVMGNPNDFPSSRHFASFAGFAPRNSGSGGEEKVGSIPHTGNKQLKKTLYMCAVARLAVQSRKAPEVKAASKLSALIENPAIKNKKIVCSIANRLARVAWSIVQSGESFNPQKCRLLG

SEQ ID NO: 369764 - protein, 351 aa, unidentified
MERYAGRYAGQQYVGIDLHRRRSLVVRTTDAGELLEAVQIANSQLALAEVMTRAGEHPEVVLEATYGWYWASDALAECGAATHLAHPLGVKAFEYRRVKNDLRDAVDLADLLRMGRLPEAWIAPPATRELRELVRHRAKLVSMRSRCKAQVHAVLAKCGVSVPMSDLFGVAGTDLLDQLELPAAYAARIASLRRIMDLLDFEINVAAGLVKGRLARDPGYTAVQTIPGIGPILGAVLVAEIGDISRFPSPQKLTCWAGMTPLHRESDTTVRRGRITKQGSRLVRWAAVESVQRLPATTKLGAFRDGIAAKRGHNIAVVAAARRQLEYVFYALRDHHVRADLRRPAATALAS

SEQ ID NO: 369765 - protein, 337 aa, unidentified
MEYCGIDLASKASAICVMDDQQQFKLELMCATDEDGFRQTLKGWQNLRCVIEASPLSEWVAGILESLGHTVIVIDPRKAKAVITSKKKTDKLDARNLARMAVTGWYTEVHRKSAEARLLRSHLIARKGLVTMQRQQNNRIRGLLRAHGMVLGQVKNSAFVSRVRTLVEQRCADLWSAIEPLLEHWVALRRSLAQMTKRIKQRAQRDPVCRLLMTVPGVGPLVSSAYVATIDDPARFARSDQVGAYVGLVSSVHQSGETEYRGRITKEGDGLLRWLLVEAAHVLLTRSGSNSALKAWGKRIERRKGAAKAKVAVARKLAVILHRMWLTNTPFEAQAAV

SEQ ID NO: 369766 - protein, 409 aa, unidentified
MQVVHEVCCGLDVHKKSVTACVLWAAGRRRQTREFGTFTQELLELADWLRDCGVTHVALESTGVYWKPVWNLLEGQFEVLLVNAQHIKAVPGRKTDQKDSEWIADLLQHGLLRASFVPPTPTRELRDLTRYRASLAQEINRIANRIQKVLEDANIKLASVATDTLGASGRAMLEAIVKGEQDSQRLAEMSRGLLRNKIPELQQALEGRVTGHHRFLLRELLDHLYFVESKMRRIEQEVEERLGPFQSEVARLCTIPGVDRVTAWGLLAEIGLDMSQFPDAQHLASWAGLCPGSHESAGKRKSGKIRKGSLWLRRCLCQGAWAVSTKKNNYLSALYRRLAARRGTKRATIAVAHNLLVIAYYILRDGTCYRDLGPDYFDRLNPEGLRRRLTKRLEGLGFKVTLEPLAQVA

SEQ ID NO: 369767 - protein, 417 aa, unidentified
MPPTEYVFYVGVDWGSERHQVCVLDAERRVCEERAVEHSGPGRAALAEWLGALAPGHPERIAVALEVPRGAIVDTLLSRGLHLFAVNPKQLDRFRDRHSIAGAKDDRRDAFVAAEALYTDRWAFRRLEPEHPLILQLREVTRLDQDLQQELTRLANRLRDQLLRYYPALLRLAPAANAPWLWTLLELAPTPAAGAQLPRARVVRLLQRHHIRRHTPEAVLAALRAPAVWLTPGTVEAAARHVALLLPRLQLVHAQRAQCTAEIDRLLAALSAAAPAPGPQREHRDVEILRSLPGVGRLVAAPMLAEAAHLLAARAYHGLRAHAGIAPVTKQSGKYRGVQMRYDCNHWLQQAVYHWARVSAQCDPHSRAHYTALRERGHSHPRALRGIADRLLAILVALLKTGTLYDAARLRRRELAV

SEQ ID NO: 369768 - protein, 498 aa, unidentified
MILFDQIVEVLRRSYFGPLAARMFAEDFPHRPMGCLVAIKRDGPRQSALALERPPEKGFGCRDIPLGAEHKIDRLSLFVDRTIEVSPAAFDLYVDPMREVDGDRRSLAEWDCNHALWRMAMPNTIRNDIGAIFVSLELSRSKWLITSLSPGGGERMSKHTVPGGDIYALLARFSELQRKALARTGTLFPVIVVQEAGLDGFWIHRLLEKEGIESHVVDAASIAVARRRRRAKTDGIDGETLLRTLLAYKRNEPRVCAMVKAPTIEEEDRRRLCRERKTLMNERVVHVNRIKGLLFSQGVSGYEPLRRDQRRRLDELKTGDGRPLPPHLKAHVVRELERLELLLEQIKAVEGERDALLAPQEATTPEMAMLLAIKGVGLEFAAVLWSECLFRQFANRRQIAAYAGLAPTPWQSGSVDHEQGVSKAGNPRLRTTLIQLAWLWLRHQPHSALAEWFHERVRRNGGRLKKATIVALARKLLVALWKYVTAGIVIEGAVMKTA

SEQ ID NO: 369769 - protein, 412 aa, unidentified
MEAAYYVAGIDVHKKMLAVVVANARDRELCFECRRFGTTVSELRKLSAWLRERAVQEVVIESTAQYCKPVWLALEGQFQLWLAQARSNRGPRGRKTDFRDAKRSVSRSLSDDLILSYVPEKEQRSWRTLTRTKYQLTRDRVRLQSQLESLLEECQIKLSSVVSDLLGASGQRILRAIATGETDPARLRELGDRRLHATDEELRDALDGQPQPLHRKLLLRYLQQLDLIEAQIAETESMIAEAMKAHEDAIVRLAELPGLGVDSAQQIIAEIGPGAEAFPSAPQLASWVGVCPGRQESAGESTSNRSAKGNRAMRRLLNQLAHAAVRKRDCYLQIVFKRLSARLGYAKAVWAIAHRLCRLIWKVLHEEVHYVEYGPAVSALTLKRRKQRLVTQLKKLGYSDQLVPTTAPAADL

SEQ ID NO: 369770 - protein, 450 aa, unidentified
MATRNRALNRKGLELTHPNAAGIDIGSASHYVAVPADRDDEPVREFASFTADLHRLADWLRDCGVDTVAMESTGVYWIPLFELLDARGFTVLLVNARHVKNVSGRKSDVLDCQWLQQLMTYGLLRGAFRPSDQVCVLRALARQRATLLRTQARSVQHMQKALVQMNIQLANVIADVAGASGQAILRAIVAGERHPYALARLKNSRVHASNEEIARSLQGTWRAEHLFALRQALDAFDFCGGQLQQCDQEIEAQLQRLHITEVEPDKGKKRSKARNARKFDLRTRLYQMCGVDLTRIDGIDVTTALMVVSETGTDMSKFPSDKHFASWLGLCPGTKITGGKVMSGKTKRCANRAAQALRLAAAALRASQSALGAYYRRICSRMDKAKAVTAAAHKLARLIYSMLTKGEEYTDQGQAYYEERYRQRVLHNLNRRAQQLGMTLVPTTPAAQAV

SEQ ID NO: 369771 - protein, 344 aa, unidentified
MKKEEFECIGVDVSKNTLDVALFRGKVDWNEGHIKVENNCVGYKEMKKWLCLKGAEKRQLRVCMESTGLYTHNFRTWLEKEGITYYVVDSKLMHNFAPPQSIKGIRQTKNDKADAFRIAIYCSLFHDAMVPSKLPSAAYFKLKRLLAERRQYLKQSVLYKQQLHDISIYDTVSSRLRKEEELKNLKNHIKQTDAEILTVLETDEAIKRNYNLLISIVGVGLVVAVTTIVLTENFTTFTNPRKYASYIAIAPFPHESGTSVRGATRVSKQGFRQAKADLSISVLSAMSYDPELKEYWLRKKAEGKHAGTILNAIKFKIVLRMFAVVKRGTPYVNTKGYKRMKHGQ

SEQ ID NO: 369772 - protein, 314 aa, unidentified
MSAAIFVGMDVAQDTVDVAVQPGTAFHLANDESGVAEAVTRLQAVQPTLIVLEATGGLEVPLAGALAAAGLPVVVINPRQVRDFARATGQLAKTDRLDAQILARFAEAIRPPVRPIPNEQTQALAALVARRRQLIEMLTAEKNRMRLAAQPIQKRVQAHITWLEKELEGINTDLTTTMHQSPAWRQKEEVLRSVPGVGPVLTTTLFANLPELGTLTRKEVAALAGVAPFPRDSGTLKGRRAIWGGRAHVRAALYMAALVATRKNPVIRTFYQRLCQAGKAKKLALTACMRKLLTILNAMVKNRTPWRVAVTQPA

SEQ ID NO: 369773 - protein, 481 aa, unidentified
MGENQPAQAKSGKRLTRKQKKELGRKIWSDRPGLDVVHRDAAGIDIGSREHYVAVGPDRDAQPVRVFGCFTTDLHQLAKWLKGCGVKTVVMQSTGVFWIPVYDVLEQDGFDVWLVNARDTRNLPGRKSDVQESQWLLKLHTYGLLRKSFRPTAEIRALRTCWRERSEYVQQAGMCIQRMQKALTEMNVQLATVLSDLSGTTGMNIIRSIVAGERDGMQLAEFRDPHVKASKETIAKSLEGTWLPEQLAILKRQLGDWDHVQKQIGACDLDLQAMMKELPAAEVQTAQPPAATSGSQKRSRKRNGKSSKNEPAFDLKSALNRATGVDLTRIDGIKVNTVQTIITESGLEMSPWPTEDHYVSWLGLCPTNDVSGGKVLRRKTRKVVSRLATAFRMAATTLRQSDSYLGAQFRRFRTKLGAPKAITAMAAKLARLVYRMLKYGQEYVDKGTAQYEEKYRQQQIRLLEKKAAQHGFQLVAVPNLV

SEQ ID NO: 369774 - protein, 358 aa, unidentified
MAKRTTKSENGKQTMLTMKDRVFVGLDVHKKSYHAAVRVNGREVTTRVLAPTAEAVLVFLEPYRSGRLHVVYEAGPTGFGLVRALREAKVSADVIAPSKTPQTPSEENKTDGLDCRQLAFYDEKGVLKTVAVPTTEEEADRQVIRLRDQVVDARRRVKQQIKSFLLQHGVAEPKGLANWSKESVEMLGQLPLVAPLRFCLDVMVAELKAFDKLLGQVNREVERLSRETRHSEAVTRLRKYSGVGVITAMQYRTEVFRPGRFANERQVAAYLGLAPRVRQSGERRRTGPLLKAGHGRLRALLVEAAWIWIQRDETAKATYKRLLQNTGQPNKAITGMARRLAIRLWRTLVPPEERRGAA

SEQ ID NO: 369775 - protein, 416 aa, unidentified
MEVLHSRCAGLDVHKDTVVAGIRIAGGGPAKTEVRTFDTTTPGLLALSAWLAEAGCTHVAMEATGIYWRPVWHVLSDGEVTLILANAAHVKNVPGRKTDVADAVWLADLLAHGLIRPSFVPEAATQEMRALLRTRKQLVREQASHVQRLQKTLEDANIKLTSVLTNIMGKSGRAIIEALFGKQTDPEALLALVQKGVKASPEKIKAALTGRVTDRHRFLLQLHLRQIDALDAALADIDAEVDRGLDPFRQAVELLRSIPGVSDLTAQVIVSEIGTDMSRFPTAGHLISWAGLCPRNDESAGKRRSNRLRHGAAWLKTMLVQCAWAATRKKASYLQAQFQRLRHRRGPKKAVCAVAASILTAAYHMLRDGTFYHDLGPDHFRRTSPETHAKRLAQQIAKLGFTCTIAPASTVEEVSI

SEQ ID NO: 369776 - protein, 384 aa, unidentified
MKVVCGLDVHKDSVFCCILCANGEKIQHKFGVLTEELVTLRDLMVSEGVEECAMESTSIYWIPIWRVLEGSVKLHLVNPYFIKQLPGKKSDVNDAEWIATCLSKELIASSFVPDDKIQRLRQYDRRIFDLNASISRNLVKLDQCIQRCNIRISNYISTTDSKGYRSIVKLISQGVTDAEVLVKELHGRTINRHGRETLVKALTGVVSETDIDIIKQLVEEIELQQRHKDEAQQKMTALCMEWFPQEVENLQTIPGVKERSATSIIAEIGTDMTHFQTPKKLVSWVGLRPRNEESAGKIKARGITHGNRFVRKTMIECSWGAARMKDSFFAEFSYRQCIERRKNKMKVQVAIARKILVAVWYVLSQRTQYIKPTDHYTAAHMTAV

SEQ ID NO: 369777 - protein, 369 aa, unidentified
MSDRITYVGLDVHKESIVVAVAPGGLRGEVREYGRIANTAAALDRLLRKLGVDGMALRFCYEAGPCGYGIQRRLSAQGQQCVVVAPSLIPKRAGDRVKTDRRDAASLAKLHRAGELTAVWVPDARHEAMRDLVRARLDAVHSLRRARQQLSGFLLRQGCHYGRPAWTKLHRRWLAGLKFDQAVHHVVLEDYIAAVEVAQIRRDRLTAQIETILPDWTLAPVVAALQTMRGMALVNAATLIAELGDLSRFTNPRQLMAYLGLVPSEHSSGASVKRGGITKAGNGAARRLLIEAAWSYRFPARLSRELLLRQENQPRSIRDIAWKGQVRLCARYRRLTRAAKPANVVTTAIARELSGFIWAIARQVTVTVG

SEQ ID NO: 369778 - protein, 345 aa, unidentified
MKQYAGIDVSLEASYVCVVDAEGKIVREAKVLSEPDALINWFAAHQVALERIGLEAGPLSQWLYASMSRAGLAVELLETRHVRAAFKTMPVKTDKKDARGIAQLMRLGWFRPVHCKSVPAQEVRAMLTARKLLQGKLHDMEMSLRGILRGFGLKVGATTPKTYPARIRTLVDGHPALEVIATALLKAREVLAEELRGFERRVRAMARQDERAHRLMTPPGVGVLVALTFVAAVDDPERFRSSRAVGPHFGLTPKKYQSGETDYTGRISKIGDAGVRTALYEAANVILTRPVKGSDLKSWALSVAKRAGLRKAKVALARKLAVVLHRMLRDQTSFVTHKAAPLAAA

SEQ ID NO: 369779 - protein, 348 aa, unidentified
MQIAVLGIDLGKNSCSVAGLDATGRIVLRRRMNREGVIKLASRLPGCVMAMEACCGAHHLGRALQSVGHQVRLMSPEYVQPYVKAQKNDERDAEAIAEAATRPTMRFVELKNETQLDMQSLHRARSRLVGDRTALINQLRAVLLERGITIAQGRRRLEQYLALALNGEGSPPLQLSTRMRVLIDDMRAEWHELDRRIAVFDAEFVAAARNDQTARRLASIPGIGIMNATALLAAVGDARTFARARDLSAWLGLVPRHATTGGRPRLLGITKRGNKYLRTLLIHGARAALPSLATTGGSLGNWLRGLSARAHRNTVIVALASKLARIAWAVLRSAATYNATMGDHPAAA

SEQ ID NO: 369780 - protein, 374 aa, unidentified
MADYSEAYVAFDTSKLRNAVAIAEGGRTGEVRFLGDIDNTAVAVRRLVKKLSGKYTRLVFCYEAGPTGYGVQRLIRDLGHECTVVAPSLVPKKPGDRVKTNRRDAVALAKLMRAGELTAVWVPDERHEAMRDLTRARGMAVVDQRAKCQQVTALLLRLGRHYAGKSKWGKAHWAWLNRQELGQPEQRIVFEEMLLALRQAQERIKRLEEAIRAAVPEWSLEPVVTALMALRGIDLVSATVFLAEIGDLSRFRTPRELMGYLGLVPSENSTGETIRRGAITKAGNRRARRVLVESAWSYRYPPRVGRAKQLRVEAAPSAVRAIAWKAQIRLYARYRALLRRGKLKTVAITALARELAGFIWAISREVTPPLTQTN

SEQ ID NO: 369781 - protein, 366 aa, unidentified
MSKHSKEPAEKAGRYVGIDLGDTKSRVCTVDKLGQVVLQEWVTTTPQAFLERFSNRANLHIAMEVGTHSRWASEALMRCGHEVIVADARQLALITNSDAKSDKRDARTLAQLVWADPRLLSPIKHRAEELQQDLTLIRQRDNLVETRTRLIVSVRGVVKASGARLPDCLTGSFPQQVAEAIPEPLRAVLAPTLEVIDQVNEQIYACDIMLEHWARTRYLESARRLKQVGGVGTLTALAFILTVGDKERFSRSRDIGSFLGLRPRLGQSGDSNPQLRITKAGDGYLRKTLVQCAQHIVGPFGQDSDLRRWGLKMVADGNGSKRAKQRAVVGVARRLAVLLMSLWRSGETYDPLRHSRSVEKEAEAAA

SEQ ID NO: 369782 - protein, 337 aa, unidentified
MKLYGGIDLHSNNSYVVILDEEERIMYEKRLANDSQEILRALSPYQASLEGLVVESTYNWYWLADALLAENYTVHLANPCAIQTYSGLKYSDDKSDARWLAKLLKLNILKTGYIYPKDQRPLREVLRRRLILVHNQTRQLLSIQGLGARYLNQHWSSNQIKKASKEWFKAISDPLIRQSIQSHYRVLKCVQAEIERLETIIKKELKPSDDFKRLKSMPGVGAILAMTILLETGDIKRFPSAGDYSSYCRTVKSIRLSNEKKKGENNRKNGNAYLSWAFIEAANAAIRAYKPITCYYQRKLQKQLRVVVLKTIANKLSKASYFMLRDKVEFDMKKLFP

SEQ ID NO: 369783 - protein, 510 aa, unidentified
MTRGKLSRKERKEFQRRLQSDNPGLEVVHQHAAGIDIGNESHFVAVAPGRDPEPVREFGSWTADVVRMAAWLKSCGVKDVVMQSTGVYWIAVYEVLEEAGFNVCLANARDTKNLPGRKTDVQESQWLLKLHTYGLLRNSFRPPEEIRHVRTIWRLRGRHVQEAAREIQHMQKALTTMNVQIANAISDLSGVTGQTILRAILKGERDTYKLAEMKDYRVRASNEEIARSLEGNWQEDVLFELQQAVDAYDFIQRQIADCDRQLEKYMAVLPDRSMKQAEEVQSATVEPASESEVRAKGKQRKSKNQNQKKHACNSDAQVAGGAKHGNFWEKNFNGSKKTAKNAPKFDLRSELTRICGVDLTTINGVDVMTVQTFVSELGTDMTRWRTENHLVSWLKLAPNRGVSGGKLIKHERIKVKNRVTEALRMAASSLEHSESYLGARYRHLKFRLGPKKAIKATAAHLARLFYRMLTHGQVWVDRGAQEHERKRTERDLRSLQRKAAAHGFRLEPAA

SEQ ID NO: 369784 - protein, 343 aa, unidentified
MQVHSVGIDLGKTTFHFVALGASGKVLVRKKFARKQLLAYTANIPASLIGLEACSGAHFLGRALRKQGHDVRLIPAQFVKPFVKSNKNDFVDAEAIAEAVDRQNMRFVPIKTDDQLDLQAIHRVRDRLIARRTAVINQLRAFLLERGMIFAKSPAKLRKEIPEVLEDADANLTPRMRNLLDLLWGEWKMLEQQLGGLNEQIEQIASADAACQRLRKIPGIGPLISTAIVAAIGNGAAFHKGRDFAAWLGLVPKQHSTGGKARLLGISKRGNRYLRKILIHGARAAVLRLKRERAPMGAWMTALEARAPRNVLIVATANKLARIAWAVLSSGEEYRAETSLVAV

SEQ ID NO: 369785 - protein, 341 aa, unidentified
MWIIGCDFHPRFQQIALVNTEGGEWGQRRLEHRGEAGQFYRSLAGHVVRVGMETGGSSRWFERLLGELGHELWIGDAAKIRAAETRKQKTDARDAEHLRELLCNGQFEKMRIWIPPADNRDLRQLLWHRHRLVQMRTRVKNQLRSLATSEGMERKPGLWSQTGQKQFQALELAPWAGRRRQDNLELLTELLRRTDPLDQEVAQQAAQQPAAVRLMTHPGVGPITALAFVLVIGDPARFANSKKLASYLGLIPSEDSSGGKQRLGHISKQGNALLRGLLVEAAHVAVRHDAHWKRDYRRLAMRKNRSIAAVAVARKLAVRLWWMWRRGVDYAQLNASGSHAG

SEQ ID NO: 369786 - protein, 334 aa, unidentified
MENIALIGIDLGKNSFHIHCQDHRGKAVYRKKFTRPKLIEFLATCPATTIAMEACGGSHFMARKLEELGHFPKLISPQFVRPFVKSNKNDFVDAEAICEAASRPSMRFVQPRTESQQAMRALHRVRESLVQDKVKTTNQMHAFLLEFGISVPRGAAVISRLSTLLEDSSLPLYLSQLLLKLQQHYHYLVEQIKDLESQLKRKLDEDEVGQRLLSIPCVGTLTASTISTEIGDGKQYASSRDFTAATGLVPRQYSTGGRTTLLGISKRGNKKIRTLLVQCARVFIQKLEHQSGKLADWVRELLCRKSNFVVTCALANKLARIAWALTARQQTYEA

SEQ ID NO: 369787 - protein, 354 aa, unidentified
MRFYSQPHRFYCGIDLHARTMYLCILDHDGNIVFDHNLACNPKAFLHAIAPFRDGIVVGVECMFGWYWLADVCREQQIPFVLGHALYMKAIHGGKAKNDRIDAGKIARLLRGGTFPLSYVYPKGMRETRDLLRRRMYLVHQRGALTTHVQILNSQCNLPPFSKKLSFAGNRAELKIAERFSDPSVRKNVELDLDLIDKLDELIGATELYLTRTVKVDDTQSYYRLRSIAGVGPILALVLLYELHDVARFEHVGQFLSYARLVRCAHESAGKKLGSGSKKIGNAHLRWAFGEAACLFLRASERARKWKQKQEKKRGPAKALAILAAKLGRAVYHMLRKKEAFDEERFWNTAIAVV

SEQ ID NO: 369788 - protein, 412 aa, unidentified
MTAKDQFAAHVGLDWADKKHDVCVQFKNGDRIFHVIEHTPEALDIWLNELHQRAKGRIAIAVELKKGPVVYALQKYPFVTVFPVHALSLARYRQAFWPSGAKDDPQDAELALDLMLRYPHKIKAIEVDNPDIRLLQQLVEQRRLLVEDKRRFVNRLINTLKQYYPQPLKWFSHRDSSLFCELIIRWPSLQQLKRARSDTVRHFMNAKGGPAVAYTEQRVASITSAIPLTTDKTVIEANALMATALASQIKLTGDLIRTYDERIESLFDTLPDAELFKSLPGMGPCMGPRMLAALGDNRDRFNSAEEIQNYAGIAPVTERSGQKSWVHWRWQCAKFVRQTFVEWTAKTVNSSYWARLYYQGQREKGKSHQSAIRALAFKWIRIIYRCWKTRTRYDEAKYLLALEARKSPLLKP

SEQ ID NO: 369789 - protein, 409 aa, unidentified
MICIGIDWADDKHDVCIRDARDRRILAEFTITHDVEGVEQLDQTAAALGFQPADCLVAVETPHGLLVGYLLQTGYIVYAIPPLAVDRYRDRHRCSGAKSDKIDARTLSDILCVDREYHRPIPEDSPLAQEIKLVSRQRQKLVQEQTRFKNQLTACLKAYYPAALGLLSGLDCAIAWAFLRAYPNAETAAQASLAELEEFFDQHGYTCKRKIPEIYTQLQTPVIPVAEWQVRVLQRHMLLLVDLMATLTPQIKAHERELTRLLDQHADAFIFRSLPHAGDVTAAWLLGEIGDCRDKFENASAMQALAGTCPVTIQSNKRRYVKFRVGCCKLFRNAVQQFARLSARGKKGSPWAKGYLSDQLARGHSVSRATRALGNRWLAIIFRLWQDRVAYDEKIHLRNRALRGHRIAA

SEQ ID NO: 369790 - protein, 312 aa, unidentified
MAMLSFCGIDVSKDRLDVVVLPEGWFFSVSNDTAGWAELVARLRPLTVSAIGLEPSGGYERGIIRALLAAGLSVRRINPNKLRQFARARGVLAKNDRLDARLIAEYVAIMPTRVVQRDAAVEKLAEIVTMRRQLCDEHVAAENQAAHLEDAMLRRLSKRRQMRLEADIRLLDKRLAEMVAANVALAQRYELLTSMPGVGPVLAFTLIALLPELGKMSRKQIAALVGLAPYDFDSGKLKGHRSIYGGRMSVRNVLYMAALSASRYSPALKAFHNRLADADKKSKVIIVAVMRKMITTLNAMLRDNAVWRPQSA

SEQ ID NO: 369791 - protein, 345 aa, unidentified
MKKVVAGIDLHSNNVMIGIMDLDGKRLANRKVACELKDVVKFLAPFKTRLEKVVVESTFNWYWLVDGLQALKYPVVLANPAGMQQYSGIKHADDTSDAFFLAELSRLNILPTGYIYDAHLRPMRDLLRRRLMLVHHRTALMLSFKSLYARTTGQQMSLGRLKEMEVKEAHQLYAHPANQLIAGMQIKHMDQLTESIEKIEKAVLNSARDLPRYAKLTTLPGVGKILGMTITMEVGEIQRFGSAGEFASYCRTVEATRLSNTKKKGENNSKCGNKYLAWAFVEAANFARRYNPDCLAWYNRKAAKTSKVIATKALACKLAKAAWYLMAQNTDYQGQRMFGSTGATK

SEQ ID NO: 369792 - protein, 323 aa, unidentified
MQGKELSERKPMTEVYIGIDVSKAWLDIHIHPSGDNLRFANDRVGVGELIREIAGLSVKLIVVEATGKSHRRVHRALDKAGHQVAVVNPYRSRKLADALGLLAKTDVIDARVLALFARHIDPRPTPPLAANIAEIKELVAARRAMVADMTALKNRLGSTEHRLPARQLRARLKTLEGQIKGLVTEIQRLIAADPGLARRAAILASVPGIGPIGVITLIAEMVELGTCSRTQIAALAGVAPMNWDSGLMRGRRIIKGGRAGVRTVLYMAALTAVRANLGLKAFYQRLIKNGKKPKVALTAVMRKLIILTNILIKEDRTWSPTPP

SEQ ID NO: 369793 - protein, 345 aa, unidentified
MQIKSIGIDLGKTTFHLIALGTRSQVVARKKFSRSQLLVYTANLPPSLIGMEAGVGSHFLGRALREQGHQVRLIPAQFVRPFVKSNKNDYRDAEAIAEAVERENMRFVPIKTEDQLDMQALHRVRDRLVARRTSVINQIRAFLLERGISFRKGPARLRRQMPEILENADEKLSARMRRLLDFLWQEWKGLQLQIESLNSDVEQIANSDPTCVRLQQIPGVGPLVSTAVVSAIGNGAAFKKGREFAAWLGLVPRQWSTGGKAKLLGISKRGNPYLRKMFIHGARAAVLRVKREGSSLGQWMNGLETRAARNVVIVATANKLARISWAVLATGNDYHPRHKALAFSN

SEQ ID NO: 369794 - protein, 394 aa, unidentified
MNKDLLIQRRTESSALDDSVRAQVAQISCLDQERVIKTVIKYGNERIELDWSVKILKLGLDLHYRQVTVAMQEDGRLVVAVGKMAHRDFLKWIKKKLAQGWQIYSCYEAGASGYWLDRKLRKLGVANLVVVPKAMGQAGKKQKTDRRDSAQLVDDLDRYMRGNEKALSVVGVPSEEQEERRALIRYQLQIMGDRKRCEARGKGLLCSQGIEVHGVWWSEESWQELTQNPALKDWMKEQLEGWRTKALRYEEGQNQLRTRIEALAPESPLPKGVGRYSWAVLEYEMKGWARFNNRRQVSSYTGLCPGVHLSNGFGKEGSINRCGNPIVRWILVEMVWRLVRWQPDYPPIRQLVKGLVRSKRAKKRLAVMAARHLAIDLWRLATGQTTAQNLGLVF

SEQ ID NO: 369795 - protein, 435 aa, unidentified
MDEVTDEPLYRDRVCGIDIGKAQLVATIRVPSDRDRSRRAAETRTFGTTKREVLALADWLRCWQVPCVVMEATGDYWKGPFYRLEAEGFECVLADARQVKNLPGRPKRDPADSRWLAACFERGAAAACFVATPEFRIIRLHTRYRRDLTDERTRDKQRAEKLLESAAIKISSVLTDLHGVTGRDIMDHLIAGERNPKVLAQLARGTARRKIAQLEEALDGAEFFTAEHAALLQTMLARIDRVTAEITGLTEVIDQLLAPYEEQLQQAGSMPGWGRRAAQDAVAETGVDMTRFPTGSHLVSWGSRAPLDHQSGTRKGRARVKKGNRYLAGVLGETAVAAGRTQTREGARYRRIARRRGKNKAQVALGNTQLKVYHKLLSNPGMRYEDLGPDYYERRADTRRQIAHHVGKLGALGFEVTLARLPGPDPDTPDQTQAA

SEQ ID NO: 369796 - protein, 286 aa, unidentified
MAKVRTLVGLDVHAAKVVAAALDAETGELQRFRLGGDVVDAVALCAGLARPVRVAYEAGPTGYGLARELARRGVECVVAAPSKIPRAPGDRVKTDRRDAELLVRLLLAGKLHPVRVPGPEEEALRDLVRAREAVRVDLMRCRHRLSKLLLRRGIRYEDGRAWTERHRAWLATIELDRPAAQATLADCCGAVDALCHRREALERQIVALLPGSPWATQVARLRCLRGIDTLTAAGLCSEIGDFERFARPGQLMSYVGLVPSESTTGAQRRLGAITKTGTQTQEPPQA

SEQ ID NO: 369797 - protein, 412 aa, unidentified
MFKIFRNNCCGLDVHKTWIYSCIGITDPNGRTEYKQARFSSFSKGLRELAAWLAKYSCTEVCMESTGKYWIPVFNILEKSCFVTLAHPKYTKPQKGNKTDRKDAKWICDLFMCDMIKPSFIPSPEIRQLRDLMRYRFKLTNMLTGEKNRAQNCLTVSNLKLDDVFSDVFGKSSRSITNYILDHPGKTFDVSPFVDPRCKTPVSEIQAAVDGAISPEQAVKLRQCLDHIDELEAHRKEIESEILRIAEPFSAVLDLLYTLPGLNKNPMTAIAILSEIGPDMSVFPSSKHLISWAGCCPRNDQSNQKVKSRRNSRAGSYLKPLLVQVANALIKSKKHPEFKARYHRIKSRRGHKKAIIAVCKMLLTAIWNMLSKLEPYNPEGFLEHRPVKQEKTLTVSQALELLRLRGYTIANQ

SEQ ID NO: 369798 - protein, 317 aa, unidentified
MEKEYAGIDVSKNTLDMAIYTTNKKYQFPNTDVGINQLVHTISGLSITLVVIEATGGYETPLAYALNKAGVPCAVVNPRETRDFAKATKKLAKTDTIDARVLAHFAAVIQPKPRPLSDEQTQELGAILARRRQVIEMIVAEKNRLHTALQPVREAINAHINFLENELANIDSKLKGRIEESLIQRERYTLLQSVPGIGPNLAATFVIELPELGNLNCKQIAALVGVAPLNHDSGSKRGNRSPWGGRPQVRTALYMAALVAARFNPIINALYVRLCIAGKAKKVALVACMHKLLTILNAMLKHHTPWRYEPLPVHASC

SEQ ID NO: 369799 - protein, 368 aa, unidentified
MNTDKYVGLDVHKDTTVVAVAEGGREGECRIYGTIASDLHALEKVLRKLGGEGARLRVVYEAGPTGYVMARRLAQLQIDCIVVAPSRTPQPKGQRQKTDRRDALMLARLHRAGELTGIHVPDAVDESIRDLTRARADAVHDLTRAKQRLKSFLLRQGYRYTGKANWSEAHQRYLRELVLPLPALKAVLEEYLLTIAQRVAQVARLDDLIAAQVPQWKLYPAVQALMGLRGVQLNAAAVLVAELGDLRRFQHPRHLMAFLGLVPKEHSTGDSRKLGGITKSGNAHARWMLAEVVQHAFLPPKVSSHLALRQQGLPVAYRELSWKMQTRLHQRGRHLLGRGVMKPKVTIALARELCGFVWALLRQVPAPQ

SEQ ID NO: 369800 - protein, 369 aa, unidentified
MKDSITIVGMDVHKNSIEIALAETDGSNEVRHYGKIGGTMKALDTFIRLLISKGKNPRFVYEAGPCGYEIYRRLTKKGLSCKVIAPSLIPKRSGVRIKNDKRDAIMLARLERAGELTEVIVPSEEDEAIRDLTRAREHAVKARKVARQELKSFCLRQGKRYPGKGSWGPLHMRWLSDVSMDNPIQQIVLQESIHAVVACTERLKRLEDEIEHILPGWRMYPAVKALQALRGVAFITAATTIAEVGDMNRFPSARQFMTYLGLIPSEDTTGDNVRRGKITKTGNSHIRRVLVEAARGYSHNARVTRKLAKRQEGVPEYVAKIAWEAQKRLCRKYRMFIARGKENNKTVVAIARELAGFIWAIARQVPLAA

SEQ ID NO: 369801 - protein, 335 aa, unidentified
MQIKHFIGIDVSKDTLDLSVVVNGNVLNHYCIGNNSKEIKSIVNKIIRSLCGSFNDTIFCMEHTGLYNRPIVKWLHNNQAKMWLESGTHIRKTLGLVRGKNDKIDSSRIAMFAYTNQHKIKLWTLPRHVIEKIAALLSQRARLVKVRKQLTTANKEQKKFLEKDVMHSLNIYTDRTVSVIDKQIEAIESEITVLIKEDEKLNRMYRIITSINGIGFVTASYILVTTNEFINIDDPKKFACYCGVVPFEHTSGSSIRGKNRVSHIANKTIKALLHLSAMSTLNTPGEIQDYYKRKIAEGKNKMSIINAIRNKLILRIFACIKQNREYEKNYCYKFA

SEQ ID NO: 369802 - protein, 422 aa, unidentified
MLEEDQHVEQIVERVAACDIGKAELVCCVRVPHPSRPGRRLQEVVTYSTMTRSLLVLADRLAELGVTRVVMEATSDYWKPVFYLLEARGLDPWLVNAGDVKHLPGRPKTDKLDAVWLAKVAERGMIRPSFVPPPPIRRLRDVTRYRADLVVERTAEKQRVEKLLEDAQIKLSVVASDIFGVSGRAMMAALLAGERDPAALAGLARGQLRGKTGALTEAFTGYFTDHHAALLSKMLARIDSLSADIADLDGMIEELTAPFATAVARLDEIPGIARTAAAAILAEIGLDMTRFPTPGHLASWARFAPGVSESAGKPKGRRSTGHGNRYLARILGEAAVAAGKTHTFLGERYRRIARRRGGGKAIVAVGRSILTIIWHLLSDPDARYTDLGPDFFDRRHDPERRKRAHIHQLEALGYKVTLQPVA

SEQ ID NO: 369803 - protein, 452 aa, unidentified
MGLDPVGETVLLPPSSTANCTPMCVYKITILRGQDLLISMKAGMSLDAIRECCAGLDVHQKTVVACILTGDVEAKPKSLIQTFGTTTKELLQLQDWLLEHGCQEVAMESTGVLWKPVWNVLESTCNLVLANARRIKNIPGRKTDKKDAHWIAQLHRCGLIEPSVVLPEHMRDLRDWTRYRVKLVQAITAEKNRIHKMLQDANIKLSSFMSDVFGVSGRLLLQKLMDGEVLEENEIKSIVKTRLKQKVPELIEALNGKLRVHHRKLMTFHWKHLTYLEEQVEQLETQIDRELSIYKEEIDWLDSIPGIERDTAAAIFAEIGPNIHERFPTEEQWAGICPGNNESAGKIKKTKSPQGNKYLKRALTQASWANDKSQNRIGQHFRRIRKRRGDKKASVATAHLILRIIYAMMKNKSAYKEIDVPERTPNEKTLNYYLKQIQDMGFEIKVSSTETS

SEQ ID NO: 369804 - protein, 351 aa, unidentified
MPDLAVVGGVDTHKHTHHAAVLGADGTLIASQEFQATTDGHQELVAWLLSHGDIAAVGVEGTGSFGAPVARHLEAHQVRVIEVNRPNREARRRQGKSDSLDAEQAARAVLAGTATATPKSKNGTVEVIRMLRIARNTAVKSRTQAMNAIHSIIVTAPDALRDELLGLSKRRLVRRCQHLESHADLVHRHGEPDAVLAGTTTALRVLSDRWAMLDIEIKRLDQELEALVQVIAPDLCALHGVGIEIAAQMLITAGDNHHRLSNEAAFARLCGVAPQPASSGRTSGRHRLSRGGDRAANSALYLVVITRLRRHEATRTYVERRTAEGLSKREIIRCLKRYVAREIYNALPATG

SEQ ID NO: 369805 - protein, 325 aa, unidentified
MEAKKLCCGIDVSHTTLDVCYQNNLGELFHMKVGNNNKGFEKILEHTSTGYHFVMEATGVYYIRLAFYLHQKQCKLSVVNALSIKRFIQMQLERNKSDKKDAGWICRYAMEQCPPYWEMPDSAYFECKQLYNTIREYTEQTKRFNNQLHSLRLLPVPSKDTIKSLERIKQQLAKEIDNLEQKLEALLQQWQPTQFKSVGSIKGIGKRATAMLIVFTQGFKNTHSHRQLISFAGLSPTEYSSGSSIQGKPRIYKRGGKNLRDVLYMCSMNAIKTNTACKALYERLRANGKTGKQALIAVCNKLLKQVFAVVKNNTMYQPNYCSPKP

SEQ ID NO: 369806 - protein, 349 aa, unidentified
MQHYAGIDVSLGLLSVCIVDAKGKIVKEAKVGSDPDTLVAFLRGLDLAIERIGLEAGPLSQWLHAGLTSAGFEAVLLETRHVKAALSAMTVKTDRKDARGIAQLIRMGWFRAVHCKSPGSQEVRALLVARKLLLSKLLDVEFSIRGILRGFGLKMGMVTRKRFEARVRELYADHAMLEQICSAMLTARSALQTEYAKLHKALLVIVREDEVCRRLMTTPGVGPLVAITFKTGVDDPSRIHKSKAVGALFGLTPKKYQSGETDVTGGITRAGDEMVRTALYEAASVLLSRVTRFSALKRWGMDVAKRRGTKRAKVALARKIGVILHRMWVDMTSFRWTKGAPTTMRLARV

SEQ ID NO: 369807 - protein, 382 aa, unidentified
MTKIIRIGVDTSKAIFVLHGVDAAEQPVLRKRLVRRQVVKFFAEAEPTKVGLEACGSAHYWARQLQALGHEVVLLPPQYVKPYVKRGKNDALDAEAICEAMSRPTMRFVPVKTAEQQAALMLAGTREALIRRRTQLTNMIRGYAAEFGLIAAKGLGKIEPLLARIAADAELPELAKDLFATCAEEFARLQVEIKKVEAKLMAWHKHNALSRRLAEIPGIGPVGATLAVMKVADPKAFGSGRDFSAWVGLTPKDHSTAGKTRLGVITRAGDEALRRALVVGATAVIQQVKRGKGRPSPWLVDLVRRKPPKLAAIALANKNARVLWKLMVSGERYNPARGLVSGKRAFAEVARSEGRVAARRGGSAPRPSLLAPPDAGESLTNA

SEQ ID NO: 369808 - protein, 352 aa, unidentified
MDRYVGLDAHAQTCTLAVMGPTGKRLTSRVVETNGHALVEAIRGIPGTIHLCLEEGTQSTWLYEILEPQVSEIVVAVPEESKGAKDDLRDAWARADELRTGRIRTRVYKAPKHLTALRSSAVAYRMATQDVVRVKNRLKAVFRSRGILAESDVYLPRSRTKWLKQLPAGHRELAEWLGRELDTLAPLREEAEERLLKEAKTHPITRKLGTAPGMGPVRTAQLVAIVATPHRFRTSRQFWSYCGLSVVTRSSSDWVRDKHGQWVRAEVQQTRGLSRKRQPVLKAIFKGAATTVLTQLVGHPLHADYQRRLQAGIKPNLAKLTLARRIAAIVLSMWKHEEVYDPARLKVATDKS

SEQ ID NO: 369809 - protein, 341 aa, unidentified
MGQAHTIGLDIAKRVFQTHGADASGRVVFRKRLVRAKVLAFFAAQPPCTVAMEACAGAHHWARELGKLGHIVRLIPPAYVKPYVKRHKNDRADAEAICEAAQRPSMRFVPVKTEEQQANGVVFRARDLLVRQRTQCINALRGHLSEYGYVFPQGITHAEAVIAHVEDPDSAVPESARAVLKVLIGTFQALEAQIQALDAEITQRAKADPVARRLMTIPGIGPIAATAITALVPAPEGFRAGRDFAAWLGLTPLQKSTGGKQKLGAISKMGERTIRRLLILGASAVVRWASQRSTPAGSWLARMLARKPKMLVTVALANKTARIVWALLVKGGGYRAPAPAA

SEQ ID NO: 369810 - protein, 346 aa, unidentified
MMIIGCDFHPSWQQVCWLDTETGESGEQMLVQANGDAERFYRQVLAPALIGMEATGNCHWLVDLLAEMGHELWVGDAAQIRASYVRQQKTDKRDAAHILKLLVEGRFPRIWMPSSQVRDLRQLLLHRYKLVMIRARVKNELQHLCLNQGLQRKRKLWSQAGQQVLRELPLKPWAALRREDLLRLMAMLDQQIGPLDEAVKAEAQQDKMARLLQTQPGVGPITALAHVLTMGDVGRFRRGKQVASYLGLIPREHSSGGRQKLGAITKQGNRMMRMLLVEAAQIAVRYDPEFRRQYLHRCHQKPKGVAKVAAARKLAVRLYWMLRTNVAYPEIVRIESSPRVPLVGAS

SEQ ID NO: 369811 - protein, 586 aa, unidentified
MLPQPATVRQPPDVTSTCKDLSVNDIGVGIDTSRYGHYAAFLDDKLQQAAAELEVTESAQGYARLRQRFVDLVHKYGRARFFVRLDVAGAYADNLLAWLQTLKIDHADFSISCGDPQRNKNYRAAVFGSKKSDPIEARACARYALSERPRPMPIVSAERSRLRQVASRLQAVVKQRTRLVNQLHQLLARSYPELALQVKDITTGWVLELLTRYPTAKVLAHATATDLEAIPYLPHGRSAELLERARDSIGSLDGALAEELVRDQVRQVRDITARQKRLENLLVSAYQDLAPPNHLDTITGFGKVTAGVLTAFINDIDTVHSPGQLVSYFGVLPIEVSSGVDRDGTPRGPKRYVMSRRGNDLVRRYLWMAALSAARYNPACRALYARVRVKHPDQPAIAIGHVMRKLLHLVFAVWKTGKPFDPNHYPWHAPAHVVNSKCNNVNMSIEQAAGLEPDMPARPEVTATCAVTVAGAAKPVEGVWLDFARLKSQLPMARLLDHLGLTPRLRGSGPQRRCACPIHRGDGRGRTFSVNLDLNKYKYFDARCQSQGDVIDLWAALHRMSLRDAALDLVRTFGLEPSTGPEKRNG

SEQ ID NO: 369812 - protein, 370 aa, unidentified
MKKKILYIGLDVHKNTIDVAIATGRSNGKVRSYGKINSTIDALNKLIEKLHGNNPELRFVYEAGPCGYQIYRHLRSKNIECAVIAPSMIPKRSGDRIKTDRRDAINLVRLFRAGELTSIYVPTVEDEAIRDLVRCRDDMRRFEHKARQRLLAFLLRHGHHYAGKRHWTKIYYNWLATVRFSHSADQIAFQEYVDMVNECGQRLKRITEQIQVHVEQWDRSPLVKAYQALRGVSFVVAVTVVAEIGDMNRFQNPKQLMAYLGLIPSEHSSGKTIRRGSITKTGNGHVRRVLVQAAWTYRMPARVSTVLLKRQQGLPKSICEISWKAQTRLCARYRRLIARGKSRQTVVIAIARELGAFIWAIDRQLHGAVA

SEQ ID NO: 369813 - protein, 321 aa, unidentified
MTYVGIDVSKATFVVAYSSAKNSKTKTFKNTTKGVHEFIQTLSANEHHCVLEATGNYSSLLVYLLSQANITVSLENPLKIKNFARVMLSVTKTDETDARLIALYGERMQPAPYKLRSDAILTLKQKRTVIRQLKKQLIATRNLKGSMEALPFFDPKCKKAIEKTIVFLEKQTKGLEEELAALAQSEYKKQIDLLTSIKGIGVTLAAALIMATGGFTYFDNAKQLTRYLGLSPTYQQSGTSVNVKGHINRNGDSSLRGQLYIAAMASLRCNAECKACFDRLRSNGKPGKVAVVAVANKLVRQAFAVVTQEKPYVDGFKSEKP

SEQ ID NO: 369814 - protein, 347 aa, unidentified
MTNRSKVVVEVFAGLDVSAREISVARGQGIQGKEEKPVVASFANNASGHKALLAYLLQGTERVRVCLEASGNYSLDLALALHAHRQVEVSLVNPRRARRFAESLGERSKTDPVDARVLWEYAARMPWVAWQPPSSLALRLRAITRAIEALGVMHTQEKNREHALASSQALPAMVIQEMQRHQRYLEHRMERLRREALRLITRDCELNRRFRLMLTVPGIGETSALQMLGELVVLSDTLDARQWVAFAGIDPSQFTSGSSVQKRPRISRGGSRHLRRALYMPALVALRREPHLRAFYQRLLSRGKARLQAVVAVMRKLLHALFAMFRFNQSFDGSKLCPIGLVTNLAA

SEQ ID NO: 369815 - protein, 355 aa, unidentified
MNDAKYIGMDVHTATISAAVRDSSGNLVMEATLETKAETILEFVHGLRGSLHVSFEEGTCAAWLHDLLKPHVSEVLVCDSRKNALLRVGNKNDREDARKLSELLFLNKLHAVYHGETGIRTLKELARSYLTITRDLTRVMNRLKAIYRGWGIACAGQQVYAPRYRAEWLAKITEAGVRRRAEIYYQQFDALAALRQEVRRELWAESRKHPAMRLLRQIPSIGPIRAALLIALMQTPHRFRTKRQLWAYCGLALRTYDSGEYRFVGGQLKRSKKAVTIRGLNKNHNHDLKNIFKGAATRAAATAGPLQNFYQARIANGMKPPMARLTLARKIAAITLLVWKKGVRFDAKQLKQQAA

SEQ ID NO: 369816 - protein, 390 aa, unidentified
MDVLYQSCAGIDVHQANIVVCILHGPLTSTRPKREMATFDTTTKGLRACHDFLSQFHVEAVGMESTGVYWRPVWHALCDDFELILAQPAHMKAIPGQKTDKKDAHWIAKLTRIGLLPRSFVPDETIQELRELTRQRKHYVESRNRETNRIHKILQSGGIKLTTYIEDIMGLSGRNLLQLLVDGTPITPRIVHQSVYTSLKKKVPQLLEALDGYFSDHHRFMLKQSLEIYDFYQKQIELLEERINVYLSQYEKHVEILDSIPGIDVITASVIISEVGVDMSQFPTAGHLASWAGLCPGNNESAGKKRSTKIRHGNSYLKKCLCQAAFAVKKQKGSPLAARFYQIQSRRGSQKATIALAHQLLKIAYILLKEQITYPEFLAQKKTTRDELVA

SEQ ID NO: 369817 - protein, 318 aa, unidentified
MKTKTNQNINVGVDTGKFQLDIYIRPMGIYFTVTNDEKGIKEAVKTIKKHKPERIIIEATGRLEMPFILACAKAGLPFVIANPIHIKRFAGAIGQRAKTDKLDAQLIAHFGEAIEPKLSTLKPDTMQAMSDLVARRSQLLIMQTMEKNRLQILPKNLAMTIKPILTAFKNQIEKVENKIAELIVECPDYQAKSLILQSMPGIGKIAAASLIGNLPELGYISSKQASAFVGVAPMSRESGRYKGQRKIQGGRHQVRTVLYMAMMSAMQCNPVFKATYQRLLAVGKPKKVAIIACVRKMIVILNSMIRDGVMWDATTVKN

SEQ ID NO: 369818 - protein, 389 aa, unidentified
MKIFVGIDIAKLNHFAAAISSDGEILIEPFKFTNDADGFQLLVSKLESFDKNSIIIGLESTAHYGDNLVRYLVAEFYQVCVLNPIKTCQMRKNNVRKTKTDKVDTFVIAKTLMMQDDLRFITFFDLDMMDLKALGRFRQKTIKQRTRLKIQLTTYVDQVFPEIQYFFKSGLHQNAVYALLKEAPSPKEIASMHMTHLANLLKVNSHGHFTKEQAKELRVLAQKSVGANDSAISIQITQTIQQIELLDSQLQKIEVEMTDIMKFNDSVIMTIPGIGYINGGMILGEIGDIHRFSNPNKLLAFAGLDPSVYQSGNFQAKTTRMSKRGSRVLRYALVNAAWNVVRNNATFKAYYDAKRAEGRSHYNALGHCAGKLVRVIWKMLTDEVEFNLE

SEQ ID NO: 369819 - protein, 525 aa, unidentified
MVDTRQEAKERRANAKEEKAFKKYIKSAKVEGLPKLNPNTAGIDIASEVHYVAVPSGRDPKGCIREFGPTTPELRDLADWVKECGVQSVAMESTGNYWVPLFELLEERGLDVIVVHAQYVKQIPGKKTDVLDCQWIQTLHAHGLLNKCFRPSQVVGPLRTFMRNRETWIQDASSYIQHMQNSLDLMNVLVHRAVSDITGETGMKIIKAILDGERNPKVLAGYRNYRCRKSVEEISKALDGHFQDHYLFCLRQALAGYEMCQKMLRECDIVLERALIQYESALFPESESVSESESDSVSESESMQESESKQEALKRPLLRKPKGNEPHFNVEAYLRRISGVNLLAVGGIAAVNGLTIVSEHGVDLSAWASYKKYTSWLGLCCGNNVSGKKSKSGKARAVKSRVANANRMTASTVRNSKCPLGKNYRRMKAKLGPAEAVTATAHKIARIVYTMLTTRTEYSEEMVEMAHEDQKEKRRKCLVKLANDEGMFLLDGEQYAKVVEMLLVPEDLAAVSAMHYPGPHAWVSD

SEQ ID NO: 369820 - protein, 456 aa, unidentified
MKRKQISLEVVNPNAAGIDIGSRSHWVAVGQNAQDVKEFGVYSQDHQELCEWLKKHKVTTIAMESTGTYWQNLFSSLVVFGFDVILVNGRQTKNIKGQKTDILDCQWIQKLHTLGLLSSSFLPDSTTAVIRTYSRHRQNILKQSASAILKMQKYLRLMNMRLDVVVKDIVGLTGTKIITAFIAGEKSGKVLAQNRHYNCRKSEEEISKALQYNGREDYYFALKQEWETYLHLQKQIDQVDVQIKRHLEKVIDTDDDKKQHIASNKPYKRKNKNTIRNTDMNQLSYQYFEGDDLMAIEGVNDALLMAFISEIGLEGIKKFESSKQFTSWLRLAPNNKISGGRVLSHHLPKGSNRLKVALRQAANTIGNLKDGHLSDFFRRINYKKGRATAISATARKLAVIIWNMLTKGIPYHPPTEYLFLDQKRKLKMLSRIKKNIVKFDIRPEDIGLSKILNIST

SEQ ID NO: 369821 - protein, 342 aa, unidentified
MDHFAGLDVSVKATSVCIVDGSGKIIREVKVASEPEALLVVLKNPAYRFKRIGLEAGPLSQWLFGALAEAELPVVCVETRHMQAVLKAQINKTDRNDARGIAQMMRAGLYRPVHVKTLRSQKLRMLLTHRKLLQSKAIAIENDLRGTLRNFGLKVGMVGTVKFEARIRELVENLPDLAELVEPLLIVRRVLREQIVILHRRLLAIVRDDEVCRRLMTTPGVGPVVALTYRATVDVPARFRKSKAVGAVFGLTCSKYQSGEIDRSGRISRCGDEMMRVMLYEAAQSMLRSKKWSWLKAWAMQIARRRGMKKAIVALARRLAVIMHRIWVDGTEFRWTREVAAA

SEQ ID NO: 369822 - protein, 351 aa, unidentified
MNIIGCDLHTRFQQIAMLDTETGEIVGRRLEHETGEAQRFYAALAAPARVGIEATGYARWFERMLAEQGHELWIGDASAIRAARVRQQKTDARDALLLLDLLVAGRFPKIWVSSPAERDLWQLLRHRDKLVRLRTSVRNQLHAQAMGEGVCRKKKLWSKRGRQELQALPLGEWANRRRQELLELLDRFDASVQELDQAVAQQAERHPAAVRLMQQPGVGPITGLALALAVGPIERFRNSRKLVSYLGLNPRESSSGGKQRLGAISKQGNSLVRWLLVEAAQTAARKDEGLRRVYQRLVHRRGRAVAKVAIARKLAVRLYWQLRQAGAQPSPPTRTQGSSLSPVVPLAGPTP

SEQ ID NO: 369823 - protein, 291 aa, unidentified
MLKFNVIGIDLAKNVLQICVISKHGELVSNKIVGRQRLKEMLAKSSPSIVGIEGCGSSHYWGRMAESFGHDVRIITPKKVKAFLSGHKTDANDALAIANAAMQIGLKYSKPKNEEQQTLQSLEASRVFLSRNITSLGNHIRAMLYEYGIVSAKGAAGLRKVVQDTFEENNELPTCLISTLHQLWAQYLNLKEEFTKLEKAKNSIVRQVKPCKQLMALEGVAEVCAGMLYSSIGNGKQFKNSREAAAFVGLTPKQHSSGGKVFMMGIDKKRGCQRIKGRFVSRGYVNSHSFT

SEQ ID NO: 369824 - protein, 390 aa, unidentified
MEARTMNNLPPTAPHDDAVLCLLAIELSKKSWIVAVNTPLSDKVSRHTLTPCDGKGLLDLCERIRTRVAREMKKPVEIISCYEAGYDGFWLHRLLEAHGIRNYVIDPASLQVDRRARRAKTDRVDVERLLRSLMAYLRGEPKVWSVVRVPSVVEEDDRRLHRERDRLINERIQHVNRIKGLLAIHGIYEYQPLRRDRMQQLERLRTADGQTLPPRLKAEILRELQRLVLVIGMIKTIEAERDAIASAKTEAEHTSAKKIQDLVKIKCIGPEFANSLVGEVFYRSFDNRKQLASYVGLTPAHFQSGTMSRDQGISKAGNAKARTVMIELAWLWLRHQPDSPLSIWFRDRVGKLKGRIRRITIVAVARRLLIAFWRYLETGLVPEGAILKVK

SEQ ID NO: 369825 - protein, 378 aa, unidentified
MQSIDAVNRNILVAIELSASTWLVAARMPGLDKPQLHRIDGGDTAALLALISSLRERVARSLDAAIGVVCCFEAGRDGFWLHRVLTAHGIANHVLEPTSILVNRRARRAKTDRLDAVGMLRVLAAYLRGDRQSCSMVRVPTPDEEDAKRTHRERENLVQERLRIENRIEALLFTQGIRKRPSLRSWDRDIAVLRTGDGREMPNHLRAELGRLRRRLVVTLELIREVEAERDEAAEAKPQDQACRKIAALCRIRGLGDNFATVLTREVFYRPFHNRRQIASYVGITPMPYQSGSMDRDRRISRAGNPRARTTMIQLAWLWLRYQPGSELAEWFRKRVGTLAGRTRRIAIVAMARTLLIALWRYVETGVVPTGAEIRAEA

SEQ ID NO: 369826 - protein, 408 aa, unidentified
MKTLLRRCAGLDVHKVEIVACLRLVEKGKVARRVRRFPTTTQGLLELVEWLEGAGCSHVAMEATGVYWKPVWHILDGHFALILANAMHVKAVPGRKSDVNDATWLADLLAHGLIRASFVPSTPIQELRDLTRTRKQLTREIVQHVQRIQAVLEEANVKLSSVISDIMGPSGRRILTAIIAGETDAEKLAALGSERLGCGRAALSEALRGRIREHHRFLFAQHLRTIEQLEESVAAFDARIAGALAPFREVVERLNEVPGLGRIAIETIIAEIGTDMSRFPTAGHLVSWAGLAPRLDESAGKRRSTRIRNGAPWLKPALVQAGWAATRKKNTYLQAQFLRLRSRRGPKKALIAVAASILTIVYHMLRDGTFYRDLGPEYFARRSPAKLAANLANRIRNLGYHVEISAAT

SEQ ID NO: 369827 - protein, 343 aa, unidentified
MGTTKSNNSMNYWMGIDVSRATLEVALLDDRGERIGAASVKNEHKAVSGLLKRWTKEVGMANEQLLVCLEPTSHYSNGLLRWLVEAGVRVWLAHPSDIQHSVGSTRGKNDRVDAVRIADYARRFQDKASLFTAERLKYTGLRQLITRRKQLVHDRVKHHKQMTDLNRCVEGQLQAVFARLDRRQIRLLDELIAQVDGMILDTIKSDPELHRLYRLILTVPGVGPVLAANLLAITEGFTRFRKARALSCHAGAAPYEHSSGTSIRGRTRVSPKANQGLKALLHISALSTIQREGELRDYWIRKIAEGKHKMSILNAIRNKIIHRVCAVVDRGTPYLAQNPLLMS

SEQ ID NO: 369828 - protein, 412 aa, unidentified
MDKLFIGLDVSQKDYEVCVMDGEGERVGKGFSLRNNAEASEILVSRIAEAAQKRGVQKIFIGYESTSVYGWHLQYFLADSPVLKPLQPTIICFNPTVIENHKKALGDLPKNDRIDAFAIADRLRIGRLPESAQVDFRYLALQRLTRHRFHIVENIAREKNYYLSNLFLKCSGLCQTGVFSNNFGATALAVIDELTDLEQIADMPLEDLAQFLMEKGREHFTDADETAAKLKAAVKSSYRVNPSVDNSLNLVLRSCIENIKSLERQKKAIEKAIKEQVAFFEREGLCLKSVKGIGDVIAAGLIAEIGGISRFDNDNSLAKFAGIYWNSYQSADFTAEETALRRRGNKYLRYYFVQAADQMRKYLPEYAEFYSRKFKESKTHQHKRALILTSRKVVRLVFALLHDNKLYNPANQ

SEQ ID NO: 369829 - protein, 378 aa, unidentified
MNRIIKIGMDVHTTNYTLCIFEPSFEHDGTVHCITQVKPEIKKIIHVIEAFKKKHENEELNIVCGYEAGCLGYSLYHELKEKGVECVILAPTTMKTEKGGRKLKNDYRDAKMIAECLAYGGYSAVHVPTELDNSVKEFIRMRDDIKENLKRIKQQIIAFLTRNGKQFNGKNYWTKKHIDWINTISFSEPLLLDTLKEYMIEYNHLCDRVETLDKQIEEISVKEEYVEKVQQLQCLIGIKTHTALSLIVETSDFNRFKKGNMYSAYLGLIPGDDSSGGHENKLGITKAGNSHLRRLLVEAAQGYTRGKVGFKSKDLKARQEKCSSEVVAYADRANERLRRKYYRMILRGKKYNVAKTAIARELACFVWGIMTDHIDLCN

SEQ ID NO: 369830 - protein, 385 aa, unidentified
MEISPRSPASATDQPATIFVALELSRGSWLVAVHTPLADKIGLHKLKGGDSEGLLALIARLQARVQAALGRPVAVVSCYEAGYDGFWLHRLLEAHGVRNHVLDPASLLVTRRARRAKTDRIDAASLLRALMAHLRGEPKVVSVVRVPSVAVEDARRLHRERHRLVGERTQHVNRIKGLLATQGIYDYEPLRRNRCARLAELRSGDGLALPPRLAAELRRELTRLELVLAMIREVEAERDAIATAKAVSHPHAAKIQTLVKLKAIGPEFATVLAGEVFHRVFANRRQVAAYVGLDASPWRSGAMCRDQGIAKAGNPKARTTMVELSWMWLRHQPNSALSRWFHERVGTLKGRPRRIAIVALARKLLVALWRYLETGLVPAGATLKA

SEQ ID NO: 369831 - protein, 322 aa, unidentified
MAMLSFCGIDVSKDRLDVMVLPEQQCSSVGNNVAGWSELIERLRGFSIAVIGLEASGGYERGVMRALLAAGMSVRQINPFKLRQFAKASGVLAKNDRLDARMIASFVAIMPTHPAQRRAPAVERLAEMVTVRRQLSNEKIAAENASRMLENAMLQRLSRRRIARLATDIAVIDQHLVEIVASDAALAHRYRLLTTMPGVGAVLACSLIAFLPELGQLSRTKIAALVGVAPYDFDSGKLRGMRCIWGGRTPVRNVLYMAAMSASNWNPRLKAFHDRLAATGKKPKVVIVAVMRKMITMLNAMVRDDILWADRYCGRHSVPTAR

SEQ ID NO: 369832 - protein, 390 aa, unidentified
MDARTVNNLPPAATHDGATRCLIAIELSKRSWVVAANTPLSEKISRYTLKACDAKGLLELIEKIRMRIARELKQPVEVICCYEAGYDGFWLHRLLEAHGIRNYVIDPASLQVDRRARRTKTDGVDVERLLRSLMAYLRGEPRVWSVVRVPSVAEEDDRRLHRERDRMINERTQHVNRIKALCALHGIYDYEPLRSDRMRRLEQLRTGDGRQLPPRVGAEIRRELQRLELVLQMIKAIEKERNAIASGKAASSHPYANKIQGLVKIKSIGSEIATVLAGEVFYRSFDNRKQLGSYVGLTPTHFQSGPMCRDQGISKAGNPKARTIMIELAWSWLRFQPDSRLSIWFRERVGSAKGRIRRITIVAVARKLLIALWRYLENGLVPEGAILKTK

SEQ ID NO: 369833 - protein, 424 aa, unidentified
MREEGLSMAEEIEWFVGIDWASQSHQVCLVDARGECLGERAVAHGGLGIEELCDWLIARTGATPEVIGVAIEMTQGPVVEALLERGFCVYGINPKQLDRFRDRFTVAGAKDDRRDAHVLGDSLRTDRHAFRRLSNDEPVIVKLREWSRMADDLQQERARLASRMREQLWRYYPQMLELADDLAADWFLDLWNQAPTPAKAARLRQTTIERFVKAHRLRRWQAPEVLRILKQKPLSVAPGVVEAASDHIRTLTVRIRLVNQQLKAAHRKLDELCAQLVPSEEDEPGQQCEQRDVVILRSMPGLGRTILAVLLAEVWQPLRRRDYHALRSLSGVAPVTRRSGKTCVVVRRYACNKRLANALYHWARVATQHDALSRRRYAALRQRGHSHGRALRTVADRLLSVACTLLEQQTLFDPSYEVRDAAGA

SEQ ID NO: 369834 - protein, 389 aa, unidentified
MIYVGIDIAKKNHFASVLSSDGEVLVEPFEFSNDDDGFNRLISNLDSFEKNNLIIGLESTAHYGNNLVHFLYSLHYKVCVINPIQVSSMRKNNIRKTKTDKVDTYLIVKTMMLNQHRFVTQFDIDIIRLRDFCRFRQKLIKSRTSLKIQLITYIDQLFPELQYFFKSGIHGKACYALLKESAAPKEIASMHLTHLTHLLKCASHGHFKKSTAIELRALAQKSVGIYDTSISIQVADTIEQIELLDRQLSEVHQNIETIMVSLNSVIMTVPGIGYLNGGAMILGGEIGDIHRFSHPKKLLAFAGLDPSVHQSGKFKARRTRMSKRGSRVLRYALINAAHNVVLNNQTFKNYYDSKVAEGRSHYNALGHCAGKLVRILHKILTEDIPFNLD

SEQ ID NO: 369835 - protein, 411 aa, unidentified
MRLFVGDDWAEDHHDVEVMSAAGKVLAKRRLPEGVAGIAQLHELVGRHLGDDADEAEVVIGIETDRGPWVAALITAGYLVFPVNPLQASRYRERHGVSGAKSDGGDAHMLADMVRTDSHQLRQAAGDSPEAEAVKVTARMHKTMIWERTRAVQRLRHQLREYFPAALEAFEDLDAPDTLELLGKAPDPGRARKLTRAQVSAALKRARRRNIPDKASAILAALRGEQLAQPPALTAAYAGTVRSLIALIATLNEQVKALEAQVREHFGRHPDAEIYLSQPGIGAVLGARVLGELGDDPHRYASAKSRKNFAGTSPITRASGKKKVVAARFVHNDRLVDALNAQAFAALTASPGARAFYDQQRAKGVEHQDALRRLANRLVGILHGCLKTGTLYDEATAWGHRENLPQSSSAA

SEQ ID NO: 369836 - protein, 411 aa, unidentified
MSEKYFAARIGLDWADVKHDYCLRDELNQKIEHGVFKHTPESIDKWASELKDRFNHQPVAICLELKSGPIVSCLLQYDFIALFFVVPQALANYRKIFTQSGAKDDPTDAFLQLDYLTKHFSDLQEVKLDQQNTRMLDQLTYHRKSFVDEKVKIVSRLTAALKNYYPLMLDVFTDLDTILFCDFVERWPNLSKLKDAKQEKLSSFFKSHRSGRIELINQRVELIHKAIPLTNDEAVINPQQRFVLGQISLLKSLLKTIKSYDSEITSIFEQHEDHDIFASFPGAGEHLAPRLLAAFGTDRSAFSNAEEVQKYSGIAPVLVRSGKKACVHWRFKCSKFLRQSFVEFANQSIRLSFWAKTFYEQNRKKGKSHQATIRALAFKWIRIMYRCWKNHTTYDEATYLFALKKRNNKMA

SEQ ID NO: 369837 - protein, 314 aa, unidentified
MPQLVQSAGIDCGKRFLDVAVYPGGEQIRLENEPADHQRLVVWLKERGVTRVGLEASGGDERAVRDVRCAAGLEVHILDPARVRHFAKAKGRRAKTDPIDARVIAEFTATLVDTPPVTVEPAREDLAKLIRTRRLLVAKRADMTKAIKDLPDAARTVVETALASLGAAIAELEQLIDRQAGADAALAKRVEALCSAPGIGQTTAVAVAVLLPELGRVSGCAIAALLGVAPFADGSGDRKGERHIAGGREDVRQLLYMSVLRAATQGQGVLRAFYLRLTGRGKPAKVALTACRRKMIVRLNAMLAAHQTWKEEPA

SEQ ID NO: 369838 - protein, 389 aa, unidentified
MKIYVGIDIAKLNHFAAAISSDGEIILEPFKFTNDADGFQLLVSKLESFDKNSIIIGLESTAHYGDNLVRYLVAELYQVCVLNPIKTCQMRKNNIRKTKTDKVDTYVIAKTLMMQDDLRFVSFYDLDMMDLKALGRFRQKTIKQRTRLKIQLTTYVDQVFPEIQYFFKSGLHQNAVYALLKEAPSPKEISSMHMTHLANLLKVNSHGHFTKEQAKELRVLAQKSVGANDSAISIQITQTIQQIELLDSQLEKIEAEMTDIIKFNDSVIMTIPGIGYINGGMILGEIGDIHRFSNPNKLLAFAGLDPSVYQSGNFQAKTTRMSKRGSRVLRYALVNAAWNVVRNNATFKAYYDAKRAEGRSHYNALGHCAGKLVRVIWKMLTDELEFNLE

SEQ ID NO: 369839 - protein, 383 aa, unidentified
MQASTIGTPTIGHCGTIFVAIELSRRSWLVTMHSPERDRISRHKLDGGDHAGLLTLIDSARTRAGRKLGSMPAVVSCYEAGYDGFWLHRLLTQAGITNLVFDPASIAVEQRARRAKTDRIDGELLLRTLMAHWRGKPRVVRIVRVPSVAQEDARRDSRERHRLITEQTAHTNRLKALLRLVGLAVGNPRRRDWLSWVERQRDWRGQPMPPRLLAEVEREHARLMLVREQLAALEQAPAAADASAAIAQMTERRDLLLRLKGLGPVFAATLAHEVFYKDFRNRREVAGYCGLAPSPWRSGGTDREQGISKSGNPRARHKAVELAWLWLRHQPDSGLTQWFRARTLNASKRIKRIAIIVLARKLIVALWRYLTTGLVPDRAVIEA

SEQ ID NO: 369840 - protein, 404 aa, unidentified
MKGPIVSIDVSKGKSDYQAFKNLNVKYTGSRSIKHTKEGFDEIVNLVREMEKKLETEVCVVYEATGVYHRVLKKVLEDNNIKQFIINPLLSAKTRKNDSLRSPKTDKLDPKSIAKTYYSHSLHNSHKPETIYHELRELSRYYEDILVHIRKDKVAFIAQLDIVFPGYDALYDDLYGPVALAVIEKYPHPEMLQKKKINTVSKVIQNKTCHRQATSDIMADKAIEYSKTIYSGCDKDDIEVLILQRLIKKLKEDMAEAERTIGEMIKLAQELPDFSIIKSIPGIGDNLAARIIAELGDMTRFKKKNELVAFAGLDPRISESGKNDGDHMHITKKGNKRLRCLLYLAVTCSIRLKRDDNSIKDFYIKKKQQSNPMCSKAAKTACASKLVRIIYSMCKTGELYQYNK

SEQ ID NO: 369841 - protein, 391 aa, unidentified
MFYIGIDIAKHNHEVSIIDDNGKALGKSFSISNSQKGVDKFNTYLDSFNITSENCVIGMESTGHYWINLFSFLVNLKFNVFVINPIQSDAFRKMYIRKTKNDSKDSYIIAQIMRFGEYSSSNISDENIFALRQLSRYRTSLVDECSSWKRKIISILDQVFPEYSNLFSDTFGVTSKELLSKYPLPENMLELSTEELTNLLTKASKGRFGNEKAQEIKESAKNSFGVSFAKQTFSFQIKQIINQISFIESQLKELDNEISNMLKELNSEITTITGIGDVLGACILSEIGDISRFEKASQLVAFVGLDVAVKQSGEFTGTEMKITKRGSPYLRRAIWLAATVASFKDPALSIYYKSLIARGKKHLTAIGAVSRKMCNIIFSVLKNKKAYTPNI

SEQ ID NO: 369842 - protein, 351 aa, unidentified
MPRKTAVAVVRTIGIDTGKNTLHMVGLDERGAIILREKISRHRIAARLVNVQPCLVGIEAGMATHYVARELVALGHEVKQVPPAYAKPFRQGHKNDFRDAHAVAEAVQRPSTRCVPIKTDGQLDLQALHRVRSRLIGARTAVINQLRGFLLEHGIAVRQGHRFLRQQLPQILATRADVLSPRMVRIAGDLIEDWGYLDERIERVTDEIEGLAKTDVSCGQLMTVPGIGPIIASATVAAIGNGAAFAKGRDFAAWLGLVPKQMSTGDRTILGRITKRGNRYLRMLFIQGARAIQLHRASWTRHSFGPWLTAAAKRLHHNVLTVALANKLARIALTVLIEGRNYETRITPAAA

SEQ ID NO: 369843 - protein, 281 aa, unidentified
MTITTIGLDLAKSVFQAHGVDENGATALVRKLHRKQMLPFFSKLPPCLIGVEACGTAHHWARTLSAMGHEVRLIPPSYVKAFVKRGKSDALDAEAICEAVQRRTMQFVPVKTVDQQGILMTHRARSLLVRQRTQAANALRSHLAELGLVANLGVANLAKLAEQALADRDALPSFARAALEIMLRQIVALGQEIAELDRQIASWHAESEASRRLAAIPGLGVITATAVAATVTDPDQFRSGRQFAAWLGLTPQQQSTGGKIRLGGIRQISRQARLLPVDSSR

SEQ ID NO: 369844 - protein, 339 aa, unidentified
MELYAGLDLHSRNTYIGIMDNAFNRVFKKRVPNHLELILQTLDPFRDQIKGFVVESTYNWYWLVDGLMDAGYSYAHLANPSAIKQYEGLKHSDDQHDAFFLAQLLILGILPQGYIYPKKDRPVRDLARKRMFLVQHKTAHILSLQSLIQRCCAMKVRANDMRHLTVKELELWLEEEHLVLSAQANLDSVNFLKQKIKQLEKAIIQKVKLNKAFKYLLTVPGIGNILAMTIMLEVGNINRFPKAGNFTSYCRCVPSRRLSDGKSKGQGNRKNGNRYLSWAFTEAAQLGRRHNQRFRRYYNRKIAQANTSLATKALGNKLARICYYIMRDQVPFREELFCH

SEQ ID NO: 369845 - protein, 355 aa, unidentified
MIIIGVDYHPEFQQIAFLDKDTGEFQEKRLSHPEEAERFYRSLAAGHGKVRVGMEASGHARWFERLLAELQFELWIGDAADIQSKRGRKQKTDRQDAEHILKLMLKDDFPRIWVPSGENRDLRQLLWHRHRLVQARTRIMNQLQAVAINEGLRCKKRLWRAGGRQQLESFLLAPWASRRRHDLLELLDRLSPTIAELNQAIEQETEKNPEARRLRTHPGVGALTALAFVLIVGNAKRFQCGKQVASYLGLVPLEKSSGNRRRLGHITKQGSSLLRFLLVEAAQVTVRSLPEWRSQYFRLLLRRGRKTAKVAMARRLAIRLYWMWREGRDYEQQRSSVRTQDSPKQAMVCSRTPRN

SEQ ID NO: 369846 - protein, 358 aa, unidentified
MADKVTVAAVVGSVDTHKDLHVAAVVDQNNKVLGTQYFATTRQGYRLMLAWMTSFGALKRIGVECTGTYGSGLLRYLQNAGLEVLEVTAPDRMERRKRGKSDTIDAECAAHAAFSGIRTVTPKTRNGMIESLRVLKTCRKTAISARRVALQIIHSNIISAPDDLREQLRNMTRMQLIRTLGSWRPDASEYRNVTNVYRISLKSLARRCLELHDEIADLDVMIAAIVDELAPELIKRNAIGYESASQLLITAGDNPQRLRSESGFAALCGVSPVPVSSGKMNRYRLNRGGDRAANSALHIIAIGRLRTDDKTKEYVARRVAEGHTKMEAIRCLKRYISREVYTLLRNQNRQVNSIPIMA

SEQ ID NO: 369847 - protein, 339 aa, unidentified
MGEVTTIGLDLAKNVFQVHGVDAAGAVAVRRALRRGQVLGCFAKLPPCLVGMEACATAHYWGRELARLGHRVRLIPPAYAKAYVRWNKNDAADAAAICEAVSRPSMRFVALKTAEQQAAAGLHKVRELLVKQRTMLINALRGLMAEFGLVAAAGPQHVDELVRMLNEPAGAVIPEPLHGGLMQLVHSLRLVQREVETIEKEIVRWGRDNRTCRHLDTIPGYGPILASAMAAMVVEPGAFKSGRHFAASLGLVPRQDGTGGKVKLGPISKRGNGYLRRLLVNGAMSVLRGKRARHDPWLAKLLAERKRMVVACALANKMTRIGWAVMVRQAEFRARPAAT

SEQ ID NO: 369848 - protein, 343 aa, unidentified
MVTTIGIDPHKATHTAVAIDGSETVLAEITISADRYQTKKLIDWASGLNGDGRVWAVEAAGGLGYLLSQQLIAHGEHVVDVPPVLASRVRLLGSGRSDKNDPNDARSVAIAALRQPGLAVVLREDHTQVLRMLAKRHLELTGLRTQAVCRLHAVLAQLKPGGMGRRLSAKQAGRMLAGIRTLDPVGEQRRAMARTHLGDIRRQDREIKANKTLIQSAVAASDTTVTGIYGVGPIVAAFLIGYTGDIGRFASADHYAAYNGTAPIEVSSGGKKRHRLSMRGNRVLNHAIHMAAVTQIRHDTPGRVYYDKKRAEGKTKKEALRALKRRISNVVYRQLLTDQTKRS

SEQ ID NO: 369849 - protein, 511 aa, unidentified
MRRIGIDIALKTAHKAAVFEGGERKGKPFPVPQTRAGIDELMRRATGGIDEPCEFVMEPTGLAWLPLAAELSRQGHRTYLPKPQKTNALRKFLAAHAKTDANDACAAALVRHVDTANTHELHVPSAQETTLKLYVKQRARMVADAAKAKVRIHSWLVLANPHLGKALGDTTSDVATAFLRRQLDPFQVLDRGMDELVRFWRAHSSGRFNAAQVEAVWTACETTCALYAELRASGQLPFEYAAVQRLVCQSLEQVEFFEGQLAEFDAQIAALYAALDPSRLLERQVPGVGAVIAATVEAFAGDATRFSSVKRYAAFYGLVPRTKQTGGAEGKPRQRLTKGGNNLLKQYMFLAAESARRADPVLAAVYASAIARGKHHYSAVIIVAHKLVRRIYAVLRQRAAARAGAAEAPMYRLQQPDGTSLTKSEARTWVATQFPPKRAKVARVKRTAGDLRQTRSVPQEGSSEDATKPSRLPPPNSLVPESAHAEKSADPNDKLDSIDKSEQGPFLLAAP

SEQ ID NO: 369850 - protein, 351 aa, unidentified
MLIIGCDFHTRYQQIAMANDETGELLLERRLDHDSGEGHAFYRSLQGPVRIGIEATGPIHWFERLLTELGHELWIGDAAKIRASEVRKQKTDERDARLILELLLAKRFPKIWVPTPVERDLRQLLWHRHKLVSLRTTLGNQLHALAMSQGLCRKKKLFTKKGRVELVNLGLGPWASRRRAKLLELLDQVDPPIAELDRAVLEEAQRRDDAVLLMTHPGIGPVTALAFVLAIGPVTRFPCSKKVASYLGLNPSEESSGGRRRLGAISKQGNTMVRWLLIETVHHAVRKDPELRQDYQRLKFRRGHAVAKVAIARKLAVRMYWMLRSGAAYAQLVRRQGSPGGILMNASSSLA

SEQ ID NO: 369851 - protein, 320 aa, unidentified
MSKSVPTFVGIDVSKAKLDVAVRPVQERFSVSNDDAGIAELLRRLKRLKRRRGALVVIEATGGLEHGVAAAMSTKGFRVAIVNPRQVRNYGRAIGQLAKTDKIDADLLALFGEKVSPDPRPLPDKDMQVLQALVARRRQIQEMLTAERNRLGAARAPTVRQGLKKHIEWLQQQVKDVDRQLEVAIKNSPAWCAKGDLLRSTPGVGPVVATCVIAQLPELGLINRKEIAALVGVAPFACDSGKFHGMRIIWGGRAPVRSALYMAALVGVRHNSVLREFYSRLLAAGKKPKVALVACMRKLLTILNAMVRTNTYWKESASAA

SEQ ID NO: 369852 - protein, 464 aa, unidentified
MTIDKKQRNRKERKELARRLRSEDPGLEVVHPHAAGVDVGNSAHYVAVRPDRDSQPVRRFECFTADLHRLADWLQSCRVKTVALQSTGVYWIPLYDILEERGFEVYLVNARHTKNLPGRKSDVQESQWLLKLHTYGLLNNSFQPTSEIRVLRTYWRQRAEHARGIGTCILRMQKALTQMNLQLANVISDLSGVTGQQIVRAILRGERNPRELAELSDPRIRASKEEVAKSLEGNWRQELLFVLQQEVDMYDVYQRRIAECDQELQKHLARFADTVPSQAKEEETKKKKGKQNKNNPQFHLADELQRITGVDLTRIDGIDVMVAQTLVSEVGLDMSRWKTEAHFASWLGLCPDNRISGDKVLRRGTRHVVNRAATSLRIAATTLLRSQTYLGAQYRRLRSKLGAPKAITAMAHRLARLVYRMLKYGQKYVDKGAEYYEQRNHQQQIEFLRKKAAKLGLQVIAAHP

SEQ ID NO: 369853 - protein, 477 aa, unidentified
MGKPTGVNIRGLRGVQRAKDLEGLDLSLVLVLAIDPARDYPKALICDYFGMVLEKPFFFAVNSDGIMSVHKKLQHWVGCVKAVRVFVGIEIAGCYHDAIGEALTRLGYEVGLVNSYTTASNRKMMLDFSKTDDKDLLAIAQALITNNGISAKRVTGFYEQLQAVCRTRRQFVKEASAVKIQIRQLMSMVFREFQGLVDSDSLTQQKVFDSFWGPKSKMVMSCFPLPSEILSLGVAGLKERAAGKGLKLSDLEITLLLQAAKRDLMISPAELNLFKAEQIKFRLGQLQFLEEQIASLEREMENMLIKTPAVLLLSIKGLGVVTATEFIAEVGSIFNYTYNRQLVKLAGINPIMSQSGGKKTRAYKISRQGNPALRYIVTLIGKIICSKKCCNSYFIDYYERLFDKGKMPSQIYAAAGNKFLRIAFAMLKEQKLFHVPGYEQCTSDICKKLKFKENRVKARQRLALLTGAATEKTAVAL

SEQ ID NO: 369854 - protein, 357 aa, unidentified
MNFIGIDLHKKTISVCVVNQERKVLKRRTLCCAEPERIVAFFREWGEFRAVVEATASYEWLWQLLEPLAQRLVLAHPGKLRVIAESKNKSDKLDAQVLAEFLALDMIPEAYRPTPRQRQHRTLVRQRVFVKKNLTRVRNKIRRVLSNYNADRPDLFTRAGLTYLQEAKKKVSAADQFVLDQLLEEWHYHRRQFQAVGRQLQAFARQAPLKEKEIRAVLRSMPSVGPTTVEVVLSEIGDIARFRSNKRVVAYAGLAPGQRESAGRKKELGITKQGSGLLRWVLVQTAWRTVRCSLRWRSVYENLKKRRGSKKAIVAVARRLLTVMAALWRTGQRYRHAAQDGAPTVPKARRACRAAQA

SEQ ID NO: 369855 - protein, 431 aa, unidentified
MHYTQNDKIAQVGQESLVIGIDVGSEKQFARAFGPSQIEYTRKAFSFINSAEGFNQFLKWAQDIQRKKGLKKIIVGFEPTGHYWFNLADYLEEQGIKYVLVAPQHVKHTKELDDNIQQKDDCKDPKVIAKLVFDGRYFYAYRPKGIYAELRVGFNRRCEIMEHLVETKNRISRWFSIYFPEYMKVYRKVDASTGMKILRQAPLPKDIVALGVDGVNKIWREAKQRGAGKKRATTLVGAAQGSIGSKQADQAARMDLWQLLDEYDLVEKQLQEINELLLDLLASIPDAQRMLAIQGVGMVTVAGFLAEVGDVRRFTDPKQIVKYAGMAVIKFNDSGKHKGKGKLSRRGRKRLRTILVQAAMSLVKSNPDFQQIHQYFTTRECNPLKKIQSICAIANKLIHVFYGMITHDQPYDGEKMLRDIRRPMMAAAKAA

SEQ ID NO: 369856 - protein, 445 aa, unidentified
MKVMHEHVAGIDVHKKMVKVAIRSPGKGRWARKTDVLTFGTFWDELRAMAAELRARGVTHVAMEASGVYSDPVYFALEDEGCFEEVLVVNPAHVKGLKGHKTDARDCARIAELLECGLLQGSWMPPQEIREMRDLVRYRQRKVQARTSEVQRLGKVLETAGIKLGSVASEITGVGPMEMIEALIGGERDGALMAQKARGAARTKDKMAALARALQGRFGDHHAAMCRLIVDQVDALGEAIAGIEAAITVKAAAWDREVTLLKTIPGFGDATAWAWIAEIGPAPHEWFSGHGKLASWAGLAPANHVSAGKRRTAGTTDAGAWIRPVLVQAAWAAIRVKGRLQARYDRLVRHMGGQNSPAARKKAIVAIAHTLLKIACAVLKSGQPYAEPGPDFYASREAPARRQAYLEKQIQRLYPGCTITVTITPPPATAAPPGTPPPGHIPKAI

SEQ ID NO: 369857 - protein, 410 aa, unidentified
MRYYLGVDWADQTHAVWVVDADGTKTAARTVPHTAEGLSEWGRELDQWRAQGIKLWAAIERREGRVVDFLLDHGVVVYPVNPKALDRARDRFRQSGAKDDPFDARVLADFLRTDHAHLQALQPSSDAAQELKLVTEDYQRQIRQQTRLVNQLTNTLKAYYPRALEIAELTTALAQAFLRAYPTPESLTGLTERKWQRWARAHRLSDARTRELWGVLQQPQLPVPAHVVRAKARLMRSLVEQLTLVVAAVAEYRKAIEDFFASIPTAQWARTLPIGEHGITAPTLWARLGDAPGRWESFRHLQAQAGAVPVTKRSGKQQRVVQFRYACDKALRYVVDHVAFLSLLSSEWARAYYDQQRERGHPHRQALRALGAKWLKIIFVMWERQAPYDEQYHLATMTRQQLRQCQPKIA

SEQ ID NO: 369858 - protein, 372 aa, unidentified
MSETIVAYQSFVGVDLHKTTVTLVAVGPDGKEIARLTINTKCREKIRAWLLDLPRPLHMAVEAVGFVEWFIECFRSCVDRIDIADATELSNRRGKRRKNDHRDALDVAQRLARGECPCGYIADDELMQLRKLGRHWRQLSSVMARTKQFMKSMLLAANLRGPKFDGASAQRWLLAHGHLLKPAQRRAFANFTRIVQLIELQRQPLRFAIIEASRSERFASMTKLLQSVPGIGEIWSCIITAEIGPFERFPNADALEFWAGMTADLKESAGRTQSGPITKAGSRTLRWALCNAALTLCHSDAGQEAIRQRLIRKNGGINAKANTAMGRRLLCTLFAMVRDGKPYQAGPSRHRNAAANKARAAKRARMNRKEAA

SEQ ID NO: 369859 - protein, 373 aa, unidentified
MSESCVVYRSLVGVDLHKTTVTLVAVDAQGNVIAKLTIATKCIEKITGWLRSLPDPVWMAVEACPFVEWFIDRFRACVFRMDIADATELARLRGKRRKTDPNDARDIAERLAAGRCPLGYIADDELLQLRKLGRHWRQLSHLLSRTKHAMRSMFHAANLAGPKVLDAAAAHRWFLGQRHLLKPAGQQAFADFLDTLALVERQRERLRREITLANRCETFRDTVELLKTVPGIDEIWACVIVAEIGPFDRFPNADALEFWAGMTADLKESAGRRQSGNITKAGSRTLRWALCKAAVTLCQGDAGQEAIRQRVIRRTGGIKPKANVAMGRRLLRVLFAMVRDKTPYHNARPVARNTAANQARAAKRARKTGKEAA

SEQ ID NO: 369860 - protein, 318 aa, unidentified
MEPSRQQQVVGLDVSKAWLDGYAPATGRRFRVSNDPAGIEDLLRSAAGRGDCLMVMEASGGYERTAHRALVAQGVPAAIVNPKRVRDFARGMGLEAKTDRVDAKVIARYGAVMRPAATPLPDPARLELREILACRRQLLEEVAVRRQQLEQLTSPAVRAQVEKTLAFLHGEAKALLALLRAGIAADAALAADFALLTSMPGCGPILAATLLAEMPELGSLDRRKVAALAGLAPTARDSGLREHRRVIKGGRGQVRRALYMSAVASLKTDKSPLKARYAQLTAKGKPPKLALAALMRKMLVTLNAMLKAKITWQDPRHT

SEQ ID NO: 369861 - protein, 388 aa, unidentified
MQVAADRTDASTAIQTDLPAIFASLELSRSTWLITSLSPGAGEKMSKHSIRAGDVAGLLVRLAQLKEKARGRTGRDFPIIAIQEAGLDGFWIHRVLQSEGIEGHVVDAASILTSRRWRRAKTDGIDGETLVRTLLAYKRGEPRVCAMVKAPTPEEEDRRRICRERKTLVGERVEHVNRIKGLLFAQGVSDYEPLKRNRRARLEELKTGDGRPLPAHLKAQISRELDRLELVLPQLKAVEAERDALLKPVSEGCPTPAAMLAQLKGMGPEFTAILWSEGLFRSFSNRRQLAAYAGLAPTPWQSGSVAHEQGVSKAGNPRLRTTMIQLAWLWLRHQPTSALSVWFQERVQSNGGKMRKTTIVALARKLLVALWKYSTSGVVIEGAVMKTI

SEQ ID NO: 369862 - protein, 474 aa, unidentified
MSKKTLKPEVRGSRGPIPAKSKRNKRPNQPDRSVFEPNAAGIDIGAREIFVAVPPDRDPNPVRKCETFTGDLHQMAEWLVSCGITTAAMESTGVYWIPVYDVLEQHGIQPCLVNPRNMKNVPGKRTDFHECQWIQHLHSLGLLHAAFRPDGEVCTVRSMMRNRNDLVQMASQHVQHMQKALTQMNVQFQHVISDITGLTGLAILDAIVAGERDPSKLAQLRDPRIKASEETLRKSLEGNWRAEHVWALKQRLSLYRSYRAQIEECDQEIERLAAAFEPRVDPDDRPLPEDRKKKQRRRKKKSGTPSFDMRTEAYKLFGVDLTQIPGLMTLVFMLFSEVGRDMSRWPTAAHFVSWLGLCPDNDISGGKVLWRGARRTKNRAGTLFRLAAHSLHRDQTPLGHYLRRMKAKLGPAAATTATAHKIAIIFYTMVSRQVEYDASLWGKRDELREKRSEAQLQKQAARRGYKLVPLKPAA

SEQ ID NO: 369863 - protein, 404 aa, unidentified
MNAVGIDVSKGKSTVAVLRPYGEVVVSPFDVAHTGSDLRALADLIKKLPGETKVVMEATGNYFESIARYLHEQNIFVSVVNPVLISDFGGNTLRKPKTDKKDSVKIASYALNYWLDLREYTPQEDLRKSLKLLNRQYQQSIKLKTMMNNNLISLLDLTFPGINKLFTSPSRESDGHEKWVDFVLEFPHCDMISKLTIKSFTRKHMKWCSNNSYYFTESSCEKIYAFAKECVSSVSSDEAIVFSVVQAAKMLVSATENCHAIQTEMNRVASKLPEYDTVMNMYGVGKAVGPQLMAEIGDPRRFHSRKAITAYFGYDSENNDSGQKTTRSNPMTKKGSGALRRTLFIIMQVLLQTKPQDNPVYDFLIKKKSEGKHYYSYINAAANKFLRICYARVKEVLNVSEQMT

SEQ ID NO: 369864 - protein, 292 aa, unidentified
MSQEKYIGMDVHQATISAAVMNAQGKLLVECVLETKASTIVEFIQGLQGTLSLTFEEGTWPTWLHDLLQPHVSRLVVCDPRKAALLKEGNKSDRIDARKLAEMLRTNQLHSVYHGEHGIRTLRELGRSYLTVSKDVTRTMNRIKSLYRSWAIPCRGSSVYAPRHRAEWLAKIAEPGVRMRAEHLYQQLDSLQPLRLEARRELLRESHKHAAVQRLRQIPAIGPIRAALLVALLQTPHRFRTKRQLWAYSGFAVETHDSGEYLWRSCRQKAVGMAAFTDHVFVYRSKALTAEL

SEQ ID NO: 369865 - protein, 408 aa, unidentified
MLAEKPSPSRFFGLDIHKHYLVAIGVDPDGNPIYGPRKVNWTDLETWRNKTLTVCDAVVIEMTTNTWQVYDDLLPYVHSVTVVHPPHVKSVTQAQVMTDRIAAFNLAKLLAKGLLVSIWIPPADVRDRRALVAHRNKMTRLSTQAKNRLHAVLHRYHLLPSEDDLFAPGQCAWWLALPVSPLEKVRIQSDLDTLAFAQAQIATLEEALAALAAHDDRLTLLVQLPGVGWLTALVILAAIGEIGRFPDPKHLVGYAGLGARIHDSGLTTHTGKITKAGRRDLRAAMVEAAQAAANTHPHWQAELARLEPRLGRNKAIVAIARKLLIAVWHVLTEGCADCHAEPQRLARKLMQVTYQLGKNNRPAGQSTAALVRAQLDRLEVGQDLKEISWGSKKHPIPLPPSSLPPAAD

SEQ ID NO: 369866 - protein, 359 aa, unidentified
MKIVGCDFHPSYQQVAVLDTETGEVQEQKLMHGNGEAEKFYRELEGPALIGMEATGNARWFELMVERFGHQLWIGDAAKIRASYVRKQKTDKRDAGHILTLLIEKRFPRLWMADRQQRDIRQLLTHRHKLVAVRTRLKTELQHLALNQGVQKKRQLWNEKGRALLQSLPLQGWTQQRRKDLLQLLAVVEPQIEQLDKAVEQTAQAHPQAVLLMTQPGVGPITSLAFAVTIGEASRFAHSNQVASYLGLIPSERSSGNKRRLGSISKQGNVFLRTLLVEAAQSVVRHDPGFRKEYQHRCHHKAKGIAKVAAARKLAVRLYWMLKSNKPYPEVLLIGGSPRHPVAAKAKADQLNGHPRISQ

SEQ ID NO: 369867 - protein, 344 aa, unidentified
MMELTITWRFVVGIDISKQYLDCYLLDRKTGQGWDRKVLNAKEGFDQLGRWLNERQVECTQTILISEHTGRYGEHLLRWTTSQEWAHAVVKTTALEKVTPDHHRKDDRYDARELADYGARFSDQLTLSKAPKPAIGQLKRLQAERRKMVDRRAALKIKLTEADIHDADMDQLTSMWTQQINLLSQHIKRLEESMDELISQDEALTARHQMIRTAPGIGPVIGRFWLSLFTGEEHLNARKISSRFGFAPHGRRSGSSIKSPDRSTGHGNSEMRKLMHQAARSVANHKPHYREYYKRKLEEGKHELLVINNIINKLIRLYCAMWNNQSEYDPNHIQNMKEQWKKSA

SEQ ID NO: 369868 - protein, 408 aa, unidentified
MRVIGMDIHRTFAEAVMIDGDKLIRLGRINMSREHLAAFAAKLTHDDHIVVEATGNAQAVVEAVAPFVGRVVIANPRQVHLIAKARVKTDVIDATVLARLYASGFLPEVWVPDQQTMRLRRQVTRRNQVVRQRVRLKTMIQAILHAHLVPQCPHADITGPKGRAWLLAQLLPEDEATAIERHLREYDRLTDDLRSLERELARDALASAETKRLMTIPGIDMVVAVGLLAAIGPISRFSNPTRLVAFLGLNPSVHQSGNSPARHGRITKQGPCHARTMLVEAAWAAVRGAGPLRAFYERVRARRGTHVAAVAVARKIAVIVWHLLTRCEDYAWVRPALHAKKLRDLELLSGQPARRGQRGAGYEYNLTKCRQEERQRGERAEAAYRRFTEGWTKRGNRVPAGASEEARQ

SEQ ID NO: 369869 - protein, 408 aa, unidentified
MTVVGIDVSKGKSMVVAMKPGGELVTTPYEVKHSDIELSRFALDVLCMEPDTRVVMEATGRYHEPVAALLHSEGIFVSVLNPLLIKQSGAGSLRKVKSDPKDALKIAKYGLDNWSTLREYTPMEAIRQQLKLCARQCDLYSKNIVMLTNNLISLSDKTFPGVNELFSSPEKENGHLKWVDFYRTFWHCDCINRMSPDAFEERYKKWCKRKGYHFSADAADALYAASCGLYTTLPRDNNAKLLVTVATDQLIALRENQSKLETEMLNLCKQLPEYETVMAMYGVGKSTGPHLMAELGDIRRFPHRSSIVAFAGVDPGVVGSGKMQLSSVATSKRGSPQLRKALFQVVSAYVKRKPENEAVYQFYAKKRDEGKPYYVCTTAAANKFLRIYYARVKECLNAAESATQAEEG

SEQ ID NO: 369870 - protein, 342 aa, unidentified
MQIAVLGIDLGKNSCSVVGLDAGGRVVLRRRLNRDGVVKLAAELPHCVMAMEACCGAHHLGRRLRDQGHEVRLMSPEYVRPYVKAQKNDDRDAEAIAEAATRPTMRFVELKSEAQLDMQSLHRARDRLVGERTALINQLRAFLLERGVIVPQGRRKLELHLETLLAAEQVSLSPRTRLLIEDHQAEWRELDRRIQAFDEEFALQARTDEAARLLMTIPGIGPLNATALVAAIGKAETFGRGRDLAAWLGLVPKQMTTGGKPKLLGISKRGNKYLRKMLIHGARAALPTLSKSETPLGGWLRGLLARAHVNTVVLAFAAKLARTICAVLRSGQKFEMKAAAVA

SEQ ID NO: 369871 - protein, 411 aa, unidentified
MMRVVYEICCGLDVHAKTVVACLVSHGKKEVRTFSTMTDDLLTLLDWLTAAGCTHVAIESTGVYWKPVFNILEGSMEVILVNARHMKAVPGRKTDVRDCEWLADLLRHGLLKASFIPPLEIRELRELTRYRQSLTSELARIANRVQKVIESGNIKLGQVASNALGVSARGMLKLLAAGETDVERMANLAQKQLRKKKPELRRALVGRLTEAQRWVLTELLSRYEEVESAIARVNERIDKELAQHPFVKEAVQVLDEMPGFGTQNAEDVISEIGVDMSAFPSHRHIASWAAVCPGNDESAGKRRSGKTRKGNPYLRTALVQGAWAASHTKNTYLSAQYHRLVKRLGKKKALIAVAHSMLVIIYHMLSRNERFHELGGDYFDRRNQQVLRHHFIHRLESLGLKVTVEECNQAA

SEQ ID NO: 369872 - protein, 359 aa, unidentified
MVIMVAIDMHVKRLVCELGYGKGEPRRATYANDLIGHRRLMDDIASMKRELDVRDVLVAYEASGLGYVLYDRIREAGYRCAVLAPTELLRSASGYKKKTDKKDCSYIYETMRGHVLAGNRLHGIWVPDKQLREDREVVRARFDIGQKLSRVKVQIHTLLKKFGVQKPEDLNNWTKAFREWLVQVAESKGAGFRIGMESLLRQLAFLEAEQKQVERAILALSREERYRDQCAELQKVPGVGLITAMTFLTEIGDVMRFSNRRQVGSFMGLVPSSFESGEVNDRKGRITRDGPYRIRSVLNQALWAHLRCNGQEKAVYERIVEKNPKRKKKAVVACMRRLGIRMWHVAKDVEFSKGLRLAA

SEQ ID NO: 369873 - protein, 407 aa, unidentified
MEVLYPRCAGLDVHKETVVACVRLATGSAVERHVETFGTMTHELLALLAWLEQHAVTHVALEATGVYWKPVWHVLAGHVTLVLANPKEVKQVPGRKTDVNDATWLADLAAHGLIRASFVPPEPIQELRDLTRTRKQLVAERTQHVQRLQKVLEDANVKLASVVSDILGQSGRAMLDALAAGQSDPQQLAQLRHGRLRASPAQLVAALEGTVREHHRFMLRLHLRQIDTLDSAITLVEERVETLLRPFARLVERLKTIPGVSAIVVAVLLAEIGTDMRQFPTAGHLLSWACLVPRRDETAGKRRSVRTRKRDWLKATLVQAAWAAVRQKDTYLHAQFHRLRARRGPKKAIIAVAASILTAAYHMIQHETVYADLGSDFFSRRDHKKAAFRLVQRLQQMGYAVQLSTAA

SEQ ID NO: 369874 - protein, 450 aa, unidentified
MGSRFAGIDWATEKHDVLVSNELGEKLLAATFAHDENGLSALCRTLVKMEVVLVAIERPDGVVVERLLDAGLRVLALHPNKVAAARDRFRVSGGKSDRFDAFVLCELARTDSHRFRVLEPDSDQTKALRAMTRAREGLVENRTGVMNQLRAELDRFWPGPLRLFSHMDSEILLAFLERYPSPADARGLGIGRMQAFLRREKYSGRQQPTALMVKLRSAPEGRVGEFEHAAPRQLVLSFVAMIRALNAQIKGLERQIRTAVRAHPDGPIFLSLFKQAASVITAAELLAEMGDCRARYPARDALAGDAGQSAVAKESGKRKDANFRWGCNKRLRVAFSRLADSTRHWHPWAQALYAQARQRGHEHPRAIRTVGRAWCRIVWQCWQHRTPYDPTRHRSLQRHITVTIPSPSGAVTDVAATQRMAAALAPPAGTLEPSAQHLTTSLHPLTQTGG

SEQ ID NO: 369875 - protein, 301 aa, unidentified
MNAKYIGFDIDSKKTVACVVQQGQKDRYTTLKTDLQEMQQYLQRQRQGGNAVHLTFEISGEAGYRYDALRPYVDTLTVSNPHKMTWIYRTSKKNDRIDGRKQAVLLSIGEVPPVHIPPREVRQWRATIQQRRGIVNRIVSVKNRTRALLKANGLTQPAHKGSWWKAANLEWMRQQAQDWAEATSEHLWRVHLTNLLDELKLLEEQLQKVTHYLDRYLANHPGGTLLMSIPGVGPRTAEAVLAYTDEVKRFARSKQYGAYFGLTPKLDESGSVRRLGHISKEGPAVVRWLLVESVWRAIRKS

SEQ ID NO: 369876 - protein, 361 aa, unidentified
MTKVSTMTDRAATTDFIGLDLSDKTGTYVVLSAEGQVVGDGKLRLTSAGISKVFAARPPARIAIEVGGHSPWVSRALTQLGYEVTVANPRQVKLISHGPKKNDKLDAENLARLLRLDPILLRPICHRSETAQADLALLRSRDAVVRARTRLINCARSMVKAAGGRLPKCSADSFHHKVQGRLPEMLKPALEPLIEVIAGLTQQIITATRQLEKLADERYPETRILRQPKGVGVITSLGYVLTLEEPQRFGRSRSVGAFVGLTARQYDSGESQPQLRITKAGDPFLRRLLVQSAQYMLGPFGEDSDLRRWGLKLMRDGNNKILKKKAVVAVARKLAVLLHHLWLTGEVYEPLRQAALEEEAA

SEQ ID NO: 369877 - protein, 435 aa, unidentified
MKRKSRRAKCQKVSPFSGDLQLIEADAAAVDVGSRSHWVAVNPQRDPNPVREFGTFTTDLISLADWLAQCEAKSVVMEATGVYWVSLYELLERRGFKVYVVDAHTVRHLPGRSKSDVKDCQWLRRLHSYGLLRGSFRPPAQIRQLRNYLRSRTKIVEAAAQQQLRMQKALTLMNIHLHHVISDLSGLTGLAIVRTIVGGERNPNRLARLRDPRIRASKETIQKSLEGHWQEELLFDLKIALESYDHFQGQIAAYDEQIRQELKEVESKVNLANEPLPAARLKACRKRPGMSQQDQLDLREELYRISGVDLTRIDGISLQTAQKVFFEIGTDVSAWSDEKKFSSWLGLSPNHRISGGKVLKRGSRKVVNPLSVALRLAARTLRNSRSALGANFRRLIGHATLRIQIPRNQTPIPPGPGGKIRHDPSSKTASCHRRC

SEQ ID NO: 369878 - protein, 415 aa, unidentified
MEQMFPHCAGLDVHKKTVVACVLVTAADGKLQAVKRQFGTTLAGLEQLAAWLLSYGVTHVVMESTGVYWKPVYNVLAPQCEVWVVNAQHVKQVPGRKTDWNDAEWLARLMCYGLLERSFIPDEEQRELRDLTRYRTRLTAERAAAANRLEKTLEDANIKITSVLTDIQGVSARAMLEALIGGESEPVVMAELARGRLRAKLPQLEEALAGRMRPHHRFMLRELLTHLDHIGASIATVNERIAELTAPYEAIIQRLSAVTGIKRHTAEVILAEVGPDITPFPTAKHLASWACLCPGNNLSAGKRRSGKTRRGQPWLRAALVEAAWAASHSLDTYLAAQFQRLRARRGDKRAAVAVAHSILTIVWHLLANPEAVFTELGGDYFLKKNPEREQRRAVRKLEALGFTVTLTPAAAAVAT

SEQ ID NO: 369879 - protein, 322 aa, unidentified
MATVSFCGIDVAKDRLDVVVLPEQRCWSVCNDAAGWAELAKQLGSFSIAAIGLEASGGYERGVMRVLLAADMPVHQINPFKLRQFAKASGVLAKSDRLDARVIASFIAIMPPRRAQRPSPAIERLTEILSVRRQLTDQKIAAQNASAMLQDAMLLRLSRRRIGRLAADIEMLDRSLVEIVRTDAALAHRYRLLTSMPGVGPVLACTLIALLPELGSMSRKQVAALVGVAPYTFESGKLKGKRCIWGGRAPVRHVLYLAAMSASNWNPVLKAFHSRLKIAGKLHKVAIVAVMRKMITMLNAMVRDDVAWAGHLGGRQILPTAR

SEQ ID NO: 369880 - protein, 428 aa, unidentified
MKYNTQNAKIASITEKTLIVGIDVGSETYFARAFDWRNYEFTKKPFEFSNNEAGFLSFKAWVENLLEKNGKSVVIPGMEPTGHYWFALGKFLQDNGMRPVHVNPHHVKKSKELDDNNPNKNDRKDPKTIASLVNEGRFSYPYIPTGVYAEIRSLSNMRFQAQEELTRAKNRIARWFSIYFPEYKDVYRDFKAVSGRIVLQAAPLPEDIRKLGVEGVNRIWRGAKLRGAGMKRAKTLVSAAEHSIGSKEAPEAARIELRNLLNDMDVYASRVEELLGMIGEKLKEIPYIDKLMAIKGVGLLTVSGFIAEAGDIRRFEDPKQLQKLAGYAIVANESGKHKGESRISYRGRKRLRYVLYEAALSLIGKNAEFKEIHEYYRTRKENPLKKMQSVVAVACKVIRIFYVILTKGVDYDPEKMMGDIRRPQIQAA

SEQ ID NO: 369881 - protein, 344 aa, unidentified
MGSLWAGVDVGKTHHHVCVVDDDGTVVMSEKIPNDQQAISGIAGRLGKRRKPIRWAVDLRGGPAALLLAVLFDRGADVRYVSGTVTSRMAEAFHGERKTDAHDAYVIAQTLRMRTDLPTLTLADGVQQQLKLLVSRRLDLVADRVRITARIQDLLTMISPALEKALNLSSKGALRLLAQWQTPAGLRRAGEARILAYLRQHGVRAAKALAAKVLTAARTQTVAVAGEATAAGIVAQMATDLEAVNDRIAAIEETIAGVVAEHELGEIVTSLPGIGTTLAAEFLAHACTLTTYPSAAALAAHAGLAPISRDSGRRQGHQVRPHRYHRGLRRVFSMSSFTALTHCP

SEQ ID NO: 369882 - protein, 384 aa, unidentified
MNKLIRIGIDTSKSVFALHGVNAAGEPVLRRKLRRSQMLDFFVKLEPTVVGLEACGSSHHWGRQLMALGHDVRLLPPQHVKVFVKRNKNDANDAAAICEAMMRPGLRFVPVKSTEQQAALMLVGRRDELIRRRTQLTNTIRGYAAEFGLVAAKGPDKIEPLLARIAASEELPMVAKELFAEYAGDCARLAGQIAAIDAKLKTWHKGNELSRRLMKVPGIGPVTASLLVMKVSDPAAFRSGRDFAAWIGLTPKDHSTAGKTRHGVITRAGDEALRSSLVVGATAVVQQARNGRGRPSPWLIELLRRKPPKLAAVALANKTARVAWKLMVSGECYDARRAERFVSPKDSIAPRAPRQGRFAPPAAVAQGPALTRRALSASKPLAIG

SEQ ID NO: 369883 - protein, 344 aa, unidentified
MDHSAGLDVSVKETSVCIVDDTGRIVREVKVASEPEALLSVLTNPGYHFKRIGLEAGPLSQWLYSALAEAGLPVICVETRHMRAVLKAQINKTDRNDARGMAQMMRVGLYRPVHVKTLRSQKLRMLLTHRKLLQSKAIAIDNDLRGTLRNFGLKVGMVGKVKFEARIKELVENLPDLAELVEPLLVVRRVLREQFVIQHRRLLAIVRADEVCRRLMTVPGVGPVVALTYRATVDVPARFRKSKAVGAVFGLTCSKYQSGEIDRSGRISRCGDEMMRVMLYEAAQSMLHSKKWSWLKAWAMQIARRRGMKKAIVALARRLAVIMHRIWVDGTEFRWTREQAAAAA

SEQ ID NO: 369884 - protein, 312 aa, unidentified
MEQTSLGIDISSKRLDCYWSHTNKHQSFENSLSGIAQLVDKIQKETPLWVIFEPTGGYEIDLSIQLAQASIAFSMVQPHRLRSFARSCGKLAKTDKLDAKLMAIYGETMKPKETILGTKSQQELSGFVTRRRQLVDLLSMERQRLGQWRDPSIQKDVKDHCDYLKKHILTLEEQIQECINQDDSLQKVNEALQSVPGVGPTSAAVLLADLPELGRIGSKEIAALAGVAPFNVESGNSTRKSSIRGGRLSVRCMLYMAALVAIRHNPVIRDFYQRLREQQKPAKVAIVACMRKLLIILNAIARDHFKNELLQA

SEQ ID NO: 369885 - protein, 411 aa, unidentified
MHNRQNYMYVGVDLHKEQHTAVIINCWQEKLGEIQFDNKPSAFSKFLLEVETYVSDGLSVVFGLEDVGGYGRALAKYLVDHEQVVKEVNPALSFLERKSQVMIQKNDSWDAECVARILVNKFNQLPDAKPNDLFWSIQQLVSRRNALVKAQSALKNQLHIQLNHHYPSYKKFFSELDGKTALVFWQQYPSPSCLGGTNIKQLTAFLLDVSNNTCSVKKASDILKLVKEDGQTMKEYQETRDFLVRSIVRDIEFKKKEMKYIERELKRLVILLDYQLETMPGIELVTASALIAEIGDVRRFPNANKLARFVGIAPVYFGSGGKGKTHKSKQGNRALHALFYNLAVQQVQVAKGSKLPRNPVFHAYYQKKLKEGKTKGQALVCIMRRLVNIVYGMMKYKTAYELPIVEEKEVV

SEQ ID NO: 369886 - protein, 348 aa, unidentified
MAHFVGLDVSVRETSVCVVDDVGKVILEQKVLTEPDAIIALLASLGATYGRIGIEAGPLSQWLFNAVTAAELPVICVETRHMKALLTAQQINKTDRNDARGIAQMMRVGLFKPVHVKTLVAQEQRMLLTSRKLLQRKLLDLESDLRGTLRNFGLKVGVVSGSRYEARVRELVAGFPRLAAIAEPLLNVRRVMRQQLAVLHKMLLDTVRGDPVCRRLMTAPGVGAVVALTYRATVDQPQRFVHSRAVGAHVGLTPKRYQSGEIDYNGGVSKCGDALLRTMLYEAAQVLLTHGGKWSWLKAWGMRVAQRRGMRRAIVAVARRLAVVLHRMWVDGSEFRWRKESAAVPSVA

SEQ ID NO: 369887 - protein, 379 aa, unidentified
MKKHNNSRKKSEPTSKRAKSRGPVQRDTKEVLAELVGKLKEKLDPKVGAARAGKKNQRGELRPNLDRLRVGVDLGDQWSHYCILGLEGETLAEGQLRTTAQDVAEFFEALNAARVVVEVGTHSAWVREVICGYRHEVLVANPRLMEGSKRRKRKSDRIDANKLARLGRVDPQSLYPIRHRSREVRQDLVVLRARDGLVAARTELINATRGLVKSMGNRLPKCSSPSFAQKVEEAVPAEIREALLPLLPMTAALSDCIQGYDEKMEKLASEKYGHTALLRQVKGVGPITALAYVLTLENPERFATSRDVGPYLGLVPMQEDSGDSQPQLGISKTGDTMLRKLLVGSAHYILGPFGPDTDLRRYGLRLCERGGKNAKKRAG

SEQ ID NO: 369888 - protein, 316 aa, unidentified
MSKAVLGIDIAKQKFEVALLINNKLKHKVCKNNPEGFDALKIWLEKQKAHTLHACMEATSTYGVELATYLHDLGHTVSIVNPARVKGFAQSELIRTKTDSVDAGLIARFCLAMEPEPWQPPSPEIRHLQALVRRAEALINMRIQEENRLDVSHTSVKTSIKEHISYLEKEIESVKKEIADQINKDPDLKNKKDLLNSIPGVSDATSASVLSELHIFEHFSRVQQVVAFTGIATRQNESGMFKGKSRICKIGNSRLRKALYMPALVAMRFNPVIQEFSKRLRDKGKPGKVIVCAVMRKLIHIIYGILKSGKPFNRKA

SEQ ID NO: 369889 - protein, 347 aa, unidentified
MKILSLDLGKYKTVACDYERETGEHRFKASITTPAGLRQLVQEVKPDRVVIEVCKIAGWVCDVLREMAVEVQVANTSDDAWRWRKVKKKNDRCDALKVAQLSAVNQIRSVHIPRIEVRQWRALIAFRQQLVRRRGRIKNHIRDLLVTEGQLLPRGGKCWTQLGVKHLEEMAKPLREVGMNELWRGELDVELRQLRAVQEEIAVAEEKLDAIAAADPRVQLLRTIPGVGPRLSEAIVALLDRPERFRKPSEVSAYIGMVPKELDSGETERRGRITRHGSRLVRSLLVEVAWAGLRYNPWVRETYQRISGGKKSRKKIAIVAVGRRLLVRCWAMLRDGTSWQWASTKAA

SEQ ID NO: 369890 - protein, 412 aa, unidentified
MKQIRDRVAGLDVHRDTVVACCRVQRPNRSIDVTKKSFATTSRGLTELAQWMTEAAVTTVVMEATGVYWKPVYYSLEGGFEELWLCNAQHVKNVPGRKTDLSDAEWLADVAAHGMVRPSFVPPADIRQVRELTRYRKTQVDARTKEIQRLEKVLQDAAIKLTSVASGVWSKSSRDIIEALIAGEHDPKVLAQMAKSRMRAKIPQLEEALSGRFGSHHAVVCRQVIDHIDFLDHSIAALTADIAARLAPVEGATTIICSITGVSRTTAEVMIAEMGTDMSRFPTAGHLCAWAGVAPASHESAGKRRPDGTRHGSTWLQRALIEAARAAARTKGSYFSAQYSRIARRRGPNKAAVAVAHSILAVTWHLLTNGVLYDDPGSRYFEQRHDPVIEARRLQRRIESLGYQVTIADNAA

SEQ ID NO: 369891 - protein, 409 aa, unidentified
MTPPLPTPPMLSTVYGGADTHADTIHVAVIDALGRELGDREFPTTPAGYQAAVEFVTGHGQVVAVGIEGTSSYGAGLSRAVQAAGMAVVEVNRPDRAHRRRRGKSDPIDAYQAAHAAASGRAHAAVKDEDIEAIRAVTNARNSAVKATTAAMNQIHQMLITAPVEVRERYRDLKQKALVKALAASRPGAPNSLLSPTARTVLGALRRLAVRHQFLTTQAGELETELRDLLEALNPGLLAAYGLGPATAAQLLITAGGNPDRLRNEASFAALCGVAPVPASSGKTTRHRLSRGGDRAANYALHTIALVRLASDPRTREWATRQRAAGRTGLELLRILKRAIAREMYRHLTRPTAVPQIADLRPLRQSKNLTLTAAANHFGLWPAAISNLERGVRRNDDLAQTYREWLLTA

SEQ ID NO: 369892 - protein, 342 aa, unidentified
MPPTLLSVKETSVCIVDETGAICREIKVLSHPEDLVQALKNPEWRLVRIGLEAGPLSQWLFSGLAEAGLPAICIETRHAKAFLKAQVNKTDRNDARGIAQMMRVNLFRPVHVKTLASQRRRALLTARKLLQEKAIAIENDIRGLLRNFGLKVGIIGTVGFDDRIRELVDGMPDLGEIMKPLLAARQKLRETFMELHGKLLSIVRDDETCRRLMTIPGVGPVTSLAFTSTIDVPARFSNSRAVGPALGLTPVLNQSGESHRVGRVSLCGDDMMRALLYEAAQVMLSRVKKWSWLKAWAMNVAKRRGRQKAIVALARRLAVIMHRMWSDGTEFRWTRESMPAAI

SEQ ID NO: 369893 - protein, 355 aa, unidentified
MSTMPCIDGEVILGVDTHADTHTAALVDPLGRTLATTTIRAGRRGHRALLRWASLRGQVKVAGVEGTGSYGAGLARFLALEGVEVIEVTRPARKGRRHLGKSDARDAEAAARAVLSGEATAMPKPRNGIVESIRVLRHTRASAVKSRTQAALQLRNLIVTAPDELREPLADLTTKQAVTRCARFRRSDRLDPVAATRKALRTLARRWQALDAEVRELDRDLKRLTAQAAPRLLAQPGIGPENAAKLLIVAGDHPDRLRSDAAFAALCGASPVEASSGKTRRHRHNRGGDRQGNCALWTIANNRMLHHPETRAYVERRTAQGLSTREIRRCLMRHLTRRLYPLLRADLTDAATAST

SEQ ID NO: 369894 - protein, 460 aa, unidentified
MNRKRSKSRIDRTLPMMHPNAAAIDVGATIHMAAVRADRAPQPVRSFGTFTTDLHRLVDWFTECGVETVVMESTSVYWIPIFELLDARGFTVFLVNARDAKHVPGRKTDVSDAQWLQRLHSYGLLRASFRPKGQIAELRAYVRQRERLLEYAASHIQHMQKALTEMNLQLHHVVADITGSTGLRIIRAILAGERDPEVLACLRHYSCHSSAETIAKALTGSYRTEHLFALEQALALYDAYHEKASACDVRIEAVLKELSINRGRGIGSVAPAPRRRHRTDQANALAFDVRAALFALLGKDITTIDGLGPYLSLKLVAECGDDLSSWPSAKHFTSWLGLAPSNKVSGGKMLSSRTRRSGGRAAALLRLAAVTVGRTDTALGAFYRRLSSRIGKAKAVTATARKVAVLFYNAVRHGMQYVDPGASSYETRYRTRVVNNLHRRAKAFGFVLQPLEPKAGAVVS

SEQ ID NO: 369895 - protein, 353 aa, unidentified
MEEKKRFIGIDLGKKTYVAHILNDKTFNGKTTIAGRESLYKKLRKTDVIALEVCSLAFVIEREIRDKVGCNVKVLSASKLAVIYASMKKTDKEDALKLARIISMIDDKYLPIVEVPTDKEWERRKILSENRELKDDRVKEINRLHAIFVSSGITDIKKSNLSTKKNRNIIIERLDGYYKTQAKRLLERLDIIDEQIAEIKDLISEECENDTKIELLKTIPGIGDTTALAFMAYVGNTNRFEKAKQVSNYLGLVPRVDISSTIVKYGAITKRGNSYLRSLLNQASWALVRSKDGGVLKFKYFQMTQVLGKSKKKAIIAIARKLAELMFTILKTGNEYQPVYSGIVDITSLEKLE

SEQ ID NO: 369896 - protein, 277 aa, unidentified
MEQQQFVGFDVSQAETSVCVVDGAGTIVWQGKCASTPEAMAALIQRRAVHVVRIAVETGPMSAWHCRSLAALGLPVVCIDARHAKAALAMQLNKTDANDAAGLAQIVRTGWYREVAVKSEHSHRTRGLLAARAKLVGMRKEVANQLRGLLKVFGHVIGAAGGEKFDARARELAAGDATLTITAEALLAARAALAAQVARLDKLLLTQARQDPACQRLMTVPGVGAITATAFIATIDDPARFKHSASVGAYLGLETIRMSGVFTPRREHPRHPDGLLR

SEQ ID NO: 369897 - protein, 430 aa, unidentified
MKIPQSTIRLLTGRLVKILLYREVSTMKSNTQNAKIKSITEKTLIVGIDVGSETHFARAFDWRNYEYSKKPLEFSNTEAGFMTLKAWMADFAEKYGKNVVIPGMEPTGHYWFNLGAYLQDNGMKPVHVNPHHVKKSKELDDNNPNKNDRKDPKTIAALVNEGRFSYPYIPTGIYAEIRSLSNLRLQTQEEITRIKNRIARWFSIYFPEIKDVYRNPDSVSGLMILKEAPLPQDIVKLGVDGINKIWRDAKLRAAGLKRAKTLVTAAEHSIGSQEAPDSARIELKNLLNDYEIYKNREEDLMSLTEEKLSEIPHIDKLLEIKGVGLKTVSGFVAEVGDITRFDNPKQLQKLAGYAIVECSSGKHKGESHISYRGRKRLRYVLYEAAISLIARNEEFKEVHRYYRTRKENPLKKMQSVIAVACKVLRIFIRF

SEQ ID NO: 369898 - protein, 335 aa, unidentified
MQIYGIDLAKEKFDVSFFDLTSKKVSNHPSHKVVKNNFKSIGRFLETLPSDAVLVAEHTGVYGDTLLKCCMDSNVKIAFVGGYVIHRYRATPDRAKTDVLDCALLRDFGERYPDKLKYKTFPEEALYELRQLARHREMLVEQRKQLITADKSEDCRPIRSLAVKRSMDRIKEMLDTEIAETEKEMLKVINGHESIRHNYELVKSVDGVGLITAVELLTKTENFTKITTARQYAAYAGTAPYEKSSGKMDKGAHISKIGNRRSKTLLYICAESARLHNKEIKLYYERRTLIDKKPRHYVLNAIANKLLRIIFTLVEKGEYYDANFIRQDPRVVKYN

SEQ ID NO: 369899 - protein, 343 aa, unidentified
MQTITTIGLDIAKSVFQVHGVDAVGQVVIRRQLKRRQVQPFFERLPPCLVGIEACASSHHWSRQLQALGHAVRLMPPAYVKPYVKRQKNDMADAEAICEAVTRGNMRFVPTKTPEQQSCLMLHRTRHLFIRQQTAVINSIRAHLAEFGIVAPVGRKGVTELLRVVAAPNDGRVPEVARVCLAALGTQLLSLKEQILEFDRMILAWHRSNQTSRRLHYIPGVGPMLATALVASVADPRTFRSGRNFSAWIGLVPKQHSSGGKERLGSISKQGDRYLRSLFVAGALAVIRYAKIHGTGHRPWLTALLVRRPTKVAAIALANKIARMAWAMMAKEEHYKQPAALAR

SEQ ID NO: 369900 - protein, 367 aa, unidentified
MKKVSSTAVREAKNFSEQKLTIGLDLGDRSSWYCVLEEAGVILLEQRLSTTPKAMREVFGGMPRSRMVLETGMHSPWVSRVLNELGHEVIVAHARNVRLIGESRKKDDRLDAQKLARLARIDPQLLCPVKHRSARAQADLTVIRARAGLVRARTALVNTARGLAKSYGERLRGCNVRNMNPEKAEGLSPELQTALEPLLAGIESLSERIRECNERIESLVQESYPQVALLKQIQGVGTLIALTFLLTLEDPHRFRKSRDVGCYLGLQPGRRNSGQREPQMHISKEGDPYLRTLLVQGAHHILGPFGADCDLRRWGLRLAERGGKNGKKRAVIATARKLAVLLHRLWVSGEVYEPLRNRHPAAMPAAA

SEQ ID NO: 369901 - protein, 337 aa, unidentified
MRYIGVDLHSNSITVCYLTKKGQETHSTFSLSDLAEFEGGLRRTDRVAVEATGNTRWFVGRIKEKVKQVVVVNPNQFEVIRKSVKKTDRHDARALAQFLSKDLLPEARLKDELASQINSLAETRDKLVKLRTTFVNKLHALHRARGISSRKSQFLSEKGLKAVADLEWEATTRVEVEVIIAQIRSINEGIARLDTQLVASGKQLKGHGNLVSIKGIGPRAAAILLSVIGEVSDFESDDKLFSYFGIVPRVSNSNETVQHGRITKRGSKLGRTTLVQCTLVAKKYSSYLNKFYQRIKAKKGGGKAIIATARKFLGIIYRTLKNNWVFADFPNFVLAED

SEQ ID NO: 369902 - protein, 337 aa, unidentified
MRIIRIGLDTAKHVFQVHGVDETETAVLRAQLRRGAVAKFFAKLPPSRIGLEACGASHHWARLLRGLGHEVVLLPPQYIKPYIKRGKNDAIDAAAICEAMSRPGMRFVPIKSAESQAALMLLRVRDLLIKQRTMLSNAMRGHAAEFGVVAAKGPLGVAELLQHAHSEAAGVPALAQELLALLADQLEAIAVRLKALEAQLLAWHRQDPVSRCLVTQPGIGPIAAVSFTLKVPDPKMFRSGRHFAAWLGLTPKENSTGGRRRAGRISRQGDQSLRKLLVLGATAVIQFAKPGRGSPWLINLLARRPKKLAAVALANKMARVLWAMMASGEVYRRPQPA

SEQ ID NO: 369903 - protein, 343 aa, unidentified
MNIQLKETIDEAKPHLFAGIDVGAEVLVLVILKNGKSFDPQKFANTPADRDRLVKKLVKLPGIIVCLEATGVYHFDLSLALHDAGVLLMVVNPKASHNFAKVLMKNSKTDAVDANTLAEYAARMDFVAWTRPSNETIALRSFARRIDALTSQKAAAKNHLHALTATSETPKAVLKDVKLAIAQLEKRIDRLTAGALILIGKHPDLERILALLIGIKGIGNTSAIALMGELLLLPPDLSHREWVKFAGLDPRAFDSGKSVHKKTRISKAGNRHIRSALYMPALSAKQHDPHVKAYFQHLVANGKKPLQAVCAIMRKLLHAIHGMLKHNEPFDNTRFYAIPASAE

SEQ ID NO: 369904 - protein, 419 aa, unidentified
MADETVSWFAGVDWGSERHQVCLLDAAGQVVGERAFRHGGAGLAALCDWLVSVAGEPERVAVAIEVPHGPVVDALLDRGFAVHAINPKQLERLRDRVSLAGAKDDRRDARVAAGGLRTDPHLFRPIEAGDPAVIALREWSRLAEELQHERVRLGNRIRQQLWRYYSQLLEVSDDVTAEWVLDLWTLAPTPAKAARLRETTLARLLQEHRIRRLDAERALGILRQPAIAVAEGVTEAAVLHLRSLVARLRLANREFYQAERKLDELCTNLRDKTSTPKSGGPCDAAVLSSLPGIGPVTLAILLTEAAGPIKRRDYAALRTLSGVAPGTKRSGKSCLVTMRYAAQIRLRNAVFHWARVAVLNDPTCGRRYAALRARGHSYGRALRGVADRLLGVACVLLQRQALFDPAHDKRAASQPRATS

SEQ ID NO: 369905 - protein, 404 aa, unidentified
MEVLYKRCCGLDVHKRSITACLITPEGRKMRTFGTMTEDLLELADWLTKEGCTHVAMESTGVYWKPVSNLLEGLEMDLLVVNARHIKAVPGRKTDVADAEWIADLLRHGLLRGSFIPDKEQRELRELVRYRQSLIRERVAEANRIQKVLEGANIKLGSVASDILGKSGRSMLKAIISGTDDPSLLAAMTKGRLKNKTAELKRALRGLLDQHQRKLLAPQMRHIEFLDQEIEDLSEEIKKRMHPFEEAIALVDEIPGIGRRVAEQVLAETGLNMERFPTDAHIASWAGVAPGNNESAGKRKSGKSNKGNKWLKATLVEAANATSRTKDTYLSAQYHRLAARRGKKRAALAVAHTILVIIYHMLKKGTSYQELGANYFDKRDEKAVVLRSLKRLEALGYKVVLEAA

SEQ ID NO: 369906 - protein, 340 aa, unidentified
MAITTVGIDLAKNVFAVHGVDQNGRTVLVKPKVSRAALPELIASLPPCVIGMEACSGAHYWARLFRQYGHEPRLMAAKFVSPYRMAGKSGKNDAADAQAICEAVRRPHMRFVPVKDESQQAMQCLHRTRQGFIEEKTATYNRLRGLISEFGVIAPQSTDSLRHIVSAQKNSLPLQVQQCADDLLEHVARIEANIAEYDRILSRMAKTDHRSQRLMELKGVGPTTACALVASIGNAHDFKNGRQLAAWLGLTPSQYSSGGKSKLGRITKAGDAYLRTLLVQGARSVLIGAEKRTDSFSRWVCMLVERRGYWRAVVAIAAKNARLCWASLHYGDDFRLYSAN

SEQ ID NO: 369907 - protein, 345 aa, unidentified
MKNIKVLGIDLAKDVFQLHGTDAKGNRVLTKRLSRRKLIEYMANITPCLVGIEACGGAHYWARVFDEQGHTVKIMSPQFVKPYLKSNKNDARDAEAIAEAVTRPNMRFVPKKTMEQQDVLLHHRARELAMKQRTAHGNQIRGLLAEYGIVIGKGFSHLNELPAILEKEEGKLSVVSKEVFLQLYEQLKAYVEQVNYYEKKIQNHAATDPRCIAVQEVEGIGPITASAIVATIGDANAFKNGREVSAWLGLIPKQHSSGNKIVLGSITKRGDRYVRKLLVHGARSVVNTCDNKTDRKNQWVADKKQRCGYNKATVALANKNARVIWALLATGECYRKAEPTAMQAA

SEQ ID NO: 369908 - protein, 432 aa, unidentified
MTDEPLYRDRVCGIDLGKAEMVATIRVPSEADPARRAAETRSFATTKAGVLALADWLRCWQVPAVVMEATGDYWKGPFYRLEAEEFECVLADAKQVRHLPGRPKRDPSDSRWLAACFERGAVTACFVATPEFRLIRLHTRYRRDLTAERTREKQRAEKLLESAAIKLSSVVSDLHGVSGRDIMDHLIAGERSPKVLAQLARGRARRKIAELEAAVDGAEFFTAEHAALLSTMLARIDRLTGEIDGLTEVIERLLAPYEEQLQQAESMPGWGRVSAQDAVAETGVDMSRFPTGAHLASWAGRTPLDHQSGKRAGRAKSKKGNRYLAGITGETAVAAGKTQTREGARYRRLARRRGKAKAQVALGNTQLKVYHKLLSTPGMRYQDLGPDYYERQANTRRQIAHHVGKLSDLGFEVTLCLRPQPEPEGTGQTPAA

SEQ ID NO: 369909 - protein, 346 aa, unidentified
MLYAGLDLSRKRLDFHLLDAEGATVDVGASPPDADGLDRLTERLERHGAPIRAAIESMNGARFVHDRLELRGWQVEIADAQKVKGLAPLACKTDRIDAWVLAELARRDLVPAIWLPDPRVRAERERARWRLHVVRHRSSLKQRVHAVLLTHGKPCPVSDLFGVRGRQLLAQLGLPEPWQGTIEASLRLIDELDREISDCERELRRLGADHRYVPLLCTVPGISWVLAYTIAAEIGDIGRFPTPRKLAGYSGLCPRVYQSGERDLRGPLSKQGPRHLRWALVEASTHACTAPVYRDRYQRTKARIGKQRGAKVAQIDLARRLSEAIWHMLSRGEAFAPKGATDPLAA

SEQ ID NO: 369910 - protein, 322 aa, unidentified
MTKEAIYVGVDVAKDTLDVADSGSQGTHQFHNTHEGIVQAVQHIVSLRPTGIILEATGNLEIPLAAALQAECLPVAIINPRQIRDFARATGALAKTDAIDARILALFGLRIKPEVRPIPDKQAREMSNLLTRRRQLVEMLIAEGNRLSRADDDVQPNIKDHIKWLEKALSYINNDLDRRIRSSPSWREKDNLLKSVPGVGKVVATTLLIELPELGQLNRRKIAALVGVAPLNRDSGTLRGKRTVWGGRTKLRSVLYMAALVGVKRNPVIAAFYERLLKAGKAKKIALVACMRKLLTILNAMIRSKTTWCPRTSFETGCLEVK

SEQ ID NO: 369911 - protein, 416 aa, unidentified
MAHVVIGMDPHKRSATIEVLDAREKVLSTGRFGTDRDGYKELLAAGRRWPDRLWAVEGCEGVGRHIAQRLVADGEPVVDVPAKLSARVRVFSTGQGRKTDATDAHSVAVVALRTPGLRPVQVDGATVALRLLVDRRDELGAARTFTVNRLHRLLVELIPGGAKTFLSATQAKALLATVRPRDLVGKTRRKLAAELIAELDGIDKRIKVATTELRDLVQATGSTLLELNGVGPSGAARLLGDIGDVSRFPTRGHFASWNGTAPIDASSGEQNRHRLSRAGNRRINRVLHIMAIVQLRNDTEGRTYYRRKLAAGKTPMEAIRALKRRLSDIVYSQLVADQKRQRQTAAGTGPGGQVGAATDSSAADSNPNVDASEKSLPGPASPEATPATTSRPVPSPARSRRPVPAPTRSRGQAQSA

SEQ ID NO: 369912 - protein, 430 aa, unidentified
MLSERKKVCGIDPHKNMCAAVVIKGNPIETLGKIKFENNRRGLDKLLHLLSETDCNTVVIETTNTFWQGISSALMHMGYTVVPVAPQTVPKKREKDDFHDASWLAITYMDNRVTQAYFATPKIQKLRSLLRTRYTLIKIRTMLKNRLNAELSRAGLNLKGVVSDIFGKEGKKILQTLAEEGIEGIKELANSEDGTSHKKNKYAMLLDVLSVAFTENFDAQVITILLLGTDNFEKLIERIEGLVNELIHSDMELLSLVNLLMTIPGVGFITAATIVAEVGDFTRFTSGKKIAKWAGLTPRMRESGGKRYYGRITRQGSPFVRWILYEAATTIAKLKKPQKLYTFYKGIAIRRGTKIAAVALARKLLVVMHAMVMQGRKYDESDAYRGTYERKMYLMELNYKKYREGLNQIKNELSKLRDTELTLIDERQKT

SEQ ID NO: 369913 - protein, 343 aa, unidentified
MDQYVALDVSLRKTSVCVLNSLGGVVTEADVPSEPGALISFIRARAPHASRIGLESGPTSTWLWHALKAAGLPVICMDARHAHAALSVRPIKSDRNDARGLAEMVRVGWFKEVQVKSLAARERMALLGVRRRLVDIRVEIDGQIRGILKTFGLVVGSGNKGAFAQRARMMAQDHPILSALVEKLLDVREVAAAKVAVLDKEIRRFVRDDPTLRRFLTVPGVGPVTALAFHATVDEPSRFRRARDVGPYLGLTPRRYQSGETDRQGHISKCGDQFTRTCLYEAANVLLTKVQRWSPLKAWGTRLAKRIGSKKARVAIARKLAVILHCIWTDGTEFWWTKEMAAA

SEQ ID NO: 369914 - protein, 307 aa, unidentified
MSIVMGLDQHRAQITADWLDTETGEVKRGRVAPADRAGVRRFLERFDGQELEVALEATTGWRFVVEELRRVGAIVHLAEPAETAGLRGPKKRARGDRADARHLRELLMLERVPESWIPPDHILDLRARVRLRHMLGEQRSEWQQRIQATLYHHGCPERRQLMVGDGRDWLAAQPLSAVARERVTVALAMIDALDLQMRPIEKELRAYARRQAGCRALMAHYGIGELSAVTILAELGDCTRFSSSRQAVRYAGMDTVASNCTSCSGDFGLRGDVGRVRDPLAAFLLDLGAERDPQAVGAVAVGGELVV

SEQ ID NO: 369915 - protein, 379 aa, unidentified
MVSASTPASLAETASATLFVALELSRSTWRVALHAPLTNKVSQHRLDGGDADGLLALITRKRSQAEEKLGRPVRVVCCFEAGYDGFWLHRWLYARGIENRVLDAASLLVNRRARRAKTDRLDAAGLLRTLMALERGEAQVCRVVRVPTPEQEDARRRSRERARLVVERGQHTSRIKGLLMTQGIRDFEPTRRDGPARFEALRTPDGLPLAPCLRAELLRECRRLWLVMEMIAEVEAEQKAVAEAEDGPAARLAQLRGIGLTFATVLGNEVFFRVFRNRREVGGYLGLAPSPWQSGAVRRDQGIAKAGNSRARRTAIELAWLWLRHQPESALTRWFHERAGSSKGRMRRILLVAMARKLIVSLWRYVTVGIVPEGAVLKV

SEQ ID NO: 369916 - protein, 378 aa, unidentified
MMGLSGAGLEPTPGNMNSVYHTELSSLEGTRCQFNGGTEPIKIGIDVHQDFYVVVCQVGGTNPKPPQRFHKEAFVHWASKLKQSGASVYTVYEACGFGFGLQRRLAALGIECHVVCPQKLDEQNRRVKTDGLDAKALCLKLDRFVQGNRDALAVVRVPGEEEERARALHRQREQLVQVRKQLEAQGRSLLVNHGCAPVQQWWKKRAFAQLDVPHWIKELLANNQPILLALQEKIDQLTLHLQNAAIAEPPRGLGKMTSVIIDREIGDWRRFNNRRQIASYTGLCPGEYSSGQSRLQGCVTKHGNPRLRAALVELAWRMVPFQPNYRAVCKWKARLAKGALSTGAARKKAIVALARQLAVDLWRVRTGRLTHEQLGLEI

SEQ ID NO: 369917 - protein, 331 aa, unidentified
MKNYLFYVGIDVSKEKLDVTMMNEKGIIEKQTTVGNTAACLKKVLKDWKKGKIAEQALFCLEPTGHYSNLPMAVLLEEKLSVWLANPSDIKNSIGMQRGKNDKIDADRIAQYAYRFHDKARLIQANEVDRLELQQLLTQREMLVKDKAKYSSQLKDYKGRIGPQAFAVIQKSNKAIIRQLEKAIKETENNLDRLIANIPEMKRQRELLKSIPGIGSVLSQTLIVFTNGFTRFNNPRALACHAGIAPFEYKSGTSIRSKNRVSHRSNKRLKSLLQMAALAAIKTKGEMRIYYERKVAEGKNKMSVLNAIRNKIIHRVFAVLKRNTEYRLELS

SEQ ID NO: 369918 - protein, 413 aa, unidentified
MEQIHDRVAGLDVHRDQVAACARTPGPRGGVQTHKARFDTTTGGLAALAEWLAGHAVALAAMEATGVYWKPVYYALEGRFVVWLCNAHHVKNVPGRKTDMSDAEWLADVAAHGMVRPSFVPPPPIRELRELTRYRKTQIDVRAAEIARLEKVLQDAGIKLTSVASKVLTQSGRAMVEALIAGERDPAALAGLAKGKLRPKIPQLTAALRGHFGAHHAIVAARILAHLDFLDETIAALDGEIGARVAERYQSAARLLADVPGLERRSIEVIIAETGADMSRFPSPAQFASWAGLCPGNHESAGKRRRVATTQGDQWLRRTMIESARAAARTRGSYFAAQYRQIARRRGPNKAAVAVAHSLLDAIWHMLSTGEVFADLGEDYFTSRHDKEHQTCRLVSQLEKLGYTVQLADTAAT

SEQ ID NO: 369919 - protein, 407 aa, unidentified
MRSAEKVAGIDVHKMMLAVVVGRSEQAEKEWIRRKFGATRRELEHLKAWLAEQGVQEIAMESTAQYWKPVWLALEGHFELHLAQARSNTGPKGRKTDFRDAVRIVKRLLADDLTLSYVPEPEQRRWRMLTRGKHQLTRERKRLHSQIEALLEEGQIKLSSVVSDLLGVSGYRILRALEKGESDVVKLAELADPRLRVSPQKLQEALYGQMHEQHRVLLRLFLDRLDLVERQMTELAKVIMEAMQVHQQAITRLSLVPGLGIDSAHQMVAELGPEAAAFPSIPQCCSWVGVCPGRQESAGISESNRCPKGNRTMRRLLNQAAWAAAKTKDSHFQHLFRRLVPRLGIKKAIAAVAHHLLRVVWKILHDKADYKEFGPLAAHEPARNHRKQKLVRELKRLGYTVQVNPAA

SEQ ID NO: 369920 - protein, 323 aa, unidentified
MNKYKETFGVDISKDVFDVHGSDNGHDQFKNNEKGFAAFLKILPEDSIVVMEATGYYHYRLAQFLYKNNVVVSVVNPLSVKRFIQMKLAKVKTDKSDAKAICEYALANEVPLYNALTDVQAECLQLFRLMDSYLKKRTATKNKLHGEEILGIPSKFVYRSLKRDRKHLDKEIAGIEERLLSLVKMEQQQQLSLLTTVPGIGTKTALFLIVITDGFSKFETAAQLCSYVGITPTIRESGSSVRGRSRISKVGNKKLRNLLFLCAFNACKHNKACRELYERVVNKGKSKKLALIAVSNKLLKQCFAIAKSGNPYDPEHVSVLKLK

SEQ ID NO: 369921 - protein, 400 aa, unidentified
MIDTSGIGAFLGLDVGKGEHHATAVTPAGKKAFDKRLPNSEPKLREVFRKLQAKHGTVLVVVDQPASIGALPLAVARDMDCPVAYLPGLTMRRIADLYPGEAKTDARDAFVIADAARVMPHTLRSVDLEDETIAELEMIVGFDDDLAGEATRISNRLRGLLTQIHPSLERVLGPRVQHPAVLKLLDQFGSPAEIRKAGRRRLVTLIRPKAPRMAERLVEDIFTALDEQTVIVPGTDAAALIVPSLANSLQAVLDQRKLLAARIEELLANHPLSKVLTSMPGIGGRTGARILIDVGDGRSFPSAAHLAAYAGLAPTTRSSGSSIRGEQPSRRGNKQLKRAFFLSAFAALADPASRAHYDKKISQGKHHTQALLCLARQRACVLLAMVRDGTFHKPQPAPSP

SEQ ID NO: 369922 - protein, 414 aa, unidentified
MAGEINKSCGLDIHKRFLIATILSRSGEKQQQRFERDEDGILSLRNWVTSEKCDVVACESTSDFWVPIHDSLIKHLPFIVGNARDMKAFTHKKTDKIDSEVIAKLALNDMVQPSRVFPKKHREYRSYIRLRHKLVQKRTDIKNEAHAILAPEMFNLKDVLTDIFGKNGREILSGISSGKNVDQILQNLSPNVRKKSAQIRELLDREISQSAAIRLQICLKLIKDFDDSIELLGKEIFNYAYGNHKREMEILMSVPGIGELGAATLIAEIDNFKDFASGDKLASWLGLVPNVYQSADKYHNGRITKRGSKVARWILTQIAQAAARTKNSKLKEFFNRKKKSIGHAKAIIALARKIATIIWHLITNDEMYEDETGYVKGEVQRRKIVETEIFSVDERISIISEIFAIVEKKKPDIK

SEQ ID NO: 369923 - protein, 422 aa, unidentified
MLEETNDREELIARVAALDIGKAELVCCIRVPGQGKRGRRLQEVGTYQTMTRSLLVLADRLGELGVTRVVMEATSDYWKPVFYLLEAHGFEVWLVNAKDVKHLPGRPKTDRLDAVWLAKVAERQMLRPSFVPPPAIRRLRDLTRYRADLVAVRTAEKQRVEKLLEDAQIKLSVVASDIFGVSGRAMLAALLAGERDPKVLAELARGRLRAKRSVLEEAFTGRFSDHHGFLLATMLSRIDASSADIAELDRKIDEAIAPFAPAADRLDEITGVGRIAAQVIIAEIGVDMSRFPTAGHLVSWARYAPGVRQSAGKKKGNSATGHGNPYLARVLGEAAIAAGRTDTFLGERYRRIARRRGAKRAIVAVGRSILIIVWHLLADPTVRFHDLGAGFYYTRIDTERRKRNHIRQLEALGYKVTLQPAA

SEQ ID NO: 369924 - protein, 402 aa, unidentified
MCTGHTPAISSAEASVNHDSTVFVGLDVHKESITVAYAIDMGDVELLGKIGTQKADIDRLCKRVQSKARHVRVVYEAGPCGYGLYRELVERGFDCVVCAPSLIPKKPGERVKTDRRDAVKLVRALRAGDLSAVHVPDVEDEAFRDLARAWAAAKADLRQARQRLKSFLLSHGVRYSGNANWGPAHRRWISVFAFPNHWQQLAFDECRRTIEDRFAQCERLEATLHEPVVGWRFYPAILGLQTMRGIQFITAVGMLSELGDLSRFEHPRQLMAWLGVTPSEHSSGERRRQGSITKNGNSYARKLLVEAAWSYRYPARVSPEIQRRHEGIPKRILDLGRTGPTLPPISQAGSTRQECEHRCRRRRTRTCGVHLGHQQARDVARRNAKRAARVPLSFATQIRRVS

SEQ ID NO: 369925 - protein, 316 aa, unidentified
MNVIGFDISKDTIDVTLLRNSGQVDYIKIANACEGFEKLNDWIRSKRIRKISISMEATGIYYEEAADYFSAIYQVFVINPLKIKEYSKSQFSHTKTDKADSRLIAEYTKRHLDKLTPFKPSENPTLYKLISLLQQLKQQQNESQNRLHAAKDTFIRATHEAIILLLAKQIDQTAKRIDLMIQQQDSLNTHYKNLQTIPGIGKDTAAILLNHLTDKQFKTANKFVSFAGLSPRIEQSGTSVNKKGRLSRYGHRRLKRALFMPALVAYRIKAFPKLVQNLSKKPKMIVIVALMRKLAKIAYYIHKTQKPFEKMRYQIA

SEQ ID NO: 369926 - protein, 342 aa, unidentified
MTLYIGVDIHARQQTLSYLETADGTTGQVVLDHEVDDVAGFYRQFQGEVIIGIEACGYTNWFEELVERLGHQLLVGDAAEIRRLARRRQKNDRRDADLLLDLLVHDEFPALYRYCQESREVLRQLRYRHKLVKLRTMVANTLHALALNAGLSLRAKLLTKGGRQQLSALPLSAISQQQRNELLSLADELTRRIQLVEQWLAVQAARDGRVQRLQTHPGVGLLTSLCVVHTLGEVQRFSSTRKVAAYVGFDPMEDSSAERKAYGGISKAGSRLLRYLLIEAGQTAAKDDEQLKQFYRRLLPRRGKARAKVAVGRKLLLRCFIMWRAEIDYAEFLRRGQTEETE

SEQ ID NO: 369927 - protein, 373 aa, unidentified
MNYNTVYVGMDVHKETFTLRYFTFDMAQPSAPVEVNADYKQILKYLDSVRRILGKDCQFLCGYEAGSLGYTLYRQLREHHVDCVILAPTTIPETRGKKKLKNDKRDSGNIAKALAYRTYSPVHIPSPQDEEVKEYIRMRSDHKIALKKVKQQILSFCLRHGYRYTATRHYWTQEHIKWLRSLPAEDVYKDILEEYMGTFTYLSDKIKRLDQKIEEFAQKEEYQEPVKKLCCFIGIKTLTALTTIVEVGDFKRFPAAWNFSSYLGLMPGEDSSGPKEKRLGITKAGNAQVRKLLIEAAQSYSRGSVGNKSRALKQRQEGNPPGVINYADRANERLRRKYYHMVLGNGKKANVAKTAVARELSCFIWGMMTENMA

SEQ ID NO: 369928 - protein, 391 aa, unidentified
MMPSHLIDTPAAGAEDGTLYVAFELSRSKWLIGIVLSGESKLSRHQVSGGDTAAVWQVIAKKRASAEKKLGRPVRVVSCYEAGYDGFWLDRWLAAQGVANRVLDPSSIEMPRRARQAKTDRLDLERLMRVLIRHDGGEPRVCSVVHPPSPEQEDARRLSRERDRLIGERTAHGNRIKGLLHGQGVRELQPRRKDFLAQLAEARTGDGRAVPARLVAEIRREHARLGLLGEQLAEVEGEMAAQRDAAAPDSRARQVTHLLGLKSIGPISGETLVNEVFWRDFRNRRQVGAYFGLVGTPFDSGQSSREQGISKSGNGRARSLAVELSWLWLRHQPDSALSLWFKQRVGDQKGRVRRIAIVALARKLMVALWRFLTLGLVPDGAIVRAAAPAGR

SEQ ID NO: 369929 - protein, 415 aa, unidentified
MKKHNYRAKKVNDINWPQLRQQFTGQALVFAIDVAKEQQFALLSNTELSESVLIQWNQLEQTVGLINELKQLNALITVVMESTSTYGDAMRYQFRQAGFTIHQASAKRVHDAKEIYDGVPSLHDAKAAWLIAHLYQDGLTKPWHELGDKERELNAYRREYELHESQHKRNQNRLEAFLSRHWPEVLPLLALDSVTLESLLIDYGSPEQIAACAEQAAKDMHRWGKHCLSTEKIDAVIHSAATTLGQPCIEAERRYLQALAEELRHNRTQAKNAKLALEAVVKAEPELKEMGLTVGMVTTAILIGLHLDPRHFGCARSYLKALGLNLKEKSSGQDHGKLKLTKRGSALARKYLYFAALRLINNDPVISTWYQNKVDPRAKLKTVIALMRKLAKALWHVARGQRFDARKLVMTTVVN

SEQ ID NO: 369930 - protein, 462 aa, unidentified
MMNVQEQREMVEKANRILSEMKSFTWRELETQGKFSKNDKLSFISDDMLILGCDIGSETHYVRAIDTRGRELSRKALAFDNNAEGFQKAHDWAVQLAAASDKKQIVLGLEPTGHYWFCLAAWMVSNGISVVQVNPYAVKQTKELEDNSQQKDDRKDPKLIANLVKDGNYGMPYLPEKVYAELRRLSMFREQLTEDRNRSMNRLHREMKIYFPEYKDAFGKIDGAFCMAVLKEAPFPEDILKLGGEGIREIWHQAKLRGRGYSRAAEIVKYAETSIGLKDGTAAGREAVRWFAEKIMELDEELAEVENKLNEKCREIPHAENVLEIPGIGGKILSGILAEMGDISRFDDAKELQKLSGLGLVSCSSGKHKGETRISHRGRKRLRYWLFQAARSAVAHGEEYKWIHAHYTTRAGNALQKMQSLIVIACKLLRVIYTMLKTGKPYDPEKLLKDIRYPENVQTAAA

SEQ ID NO: 369931 - protein, 318 aa, unidentified
MSKRTMVNAGIDTGKRKLDVALDGRPGRLQVDNTPEGHRALSAWLRRHQVKRIGIEASGGYERAVVAQLRRDGFVVVLFQPAQVRAYGYFHLQLAKNDKIDAGLIAACTTAAKKIHAPPDPRLEPLSEHLTFIEQISDDIARHKTRLEGCRDPRVRGIWKEEIARLKRLERAELRQLAASIRQHRDLAERLALIASVDGVGLRTAVAILVRMPEIGRLSREEIAALAGLAPYDDDSGGYLGKRWTRGGRERLRRALYAAALPAAFYWNPQLIRLYQRLTAAGKLHKVALIACARKLLIYVNTVVQRGTPWVRCPAPAQ

SEQ ID NO: 369932 - protein, 320 aa, unidentified
MMAQNDQIVVGIDVAKDKVDTCIRSLSQRHTFPNTAQGHRKMVARLHKHKVNKAVMEASGGYERDWARVLRLAGIEVRIVDPKRVRSFALSAGRLAKNDTIDAEMIAWFAETFSAAPGQPHDAAREELRALVKARKHLLDLQTRLKSQNEHAAPEAVQKAHARILKNLAAEIARLEAAISAKVKTTPDFAERAEIIESVPGFAETTSANLIAGMPELGQVSNEIAAALIGLAPYDDDSGKRRGERHIKGGRRWVRNAIYMPCLGAATQNNPVLKVFYQRLIAKGKEPKVALVACMRKLIIILNTMITRRQKWDPSRYALN

SEQ ID NO: 369933 - protein, 332 aa, unidentified
MVAGTTGSFNKAGSTKMTQISRTAGIDTSKAKLDIAVDGGGERWQVDNSSGGWRRLAAELSKAGVTRIGIEASGGYESGVVGALRDKGFIVLVLQPIQVKAYARVHLRRAKNDKLDAVLIAACTATIDQPRIEPDDRLAKLAHHLTFVEQIEEDIARFKVRLEHVGDPRLRRTVLADIARLKTRRAAELARIVTALRSHDDLARRLDLVLSIPGLGERTAIALIVRMPELGRVSREEAAALAGLAPYDDDRGKHKGQRHIAGGRGRLRRSLFAAALPAAFRWNKALVQLYARLTARGKAHNAALIACARKLLIYANTVVYRGTPWIEKPAAT

SEQ ID NO: 369934 - protein, 309 aa, unidentified
MSGIYVGIDVSKDRLDVAVVPSGDKRQFSNDEAGLSKLLGMLVKLAPTLVVMEPTGGFEVPLAGALAAEGLPVAVVNARQIRNYARAVGKLAKTDKLDAMIIAEFAHKVEPEVRPLRDEENQEIKAIVSRRCQLVEMLKAEKNRLAIAPKHIKPNIMAHIEWLRREMDDLDRNLRELIEASPIWREKDDLLRSIPGIGNVISATLLAELPELGTLNRREIASLAGVAPFNQDSGTIKGKRRIWGGRTSVRHALYMAALVGTRYNPVIKAFYTRLLQKGKAKKVALVACMRKLLTILNSIIRYRKAWHYA

SEQ ID NO: 369935 - protein, 387 aa, unidentified
MYFVGIDISKFKHDCAVIDELSDTVTPSWSFSNDREGFLQLKELLDNLKGEKKIGLEATGHYGENLKLFLEINGFTFMEFNPLLISRFVRSKSLRNTKTDSIDALSIAHYVMTVEYKPYPSSFYHLDKLKSLTRFRNSLVRQRSRQLVELTNVLDKLFPEFKPFFKDKFSVTALYILAHYQTPERIANMNARSYEALRKISHGRFTMSNFIQLKALAKNTVGIQREYLIDQMNILLELYSQLDSKVDELDSQIKECVRGIDPPCLSIPGVGELSAAMILSEFGDFSKFQNPSKMLAFAGLEPGYFQSGQSEYTGHMVKHGSSRLRYALMNCCLPLISNEPVFAAYYAKKRSEGKPHRVALTHVAKKLLRVVYTLQTKNVRYNPTMIH

SEQ ID NO: 369936 - protein, 367 aa, unidentified
MKDSSTVVGLDVHKNSIEIVTADTDGAMEVRHFGRIGGTMDALDRAVRKLASQGSTLGFVYEAGPCGYEIYRHLTRKGFSCKVVAPSKTPQKRGDRIKNDRRDAETLARMERAGELTAIYVPREEDEAMRDLTRAREDAVKALKTARHQLNAFLLRYGKRYPGKASWTPSHLRWLSDVTLPHPSQQIVLQESIMTVTGCTERTTRLTDQIAKLLPDWRMFPVVKALQALRGVAPIVAATTIAEIGDLSRFENPRQLMAYLGLVPSEDSSGESTHRGSITKTGNGHVRRALIEAAHAYGFPARVSRHLLKRHEGLPQSVLAIAWKAQVRLCGRFRRLMARGKLKTKVVTAIARELCGFMWAIAREVKV

SEQ ID NO: 369937 - protein, 384 aa, unidentified
MSQDNARAAITPQGELGAIFASIELSKKTWLLTTMSPGAGDKMSRHIISGGDIGALFAQLTTLKRKAYDRTGRHYPFVIIQEAGLDGFWVHRALIAEGYESHVVDAASIATSRRKRRVKTDRLDGESLIRALLAFKRGEPRVCSMLRVPNPNEEDRRRIVRERKVLMEERIRHSNRIKGLLFSQGITGYDPLRRDRREQLEILRTGDGRPLPPNMKRQVLREFGRMELLIDQIKEVEAERDDMLIEERQSAREVALLSKVVGIGPEFAAVLWGEGLFRHFDNRRQVAAYAGLAPTPWQSGSIDREQGIGKSGNPRLRSTLLEMAWLWLRHQPSSTLSRWFNERVAQNGGRFKKVMITALARKLVVALWKYASAGVLIEGAVIRP

SEQ ID NO: 369938 - protein, 480 aa, unidentified
MLRIQFLSEIVPILFSINSFSQARPPQVCTGSSQIAAFNATYSSAIGIDVHSRLMVACFQKGEFGCSSFTEEFKESGTSLKAIRNLVIWCNSKNPEIIIMESTGIYWKTLYTELEKSGFPRDRIVVINPRILKPLKGRKTDRSDARNLSKHARMGSFTNSFIPKKDIRELRSLWASFQQIKHQYENNRRSLLNSLADYGCQFANIVSDSRGVTAQRILEAILSGDTGEALRKHIRKILDDMHKRRGRKLSAGLDEICEAIESNITPAIRMALNLRSNQLKIYEDHMKTVFDTIKVMVLKSYKELYDLLLTIPGTEDMSVIGIICVVGDDLSSFSSIKKFASWTGLAPGNNISAGVSYSSRITHGNRYFRRTILAIAQGCANQKKNKSGLGNLFQRLRERKGYNKAKVAVAHKIVRIIYVIITRKVKYEDSPNDQSLAKFRMDQVKRAISRAKITEGLCVQSETSNQGKVICASVSMTQPT

SEQ ID NO: 369939 - protein, 464 aa, unidentified
MNGDSKAGSGQEGGRKEEGIAALGRRVAGVDVGSKEHWVCAPVREGEGREVGVFGATTTQLEKMATWLRERRVESVALESTGVYWVAVYEVLEARGLKVRLVDSRALARVPGRPKTDRRDCQWIQRLHSCGLLQGAFRPPEQICMLRTLVRDKGNLVAEQGDWVRRMQKSLEQMNVRVHRAVADLTGATGMALVRAIVKGEREARELAKLRDPRCHKSEEEIAEQLKGHWREDHLFSLGQALKMYEAIQERIQDYERAILEKLKAMEREECRQQEPPELKNKKKAQTILHRGQEPLRQALYRASGADLTAIDGLGVETVQAVTSEYGTDLSAFPQEKQFVKHVLLAPNRPTSGGKPVKKKQKHGTASSRVAAALRMAALTLRHSQTALGAYYRQIARHKGDDVAVFATARKLATLIYRMLRWGKDYVDEGAEAYQNRYREGRLRRLTSLARELGYQLAPLPANP

SEQ ID NO: 369940 - protein, 337 aa, unidentified
MEVYAGLDLHSTNTYVAMIDGENKVLYKQRHRNEVPAILSALDPFKKDIQGVVVESTYNWYWLVDGLMDAGYRVHLANVSAIKQYEGLKQVDDKRSSLWLANLLRLNILPTGYIYPKEERPTRDLLRKRLQFVRQRTSQVLSVKNILARNLGVRMKTYDIKKLKASEVKALFPDKEMQVAVMSSVGLIQHFQEEIDRIETIITKKFKIRKEFARLLTVPGIGQILGLTIMLEVGHIDRFPTVGDYSSYCRCIRSIRTSNGKVTGYGNSRNGNKYLSWAYIEAAHFARRYHEPIRSFYERKMARTNKIVAIKAVSHKLARASYYVMRDGVDYDQVRFA

SEQ ID NO: 369941 - protein, 352 aa, unidentified
MQEYIALDVHKHYTFAGREEVGTRRAAYDRLEHTKGIFKRYLAEVEPGTTVALEATGNWYWVVDEIEASGMKPALIHPYKAKVMLGCINKTDKLDVMGMNRLQRTGTLPTVWIPPIETRDQRELPRTRMFLTQLRAKLKNRIQATLTKYALNVTGYSDSFGQEARKVMEKRIEELPPQAKKATQQLLELLDPLEEQIQDQEKRIQELVKVTPEMDLLVTMPCIGKILAIVIASEVGDIRRFPKAENYTSYAGTAPRIKASGDKYRIGRLRADVNHYLKWAYIEAANCVCMHQRNFPDRHVTLLYKRIARRKGHPKAIGAVARHLAEATFYVLSRNQPYRDPALSKRVVTTGT

SEQ ID NO: 369942 - protein, 316 aa, unidentified
MVGIDVASAHVDVAAIGAALPAALSHVGNDADGHSVPADGLARLKPELVLMEATGGYEAALACALQAAGLRVAVVNPRMARDFARAMQRLAKTDRIDAATLAEFAGVLARRPDCERFIRPLREPEQQDLAALVTRRRQLVSMQLSERQRLRLARPVARPSIEALLEAIARQLDDVEAEMARHVEQHYAQMTKLLQSVAGIGRVAAATLIAELPELGRLNRRQICALVSVAPYAKDSGASRGRRRIGGGRFEVRRALYMATLAATRYNAPIRAFYQRLVAAGKLKKVALIACMRKLITHLNAIARDHLKDQDRPTIA

SEQ ID NO: 369943 - protein, 407 aa, unidentified
MIFAGVDWAEAHHDVYFQDVRGRRLAGGRLPEGVEGITRFHELAAAHADEPDEVVIGIETDRGLFVSALVAAGYQVFAVNPMSASRYRDRHGSSGAKSDPGDAKVLADLVRTDRHNHRPVAGDSDLAQGIRALARAHQSMIWAGRRQANQLRSALREFYPAALAAFDNLTSGDATAVLKAAPQPMLGAALSRAQITAALRRGGRTRRLAERTAAIQAALRTPQLQPAPALAAAMGAAVAATAAVIAEMNAQIAALEQQLAADFELHPDAQVVRSLPGLGTILGARVLGEFGDAQGRYATAKSRKNYASTSPITRASGTRRAVLARYARNKRLADAIYLWAFAALTASPGARAFYDHRRAAGDTHHQALRTLGNRLVGILHGCLASHTPYSEHTAWAHRANQEIGHAA

SEQ ID NO: 369944 - protein, 346 aa, unidentified
MNYIGMDCHISTLDFAVVNDAGRLVKAGSVATSVNRFIEFVKKIPLPRTIYIEESTLAAWVLEICIRYGEKLVITDPKKNLWIASSGQKGDSIDALKLAQLARGGYIKEIHHPVGQRRRFRELMEAYHDTVRSEVRIKCKIKAKFRQNGIQCTGDTVYAKNHRQGWKDKLPQEATLLLTLEGLWLQLEQLEQTEKEILKAAKAQAKHYPEIKHFEDIPGIGFINAATISAILETPYRFPNKRKVWMYAGLGLMKRSSGGKLYSEKLSTDYNRLLKYTIKQAAEAAIRTEDNPLRRKYLDMTLLHGIAPNLAKLTIARGMLASTWAMWEKGEKYNPEIRERATHKQG

SEQ ID NO: 369945 - protein, 411 aa, unidentified
MEPIHQRVAGIDVHRMKHVVTILIGQEDGTVSSETREFGGFKRDMRALVAWLQMHRIQQVVMESTGIYWKSVFAHLEAAGIPALVVNAFHVKNVPGRKTDVGDSEWLAQLARFGLLRGSFIPPKDLRELRIVSRYRRKLTGMLAGEKNRLHKLLDDAGIKLGGVVADIDGVCASKMVEGLIAGGKPDELAALGRGKVRATTDILEAAMDGELSARHRLVLDIAHDHLRYLEGKLAALDRYLIAAMQPYAWAWRLLQTIPGIDAISAAMILIEIGDDPHRFRSPARLASWSALCPGNNESAGKRKSGKTRHGNPIVRYLLCEAANAARRTQTVFRAKYESLVIRHATRRRSSPSPTNWCAPSISSLSGVNLIATQLSITKLRASPRTPRAGSEPSRNTAIGHRSPFQNRQST

SEQ ID NO: 369946 - protein, 468 aa, unidentified
MAKKSQKGRKGAPGKKKKANGNSQSLPILHADTAGVDIGAMEIYVAVPADRDEHPVRCFGTFTDDLRKIAQWLKQCNIKRVAMESTGVYWIPLWQILSDESFELCLVNARHFKNVPGKKTDVQDCQWLQFLHSVGLLRGSHRPDEAICGLRTLLRYRGELVKSAAMHLQHMHKSLEEMNIKLGHVLSELQGVTGLVIVDALLAGERDLKKLAQLRDGRVRASEETIMKSLEGDYRVQHLITLQFARNLYQHYQTLIELLDREMEAFMSQLPDRVDLKDYPLPASQKKTQPKRQHNAPAYDLRTQCYRVLGVDLTAIDGIDAVTAHVVLTEVGADLSEFPTAAHFCSWLRLCPNNEMSGGRTLSKKTKKGKNRLALALRHGASTLHASQTPLGQYLRRMKARFGPARAITVTAHKIARIIYHMITLKEAFKPEMLDAQDARQKRKHEAIVRKHAMSLGFQLIPLVQPSA

SEQ ID NO: 369947 - protein, 349 aa, unidentified
MEAYDGPQIVGMDLHRRRSVLVRMTVDGRRLGTSRITNSAADLRKEIAKAGRSPVVALEATYGWYWAADALAAAGAQVHLAHPLGVKAFTYRRVKNDEKDAADLADLLRMGRLPQAWIAPCEIRELRELTRYRIKLVRMRSSCKEQVHAVLAKLGVPVTCSDIFGVWGNAWLDGLGLGQPYAGKVASLRTLTGELSAEIAVLDAVIADLLEHHDGYHAIQALPGIGPVLAAVIVAEIGDIHRFSRPARLSCWAGLTPRHRESDLKVTRGHITKQGSPTLRWAVVEAIQHQPAGSPVRDVKDRIIARRGNQAKNIAKTAAARYLLTCIFYAMRDGQARSLATRTAAKDAA

SEQ ID NO: 369948 - protein, 410 aa, unidentified
MGLYCGIDWASDHHDVAVVNDDGQVLSRGRVGNDAAGFAQALTLLADAGDTANDPIPVGIETDRGLWIAALRATGRVIYPINPLAASRYRARYAVSGAKSDATDAVLLANIVRTDPDAHRPLPADTELAQAIRVLARAQQDAVWARQQIGNQLRDLLKDFYPAAIIAFAGLPSGGLARPDARTILAAAPTPGQAAKLTPARLRRLLIKAGRRRDLDRDVERLRAVFTDTHLHQPPVLENAMGIQLTALLRQFEAANAAADELAEAAIAHFEQHPDAEIITSFPGLGNLAGARVLAEIGDDRTRFTDARGLKAFAGSAPITRASGKKTIVRHRHIKNRRLATVGSIWALASLRSSPGARRHYDARRAAGDWNRQAQRHLFNKFLGQLHHCLQTGQPYNEHRAFPPPLPLAA

SEQ ID NO: 369949 - protein, 404 aa, unidentified
MFYLGIDIALNTHRLVMLDDNGERVSNGISFQNNTADFEKVLIKLKELSINPDNSICGLEATGNNWENLYCFLTSNNFKTILLNPHQTNKFREALRKKAKTDDIDAFVIAGLLRSNEFASSYVPEDKIQTLRELTKLRYEFIKDHKNYQRQVLALLTIIFPEYKQTALKNPFAIASIAIFKAFPTAKHLSITKPKHIEKIVRSIKGNNFNIKEIENLISIAKTSVYSGRCQESRALTLNILLTQVESFSNSIQQLDEQINQIFSPSSNDNTFPGSNLLTIPGVGPKTLAAILSCVGESGQAFSTGVKLIGHIGFFPQIYESGETKRANRMSNKGPAYLRHALYMASVACIKHNLQLRRLYHTKVSQGKKPKQALICVAKKLAHLCLSMLHSGQDYNPARVFSYV

SEQ ID NO: 369950 - protein, 392 aa, unidentified
MFIVGIDIAKRFHEASVIAQDGSLVRKALRFANSQAGYNKLMNMVRGLNEPVVFGMEATGHYWMTLFTHLRNDGFTVHVINPIQSDALRGMYIRKTKHDAIDSMIIADVIRFGRYCETSMQPGDLQAMRELCRQRFYVIDMASDLKRKVLALLDQVFPEYEKLFSDTFGASSMELLSQYTTPEEMLSVSTEKLAELLETASRGRLGLAKAEEIQEAAKNSFGIVLASGSFALIIRQYIEQIRSLESSIAVFDTEIARLLAGFDTQLTTITGIGPTLAAVILSEIGGDIKRFSSPAKLAAYAGVDPTVKQSGDFTGTRMKMSKRGSPYLRRAIWLASTVAAFKDPAIHALYERKRSEGKDHMTVIGHVCRKMVSIIFAVLRDNTPYSPAVISD

SEQ ID NO: 369951 - protein, 342 aa, unidentified
MTYVGLDVSMKETKLHVLDEAGKRVWRGRCATEPAAIASAIRRYTPAAVRIGLETGPLTTWLWTELTAEGLPMVCLDARHAKKALDMKVNKTDANDAEGLAHLVRTGWYREVRVKGRGAMLAKALLGARSHLLSISMALENQIRGLLKTFGRIVPKAAGGLFEKNVRGLIIDDAELAAVIMPLLQARQMTRSKCAALDRRLVAAVRGNATCRMLMTMPGIGPITVVAYVAALERPDTFKRSCAVGAWLGLTPRRFQSGEIDYDGHISRRGDGQLRALLYEAAAVLLTRVRAESRLRRWGLMLRKRLGFKRAATALARKMAVILHAMWKSGTSFNPTLGAATS

SEQ ID NO: 369952 - protein, 520 aa, unidentified
MSTPRTRRRRPHRGPSGSVGKPRGVLHPRVQQVGPEHFGIVCFDCAKARSKFLLADFYGRVLIPPTHVEHNRPALDAAVAQVRQAFADHQLRDGLVAIERTGRYHRHVQRAFAAAGFETRIVHPFATKHYRQPVDPGNKTDDADLGALHRATVTGCALLEATRDEAWTTLQLLVRHRRDLVRKGAALNCQIRDHLEAALPGFAACFDKLWDSPIPWHLLGHYGTAEQLQATGLTTLCQSLREAGIRFQQRTVQAVLDWAARAAPGDVAAAQHLRIALALYDDRQRKTLEIQALERDIAGRLVQTPYVLLLSFPGVNVVSAADFGGEAGPIEHYANAKAISGRAGLRPARYQSDRVDQANGPLIRHCNHALRAAVLGVADNLVTCNHHFQALATRWAAQGKDPRHTRVKVALRFCRIAFQMVAGRQVFRHPGLQGRHYVLDKLNAFHRGHDTPMPDVLRDLQAALGQVPVREHAAEAKPLQEELQRIQDGRRRGPQLLGDILPIVLARLGVGVVQSEASGE

SEQ ID NO: 369953 - protein, 400 aa, unidentified
MKPFKVLHDNLDSLNKAVLTIKKAEESHSLKARIFLESTGIYHFPLFCYLIESGFEVFVLNPLITDSNKNSGIRKVKNDKSDSLRIAKTGYTHDLKVSLIPSDLVINLRSLSREYYSLSDAKTAYVNKLHKELRMVFPGYSKVFSSLTGKTSLLLLKTYRTPTAILNASKEDIVSLIAISSRKGLTYAYEKYNRLIEAAELSKYFGQHLESVFDLVQLNIEFIDIYNSKIEAILAKIKAFTIKYQNEQFIQQIHLLDSIKGIGFISAVTLMCEIGDFSAFSKPKQLYAYFGLDPAVKESGNFKGTKTSMSKRGSKLARRVLFTIALVSVRSSRSGTPNNPVLHTYYKNKKQSKPKMVALGAIMHKISNIIFAVLRDNTPFVMRTPEQHKMYRTTNLSIAA

SEQ ID NO: 369954 - protein, 316 aa, unidentified
MSDATVVVGIDVSKAQLDVAAVGATLETTQYANDGDGQQALAEALCQVQPRVVIVEPSGGYEAGLICALQGSGLAVVMVNPQQARDFARSMGERAKTDRIDALMLARFGTVIAQRPDLEQLLRPQVPEEQQDLLALVNRHRQLTTMLGAERTRLAKSRSTIRPSIESMIKAIQAQLDQVDAEMAANVQKHYAAQAKLLRSAIGVGPIACAWLIAALPELGRLDRREIASLVGVAPFPRESGKKRGKRHIEAGRFELRRVLYMAALSASRYNPAIKAFYDRLIAAGKPPKVALVACMRKLLTILNAMARTATPFQMA

SEQ ID NO: 369955 - protein, 433 aa, unidentified
MNPTHPFDLVIGLDRSDRKANLVLIDTRSGKSEKQIISTSPEALHDWLAQLHQQHPEGRVAVCLEQPAASLILFLETYSWITLYAINPITLQKFREAFVTSRAKDDGKDAQYLAELLLTHHQKLKPWQPDDSQTRQLQQLVLHRRAVVDERTGLTNRLQALLKQYFPQALDLCGEDLWRPMATAFLLKWPTLQLLQKAKPQSIQQFYYLQGSRSQQLIQQRLELIAKAVPLTDELAPLQSHTLRVQLICRELLLVHKTIDQFELKIAQAFQQHPDKELFASLPGAGPVLAPRLLASMGSERERFASANSLQSFSGVAPVTKQSGASHYVHRRYRCPKFLKQSFHEYAKESILHSRWAAAHYFQQRQKGCPHHTALRSLAYKWQRIIWKCWQSHSPYSEDIHQASLKKYGSPLVPLLDQIEVGKSPCKTLVKNT

SEQ ID NO: 369956 - protein, 447 aa, unidentified
MEILYTNCAGLDVHKKTVKVCLLIHMSDGKTHKEFRTYFTTTEELLKLGDWLKEQGCTHLAFEATGVYWKPVFNLLEGSFEVLVVNAQHIKAVPGRKTDVKDAEWIADLLQHGLLKASFIPSGPQRELRDLTRYRVRLTEEKAREVNRVQKTLEDTNLKLGDVVSDIMGKASRMILHAIADGETDPGRLAALAVGRVRAPQERLEAALRGHVTDHHRFLLSEHLTQIHHLEQAIERVTAEIVRRFTPEDTPASQKEEEVEQDLSPVSVSPQESPASSPPSLSWAEAVVLLCSIPGIGEHTAIGILAEIGINMQQFPTAGHLASWAGVCPGNHESAGKRLSGKTRKGNPWLRCLLVQAAHSASHQKQCYLAEQYRRIAKRRGAKRAAIAVAHSILVMIYYLLRNQTTYQEKGESFFEEQERQGTEKRLVRQLSRLGYHVELQPVALAG

SEQ ID NO: 369957 - protein, 355 aa, unidentified
MNQEKYIGMDVHAATISAAVMNAEGKVLMECVLETKAATILEFIEGLRGTLALTFEEGIMATWLHDLLKPHVSRLVVCDPRKNALMRDGNQNDRGDARNLAELLRTNHVHAVYHEKHGTRALKELGRSYLTLTKDSTRVMNRIKSVYRSWAIPCAGTSVYSRRHRAEWLAKLVEPGVRMRAEHLYEQLDSLQPVRQAARRELLRESRKHAAVKLLRQIPAIGPIRSALLVAILQTPHRFRTKRQLWAYSGFAVQTYDSGEYRFVRGKLQRNRERITVRGLNHNHNHDLKNLLKGAAITAIERPGPLQDFYAALVDKGIRPSMARLTLARKIAAITLAIWKKGVSFDPKQLQRQAA

SEQ ID NO: 369958 - protein, 430 aa, unidentified
MKSNTQNAKIEAITEKTLVLGIDVGSETHYARAFDYRGIEYSKKPFKFSNTEDGFVTFKEWILDLKERHEKDKVVPGMEPTGHYWFNLGKFLQDNEMKPVLVNPHHVKKSKELDDNNPTKNDRKDPKVIAGLVREGRYMIPYLPDGVYADLRTASNIRFQLQAELTRIQNRISRWFNIYFPEYKTVYGKPDAKSGMLILKAAPLPEDILTLGIDGVNQIWRDAKLRAVGKARAKTLIEAAEHSVGSKEGAVSARMEIRMLLEDYESRNIRLQEVMTLIEGLVKQIPMAEKLLEIKGVGIKTVSGFLAEVGDISRFNTPKELQKLAGLALVESSSGKHKGETTISRRGRKRLRYLLFEVAMSLVAKNSEFRELHNYYTTRRLNPLKKMQSLMAIAAKLIRVFYAMLTKGVDYDPKKMVSDIKRPAVYLQAA

SEQ ID NO: 369959 - protein, 351 aa, unidentified
MRRFYTRQHRFYCGIDLHARLLAICIVDHETASVVCRTQIPADQQRLLDTLAPYRADVVVAVECLFAWYWVADLCAKEGIPFVLGHALYMKAIHGGKAKNDDIDAEKIARLLRGGNIPIAYVYPKGLRETRDLLRRRMHLVHQRAGLITHVQILNAQNNLPDFKKKLIYAKNRAELKVAERFLNPHVRKSVEVDLALVDALDVQIADLELYLERSAKVEDPTTFHLLKTIGGVGKILGLTLLYEIHDIRRFAEVGELLSYARLIRCTHESSGKKLGVGGAKIGNAHLKWAFSEAVCLLIRNYPAVKAWQAKRQKRHGKKKTLGILAARLGRAVYHMLRKREAFDVRRFLGQ

SEQ ID NO: 369960 - protein, 317 aa, unidentified
MVRSAVVGIDVSKAFLDVAWWVPDHAARYANSPQGLAELTRALTQQAPELVVLEATGGYEIAAVDALQAAKIAVAVVNPRQVRDFARASGKLAKTDALDAKVLAWFGTTMRPAPLPPIDPSRSAIANLVARRRQVIEMLIAERNRLEHAGAGVRRWIEEHILTLKTQLAQLDAAVALAVEASPSLHRRNEILTSVIGIGRLTAAVLIAELPELGSIGNKQVAALVGVAPFNQDSGNRRGERHIAGGRYSVRCALYMATLVAVRFNPALQSFYRRLRDAGKPAKVALVAAMRKLIIILNALVRDDILWQPNHALQDGC

SEQ ID NO: 369961 - protein, 324 aa, unidentified
MSNAYQKASAKELFDFLKKHYPDGDYLAVYESGFSGFATYYALKDVGITSIVIHAADVPTTQYEEVMKTDRIDSVKLVRALKAGLLKGIYIREKENIDDRSVVRVRKTIQKQLSGYKTRVKHMLYCNGVSFPERFEKPGSHWSRAFIKWLKEDVTLLSSTRNSLDLLIRQVETIRMTLLEATKMVRSLSRTERYKNKFELLMTVPGIGVTVSMCILTEVYDVRRFNNEKQFAAYLGLIPTSHSSGDKVAHGEKTFRGNKLLGPIIVEAAWISVFKDAGLASLYLHYKERMKPQEAIVRIARKLSNIIFAVLKNEKKYVPYHVGK

SEQ ID NO: 369962 - protein, 364 aa, unidentified
MNTQTTAIPKLFIGMDMHKKSWSLHFRTDLFDHRGFSMPPSSEQLYDHVQKTFPDHEVSLTYEAGCCGFSAARYFLNLGWQVKVVNAADVPIANKQIYQKTDKIDCRNLCRQLQDGRLRGIHIPTENQEQLRSLLRHRNNIVKQLRREKQLIKSMLLYVGIQLPGEYDNPNWSRNFKQWLQDLHWSHTTGTFSMQSKLRILETLHKEYLQTGNELRYYCRIHHNKDYYLLKSIPGIGGYLAAALLAEIGDIRRFSNEKEFSSYIGMVPGISKSGETEKHMGVTPRCNSLLRSYLIESAWVAIRRDPEMQAYYRKHIGKNIKCIIVKVAHKMVKRILSVIKNENPYVINYQLKNKNIQVETTIPS

SEQ ID NO: 369963 - protein, 402 aa, unidentified
MPMLSIGIDVSKGKSTVCGMKPGGEIVYTPFEIQHTREGMSDLVSLLRSSGEEVRAVLESTGSYHCPVVAALLENGIFVSVVNSLRMKRFCSQSIRKVKTDRIDAMQIALYGLAYWQELQPTRLPEDTYRELQLLARQYYQMTSMLIKAKVDFNALCDQVLPGMQELMSDHAGRHKLSDFVLRYRHTTHILEMGETRFRKDYCKWAEKKGYRNCERMAALIFATAQNGIPVLPNAPSTQIVITEAIRVLHTVEASRDAILTQMQALAKTLPEYSLVREMPCIGDTLAPRLIAEIGDVRRFHSKRALIAYAGIDAPPYQSGKFCANNRHISKRGNRYLRKTGYEVMQSYVMHKPANDPIFTFIEKKRSEGKSGKLAMVAGLNKFLRVYYGKVTELYRSLPAIE

SEQ ID NO: 369964 - protein, 425 aa, unidentified
MDKMESTEYAALIGLDWASEKHDAWVWDAATGEGRHRVVEHTPEALAAWLGELQARYPGRRLALCLEQSRGALIYALMGHEFLDLYPVNPVTLARYRGAFTPSRAKDDPGDARLLSEILRLHRDKLAVWRPDDEQTRTLGFLNEERRKAVNLRTKLVLRMQAALKLYFPQALAWLGTDLGTPMACDWLLKWPTLEAAQRARPQTIRAFFYAHNSRSAVHIESVLAAIAEARPLTRDAAVLAVHPLTVQMLAKQLRLLHGSIVEYERQIAALFRPHPDAFLFESLPGAGAVIAPRLLTAFGSDRSRHPTAQDMQAYAGIAPVVERSGKSCWTHWRWNCPKFLRQTFHEFARCSLAHSAWAHAYYELQKSRGKGHNAAIRSLAFKWIRIIHRCWLTRIPYDEGLYLQALERRGSPLLALIAAPAREA

SEQ ID NO: 369965 - protein, 443 aa, unidentified
MKATKFAAYVGIDWADRKHDVCLREKTSGKEERLVLQHSAEAIDKWAVSLQKRFAGKTVGVCLEQSKGPLIYALQKYDFLALHPINPSTLAKYREAFSPSKAKDDPTDAELLEELLRVHPDRLTMLRTETRETRILQFLVEDRRGLMNDKKRLGNRLTSLLKKYYPLVLELFPKMGRTVLCKFILRWTTLEQLQAASDEEIVNFFRSHNSAQRKLLEKRLELIHKAVPLTTDEVIISTAVLQAKTLCEQIIKHNYALEEYDREIECVYLKHPDAKIFSSLPGAGSTYGPRLLAALGTDRNRFSSAHDVQCFLGIAPVLERSGKQEWIHWRYCCSRFLRQSFHEWAGETIRRSFWAKTYYHLQRSKGKSHSIAVRALAYKWIRIVYKLWNTKTLYDESRYLDALQRSGSPLLAYINKSDGSTQTDLIELSETEAGNAGEQPAKG

SEQ ID NO: 369966 - protein, 426 aa, unidentified
MAKVEWHPGELYPRVGFIVTNLARRVERVVAFYNQRGTAEQCWCGRPPRHRLCQNEVVADLRRWGPSVEQISRIGMDTSKHFFQLHGVNAADQPVLRKKLRRKDMVAFFENLSPTVIAIEACGTSHYWARLLRSFGHEVKLIAPQLVKPYVKRGKNDAADAEALCEAMSRPTMRFVPVKTAEQQAALMMVGLRDRLIRNCTQLSNAIRSYAAEFGFTAAKGKAHLVPLLERVQADESVPILARELFAAQAEEYARLQGQIDKVDAELMAWHKANECSRRLAKIPSVGPIGAALLMMKTPAPEMFRSGRQFAAWIGLTPKDHSTAGKGRPGVITRAGDETLRSLLVVGATSVIQHVRRGGRGAPWIVDLLKRKPPKLAAVALANKVARRLEADGQWSMLLCEIGTHRVGACRIEISQTRGAIQLQPC

SEQ ID NO: 369967 - protein, 340 aa, unidentified
MKSKRYLGVDLHRNCFTVYTRREDGSGESREWSIRSLKAFAKTVPASDEVAVEATGNTRLFCEAFKDRGCRIVVVNPHQFQVISRSVKKTDEHDAKVLAEFLAKDMLPEVRMKDEMHARVASLAQTRDKLVKLRTTLKNKVNNLLAARGVLIRKESLASEKGLAEVLAAPVSELERLELDILVGEIRHLNESINKMEGLLRDQGPKLPGWENLTSIKGIGDTGASILLSTIGNIEDFADEGKLAAYFGIVPRVSHSNETERSGRITKRGCKLGRTALVQCALIAARYSPYLQAYYRRIAAHRGTGKAIIALARKLLGIIYKTLKNNWIFEDFPNFVLAKA

SEQ ID NO: 369968 - protein, 373 aa, unidentified
MTMIGNEERYSRASSDTVVEVVLGVDTHLDVHVAVALDQLGRRLDTFSVPTTKKGYEDLLAWAEGFGAVRCAGVEGTSSYGAGLARYLRVVGIEVMEVERPKRRHRRRNGKSDTRDAEAAARAVLAGETAGEPKGGDGRVEMIRVLRSTRRSAVKARSQVANQPQGFLVTAPEELRERLRELTTKELVAVAARLRPSKDLDNVETATKFALRSVARRYQLLSKEIAELDTQLDRLVSETAPELISLPAIGTDHAATLLLTVGDNPERLRSEASFASLCGVSPVEASSGKVVRHRLNRGGNRDANRALHLICLMRMRVDERTRRYVARRSAEGKSKQEIMRCLKRYVAREVYRVVVSAASPSPSGSCRRDAPLT

SEQ ID NO: 369969 - protein, 363 aa, unidentified
MTGMSVMTPGVTGGIDTHGQTHHAAVLDHVGRQLGDREFPTTPAGYRQLLAWLRGHGPLERVGVEGTGTYGAALARHLGSHSVPVVEVDRPDRKARRAKGKSDPLDAYAAARAALSGTAGGTPKAQDGPVEAIRALRVVRCGAIKARTQAMNQLKALLVTAPAELREQLRPLTTTALIATCARLRPTSELTDPEQATKTALRRLAQRHQHLCQEIVEADTELRTLVSAAAPRLLALPGVGIEVAGQILTTAGDNPHRLRSEAAFAHLCGVAPIPASSGRTHRHRLNRGGDRAANNALYIVVLGRLRYDPRTRRYADRRTTEGLSKPEIIRCLKRYVAREIYNQLATHTADDRPTTPPTMSRAA

SEQ ID NO: 369970 - protein, 366 aa, unidentified
MKKISTMGKNGNEILKEPKLTIGLDLGDRSSHYCILDEAGNVMLEHSLPTTPKGIQQVFSRVPRSRIALETGTHSPWVSRQLTQLGHEVIVAHARNVRLIGESSRKDDQLDARTLARLARIDPGLLGPVRHRSAKAQIHLTVIRARAVLVSTRTALVNAARGLTKSYGERLRKCGTGQMNREIAKGLSQELRDVLDPLLQEIESLNERIAEYDRRIEQIAKEAHPEVALLQQVKGVGTLIALTYVLTLDDPHRFRRSRDAGCFLGLRPGRRNSGMSEPQLHISKEGDRYLRTLMVQGAHYILGPFGEDSDLRRWGLQLAERGGRNAKKRAVVAVARKLAVLLHRLWVSGEVYEPLRNNHKMVSAVA

SEQ ID NO: 369971 - protein, 400 aa, unidentified
MLSIGIDVSKGKSTVCGMKPRGEIVYTPFEVQHTREGMSELVSLLRGSGEEVRVVLESTGSYHCPVVAALLENGIFVSVVNSLRMKRFCSQSIRRVKTDQIDAMQIALYGLAYWPELQPTRLPENTYRELQLLARQYYQMTSILIKAKVDFNALCNQVLPGMQELMNDHAGRHKLSDFVLRYRHTAHILKMGETRFRKDYCKWAEKKGYRNRERMAALIFATAQNGIPVLPNAPSTQIVITEAIRVLHTVEASRDAILTQMQALAKTLPEYSLVREMPCIGDTLAPRLIAEIGDVRRFHSKRALIAYAGIDAPPYQSGKFCANNRHISKRGNRYLRKTGYEVMQSYVMHKPANDPIFTFIEKKRSEGKSGKLAMVAGLNKFLRVYYGKVTELYRSLPAIE

SEQ ID NO: 369972 - protein, 367 aa, unidentified
MKKISTVAAKPSKKISRQKLTVGLDLGDRNSWYCVLDESGQIQLEQRVRTNAKALREVFSKMPRSRIALEIGTHSPWISRLLSELGHEVIVANARKVRLIGESRKKDDRLDAQTLARLARIDPELLYPVKHRSAQAQADLMTIRARAGLVRARTALVNTARGLAKSYGERLHGGNVRNMNPEKAEGLSPELQAALEPLLNAIESLSERIVEYNDRIENLAQQRYPQVALLKQIKGVGTLIALTYMLTLEDPHRFGKSRDVGCYLGLQPGRRNSGQSEPQLHISKEGDPYLRTLLVQGAQHILGPFGVDCDLRRWGLKLAERGGRNAKKRAIVATARKLAVLLHHLWVSGEVYEPLHNSQRTTMRAAA

SEQ ID NO: 369973 - protein, 334 aa, unidentified
MIAVGVDTHKHWHVVVALSALGQVLGELVIAASTSGYHQLVVWLDGLDGQVVVGIEGAGSYGAGLCQHLRDAGVTVVEVERPRRRDRRAGKSDSIDALLAAKRVLAGDGVSTPRAAGTHAALRVVLVAYRSCVEERTRLLNQLQGLHVTAPAALRERIGGGNGARLADRLARMRDRPDAQLHEQTMLTILRDLARRARALDAQANHYRRQITALVRELHPTLMDEPGVGPISAAKLLVLDPARFRSEAAFARSNGTAPIPASSGQTIRHRLSRGGDRQANNAIHTIAMHRAINHAESRAYLDRKITAGKTRREAIRALKRHISRRIYRQLTEPT

SEQ ID NO: 369974 - protein, 411 aa, unidentified
MELLVTRCAGLDVAKDEVVACVRVPAGKGGRRQEVRSFPTFTSGLEALADWLAAEGVTQVVMEATGQYWKPVWQVLEERGFQLLLVNARQVKILPGRKTDVADAAWLAELLEHGLLRGSFVPPAAIRELRDLTRYRKRLIQAHTAEVQRVQKTLEDAGIKLDSVAADVVGASGRAMLTALINGERDPGVLAELAKGRLRSKLPQLRQALRGRFGDHHALLVRLALGHLEHLEASIAELDTQVDRVLVPFAPARNRLDTITGVGKRAAETIIAEIGVDMSVFPTAGHLASWAGRCPGNNRTGGKRRSGKPTKGNRWLGEVLTECAWAAARSRDTYLSAQFWRLARRIGKKKAAMAVGHSILVIAWHLLTDDCDYADLGGDYFVRRDADRARQRAVAQLQALGYQVTLEPLAA

SEQ ID NO: 369975 - protein, 322 aa, unidentified
MQGKMTSVGAAQAVYAGIDVCKAWLDVYLHPIGQSFRVPNSKDGCRSLASKLSSAAAGLVVMEATGKLHRLAHRLLSEAGFAVAVVNPSRSRKLAEALGALAKTDKIDARLLAFYGAALGPSPTPVPAKSLAELQELVLARQAAKAEETALKNRIGAAESRVLEGLLEAQLKAHARLLARLEAAIAALVAKNAGLKRRCEILASIKGVGPIAAVTLVACLPELGRVTGRQIAALAGVAPMACESGDMKGLSRIKGGRPHVRTALYMPGLTASRCNPDLKAFFCRLREAGKPPKLALTAVMRKLLVLANTLIREDRHWTPDYA

SEQ ID NO: 369976 - protein, 446 aa, unidentified
MELDIINPNCAGIDIGSKSHFVAVGQALEDVKEFGVYADDLTAVCLHLKEYGITSVAMESTGNYWQNLYVELERHGMEVTLCNGKFTKHAKGKKTDVKDCRWIQKLHALGLLTGSFLPDETTEQLRTYCRQRTNWIDLAAEASHKMQKYLKLLNFRLDVVVKDICGLTGLAIIADICKGNLDPQKLSEHRHGNCRKSQEEIAKALKGNNRPDFLFGLKQEYESYLFFQKKIDACDVQINSFLKTQINTHPDKKKLQTNDKIHKRVNKNSIKGIDLNQASYQYFNGVDLMKIEGLSHSTILTIMSEVGPDGFTKFPSGKQFTSWLRLAPNNKISGGKILSNKIPKGSNRLKIALRHAANAIGNLKDTHLSDFFRRVAYRKGRATAVSATARKLAVILWNMITKGIQYNPPMEYLFLDQKRKLRLVQKIKKNIAKFELRPEDVGFVIN

SEQ ID NO: 369977 - protein, 486 aa, unidentified
MAAQTPYRILAIKKSTLPRDIFKLKNKDVMKQEAKLPVINPFACGIDVGSKSHYVAVGQGSDEVKCFGVYTRDHQAMIEYLRSKSVKTIAMESTGNYWQTLFAALEKAGFEVFLVCGNQTKNVKGRKTDVQDCQWIQWLHSVGMLSNSFIPNEFVAHLRIYSRQRLKYIQIQSRLINQIQRDLRAMNLRLEVALNDVTGKSGRAIIEAILAGERNPVELANLADYRVKKSKEEIAMSLEGNWHVGYLFVLKQHYKAYEQNLELIKECEIATDILVGQYLSTCDIDSSAAPVHKKALKKNKQTPCVDLQKYSFQYFGGVDLFAIEGVNQNTVLTLMAEVGSDIFKFHSSKAFASWLHLCPNEKITGGKVIGNRTKRGANPLSQALKSAANAVGNLKAPSHLTNFFKKIAYKNGRKEAITATAHKLAVIIYNMLTKYQPYQPFKKEANEEKERVKKLNEIDRFIRKYKIDIGEVNFYTLKTKQLGTVV

SEQ ID NO: 369978 - protein, 450 aa, unidentified
MSKSKTKNAKSEVKKISQLTVINPKAAGIDVSDSEMMVAYPISAEQVEIHSFGCFTRDLHLIAEALKKHGVTTVAMESTGVYWVALFLILQEYGFEVYLVNAKHVKNVTGRKDDESDAEWIQKLHRCGLLNASFQPDPMTRTLRSLVRHRKNLVRTCAGYINRMQKALELMNIKLHTIISDIDGKTGLQIIAAILNGERDAEVLAELRDKRIKASREEIIKSLEGHWTTELLFELRQCYQLYEVHRQMIEACDREIEKQLIDQIATINGGEVVDIPQTRRKKTYKNRVAYNLSAYLNKRLGVDVTEVSGISEISILTILSEAGTDMSKWKNEHHFTSWLGLAPNTKISGGKEISSRIPKKKHHAGQAFRMAAMGLNNSKSPLGDYYRRIKAKAGRAKAVVAAARKLAIIYYKMVSNKEAFNPKALEDYQQKYKEKKINQLKKKIALLEAA

SEQ ID NO: 369979 - protein, 412 aa, unidentified
MTVTNQFAVHVGLDWADKKHDVCVQFKNGERVFHVIEHTAEALDVWLTELHQKVKGRIAIALELKKGPVVYALQKYPFITVFPVHALSLARYRQAFSPSGAKDDPQDAELALELMLRYPQKIKAIEPDNADIRLLQQLVEQRRQLVEDKRRFVNRIINTLKQYYPQPLEWFSHRGSLLLCELIIRWPSLQQLKRARRDTIRNFLNAKGGRTMALTEQRVVSIDNAIPLTTDSSVIEANALMATALATQIKVVSEIIKTYDERIETLFDTLPDAGLFKSLPGMGPCMGPRMLAALGDNRDRFNSAEEIQNYAGIAPVTERSGQKSWVHWRWQCAKFVRQTFVEWAAKTVNSSYWAKLYYQGLREKGKSHQSAIRALAFKWIRIIYRCWKTRTQYDEAKYLLALEARHSPLLKP

SEQ ID NO: 369980 - protein, 378 aa, unidentified
MQPNDINSPIILLAIELGASTWLVAARVPGSEKPQLHRIDGGDTVALLTLISSLQAGVARRHGATIKVVCCFEAGRDGFWLQRFLTAQGVDTHVLEPTSILINRRARRAKTDRLDAVGMLRVLAAFLRGDRQSCSMVRVPTPEEEDAKRTHRERESLVQERVRIENRIEALLFTQGIRKRPSLRSWDRDLAVLRTGDGRGLPIHLRSELDRLRRRLVMTLELIREVESERDEAAEATPQDQTCLTIAALGRIRGVGDNFAAVLTREVFYRSFDNRRQIASYVGITPMPYQSGSMDRDRRISRAGNPRARTTMIQLAWLWLRYQPGSELAEWFRNRVGTLAGRTRRIAIVAMARKLLIALWRYVETGVVPAGAEIRAEA

SEQ ID NO: 369981 - protein, 365 aa, unidentified
MIHSNAALTTFTSVQVPTTMGLDLSDRDSQYHVLRGDGHDLELGKVSMTREPLAELFTRWKGCRLVIEAGGHSPWVSRLAAACGMGVVIANPRRVELISKSDRKTDRSDAETLARLGMADVRLLAPITHRREDAQSDLAVRDARNMLVSLRTSAINFVRGKLKSSGYRAAACSPESFHTRVLRDIPPQLAPALQPMLEQIAKLNEGIKSYDEQIELLCEERYPVTQVLQQVPGVGPVVSLSFVLTIDDPKRFEDGRDVGAYLGLVPRKKDSGDSSPQLGISKAGDHEMRRLLVLSANYILGRFGPDSDLRRFGLRIAAQGGKRGKKRARVAVARKLAVLMHHLMITGEQYDPLYLAKKRGELAIA

SEQ ID NO: 369982 - protein, 409 aa, unidentified
MDAILERCAGLDVHQETIVACVMYGPLDKRAKKEIRTFGTTTKELLQLQDWLTEYNCSDVAMESTGVYWKPIWNILEGSFHLWLANPQRIKNVPGRKTDMKDAVWIAQLLRCGLIEASFVPPEDIRDLRDLTRYRRKLLGDATAEKNRVHRILQDANIKLTTYVSDVFGVSGRALLDSLVNGEVLDPQQVEQMVKTSLKKKVPQLIEALNGRIRLHHRKMIQKHLNHLAYLEKEIEVLESDIAQLLSPYQESVDLLVTIPGIQKDAAAGILAEIGCDMSIFPSEGHLASWAGVSPGNNESAGKKKSTRTRSGNKGLKSILCQAAWAAAKAKGSRLSSFYHRLVKRRGPKKANMAVSHLLLRIIYQMLLRNEPYSELGWDYLPQKEKSVDYWVQRIKNLGYSVNLQIETA

SEQ ID NO: 369983 - protein, 345 aa, unidentified
MKIIGCDLHTRYQQIAMLDSDTGEVEERRLEHQNGEARAFYAALTGPVRVGIEATGSTPWFERMLRELGHELWIGDAGRMRAMVVRKQKTDTRDAAHALDLLVTNRFPRIWMPSVEERDLRQLVWHRQKLVGMRSAVKNQLHALAMGQGVCRRKQLFTAKGRQELEGLALGPWASYRRQELLQLLDQLEQSLAKLDQAVEQQAKREPLAVRLMTHPGVGPVTSLAFVLTIGPADRFPGSRQVVSYLGLNPQEHSSGGRQRLGAISKQGNPMLRWLLVEAGHTAARFDPQLRRLYQRLKFRRGAAVAKVATARKLAVRMYWMLRNPTDYAQLVRMQGSPRGSLVGN

SEQ ID NO: 369984 - protein, 365 aa, unidentified
MKTKPTLHDLNISTQNPSQSNATLRPLLKLGLDVDLKNLVVAIQSGNGVIALAQKFSRSRLIQWIKDQVAAGHTVHTVYECCGFGYTLHEQLKTAGAHSIVTTPLRLNLEQRRKNDRMDARQLCVRLSRYLDGQPHELRPIRIPSRAEQQRREVGRQREFWKRQVRRLENHGRALRLEHEHETLPAGWAGPRKWKALSQECTPFVRTQLEPLVQQIRSCKAQLDRLTAQIEARVAQEKIPHGLGALSLSLLDAEVCDWNRFATRKAVGSYTGCCPSEHSSGGVQRFGHIDRHGNAHVRVLLVEAVWRLLLYQPFWHARQKFLQKLKHGASLKKKIAVALARQLAIDLWRWRTGRATAAELGWTFK

SEQ ID NO: 369985 - protein, 407 aa, unidentified
MFAGIDWAADEHAVCVIDDVGRVAERFTISHTADGFERLVRRLARHGEPAELAVAIERPDGRLVDRLLDAGHPVVPVKTTAIKAWREAEVGSGAKSDPGDAQVIADYLRLRRHDLRSLRPFSEETRALRAVVRTRTDLVDARVAAGNQLAAMLTAFWPGAGELFADVWSEIALAFLERYPTPAAAAHLGEGRMAGFLRKHGYSGRRSPAELLARLRTAPAGLPDGPESEARRDAVLATIRVVRALNRSIKDLDRAVVAHLDEHPDAIVFRSLPRAGQVNAAQMLAEWGDCREAYDDPEAIAALSGMAPVTRRSGKHLAVGFRWACNTRFRNAIATFADNSRHASPWAAQVYRAAMGRGADHPHAVRILARAWIRVIYRCWVDQVAYDPGRHGAARRLEEARTAGIAA

SEQ ID NO: 369986 - protein, 330 aa, unidentified
MTMVGGFDVHRKQITFDYVNGDGLVRFGEIGPATRTTLRRWLGEHCPEGDAEFALEGCTGWRYVVEELAAAGVVAHLGDPAEIAVARGPKKRAKTDHADAKLLRTLLLEGRFPESWIPPAHVLEIRALGRLYCTLMDERRAWQQRIHAQLFHQGCPPVKGLLSAAGRDALAHAELSAAGRQYVDTALRRIDELSAEIDPLRTQLVSFARHQRGCQALSRHYGIGWLCAAIIWAEIGDARRFSSSDQLVRFAGLDVTVYSSAGKRSPGHLSRQGSPELRWAAFEAAKCAARRGSPDHAYYHTLAAKRRPQRQEPHPGGGAQNPAPLLSHAA

SEQ ID NO: 369987 - protein, 404 aa, unidentified
MWYVGLDWADTHHDVEVPYLAGKRVGIRRFAHSHAGLHELQAFLLGIAASPDQLACIVETTHGLLISFLLEAGIPVYPVNPKTANQLRKAAGAKTDRIDAHLLAKLGRLDLGELRRLAPDSETVQELKTLTRDQDALIQTQTRLVNQVTACLKEYYPAALQLFAKVQQRSTLVFLQTYPTPQAAQAASLEEITATLRAGKHTNPTKAACKIVEELHRPHLVATELVVRAKSRLLLSLVKQLLVVIQEIAGYDKAIKPLFLSHPDHELWRSLPGEGLHLAPRLLAEWGEDRSRYADAGSRQALAGTAPVPFASGNYAKAHKRFACVKPLRNALHQFAWQSTRQEAWALAYYQRKRAEGKTHSVAVRALANVWVRIIYRMWVNQTSYQTATFEAARLAHAPRPHAA

SEQ ID NO: 369988 - protein, 345 aa, unidentified
MDHFGGLDVSVKETSICIVDDTGRIVKEVKVASEPEALLKVLGNPAYRFKRIGLEAGPLSQWLFSALAEAELPVVCVETRHMQAVLKAQINKTDRNDARGIAQMMRVGLYRPVHVKTLRSQKLRMLLTHRKLLQSKAIAIDNDLRGTLRNFGLKVGMVGATKFEARIKELIEDLPDLAVLVEPLLIVRRTLREQLGILHRRLLAVARDDDVCRRLMTVPGVGPVVALTYRATVDVPARFRRSKSVGAVFGLTCAKYQSGEIDRSGAISRCGDEMMRTLLYEAAQSMLFHSTRWSWLKAWAMQIARHRGMKKAVVALARRLAVIMHRIWVDGTEFRWTREQATAAA

SEQ ID NO: 369989 - protein, 428 aa, unidentified
MLKINPLSTLYVGIDVSSKSNYACALDFYKNKFFNAPFANNQPGADELVKRILECLKDHPDLNTVVAALESTSVYSIHIANYLSSCEELLRFKTYVFVLNPKCTANHKKSFIGMGKTDPIDAYVVADYARGGNIESEPWRGSQFLALKRLTRHRLHLVECMTREKSYLASNLYLKFSELQLLEGDDQPFSNIYGATSSGIITEYLSPEEILESSEEELLSFIAEKSRNRISDISRTAELLKKAARDSYRLDKALYEPLNVSIASSFNCIETFKKEIKVIDTAIEREIKGLCPNAFIILQSIDGIGPVFAGGIVAEIGDIAAFHSSDALAKYAGLYWKHNDSGDFSGEDTPMSKAGNRYLRYYLGEAANSMRKHNAEYGEYYRKKYNEVPKHQHKRALALTSRKFVRLVYGLLAKNQLYSGVSLDTSTE

SEQ ID NO: 369990 - protein, 373 aa, unidentified
MRLTKCDVMTSYRSLEQPAIFYSDILKYAIGGKNMRHIGVDLHTNSFTACYLQEGKPEHIQTFRLKDLDNFTKDLQETDEVAIEATGNSCFFYDAVSPYVKCIVIIAPGQFEVVRRSVNKTDKHDARAIAFFLSKDMLPEARCKNKQCQQLASLLQTRDQLVKSRVSLINKVHGLFNYHGIKIKKEVLTTKVGFERATQKHNWDPLEKVEIEVISYHLEAIRESLKKLEKEIIAFAKQLPGFSNLISIKGIGPISAAVFIVTIGDINDFRRPEKLTAYFGVVPRVSQSNQQCTIGRITKRGSKIARTSLVQCTWIAVRYSPYLKSFYEHIKKKRGSAKAITATARKFLITIFYTLKNNWVFKDFTKFEISTGQ

SEQ ID NO: 369991 - protein, 364 aa, unidentified
MHELTHIGLDVHKDTIAVAVLRSSTTTCDERVIPNTPEAVRKLLARYPDPSALRTCYEAGPTGYDTHRLVTSLGIACDVIAPSLIPKRSGVRVKTDRADARNLARLHRAGELVAVRVPTPAEEAVRDLVRAREEIKADRRIARQRIRSFLLRYGKRYPKPTDRWSFRFEVWMRALRFEEPLSQATFEHLLGAYFVRDSQLAAIDRQIEELALLDPLAEPVARLRAFRGIDTLSAVTIASETCDFRRFGTAASYMAFTGLVPSEHSSGASTRHGGITKTGNQHIRRVLVEAAWAYRYAPAVRGQLKKRLEGQPPEVAAYSWAAQCRLSGTYRKLAAKKGANKAVVAVTRELSGFVWGAMTGNMGT

SEQ ID NO: 369992 - protein, 462 aa, unidentified
MPRRKLKTTTRPRQARLVYRADAPTLQVQNPHAAGIDVHTDNHVVCVGPGQVQTFGAYTADLQAIADYLRQAGVTTVALESTGVYWIPLFEHLQALGFECYLIEPGQLRGCGARPKTDVLDCQWMQRLHTYGLLKASFRPPESVRALRAYHRQRQMVIRHAAAHVQHMQKALEQMNVKLTEVLSDITGVTGLRIIRAILAGERDPHTLAGLASPICAKSRDEFALALQGLWQPEHLFELRQAHDLFQTYQRLVDECDRQIKAELAGQPDRAGDKPGPGPRPRRSRKKNDLRFEATGPLFRALGVDLTEIEGIDVGTALVVLAEIGVDVSRFPTEKHFAAWLGLCPNTARSNRREKRQSPRQGASRLKQALRMCAQSVGRTQTPLGMFYRRIKSRIGGMGACTATAHKLARLVYRLLKYGRADVKQGMDEYAAKMHTNAERILRKKAAALGYELTPRAAGATT

SEQ ID NO: 369993 - protein, 334 aa, unidentified
MLYAAIDIHKHAFQAAVLDADSGQVVEERFSADRESLARWAGPWRGRVVAVAIEATTGWRWVWRELVVMGFEVRLAEPLQARALLGRRRSAKTDRLDARWLARLLAKEMLPESWIPPAEIQQLRDRTRLRKALAEDRRRWGQRLHACLLHEGWPCSRSNLLRPPGLRWAASLKLPEHARLQVDSLLAVMAALEVQLDVVDSELRRFARNDARCQALQSIYGIGPILACHLLAEIGEASRFQRADQITRLAGLDPVVDESGDSRRRGKLAKAGSPHLRWALNEAAVHAHRATAPDLALYRATRERRNTSVARLTVARKIGKRAYHALRELELATT

SEQ ID NO: 369994 - protein, 421 aa, unidentified
MNRLAETSFTAYVGIDWADAKHDICVQPADGEAVEFDCISSRPEAIGDWALELYGRFGGPIAVAVELTRGPIVSALLKYDFLVLYPINPLMLARYREAFTPSRAKDDPTDAELAVDLITRHPERFEALKPQSVKMRTLMTLVEHRYKVLSDQRRTVNRLSHALKCYYPQVLDWFSQRNTVVFCDFVTQWPTLQQVKRARRSRLERFFAAHNMRRSAVIERRINAIKESIPLTEDAAVLEPYSLQVAVLIEQMRVTIASLKRYDDEIAAITEQLPDYDLLFSPLPGAGHILAPRLLAAFGEDRERYQHAGELQMHSGIAPVTERSGKKTWVRWRWQCPTFMRQTFVEWAAQTINKSAWAGAYYRQQRAKGASYEVAVRALAFKWIRILYRCWQDRKPYDELQYLGTLRRKGSPILKYLADPA

SEQ ID NO: 369995 - protein, 324 aa, unidentified
MEVFPLGIDISKAKFDVALLRDDGKLRHKVSPNTEAGFQQLSAWLSKHQVFSLHACMEATGTYAEALALYLYQAGHRVSVVNPAIIKAFAKTELSRTKTDKRDASLIARYCFQHHPPAWAPPPPEISELQSLLRRLESLLDMRQQETNRLEACINASSVKKSVTDHIAYLDDQIVHTQSLIKDHIDQNPLLRQQRDLLSSIPGIGDLTAAKFLAEIIDIKQYSSARQVAAFAGLVPRHHQSGTSVRGKPRMCKVGAGRLRKALYFPAIVATHHNPAIKAMSQRLRERGKCPMQIIGAAMRKLIHIAYGVLKSGKPFDPHYGKTA

SEQ ID NO: 369996 - protein, 343 aa, unidentified
MAIVILGVDLGKNSCSVVGVDETGAVITRRSMRRQTLIGYVAKLPACMIAMEACCGAHYLGRLFETHGHQIRLMSPEYVRPYVKAHKNDDRDAEGIAEAASRPTMRFVDIKTQQQLDVQTLHRVRSRLVAERTNLINQLRAILLDRGVIFPAGRRKFQQGVDGLPIDESCILSPRIRQLTGDLRQEWRELDAKIEALNDEFIALARNDDNMRRLTSIPGIGVLNATALVAAVGDGRTFAKARDLGAWLGLVPRQHTTGGKPRLLGISKRGNTYLRTLLIHGARAALPILSQNDTPLGHWLKAMIERGVHRNAVVVALANKLARIAWAVLCKKGTFERGYPAAV

SEQ ID NO: 369997 - protein, 428 aa, unidentified
MSIPFALDTVLAVGVDPHRESLDAIAIHFPEEIVLDETFDNTRDGHRALWSKARALAEEQSLRLIFGLEDGSNYGYALGRYLVNQGICVKEINPRMTSRQRDFYGEDKTNRLDALATAAIIFRAYDRLPDVTVVQEATEATQELSRYREQLVKEQTANLNRLHRHLANQYPTYKTFFSELNGVTALHFWTTYPTPAHLRATTPQELADFFREKSKHSLGRQAARHKARQIFNVLDDVPISEPGLLVEAQGALIRDLAKRLLQLKRSIEDIEAKLEETVPSTGQQLETFQGIGTVSAAVLIGETRDTARFNHDKDRFAKYNGSAPVTKGTGKHARQVENHWCNRRLKSTLGQVALAARHNEPLSAEYYQACLDRGLNPGEAHKRLMRRLSDIFFAMMRDKTPYDPEIHHRKQQRHKRKGKSVAPAVAGD

SEQ ID NO: 369998 - protein, 357 aa, unidentified
MVEGSWVGLDVHARSVVAGVLDGVSGELRSSRAPVLSDETVAWLLQLPAPVRVAYEAGPTGYGLARACAAAGIACVVAAPSKIPRAPGDRVKTDRRDAERLARLLRLGELVAVRVPEPHEEAARDLVRAREDARGDLMRARHRLSKLLLRHGLVYDASAWTLAHDAWLRRQRFERRPLALAFDESYGAVLQAKTRRDALDRAIAELASEPPFAEVVARLVCLRGVSTLTALALTVELGDWSRFRPQSLGPFLGLTPSEDSTGDRRRQGAITKTGNSHARRLLVEAAWHQRRPLRASVALERRRQGQPAAVRARADASGRRLHARWEALEGRGKRRTIVAVAVARELAGHCWALATMA

SEQ ID NO: 369999 - protein, 363 aa, unidentified
METPFVAVKYGVGLDVGKQTFYACVSAIDQTQRVKIKSAHSFANSPKGITEFIRWTGHHCNGNKLTVSYLMEATGIYYEQLALVLHSRQEHVSVILPQKAKYYIKALGIKTKTDGVDAQGLATMACQQRLDSWKPISEAMYKLRQLTRQHTQLQELKTQLHNQLLALEAGMYHSGEVRKQLMKMIEQIDRQLAECVKLIEKAIAENPDWQRKVKQICQIKGVGILTIANLITETNQFSLFENQRQLVSYSGYDVVENQSGKRVGKTHISKRGNARIRRALHMSALQVVRYQQKPFERLFERVFERTHIKMKGYVAVQRKLLTIIYGLWKTDQAYNPDYKGDEQKAVAPAGATLHQPLMVVLGT

SEQ ID NO: 370000 - protein, 356 aa, unidentified
MEKGITTNHGITIGLDVSDRFSEAYAIDSQGEWLESFRVPTTYDGLVQGLSRYAGARLVLEAGTHSPWISRKLKREGLEVIVANPRRVRLIADSDTKSDRLDAEQLARLGRVDPALLKPIVHRGESVQRDRVLLLARDGLVRARSQLINQVRGFAKSLGTRLPSSSSEAFPKRVRAAISQELFPGFSTMLRMIEQLTAEIREMDREVERLSRERYPETGVLRQISGVGPITALAFVLTLEDPRRFASSRAVGAYLGLRPRQRDSGAQRPQLRITKAGDRFLRRLLVGAAQYILGPFGPETDLRRFGLRLVERGGKGAKKRAVVAVARKLAVVMHRLWLTGEAYEPLGYAERARRAA

SEQ ID NO: 370001 - protein, 355 aa, unidentified
MNDAKYIGLDVHQATISVAILDSAGKLVMEAILETKTATILQFIHGLPGSLHVTFEEGTWAAWLYDLLKPHVTQVLVCDPRKNNLGRVGNKNDRNDARELAELLYRNQIKAVYHGEHGLRTLKELARSYLTITRDLTRVMARLKAIYRSWGIPCAGEQVYAPRHRAEWLAKISEAGVRRRAEFYYQQFDALAALRQEARRELLHESRKHFAVPLLRQIPTIGPIRAALLVALIQTPHRFRTKRQFWAYIGLALKTYTSGEYRFVGNQLKRSKKTLAIRGLNRNHNHDLKNIFKGAATLAAATPGPFQNFYEACLARGVKPSMARLTLARKIASITLLVWKKGVCFDAEYLKQQAA

SEQ ID NO: 370002 - protein, 371 aa, unidentified
MKSIIYIGMDVHKKTYSLCALLKETGEIIGETKIPADVSLIIKFIENAKKSVDSDDVQIKTGYEAGCLGYSLYWQLAAKGIECDILAPSTMHRSAKNKVVKNDRRDAKNIAANLANGTYKSVYVPTDEDVEIKEYIRMMHDFKIELKKVKQHINAFLLRFGHHYPGKSKWIPAHIKWLKELELSDMYREILDEYLSQLEILSEKIERFKYRLEELSQKETYNEKIGQLRCIKGIDTTAAMTIHAETSDFDRFPTANAFTSYCGLTPGEDSSGDSYHRLGITKQGNSMIRTTLVEVAQVLVRGTIGKKGKKVKSKQKDQDVKVIDYADKAVVRLQKKYHRMIFRGVKRNIAITAVARELACFVWGIETGHIS

SEQ ID NO: 370003 - protein, 327 aa, unidentified
MTDATTPSPVVPVFVGVDVAKDKLDLARSDAEAVLTVANDAAGIAHVVRLLRAAGPALSVIVVEATGGLERPLLDALLDAGLPAALVNPGHVRHFAKGTGKLAKTDAIDAKMLAEFAPLAAPRLAQKRSANRAELEALVTCRRQLLHVRTEQANRRGATASKAAVRSIDRVLKALDKEVDALDAQVKKLVESDDDLDSIDRLLRSVPGVGPVLSSTLLAELMELGTIGRRQVGALVGVAPFNCDSGRSKGKRAIRGGRASVRSVLYMATIAAMRVNPVIRRFAERLAGAAKLKKVAIVACMRKLLSILNAMIRERITWDQLKLVKST

SEQ ID NO: 370004 - protein, 338 aa, unidentified
MMNYSGIDLHSNNSVVSVIDETDRVVAEKRLPNDLAKVLAFLAPWRAELAGVVVESTYNWYWLVDGLQAAGFVVHLANTAAIKKYDGLKHSGDETDARYLAHLLRLGILPTGTILPVRHREVRDLARKRMQLVRSRTSHILAVENTTARQSGTRITSNQVKQLDQVAVDQLHLPDDVALAVRANVAVITTLSAQIAIVEKRLQERVAPHADYALLTTVPGIGQTLATVIVLETGTIERFASAGNFASYARCVDSQRTSNGKKKGEGNTRNGNPYLCWAFIEAANFAMHFSAEARQFYERKKARTNSVIARKALAHKLARACFHMLKERKPFDVTRCFA

SEQ ID NO: 370005 - protein, 307 aa, unidentified
MANTVKKITLGIDVAKDKHDIYNWHTGELTTLANERSVIKAWLKAFHGLIQIAIEPTSHYHLVMIEEAHALGYEVYLINPRQLVHYRQAVNVRNKTDPLDAWLLARYLEREGSQLRPFKPQDPRAQRLWQLILRRATVVKSRQQLRQSLTGVRLPIKALLTQFQQLLDRIDRQVIALIRELGWWSDYLYCFSIPGIGLCNASALVAAYHRGAFASSDAFICYLGLDVRIRESGYYKGRRKLTKRGEPELRRLLFCASHPARKHHRFADYYQRQLEKGLSKIAARVILSRKLARIAFTLMRNEVMFIK

SEQ ID NO: 370006 - protein, 337 aa, unidentified
MGLYCGIDLHSNNHVMTVIDEGDRRLYERRLPNDLAITKAALEPFRAQLVGVAVESTFNWYWLVDGLMDAGYEVRLVHTGAVVQYAGLKHTDDQHDAFWLAHLMRLGILPTGYIYPKGKRGLRDLARQRMRLVQHRASHITSVQSQVWRSTAVRLSGHTIKGEGKQPWPELRDADLALSIETGRAAIDALTVQIERLEEVLLKRVGLSPQFQVLKTVTGIGPILALTIALEVGDIKRFPGVGEFASYCRCVDSQRLSNAKKKGEANRKNGNPYLAWAFMEAAHFAIRYLPAARRFYERKCRQRNALLAVKALAHKLARACFYILRDQVPFAPERLFV

SEQ ID NO: 370007 - protein, 347 aa, unidentified
MSKHSVQAGDIAGLLRRFAQLKEKARARTGRDFPIIVIQEAGLDGFWIHRVLQSEGIESHVVDAASILTSRRRRRAKTDRIDGETLVRTLMAYKRGEPRVCSMARAPTPQEEDRRRVCRERRTLVGERVRHVNRIKGLLFAQGVFGYEPLRKGRRERLENLQTGDGRPLPVHLKAQIIRELDRLEILLEQVKAVEAERDALLKPATDEAASPAAMLARLKGIGPQTAAVLWSEGLFRRFDNRRQVAAYAGLAPTPWQSGSIDHEQGVSKAGNPRLRTTMVELAWLWLKNQPTSALSLWFHERVRLGGRMRKTIIVALARKLLIALWRYTTAGVVIEGAVMKAAPTAI

SEQ ID NO: 370008 - protein, 330 aa, unidentified
MERHYIGVDLHKAFFQACAIDQMGRRMWEARFPRTPEGIAAFGARWPSAPSIAVEASGPTWHFVDAVVAGGASVCVVDTRKTKIKAGYAAKTDRLDARRLADALRRESVVSVYIPPPAIRAARDLCRGRQQIVRVRTRLVQTIRALLLRHGSGDPPVTALSSPRGLAWLATVHLPGDSEEVLRRLERLLGPVQREVAEATAAVRHRAAIDPVVSALTATIGIGPIVGLMIRAEVGTIERFANGPALACYAGLVPRVHRSADHAWHGRITRDGSPWLRWALVEAAMHNVKRADQTGRWARRLAVRKGILKARVALARVLCNDVVRIWRTVA

SEQ ID NO: 370009 - protein, 392 aa, unidentified
MVISVGIDVSKDKHDCFIVSSEGEVLADVFTIPNNMDGFHRLLQRIQDCTNSQDKIKVGLEATGHYSYNLLGFLLDNGLTTYVLNPLRTNLYRKSLSLRKTKTDRVDARTIASMLLSDAGLKPYTSTAYHNEELKSLTRYRFDKVKERAKLKSSISRLVCILFPELEKLVPTLHMTSVYSLLEEFPGAKQVAAAHLTRLKTLLETASKGHYKRDMALEIRDAARNSIGSRMPAKSLELQHTIRLTRELDREIDEIEEQIQSIMGELHSPITTIPGLGFRMAAMILAEIGDFTRFDSPDKLLAYAGMSPSTYQSGQLKNCYPHMEKRGSRYLRYALYNATKYVCYWDPAFADYLAKKRAEGKHYNIAISHAAKKLVRLIFAMEKSMQPYCSAS

SEQ ID NO: 370010 - protein, 378 aa, unidentified
MTHAQMIHGDINTSSERLYIAFELSNSKWKLAFGNGMKIRQKTIAARDLGALAEEIAKARQKFKMADDVPIYSCYEAGRDGFWIHRYLESEGFHNLVVDSSSIEVNRRKRRAKSDRIDADKLLNMLIRYLNGEQKLWSVLHVPGVEEEDARRLNREIERLQKERGAHTNRIKSLLALHGIVLQIGPNFLEKLEGATQWDGSPLSPRIKNEIQREYQRYELIREQIKALELERRELRESSKTAGRQMSALEYLKGLGPVSSRILVLEYFSWREFKNVKQVGAGAGLAPTPYNSGDSQKEQGINKSGNPRVRCTMIELSWLWLRWQPQSHLSQWYMKRFGSGGKRMRRVGIVALARKLLIALWKYLETGLVPEGSVLKKI

SEQ ID NO: 370011 - protein, 400 aa, unidentified
MIDVSDIGAFLGLDVGKGEHHATAVTPAGKKAFDKRLSSSEPKLREVFGKLKANHGTVLVVVDQPASIGALPLAVARDMGCPVACLPGLTMRRIADLYPGEAKTHVRDAFVIADAARVMPHTLRSVGLEDETIAELEMIVGFDDDLAGEATRISNRLRGLLTQTHPHLERVLGPRIQHLAVLTLLERFGSPAQIRKAGRRRLVTLIRPKAPRMAERLVDDIFTALDEQTVIVPGTDAAALIVPSLAGSLTAVLDQRKALAGRIEELLEAHPLSKVPTSMPGIGVRTGARILIDVGDGSSFPSAAHLAAYAGLVPATRSSGSSIRGEQPSRRGNKQLKRAFFLSAFAALADPASRTYYDKKIAQGKHHTQALLCLARRRADVLSAMLRDGTFYESRTVTSG

SEQ ID NO: 370012 - protein, 344 aa, unidentified
MTNIQPKETAHEAKPDLFAGIDVGAEELILVIRKNGKPFDPQKFANTPADRDRLVKKLVKLPGIIVCLEATGVYHFDLSLALHDAGVLLMVVNPKASHNFAKVLMKNSKTDTVDANTLAEYAARMDFVAWTRPSDETIALRSFARRINALTGQKAAAKNHLHALNATSETPKAVLKDAKLAISQLEKRIDRLTAEALVLIGKHPELKRILALLIGIKGVGETSAIALMGELLLLPPGLSHREWVKFAGLDPRAFDSGKSVHKKTRISKAGNRHIRAALYFPALSAKQHDKHVKAYFQHLMDNGKTPLQCVCAVMRKLLHAIHGMLKKNEPFDNTRFYAIPECNG

SEQ ID NO: 370013 - protein, 346 aa, unidentified
MVLIGCDFHPSWQQVCWLNLETGETEENKLVHEPGATEKYYRQFAVPSRIGIESTGNCQWFVDLLTSLGHEVWIGDAAKIRASDERKQKHDRRDAALLLKLLVEGRFPRIWTPSSEVKDQRQLLIHRHKLVRVRAQVKNELQHLALNQGVQRKRKLWSEAGQKLLREIPLKPWAGRRREDLLKLMSMLDGQIESLDVAAKKAAEQNENARLLMTQPGVGPITSLAFALTMGDVSRFPRGKHVASYLGLIPGEYSSGGHQRFGPISKQGNRFLRMLLVEAAQVAVRCDPEFRREYLHRCHSKPKGVAKVAAARKLAIRLYWMLRTKKQYPEIVRIESSSRVPLASAS

SEQ ID NO: 370014 - protein, 369 aa, unidentified
MNTVKFIGLDVHKKTITIAIADSGRQNKPRVYGAIANDLDAVDKFCRKMVSTASRLYFVYEAGPCGYGLYRHLTAKGFDCMVAAPSLIPKKSGDRVKTDRRDAAKLAQLHRAGELTAVYVPDPQDEAMRDLSRARHDAVSATQKAKQRLKAFLLRNRIVYSGRCAWSKAYFRWLADIAMAYPAQQVTLQEYIDAVHEGLQRVDRLTDQIRQLVPGWRLAPVVSALQAARGVSVVVAVTLLSELGDLSRFQRPSQLMAHLGLVPSEHSSGESTKRGGITKTGNRHARRVLVEAAWAYRMPARVSGLLLKRQQGVPEQVCRIAWNAQLRLCTRYRRLAARGKLKKKVVTAIARELSAFLWAMAKQVQPTVL

SEQ ID NO: 370015 - protein, 316 aa, unidentified
MSVPETFIGIDVSKRLLEVAVHESNYRFRCANQESDFGQLIAEAVALQPERIVLEATGGLEIPVTAALHAAGLPVVVVNPRQVRNFAKAVGHLAKTDRLDAGVLAHFAAAIKPPLRPIKSSADLELDALLARRCQLVEMLAAEKNRRGAAPTSTVRQEVAAHIEWLEQRLAVIDSQLKAQLQSSSVWRVKDDLLQSVPGIGPVVSLSLLAELPELGTLNRQQAAKLVGVAPLNRDSGEQRGTRHIYGGRARVRSALYMAALTATRCNPVIKEFYQRLIAKHKPFKVAIVACMRKLLTILNVMLKTQTSWRLALKSA

SEQ ID NO: 370016 - protein, 411 aa, unidentified
MLFVGDDWAEDHHDVEIQDETGRKLGARRLPEGAAGIARLHELIAEHLGQDGDPGEVVIAIETDRGLWVQALTGAGYQVYGLNPKQVARFKERYNLSGAKSDAADAHALADMVRTERHQLRAVAADTAAGQAIKVVARAHQTLIWERTRHTLRLRSALLEFFPAALAAFAGLGLTGADTLELLARAPDPAAAAKLTLSQVSAALRRARRRDVTARAAAIKDALRVPQLAQPAPVTAAYAAAVQAAVAVLTVLNEQIAQLEAQVEAHFLQHPDAEVYLSQPGIGTVNGSRVLAEFGDAPGRYASAKARKNYAGSSPVTRASGRSKVVLARFIRNDRLADALQSQALSALSASPGARAYYDKQRARGLGYNSALRQLSNRLVGILHGCLKTGTRYDEATAWPGTARNTEPLAA

SEQ ID NO: 370017 - protein, 329 aa, unidentified
MDISIKEIVCTTIDEHGNIVRKDKFENSFDNLDKYLSNFSHRDSFVMESTGFYEPIYDFMESRGFNVKLANPLKIKLIAESRMKNDNDDSEILAKLLKNNLIPESYVPPKEIREIRRIVRTRMQIKRTMTTYKNRIKIEMKRLHIDYKGDTFTIDGKAFLRSLKSERIDSYLRVLNAMEDEVRNIDKDLMKYQDIEEVKLLQTIPGIGLFSALMIYSEIGDIRRFTSSSKLLSYAGTIPSVRQSSDIIKYGRITRQGSKNLRCIITECLHIHLRFDPSSSVSIFYRRISRGKKRKGKALIAASNKLLKIIYWVLKERRPYVSSSTDQPR

SEQ ID NO: 370018 - protein, 402 aa, unidentified
MVDRWAFPHSETGWVTTLDRLARHGSAAEVPVIIERTSGLIVDRLLAAGHPVVPVHPTAFYAARPRWGASGAKSDPGDSYKLADYLRTDGHRLRRLTPTDPGLHELQALVRLRDDQVRARTAATNQLTAILDTYWPGPKRLFMSLASQIALAFLTDYPTPTSAAHLGEARMAAFCRRHAYRGGKSPAELLSRLRVAPVAPVGLPPATLAAMVTAQVTVLKTLQTVISDVERRIAVRVVAHPRSDLFENLPGVGMINLAQLLAEVGPILDRVDSAEQAATECGAAPVTRSSGQSRGVYFRWAANTRARKAITSFAHNARMQDDWAAALYADARARGKRHPHATRIVARAWLRVIWACWTTQQPYDPSRHRTSTSSYPPGSSAASQHCRRAGAVKMEHPTAERP

SEQ ID NO: 370019 - protein, 312 aa, unidentified
MTETTIGIDISKDTLDAHRLSDGSSHQFTNDSNGHKSLIAWIGKDVVVRVVFEPTGPYHRAFERALARGGLPMVKVNPRQARRFAEATGKLAKTDRLDAILLARMGALLQLETRPAPDETIAELRQFHLAREALVKDRTAAKNRAKSLTITLLRRQNAERLKHIERQIAAIDAELEGRIQADAELSRRLEILISIPGIGRLTAINLLIEMPELGVLEPGQAASLAGLAPIARQSGRWTGHAFIRGGRAGVRQALYMPALVAMRFNPDLKAKYEQFIAAGKPAKVAITAIMRRIIVLANALLRAGRPWMPKTA

SEQ ID NO: 370020 - protein, 355 aa, unidentified
MDNTKYIGMDVHTETISIAVLNSAGKLVMESVIETKALTIIQFVQGLRGDLHVTLEEGTWAAWLYDLLRPHVNQVLVCDPRRNALLKVGNKSDRMDARKLAELLYMDKLNAVYHGEHGVRTLKELSRSYLAISGDLARVMTRLKAVYRSWAIPCAGKQIYAPRCRAEWLGKLSEAGVRRRAEIYYEQLDALRSLRQQVRRELLAESAKHKASKLLCEIPSIGPIRAAQLIAILQTPYRFRGKRQLWAYGGLAIETHSSADHRYVKGQLQPSKRQVSLRGLNRNHNHELKNIFKGAAIIAATKPGPLQEFYANLVAKGMRPEMARLTLARKIAAIILIVWKKGVSFDAEHLKPQTA

SEQ ID NO: 370021 - protein, 342 aa, unidentified
MINITGVVAVLGIDLAKQVFALHGVDRSGRVVLKQVISRSTLMRVIAQLQPCLIGLEACSGAHEWARQFQGHGHTVKLIAPAFVAPYRKSGKNDDNAAEAICEAVSRPSMRFVPVKTREQQALLSLHRVRQGFVEERTAVINRVRGLLAEFGLVFAQRHGGLRAIPTALEGLPLLARRAVDDLLAHLRQINERIAAYDVEFKHLANQDEAAKRIMTIPGVGPITALGMVATLGHARDFKNGRQLAAWLGLTPKQHSSGGKTRLGGVTKRGDDYLRTLLVQGARATMQHASRAEPTRLSRWASNLVERRGYHKANIALAAKNARIVWALLARGGEFEAKAAAA

SEQ ID NO: 370022 - protein, 325 aa, unidentified
MIDTNLTVGIDVSKKTFDIALPNPKGYSNQQYSNDEKGFKQLVRHLPLEVHCIMEATGPYYLRLATYLHLHGIQVSVVNPLVIKRFSQMRLLRAKTDKADAVMIAEYGKTEKPELWQPSEEYIIELQQLQAIVEQYGRQHTALVNQQEAFSQSGKNNKVVVGSIKQSLRHLEKQSVAVENRIKQIINKEHSDLLTRLSSIPGIGEKTAIMLIVITGGFKKFSTSKQLSSYIGICPRVFESGSSVKGKPKICKMGMSRMRRLLYVCTWSAIKWNKTCKQMYERMVSKGKAKMVALIAVANKLLKQAFAIGTNNSFYQKDFQQTPCF

SEQ ID NO: 370023 - protein, 396 aa, unidentified
MMTIGIDIGGRKHALARCREGEAKADREVLWVTEDRAGFDHLDAWLDRQDEPVGLVAMESSGHYWMALASHLQEHGVPVALVNPLAAKYFARSHLGRTKSDPADARSLALMAMREQPVARDPLVGVELRQAARFAMTLVTEQARVCQRLIRLVELGFPELGELFDDPACRTAREVLRVAPTAAAARKRRTSTLADANAGPGHRRLGETKAQHLKAAAVTSIAVSELDDEVAFEVGLLLDQYDLLERQIAEAEEHVASLLDGELARRLQTIPGVGPATCAALIAEIGDIWRFDDVDQLLAYAGVHPAERSSGRKGADPETSWHMSKAGNAHLRAAAYRMAVAGVTHNPVIRAHYERKRAAGKSKMNALGHCMSKALSLVWGVWRNGQDFDPDWGSRP

SEQ ID NO: 370024 - protein, 426 aa, unidentified
MKSTQNEKISQIKISTLVVGIDVAKETHYARAFDFRGIELSKLLKFSNTAEGFQKLEEWMQNTCKQHNKTEIIVGFEPTGHYWFTLGDYLKNQGHKLAIVNPFHVKRTKEVDDNSPTKNDRKDPKTIARLVKDGCYREVYIPEDVYQELREAVSERDRLVQRLNSISNQVTRWLDIHFPEFNTIFKDWRRQAALQVLKNFPTPEKIIAVGALKIEESWKSTMKRTAGLKRAQELVKLAGNSIGRKTGLVAAETSLQNLLNEHDLYVQQYEQLEQLMMELLRQVPNAEKLVDIKGVGLITSATFVGEVGDIRRFQDPRQIQKLAGLNLVENSSGKHKGKSRISRRGRRRLRHGLFMAMITILATNPEFRQLHKKYISRENNPLNKMQSIIALCGKLIRIFYALLRTGSDYSAEKMMGDIELGIKAAA

SEQ ID NO: 370025 - protein, 376 aa, unidentified
MSNSIKYVGLDVSKSKIAVAVAEEGRQEARYWGTIVHTKEAVARLMQQLRTTEEITLNVCYEAGPTGYVLYRWLLEMDIHCTVVAPSLIPKRAGDRVKTDKRDALRLAQLFRAGELTPVYVPTPEDEALRDLVRAREDAKEDLNRHKQRLGKFLLRHQLTNAKGAKPGTFAYEEWLDTLRFSNECHRLTFEEYRQSIWETKERIKRYEQEIEKQAEISTQAPLIQAFQALRGVALITAATLSSEIANIARFPRPTSFMSYCGLVASEFSTGDSRRQGGITKAGNAHLRRVLVEAAWSYRHSPAIRRKLRDRIAGLPSEIQAIAWAAQHRLHKKYKSLMGKGKHKGCVTVAIARELAGFVWAIAKETERLQLQKAAG

SEQ ID NO: 370026 - protein, 345 aa, unidentified
MKIIGCDFHPSFQQIAICDLETGEFQERKLSHGDGQAERFYRELGEPALIGIEATGNSQWFLDLVQRLGHEIRVGDAAKIRASYVRKQKTDKRDAGHILKLLLEKRFPQLWRPSAAMRDQRQLLRHRDKLVEVRTKVKNSLQHLAMNQGMQKKSRLWTRQGMEQFQQLAMPGWAGTRREDLLRLLKELNGQIEPLDQAVKQAAEQHPQAQLLMTQPGVGPVTALAFVLTVGDVARFAGSKQLTSYLGLVPSEQSSGNKRRLGAITKQGNCFLRKLLVEAAQTTVRKDEGFRKEYQHRCHRRPKGVAKVAAARKLAVRLYWMLRSNVSYPEIARVESNPRVALGDV

SEQ ID NO: 370027 - protein, 418 aa, unidentified
MKVVFPTCCGVDVHKSFLVATIIKTPKESLQPSYQKKRFSTFNSDLNRFADWLHENDCLDVCMESTGKYWVPVFNILEKRGIRVIIANPKWVKAVKGNKDDTKDSKWIGDLFRIGLVKSSFIPAKDIRILRELTRYRYKLTSMKSSEKNRFQNAFTVCNVALDSVVSDMFGKSATAITDYLTSDEDFDPQHCVSLLHRSLKKKAEDVLSSIEGYEITLEQKCRIGIVRDHLHYIEKLIERVDICINTMVEKYDGAISLLRTIPGIDRSSAITVISEIGVDMAQFGSSKRLCCWAGLTPGNNESAGKKKSVRISRAGVYLKPVLVQVAHAAVKDKLNPYYALKYERIAKRRGKKRAIVAIARMILTAIYSMLSTGEIWNPVDLFKVDMPEHLKEQQLQKAMKQAVRFLKAQGLTVLDSA

SEQ ID NO: 370028 - protein, 320 aa, unidentified
MNMHIAITAAGVDIGRDYLDFAIAPTGLFKRFPNTDGGVAKLVAAVCKHQVKTLVIEAIGPYSYRLLRALRGVDLSVGVVNPQRIRAWRAAEGKRAKNDRLDAQAIARFAQKMPDVYRPIPDEASLKIKAMSARRRQIVEMIAMEKTRLKQAFDDELLASLRQMSALLEAQRDEVEARLNALLREAGRGDMLALLQTAPGVGPRIAATLAADMPELGHIGRRAAASLAGLAPHIQQSGINRGRASISGGRPCVRTALYMAALVASRSHPRTKAEYKAMLAAGKPPKVAFVAIARKLLVALNQMVAEKKPWTEDQKLQVKD

SEQ ID NO: 370029 - protein, 372 aa, unidentified
MGNDITCYVGLDTSKAKHVGSAVFKDGGEDIEFDVANERHAVRRMVRRLSRKTDGLVSFCYEAGPCGYELQRWIRAEGALCVVVAPAFLPGKAGERVKTNRRDAKKLAKAHRADMLTEVRPPTPDEEAARDLVRGREDLMGDAKRCRQRIKSMLLRRGLSLPGSKGAWTVAYRRWLKSLAWEHEADRVIFCDYLLGLDQAEERMKHLEAKIKEISLQDPWRERVGWLRCLRGVDTLTAMTLLTELHGWERFRTARELMSYLGLVPSENSTGDDARRGRIGGGNRYARRVLIEAAQHYARQPGSGVSLKKRREAQPGWVLAMADGAQLRLHRRFCRLLLTGKHRNKVVAAVARELSGFIWAILQGPAPVEKAA

SEQ ID NO: 370030 - protein, 349 aa, unidentified
MKLIGIDIGKNKHFFCVMDQQTGEIISQPVSFSNDKEGFDFLVQKIKSYPKDSILIGMEDTGHYHFALLKYLLDLQYTVALINPKTTDFNRKMQGGITKNDKLDTINICDVLDTPERKKQYRITKVNSFDLYEQKQLTRHHHNLKEEENVYKNRLQKCIDIVFPEFNKLFNSKYGIVYMNILKMFGSAENIANTDIRTIRKCFEIEGRGNRISLTPERLKECARSSIGISSSAEVIQIKHLTAQIELIEEQLTEIDKKIEEFSIQNNSPILSIPGISHFSGTSILAELGDISNYSKPSQIIKFAGVAPLHYESSQFNAQHTSITKKGSKYLRKTLYQIILPVIKHNPFK

SEQ ID NO: 370031 - protein, 344 aa, unidentified
MGHSMGIDLHRKYFVATIVDEDGEVVRRDRVSTDRLAIAGYLGGLDGERPRKAVMEACYNWSYLYDQLESEFEEVLLAHPLKTKAIAEARIKNDVLDSETLAQLLRAGLIAQAYAPPKETRDVKNLLRYRSSIVGARTAFKNRVHAVLARNHVEHPALRDLSDIFGKKGMATMRSLELYGHDTAILNGLLDIVDEFAGRELELRKQIRAMNREDDITRLLMTIPGIGDITSLLIRYEIVDIDRFLSPEKLCSYAGIVPCTHSSGGKTYHGRITKQGNKWLRWGVIEASHKVTITSSSLAAYHARIKGRRCSSDATVTLARKLLKIVYYVWKERRPYYEGRLAIR

SEQ ID NO: 370032 - protein, 361 aa, unidentified
MSDATTSEGTKVTVGLDLGDRHIQVCVLDEAGEVIEEARLATKPQALRRRFCGAERLRIVLEAGTHSPWVSRLLAELGHEVIVANPRKLRLIYQNDSKSDRVDAEYLARVGRLDPALLAPLSHRGAETQADLALLRSRNALVRARTSLISHARGTTKSLGARLPACSTESFVAKAGACVPDELRLALDPVLVVIAGLCAQIRALDECIEEMARQRYPETALLTQVPGVGTLTATVYVLTLEDPQRFPRSRSVGSYLGLRPRQRDSGSLQPQLRITKAGDEHLRWLLVGAAHYILGPFGPDTDLRRWGLKLAAQGGRSGKKRAAVAVARKLSVLLLRLWVTGEVYEPLRNARLRDELLPSPT

SEQ ID NO: 370033 - protein, 366 aa, unidentified
MKKVSTAAAKQSRNLSEQRLTIGLDLGDRSSWYCVLDEAGNVRLEQRVSTTPKAMREVFGGMPRSRVALETGMHSPWISRLLSELGHEVIVAHARNVRLIGESRRKDDRLDAQTLARLARIDPGLLCPVKHRSAQAQADLTVIRARAGLVRARTALVNTARGLAKSYGERLRGCNVRNMNPEKAEGLSPELRAALQPLLMALESLSGQIAEYNQRIEELAQQSYPQVALLKQIKGVGTLIALTFLLTLEDPHRFRKSRDVGGYLGLQPGRRNSGQSQPQMHISKEGDPYLRTLLVQGAQHILGPFGVDCDLRRWGLKLAERGGRSGKKRAIVATARKLAVLLHRLWVSGEVYEPLHNSQRGLAIAA

SEQ ID NO: 370034 - protein, 344 aa, unidentified
MLLSVTYRYIVGIDVSKKKLNLVLLDRKTTVFQELEVPNTSKGFARIGRWLDSHKAGHAETLLCSEHTGRYGEHLLAWSTRQHWPHAVLSTRTLEKTGPEHHRKSDRYDARQLAIYGSKNSEQVRLSKAPRPVVRQLRRLHAERRDLVAQRARLKQKHGEADYHEANMESIKQLWQEQMDLLSEHIDQLKEQIEQLIREDDALNERYQLMRTAPGIGPVIGTYWLCLFAGQPELNARRISSRFGFAPHAHDSGSSVNKPPRSARYGNATMRSYMHQAARSVSTHKDHYKAYLERMTEEEGKPELLVINNIINKLIRLYCSMWNNHKEYDPKYMEKMKKKYKKSA

SEQ ID NO: 370035 - protein, 464 aa, unidentified
MAKRKKSAKKSLTNIQSLDVLEQINLNAAGLDLGSEEIYACVPPDRDEQSVRVFPTFTVDLHALADWLEACGIDTVAMESTGVYWIPIYNILEARGFEVYLVNARHLKNVSGRKTDILDCQWIQQLHTYGLLRASFRPPGEIRALRELARHRGNLIRYRSAHIQHMQKALEVMNIKLTEVVSDITGVTGLSIIRAIVVGERDPHKLASFRQSGCKRSEEEIAKALQGDYKPEQIFILRQALTQYDFYLHQIQECDNQMEEMYTALPPSDPDSRVSPPPKPKRGKPRKNEAHYDLATTLYQVVGVDLTAIDGLDALTVQTIITEIGLDVDAWPTVKHFTSWLSLAPHNEKSGGKVLRSRTQKTKNKANLAFRLAAQSLSRSQSANGAFYRRMRARHGPAKAITATAHKLARIVYFMVKNKTAYVDPGVAYYEQQHRDRTIRNLKRRAKALGLELVPIPVQATAVS

SEQ ID NO: 370036 - protein, 342 aa, unidentified
MQVTTIGLDIAKNVFQVHGIDANEKVVLRKQLRRSQVIAFFKALPPCLIGMEACATAHYWARELTKLGHEVRLMPAKDVKAYVKRNKNDAADAEAICEAVRRPTMRFVRIKSAEQQGQLMQHRTRDLLMRQRTQLINALRAHLAELGVVAAQGDRGITELLAVVADDRDARLPVDARASVIVLAAQLASLQTMIGSLEKRIQTQHRANEASRRLETIPGIGVIGASAIAATVTDAMEFRSGRDFAAWIGLVPRQDSTGGKHKLGPISKQGDRYLRRILVVGAISVLRRAMQSPDKYPWLTQLLARRPFKVVAVALANKMARTAWALLAHGGTYRAPELAAAA

SEQ ID NO: 370037 - protein, 326 aa, unidentified
MSNILGIDVSKDKLDLVLLNEKGKFHKVISNDPAGFKTLDQWLISRHIDRVHVCLEATGQYGDEVSEYLYGQGHDVSVVNPARIKRYGESKLHRNKTDKADADLIAEFCLKEKPVLWEPLSPDLKHLRALVRRLIDLQANYRQEESRLSSGEKDAWVIQDLSGHAEYLKARIQATEEEIQNFINQTPGLKAKQDLLVSIPGVGKKTSARLLGEIGDISRFENAPQLAAYAGLNPKGFSSGSSVHKKTRISKQGRSELRACLYMPAIVAMTHNPVVRALKERLQKRQLPTMAIVVACMRKLLHIVYGVLKSQMPFDPDYDRQFNYSA

SEQ ID NO: 370038 - protein, 464 aa, unidentified
MTASKKLWRNRKERKEWARRLQSEDPGLEIVHPHAAGIDVGNNAHYVAVRPDRDQEPVRRFECFTADVHGMADWLQSCGVKSVAMQSTGVYWIPLYEILEERGFDVYLVNARHTKNLPGRKSDVQESQWLLKLHTYGLLNNSFQPVSEIRVLRTYWRQRGEHVRGAATCIQRMQKALTQMNVQLANVISDISGLTGQAIVRAIVAGERDTRKLAALSHPRIQASREEIAKSLEGNWRAELVFVLQQEVEMYDTYQKRIIECDQQLQKQLANLTVVTPPGKGQPQKPKSKPPAAKNAPRFDLSSELQRVTGVDLTRIDGIDVMVAETLISEVGLDMSRWKTESHFASWLGLCPDNRITGDRVVARGTRRVVNRAATALRQAANTLIRSRSYLGAQYRRFRTKLGAPKAVTAMAHRLARLVYRMLKYGQAYVDKGTEYYEERFRQQQIQLLRKRAAKLGLQLAEIH

SEQ ID NO: 370039 - protein, 405 aa, unidentified
MDNKLEYVMAIDVAKGKSMYYILSIHGEIILDATEYEHTLSNFKLIDLKIREERIKQNLAVFMESTSTYHYPVMRYFLEQGYEVIVVNPNLVKKSSTTFRKTKTDRLDCIKIAETYFKEEIKSNAAKTNDIYFNLMTANRQFLSLEKALTAIKNRYTRLLDICIPEHELYYTNSSDKYNKKYITLFQHLPHSEYIQHTRIDRISNILNLAFKWNYPKRLTKEAIKLKELSKNSYPGVAKLSNEVENLQQTIKIMKILINEREQANQRLISLGKQTKEYKYINSIPGIGEQSASQVIAELGDISRFKNYKQINAYCGLEPSVYQSGKVFYNGRITKSGNGYARKVLYTTIMGIIKTSRSNYPEHPINIYYTMKKENKSTKESVVASSTKLIRIIFSLCKHERTFIK

SEQ ID NO: 370040 - protein, 368 aa, unidentified
MMHTTTFIGLDVHARKIVAAALDTMTGEVHSATFGYDAAAVADWIRSVDPSAKCVYESGVTGFDLQKRLTGLGVDCAIGAVSKMIKPSADRRRKNDRNDAEFLARMLSVGNIVEVWIPDDECEAARDLVRALDDARDDLRRCKQRLSKFLLRHGLVFDETTPTGRRKGNWTAAHWAWIRSIEFSEKSDNDVLAYYIDVVRQATEDKKRLERLVEAEASKPRWKKRVDSLRCLKGVDIMTAADIVFEAGEFARFGNARAFAAWLGLVPSEHSSGEKIVQGGITKAGNRHLRRVMVEAAWHYNHCSAHSKDLSAGQAPDPAAMRHAAKGVRRLVERRRGLLGRGMQKNKANVATARELACWCWAVGCMAE

SEQ ID NO: 370041 - protein, 354 aa, unidentified
MIIIGVDFHPEFQEIASVNTDTGEYQEKRLVHPEEAEQFYRSLASVGQAVRVGMEASGHGRWFERLLEGLGMELWQGDATVIRAKRGRKQKTDREDARHILKLLLKDDFPRIWIPSWENRDVRQLLWHRHRMVQARTRVMNQLQAVALNEGLGCKKRLWREKGRKQLESFPLAPWASRRRRELLELLDRLNPTIAELSQAVEQEAEKCPEAKRLMTHPGVGALTALAFALIIGNAERFRCGKQVASYLGLVPLEESSGNRRRLGHITKQGSSIVRFLLVEAAQVRVRSLPDWRSKYVHLVMRRGRKTAKVAMARKLAVRLYWMWRKGWDYEQWKKFGSHVGQPGSGDGVPLNIE

SEQ ID NO: 370042 - protein, 407 aa, unidentified
MHYVGIDWADASHQIAIVTSEGDCICEFVVNEDDVGLQMLHKHLNALTPVRINIERPDGLLVDWLIQQGFPVFVTPPRIAARRRPHASKDDRGDARLLAHLLRMRDEDCRILHRHSSRVEDLLQVLRAYEQIQRQQLRTANQLRQVLKQYYPIMLRLFSDIRTKVALAFLHSYPTPRAASKLSMDELSAFLRSQRYTRPGRVSTIHQMLQTTLPQATVWQGSAIHAQAIVPVLQALNQQLQNLKREIQKMFIEHPEAAWWNSLPGAGELTTPRLLALIGDNRSVFPSAEVLQARAGTVPVTRRSGKAKVVRFRWACDKALRKAMMDFARNSLSKSGWAHSYYMDQRQQGHPDPRATRALANRWARIIWTLWQRREIYDEIKHVANRSRKGRAAIHRPDVAAPLHAYA

SEQ ID NO: 370043 - protein, 421 aa, unidentified
MQVLYERCAAVDIGKDVIAVAVRLPAGGPEGRATHKRTFKTFYGVLGEAARWLNSLGVTHVAMEATGIYSMPVYHALIEHGKFEQVLVCNAGHVKNVPGRKTDLADAEWLVHLLECGLLRGSFVPPAEIKAARDVIRYRTKVVQSRTAEVQRLGNVLQDAGIKIDSVASSIATKSGRAMIEALIDGERRPRVLADLAKGKMRVKIPDLTLALEGRFGDHHALMCRLHLDHIGHLDAMIARLDTQTETMMAPFGPERDLLTTIPGIGMLAAAAVLSEIGANVTEYFPDAAHLASWAGLCPGNHESAGRRHSGKRRHGNKHLQHILVEATWAAVRHDGYLKALYHRHVMKWGGYRSPTAKKKAIIVAAHAILVIIWHVLAAGKPYDELGTDFFTRRLDPERETRRLIAKLEALGHQVSLQPAA

SEQ ID NO: 370044 - protein, 310 aa, unidentified
MSKPTIGVDISKDHLDACRWPGGETCRVSNDAAGHRRLIRWIGADVDRVAFEATGGYHAAFERALHRADVPCSKLNPARVRRFAQALGTHAKTDRVDARLIARMGALIEPRLQVPKPALLAELNELELARTALLRERTATLNRARQLTLALLRRQHAARLRQIRRALMEVDAAIAALIASDEDLARKAGILCSIPGVSTVTAAAVLAGMPELGTLEAGTAASLAGLAPVTRESGQWKGKARIGAGRADLRRALYLPALSAARFNPDLKTVYDRLRASGKPAKVALVAVMRKLLILANVLVRDDRTWEARA

SEQ ID NO: 370045 - protein, 395 aa, unidentified
MYNLLVGVDVSKDFFSAAGLDEEGKEHFSGTYEMNSHGFSEFLKALSSHGERLDQMIVAMESTGCYHINLFSFLSSQGIRTVVVNPLLISNFAKLSLRKTKTDKKDALTIARFLLDHHKEISQLSISQDHQDLRDLSRERESLCHLIAATKVEIKRVLRTTFPELESIGNLYTGAMLRFLQQYPSARLVRGAKRVAIAKALRGPYVGDKLTFTAEDIIKAAQSSVAVVSPAKEIIVQGKIATLLHLKERLEELTKLLTDLCKATRVEDLKILQSIKGVGPNTAVPFLAEVGEVKNFTSSKKLIAFAGLDPSIHQSGKFLGASKLSKRGNRHLRRAIYLMTTSVVSQNVFFKAYFLRRKKEGLPPQKALFAVAHKLIRVIFAMLSHRTYFKAEEAI

SEQ ID NO: 370046 - protein, 424 aa, unidentified
MKVTYQTCCGVDVHKSFLVATIVKTTGGIEPSYQKKRFSTFNSSILEFKQWLLDNDCHDVCMESTGKYWVPVFNLLEDEINVVIANPKWVKAVKGNKDDTKDSKWIGDLFRLGLVKGSYIPCKIVRILREYTRYRYKLVSCRSSEKNRYQNTLTVCNVALDSVVSDIFGKSSMSIIDYLLEQSGTSINHEEIASKLLRSLKSKEDAVIESVEGYQMTDAQKYRVRLVRAHMDYITAEINDVDKMIENMIFSNPDFENAVQFLCTIPSVKRDSAITIISEIGTDMSQFGGSKRLCCWAGLTPGSNESAGKKKSVRITRAGVYLKPALVQCAHAAVKSDKSPYYKKKYDSLVKRRGKKRAIIAIARMILTAIYQMLSTGEQWNPSDLYKIDMPVALVEKQKAKAIKQAKKLLQREGILPPDEPLAS

SEQ ID NO: 370047 - protein, 405 aa, unidentified
MIFVGIDWAEHHHDVCLVDATGQVLATGRVADGVQGVSRLHELVAAHAEDPAAVVVGIETDRGLLVGALTAAGYQVYRINPLQASRYRERHVTSGAKSDAGDARVLAEIVRSDRHHHRLIAGDSDQAEAIKILARAHQGLIWARQRHVNGLRNALREFYPAALAALGTDLADPEALAVLGAAPTPERGRALQVTQITGLLGQAGRRRNLASRAAQIQQALTSPQLAAPAPVTLAYRHVVGAAVKVLAELTTQINALEQELTSAFEIHPDAEILRSLPGLGVVGGARVLAEFGDDPTRYPHPTARKTYAGTAPITRASGTRKVVLARLARNKRLSDACYRWAFSALTRSQGARAYYDQLRARGATHHQALRALANRLVGILHGCLRHRSTYDERTAWAHRSQQAAA

SEQ ID NO: 370048 - protein, 371 aa, unidentified
MRFYTRRHRFYCGVDLHARTMHLCVLDHDGNVVCDKNLPCRPEAFLRAVASFRDGLVVGVECMFAWYWLADLCHAQHIDFVLGHALYMKAIHGGKAKNDRIDAGKIARLLRGGTFPLAYAYPKGMRETRDLLRRRTYLVRKRAELMTHLQILNSQYNLAPFAKKLSFAANRAEMDIAQRFADPSVQHSAAADLAVIDALDVQIGTLELYLTRTAKVDDVQTFHRLQTIPGVGKVLALILLYELHDVQRFDHVGQFLSYARLVRCAHESAGKKVGTGGKKIGNAHLRWAFGEAACLFLRSSERAKQWKHKQQAQRGEAKALAILAARLGRAVYHMLRKRQAFDETRFWQGGGRRSVTGSSSLSAPEACHAGD

SEQ ID NO: 370049 - protein, 389 aa, unidentified
MSQPNDLSRSLVALEQDKTLIAVIEMSQSNWLAAAIVPGVERQPLKKVDPDADVLLKLLHRWRGEAVQAGREIKRIAVAYEAGRDGFWLARWLRVHDIEAYVIHPSSVAVSREHRRAKTDRLDTELLMRAFLGWLRGEKRHCSMAAIPTIENEDARRPNRERESLVGERTRLVNRIKATLARFGLRTFKPTLRKAEEKLAGLRTAEQTSLPENTLAELRRSMARLRIVCEHIKQIEHERLRQLEATASVAKGPHAMVRLIARVIGVGIETADMLVNEILSRGLRDYKAVARYAGLTGSPDESGRKRREKGLARAGNARVRRGMIQLAWRFLMFQKDSALAQWYRERTANGRGDTRKTMIVALARKLLVALWRMVTSGEVPEGVLVRQTA

SEQ ID NO: 370050 - protein, 355 aa, unidentified
MNTIYIGVDFHARQQTICYLTTEGGEILAHQLEHQDKTAVRSFYAQFRGRVIVGLEASGYSPWFEQLLTELGCEVWLGNAKEIRRRARCRHKNDRRDAELILDLMLHDEFPRLFVLPWQSREVLRMLRYRQKLIKMRTMAKNSLQALALQSGLAKGSQLFSKAGQQELANAPMSPAMQWQRDQWLQLLEPLNQRILETMLWLKQQSAADQRIARLRTHPGIGLLTALGLVHALEPVSRFRNSRRVVGYAGFDPLEDSSAERIRFGAISKAGPRVLRFLVIEAAHTSVKYDDELKRFYKRLVERRGRPKAKTAVGRKLLIRAYIMLRDEIDYAEFKRRAGVARLVRQNHGTPCLTS

SEQ ID NO: 370051 - protein, 319 aa, unidentified
MISAVIDCCAGIDVGKKFVVVCVLKGPAHGDAQAETRKFGTTNHTLQELCEWLVECGCTHVVMESTGEYWRPVFNVLEEAESLEIVLANSQQVKGLRGHKTDPQDAHWLAHLLRHGMIRPSYIPKLRIRQLRDLTRRRRQLVRNGAQERNRVQKVLEGANVKLGNVLSDVFGLSGQLMLEALLEGKAEPEQIAQLAQRSAKKKIPQIRQALEGHRMNAMQRKLIGFSLDHMAFLEEQITALDQEIAAHLQASELSPAHEILQTIPGVKQEAASSLLAEFGSDMTVFGSGAKCSSWAGVAPGNNESAGRKKRAPALHGNP

SEQ ID NO: 370052 - protein, 347 aa, unidentified
MRFYTHPHQVYCGIDLPARSMYVCLVNRDGEILVHRHLKAAPEPCLKAVAPYREGLVVAVECIFTWYWLADLCAAQGMPFVLGHALSMKAIHGGKAKNDQIDSQKMAALLRGGMLPQAYVYPAERRATRDRLRRRTPLLRTRAELLAHVQNTNSQYNLPEIGKKLAYKANRDGVAERFEEAAVHKTLAVDLGLITYDDELLKDLELSLLKTAKQHEAQTLYLLQTVPGIGKILSLVLLDESHRIARFPRVQDFASYGRLVKCSQESGGKRLGPSGKKIGHAHLQWAVSEAATLFVRNNPQGQKLLSRLEKQPDKGKALSLLAHKLGRAVYCMLKREVAFDLERFLQT

SEQ ID NO: 370053 - protein, 333 aa, unidentified
MVDGTKGSHRKEGTTKMSENNINAAGIDTGKAKLDVALAGGKARLQIDNAPNGWRKLATWLKRHNVDRVGIEASGGYERGVVAYLREKGFTVILFQPLQIRAYAGFRLQRAKNDRIDADLIAVCTAATTTVRQAPDPRFQAFCEHLTLIEQIEEDVARAKTRLEAFRDSRHREILASEIKRLKAWRTAELKRLLDALRRHDDLANRLTLIESVPGIGSRTALALLIRMPELGSLSREEAAALAGLAPYDDDSGKHQGLRHIAGGRERLRRSLFAAALPAAFQWNPSLVALYARLTAAGKSHKVALIACARKLLIFANTVVARGTPWTEHHATV

SEQ ID NO: 370054 - protein, 370 aa, unidentified
MKNNAAIWKGIGDESTQTNALVRALKLGLDVHYRQVTVAMQEDGGRIKAAGKMRHGAFLGWVCTKLEEGWRIDSCYEAGASGYWLHRELVELGVRNLVVAPKAMGGAEAKRQKTDKRDSAQLCDALDRYLRGQDKALSVVAVPTLEQEQNRALIRYHRQIMADRSRPEGRGKGLLCAQGIEVGGRWWDGKGWTELRSDPRLKDWMKEQLEGWRKKILSAEAEQRALREQIKALAPESLPKGVGAYSAAVLNYEMKGWERFSNRRQVASYTGLCPGIHLSDGRGKEGSINRCGNRTVRWTLVEMVWRLMIWQPHYGPVRQLAAGLVKSKRAKKRLVVMAARRLAIDLWRLETGQTTAQKLGLIMQLKSSSK

SEQ ID NO: 370055 - protein, 349 aa, unidentified
MKNKEIIKQVVGVDIGMESFYVCYKIQYADESLVIKGTKSFTNDASGMIDFFTWTERRNKSPEISIIFVMEATGVYYEELAYFLHSKKLKVSVQLAQKIKYFAKSCNLKTKNDKVDSKMIAEFGMEKNLTGTDFWAPPSKNFKMIRDLSREHTSLKQSIVGIKSQLHALNFAHETNKEVVKMKKQQIAFYEKQIISVEKAMRKLVKADSKLSDKIDKIETVKGLAFVSIIKVISEANGFLLFNNIRQLVSYAGLDIIEKESGKFTGRTKISKKGNAQIRAALYMPAMSAMQYNKTLKIFYDRINQGRTIKKQGVIAVMRKLLILIYTLWKKDEEYIEDYQQKITEKKAA

SEQ ID NO: 370056 - protein, 345 aa, unidentified
MDKISVIGLDLAKNVFHVHGVDFEGEVVMRKQLKRSQVSRFFANLEPCLIGMEACGGAHYWSRELTGLGHTVRVMAPIFVKAYLKANKNDRNDAEAICEAVQRPNMRFVQPKTPEQQAVLHLHHARRLLVRQRVALSNHIRGVLSEYGIVLPQGVKVISRCLPALLEDAENDLPMLARHLLAELKAEHDQLIERAECLEGQVKTWHATNRVSQRLASIPGIGVLTASALAAVVGEGQDFRNGRQLAAYLGLVPRQASSGGKARLLGISKRGDGYLRGLLIHGARTVIYHIRRRIQAGQPGGNPWVEQLLQRCHPNEVAVALANKMARIAWVLLVRKETWCPARPV

SEQ ID NO: 370057 - protein, 370 aa, unidentified
MTISNILFIGMDVHKDSIEIAIADGDSHEVRRYGRIGGTHDAMRKALRKLVAQGKSLHFCYEAGPCGYELYRYLVSEDHDCWVVAPSLIPKRPGDKVKTDKRDAVQLARLLRAGELTPVYVPNREDEAIRDLSRAREDTMLVQKSARQRLKSFLLRHDIRYQGKTSWSEAHLRWLADEVRCPSPAQQIVFQEYVNAVTESQQRLHRLDEQIKRFAQAWRLYPAVKALMSMRGVKMIVAITVVSELGDLSRFDNPKQLMSFLGLIPSEYSSGPRQKRGGITKTGNGHVRRILIEAAWCYRYPAKVSREMQLRQEKLPLVIRDIAWRAQLRLTQRYQHMQRKGKPHNVTVVALARELAGFMWAIVNEVKYPR

SEQ ID NO: 370058 - protein, 346 aa, unidentified
MMIVGCDFHPSWQQVAIFEAATGEIVERKLVNGNGEAEEFYRHLPAGSLVGMESCGNSQWFVELMEQLGHEVWIGDAAQIRASYVRRQKTDRRDAGHILKRLLEGRFPRLWRPDGEERDLRQLLIHRHRLVQIRTRVKNGLQHLAMNRGMQKKSKLWSAAGQRAFLQLPLPGWAGCRRQDRLALLGQLDERIKPLDAAVEKAALAHPQARLLMTQPGVGPVTALAFVVTIGDAHRFRRGKQVASYLGLIPREHSSGGKQRLGAISKQGNGFVRLLLVEAAPSVTRLDAGFRKQYQHRCHRKPKGVAKVAAARKLAVRLYWMLRSNIGYPEIVHNESSSRCPVAGAS

SEQ ID NO: 370059 - protein, 410 aa, unidentified
MNAIGIDCAKGKSMITVRQPLDKVIVKPYEILHTVSELERLAESIKSLNGETRVIMENTGVYHLPVADYLHEAGIFVSVVNAKEIHGYDKSPLRKVKTDKADAKKIAEYGLAKWSKLRRYEPGEDTRRQLQIYNRQYCHYSKIQTMHKNNLDALLEQVFPHIKAAFTKTYRADRHEKWVDFIGIFWHCECVSSLSEVKFHEKFKKWCGKHGYHYRKKQSDKIYAISHKYLAVLPKDEFTEKLIKSAVAQINSIAETQATVLRKMKELAKSTPEWEAVIEMSCVGETLAAQLIAEIGDISRFDSKKSLTGFAGVDSATHQSGTVDRQGEPVTKSGSPYIRRTLFLILLNMLRAKPDDVVYQFIMKKKSEKKKFLVYMVAGFTKFLRVYYGKVKEYISKSVAVNSDETLSCQ

SEQ ID NO: 370060 - protein, 351 aa, unidentified
MLIIGCDFHTRYQQIAMAEDSTGELLLERRLDHHNGEAQTFYRGLQGTVRVGIEATGPMHWFERLLSDLGQQLWIGDSAKIRATEVRKQKTDERDARLILDLLLAKRFPRIWVPTPAERDLRQLLWHRHKLVCLRTALSNQLHFLAMSQGLCRKKKLFTRKGRVELTGLALGLWASRRRAELLRLLDQLDAPITELERAVLEEAQRREEAVRLMTHPGVGPITALAFVLIIGPVARFSCSRKLASYLGLNPSEDSSGGRRRLGAISKQGNALLRWLLVEAAQKTARRDPALRQDYQRLKFRRGHAVAKVAIARKLAVRMYWMLRSGADYAQLVRRQGSPQATLVDVSPSTS

SEQ ID NO: 370061 - protein, 401 aa, unidentified
MVSDFMKGRYNLMKIYVGIDIAKLNHFAAAISSDGEIIIEPFKFTNDADGFQLLVSKLESFDKNSLIIGLESTAHYGDNLVRYLVTELYQVCVLNPIKTCQMRKNNIRKTKTDKVDTYVIAKTLMMQDNLRFVSFFDLDMMDLKALGRFRQKTIKQRTRLKIQLTTYVDQVFPEIQYFFKSGLHQHAVYALLKEAPSPKEIASMHMTHLANLLKVNSHGHFTKEQAKELRVLAQKSVGANDSAISIQITQTIQQIELLDSQLEKIEAEMTDIMKFNDSVIMTIPGIGYINGGMILGEIGDIHRFSNPNKLLAFAGLDPSVYQSGNFQAKTTRMSKRGSRVLRYALVNAAWNVVRNNATFKAYYDAKRAEGRSHYNALGHCAGKLVRVIWKMLTDEVEFNLE

SEQ ID NO: 370062 - protein, 400 aa, unidentified
MSVIIGMDPHKRSATIEVIDQGGRVLQVGRFDTDQAGYAAMLAAGRGHGVIGERVWAVEGCNGIGRHIAHRLVHDGERVLDVPTKLSAQVRVFATGNARKTDPVDAHSVALAALYAPAEPGLRPVVVEDDLVVMGMMVDRRDELGRTRTQTVNRLHRLLLELIPGGAKTFLSAPQARALVAKVKPRDLVGKTRRRLVVELIGELEVIDRKIKTAEKELTALVTERGSTLLELTGIGPTGAARLLADVGDIHRFRDKDRFASWNGTAPLDASSGAQQRHRLSRAGNRRINRTLHIMAVVQLRNPTPGREFYDARKAGGTPSLMAMRSLKRRLSNVVYTRMVADQTRREYTLRTGQVTGPGGHRGNDSDSSVTGSQPHTGSSDKPLPGPVTPERRTPVLAMS

SEQ ID NO: 370063 - protein, 341 aa, unidentified
MDHATLVGIDLGKHSFHIHGQDSKGNAVLRKKLGRKQLIEFFATYATCTVVMEACAGSHFMARKLATFGHEVRLISPQFVRPFVKSNKNDFVDAEAICEAASRPAMRFVTPKTESQQTLSVLHRVRESMVRDRTRTINQMHGFLLEFGISLPVGKTGVERLSELLSFHPLPPRLVAILERLHEHYKYLQQQIGEIDREVAQQLADDDVGQRLLSIPGIGPITASVLASEIGDGKQFRCSRDFAASLGLVPRQYSTGGRSKLLGISRRGDKKIRSLLVQCARAYMRCLQKRAGHLADWTRALLMRRHSNVVACALANKLARTAWAIVARHTTFDPRVATASA

SEQ ID NO: 370064 - protein, 340 aa, unidentified
MQIHSVGIDLGKTTFHLVALGAAGKVLVKKKFTQLQLLTFTANMQTSLMGLEACSGAHFLGRALRAQGHDVKLIPAQFVKPFVKSDKNDFIDAEAIAEAVERKNMRFVPIKTDDQLDLQTIHRVRDRLISRRTAVINQLRAFLLERGMVFAKTPAKLRAAMADVLENADADLTPQMRNLIGMLWDEWKLVEQQITALTDDLEKIADADAGCARIRQIPGIGPVVATAIVAAIGSGAAFRKGREFAAWLGIVPRQYSTGGKAKLFGISKRGNVYLRKILIHGARAAVLRIKRDRAPIGAWLDALDSRAPKNVVVAMANKLARIAWAVLSSGNDYRPATVPA

SEQ ID NO: 370065 - protein, 340 aa, unidentified
MTEITRISIDTSKSVFTLHAVNAAGNAVLRRNLRRQDVIPFFEKLPPVEVAIEACGGSHHWARTLQAMGHRVRLIPAQYVKPFVKRAKNDRNDAEAISEAAARPGMTTVAVKSAEMQAQAMLLSVQELLVRSRTQLVNALRGHAAELGLVAPVGDKGFAALRAEVASDASLPAAAAEALHMLGSEIDRVEARLAEIEVRMKAQHKASADSRRLAAIPGVGPVSALNFSLRVDAAQFKSGRHFAAWLGLVPRECSTGGKQRMGGISRAGNERLRQLLVLGATAVVRHTKPGRATASAWLLKLLERKPRKVAAVALANKMARVIWTMLTSGQNYRPATPAAA

SEQ ID NO: 370066 - protein, 337 aa, unidentified
MKYSGIDLHCNNSVVTVVDEEDRVVAEKRLPNELGRILGFLMPWREELVGVVVESTFNWYWLVDGLQAAGFKVHLANTTAIKKYGGLKHSGDEADARYLAHLLRLGILPTGTILPPEQRAVRDLARKRMQLVRSRTAHILAVENITARQYGTRISSNQVKRLTAAAVDQMPLPDEVGLAVKANVAVIGTLSEQIDLLEQRLQEKVGARAEYGLLTSVPGIGQVLATTILLETGPIDRFATAGNFASYARCVDSVHTSNGKKKGEGNTKNGNKYLAWAFVEAANFARRYCAEAKRFYERKKAKTNNVVAIKALAHKLARACFHMLKERQPFDVTRCFA

SEQ ID NO: 370067 - protein, 372 aa, unidentified
MNTSIVYVGMDVHKDTFTLCCYSIESDETLYKQKITADYKLVIKYVNQMRRLYPDPTQFICGYEAGCLGYSLFKQLTTHGLECIILAPTTMGITNTNNVKTDRKDASNIARCLAFHTYSKVYIPTDEDNAIKEYIRMRDDHKVKLKGIKQQILSLVLRHGKKYNATKTYWTETHLKWLKALPFNGVLKETMDEYLISYVYLQQKIERFDSRIEELANNENYRDKVNKLRCFIGIKSHTALAFIVEVGDFKRFSKAQKFSAYLGLVPSEDSSSNKQNRFSITKAGNSHLRRLLIESSQGYTRGSIGFKSKALKSRQAGNDPNIIAYADKANERLRRRFYRLTMKNGIKHNVAKTAIARELSCFIWGMMTESIA

SEQ ID NO: 370068 - protein, 483 aa, unidentified
MKPKPPEKTKKATNHLTPRHWHEMNRKQRRETMRKVQSKDLSLEVVHPDAAGIDIGNESHYVAVPPDRDSQPVRRFGCTTAELREMADWLKQCGIWTVAMQSTGVYWIAVFDILEEAGFEVYLVNARDTKNLPGRKSDVQESQWLMKLHTYGLLRNSFRPSQEIRTLRTYWRQRNDLVQSAGRHIQRMQKALTQMNIQLTNVLSDVSGATGQAIIKAILAGERDPHKLAALRDPRVRASEEQIARYLEGNWQEDLLFVLQQEQEGYEFCQQQIANCDRQLEQNLRQQEDGRPGAHLPEETRKNRLKNKKRRNKPQFDLRAELFRMTGTDLTQIDGIDVMTAMTIISEAGSDMSKWQSEEHFVSWLRLCPDNRISGNKIIGKGRLPTNNRASIALKMAATTLRVSNTYLGAQFRRFRTKLGAPIAIKAMAAKLARLVYRMLRYGMKYVDRGMEFYEAQQRHRQIRYLKWKATQLGLQIVEAPAA

SEQ ID NO: 370069 - protein, 429 aa, unidentified
MKFKQINGQNQRIERISPTQLVVGIDMAKEIHVAEATNFRGIVLAKRHLTFKNAIEGYEKLQRWMDELQQKHRLKTVIIGMEPTGHYWWNLANWLANKGLNVVLVNPATTKRNKENRDNSPSKSDPKDALVIADVVCRGYYYDYTRQANVFQRLRTIMSDREFWVTHSVRLQNRIIRWLDIRFPEYTSVFKDWTCPRSLATLKHFPSPLELESLSVSEVITGWREQHMQRAGGTTGMEKAAQLIAQAKKSVGDTTAMREAKQDLERLLEEYERIVETLEKIEQEVRALLGEIPMAQQLRSVKGLGPIFIGAILSGAGDLKQYAHGRQLLRKAGLNLAESMSGKRKGQIVLSKRGDAKLRKYMYLATITLVGTNPVFRQLHENNVQVKKMKKQQSIFKLLGKLARILIGIVQGGETFSPEKASPFFTEAA

SEQ ID NO: 370070 - protein, 313 aa, unidentified
MQERFIGIDVSKRQLDVAVRPESQNWTAANDEPGIRQLVTSLKELAPKSIIIEASGGQETQVVAALAGANLPVVLVNPRCVRDFAKALGKLAKTDTIDAEVLAHFGEAVQPEQRPFKDEETQALAALVKRRRQLVDMLTEEKNRLHQTPAKIQKNIKANIKSLEQCLKDIEKELKNTIINCPVWEEKNDILRSVPGVGEVLSSTILADLPELGMLNRRQISTLVGVAPLNRDSGKFKGQRRIWGGRSYVRHVLYMATVAAIRCNEIIREFYERLIKVGKKAKVAITACMHKLLIILNSMMKRGTKWQPKEILA

SEQ ID NO: 370071 - protein, 339 aa, unidentified
MREVSTIGLDLAKNVFQVHGVDAAGETVVRRVLRRARVLVYFAQLPPCLIGMEACATAHYWGRELGKLGHRVKLIPPAYAKAYVRRNKNDAADAAAICEAVSRPSMRFVEIKSEAQQAAAGIHKVREMLMKQRTMLINALRGLMAEFGIVVGVGTRHVGELTAILVDPEEDRIPALLKDGLRRMAEMLRGLERQLQGIDKQIVDWGRGNTTCRHLITAPGYGPILSSAMAAIVVNPAVFRSGRDFSASLGLVPRQDSTGGKVKLGPISKRGNGYLRRLLVNGAMSVLNSKRAKQDPWLVKLLANKERKVAAVALANKMARVGWALMMRQEDFRATSTAA

SEQ ID NO: 370072 - protein, 348 aa, unidentified
MTVYIGVDFHARQQTISYLTTEDGEIKRLQLDHTQPAEVRSFYQQFAGQQVVVGFESSGYAAWFEELLEELGCEIWIGHATAIRLFARRRQKNDRRDADLILDLLLRGDFPRIHRYSRESREVLQQLRYRQRLVKMRTMVVNSLLFMASSRGLSLRTQLKSRRGLERLRQVALPEPLTEQRDELCQLLLELKTKIEKVEAWLTAKAESDVRVQRLRTHYGIGPLTGLCLVYTLECVERFANPRKVTAYVGFDPVEDSSGDRRRIGSISKQGSRLLRFLLIEAGQIAIRKDQDLARVYQRVLVRRGHATAKVAVGRRLLVRAFIMLRDEIDYAEFQRRGVAARSSRGTA

SEQ ID NO: 370073 - protein, 387 aa, unidentified
MSQTVAALVPAAVDYERTLVLAIELSNKSWVLAAQVPGLPHAKASRTVNPEAEALLAAIAGYRARAAATGRSIERMIAVYEAGWSGFWLARWLMRHGVEAHVIQPSSVPVDRRMRRAKSDGIDAELLLRTLLAWLRGEPRVCSMVPVPDEADEDARRCVRERSELISERVGLTNRIGAILATLGVSDYNPLLRNRKCRLAELRTGLGEPLPRNAHAKIERLLARLELVLAQIAELERERDAVVETEASDKASKMIQQLTSLRGIGVQSATVLVREAFVRRFANGKALGSYAGLASSPFNSGGIEREQGIGKAGNRRVRTVMVELAWLWTRYQTNAAQVCWFRERVGPTGRRVRKIMVVALARKLLIALWRFVTDGVVPEGAVLKPAA

SEQ ID NO: 370074 - protein, 290 aa, unidentified
MTGRFGNDAAGIAELVAWCGHHAVELVAMEASGGYERLAYLLLSELGQPCAAPLNARNVRHFAEAMGFLEKTDRIDAGVIAYYAVVRKVPPAPPPSPAQQRLKALVSRLSQVTGDLAANKQRRAAASSAEILDSIDEVIALLKRQERRLSGEIASLIDDDPLWARLDAAFRTVKGVASRTVAVLMAQVPEIGLISNKAVTKVIGLAPIANDSGNRQGHRPVRGGRAGPRSILFLIARIAARYDPHLAAFHDRLHKAGKPKMVIRIALARKLLVILNAKARDARNEFANAT

SEQ ID NO: 370075 - protein, 383 aa, unidentified
MLSTQGTDFTPGEVILGVSLELSQKSWKIALQDGRRDKPSIYNVSNEEAAKRLAEAAAVIEAQKVKWQLEGACRVVVMYEAGQDGFWISRALTELGYEALIVDPASIPVERHARRAKTDRLDAIKLVNCLLGYLRGERDRMHVIRVPEESAEGQRHLARDRGELQKEIQQHRDRMRKLLRTVGNWEGVVTDFEARLKKGEVKCHNGKALPPELQQRFLWECERMALVEKQLAALEIALVAQLPEKVQARIGQLQKLKGVGFVGSVRLVLELFWRDFNNRREVGACVGLVPQPYDSGESRVDQGISKQGNRRVRALLIEMAWMWLRYQPESAMSQWFAQRTQGSGPNKRGKRIAIVAGARRLVISLWRYLENGVIPAGAVMKAT

SEQ ID NO: 370076 - protein, 326 aa, unidentified
MAHMVLPILGIDISKAKFDVALLMDSKIKKTRVFENNPTGFKALSLWLIKQDITHLQACMEATGTYGDELATYLYDQGFEVSVVNPAQIKSFSGAQLNRAKTDKADAKLIAQFFASMQPTAWMPPPMHVRELQALVQRLAALLQMERQEQNRFSTAAAVIQPSIKAVLATIKVEIKTVERMISDHIDRHPDLKDQSKLLDSIPGIGSATISRLLAFVGDVHRFDDAKALAAFVGLNPTVHQSGSSVRGKSRLSKKGNATIRKALYMPAVVARRYNPTIKAFAQRLKNAGKSNMLIIGAVMRKLLHIIYGVLKSGKPFDANYAVKNA

SEQ ID NO: 370077 - protein, 422 aa, unidentified
MLAKTQDNEEIIERVAALDIGKAELVCCVRVPDEGRPGRRLQEVESYSTMTRPLLSMADRLACLGVTRVVMEATSDYWKPVFYLLEAAGFETWLVNAKDVKHLPGRPKTDKLDCIWLCKVAARQMIRPSFVPPPPFRRLRDLTRYRADLVAARTAEKNRVEKLLEDAQIKLSVVVSDIFGASGRDMLAALVAGERNAKVLAQLARRTMRKKITVLEEAFTGSFTDHHAFLLGVMLARVDAITGDIAALDTRIEEQIAPFAAAVAKLDEVTGISLAAAHAIIAEIGLDMARFPTAGHLVSWAKYAPGVTESAGKKKGKNSTGHGNTYLARILGNAAAAAGRTDTFLGERYRRIARRRGAKKANVAIGRSILVIIWHLLSDPDARFHDLGSGFYANRIDPDRRRRNHVRQLEALGYTVTLERAA

SEQ ID NO: 370078 - protein, 350 aa, unidentified
MLTIGVDAHKELLVAVGVDQDGTELEGWTGTNGATDWKALAAWARSLSAERVWGIEGSGNYGRGLAQYLVQHQELVYEINPRLTAAVRKRNRQPGKSDRRDALAIARAVRQEGNRLPRVYPDDVTAVVALLTAEREDALAEATRLRNQLHQVLGQLDPDYQQSWPSLRDLASLDELVSDPPAAETELAKAQVAMVCRVASRLALLEGQIAELAGEIEAQATTHYAGLTTLCGVGLLTAGMLAGLLGPAERFASDAHLAAYAGVAPLEASSAGVLRHRLNRTGNRQLNMLVHRIALTQARCSSDAQTYLARRQTEGKSWREAIRALKRFIIRRIWKRWHEIGVAAASGASV

SEQ ID NO: 370079 - protein, 311 aa, unidentified
MASIICGVDVSSETLDGRIEGSGLELSVRRDPEGIAALGRFCVEHGVELVVMEATGGYEKLPFGLLWSAGVPCAIANARSVRRFAEAMGVLEKTDRIDAKVIADYARAKGLVGQVPESRTQERLRALVTRLRQLTALKVSQSNQRRLVVEPEVMAAFDEMLALIARQSRVLEARIAELLGADPLWRALDAAFRQIKGVAGRTVARLMAEMPEIGTVSNKAVAKLAGLAPIARDSGKRQGRRPVRGGRAQVRSILVVVAAVVARHDPDMAAFHQRLIQAGKPRMAVRIAVARKLLVRLNAKARDARALMLPA

SEQ ID NO: 370080 - protein, 388 aa, unidentified
MAQVNDLSRSLASFEQSGTLVVVLEMSQSSWLAAGVVPGVERRPLKKISPDPATLLHLLEKWRDQAVRAGQTVTRAVLAFEAGRDGFWLARWLRARGIETYVVHSTSVAVSREHRRAKTDRLDTEMLIRVFLGWLRGEPRHCKMVAIPTLEEEDAKRPSRERESLVGERTRIINRMKAALIRLGIRGFKPELLKAPERLEAMRTPEGVQIPPNMLDELRRDMARLAWVREQINAIEQARLGRLEQAPARGPDAMVRLLARVVGVGVETADMLVQEVLSRNLRDRRAVARYAGVTGSPDESGAKRRERGLAKAGNARVRRGLMQLAWRFLRFQKESALAQWYYARTEGAAGKRKTTMIVALARKLLIALWRMVTTGEIPAGIALRTVAA

SEQ ID NO: 370081 - protein, 315 aa, unidentified
MSEFKVFVGIDVSKEHLDVHVLPEGQSWHVANDEAGCSQLSERLSGLSGVLVVMEATNVFWRLAATALGSAGLSAAVVNPRQVRDFAKATGQLAKTDAIDAQVLARFAEAIKPPVRALPSEQCQVAAELLARRAQLMGMRVAEKNRLATARAAKVRKDISATIAFLEKRIGALDEEIDGWLKSTPIDQSRANLLKSFAGIGEHTARSLLITLPELGSLNAKQIGALAGLAPFAHDSGKKRGHRQIRGGRSTVRAALYMPAITAIRCNPVIRELYERLINAGKHHYVAITACMRKMLVILNAMLKSNQPWRNPQKV

SEQ ID NO: 370082 - protein, 390 aa, unidentified
MYYCGIDIAKRKHAIAIVNEQGQLTQRPFTIENTRAGFDQLLQVLAALDGPVLIGLEATGHYWWALYDDLTQHAYPVVVLNALQVHAFRKSGLRKVKSDRTDAVWISEFLRFSRPEPAKPTTTVFLQLKDLSRFRYHLSDQIGDSKRKLLSVLDRVFPEYETLFSSVFLTSSRQLLARAASAQELAAFDLRELTDLLQTTSRGRFNHAKAEALQTLAQQSVGVRFLADAAQLEVRCLLAQIDLLEEQRQRIDDALAQLMDQVPQHLTSIPGVGPATGAALLAEIGDIQRFDAPEKLVAYAGIDATVYQTGQFEARRMHMSKRGSPYLRHALWQAASMAILHDPELRAYYDRKRQEGKAHGTALGAICRKLITRVYIVLKEDRPYEVRTKP

SEQ ID NO: 370083 - protein, 403 aa, unidentified
MNNVAGIDVSKGKSMVSVLRPFGEVVAKPFSVCHTGSELKELADYLKSLDGETRVVMEHTGRYYEPVARFLHEEGVFVSAVNPKLIKDYGNNTLRKVKTDKADARKIARYGLDNWAELRQHTPMDTIRMQLKTLNRQQSLYTKTKTMMKNNLIALLDQTYPGVNALFDSPVREDGSQKWVDFATTFWHVDCVRNMSLTAFAERYRKWCKRHGYNFSQSKAVEVHTGAQDLIAMLPKDALTKTMVRQAIDALNAVSASLERLKAEMQALAAQLPEYPVVMAMHGVGDSLGPQLMAELGDVARFTHRNAITAFAGVDPGADQSGTHEAKSTRVSKSGPPELRRALFLVMDCLLKTQPQDDPVYRFMDKKRAEGKPYLVYMTAGANKFLRIYYGRVKEYLASLEGN

SEQ ID NO: 370084 - protein, 369 aa, unidentified
MDQGYVIALDTHCAFTEAVVMTATGRVRQRVRLATKLPDLRQLIEGVRRPRHVVLEEGSLAGWLVRELRGVADVVTACDPRRNAHIAKDGDKDEPIDAEKLGHLYRGGYVRAVHHSDDPARVAFKQLVALYHDRVRNVVRHANRLSAQFRQYGVFVRQADFAEPAPRVELLRQIPSAPLRDGLRLLFEEFDCAQSRRAILRRMVVAEARAFEPVRRFVAVPGVQWIRAATFFAYVDTPWRFATKAALWRYMGIGLERRRSGGKRGRDGRIRPAELRLCVPPPQRICRPLKSMILGAAQTVIQADLAPFAQQYKEQRHAGVSPRNARRSLARRQSATLRGMFKSGSVYHPEWVGVVQAAASWPAEPPAAG

SEQ ID NO: 370085 - protein, 358 aa, unidentified
MDQRIVIGLDPHKDVLVAVAVDGNGRQLDVRDATARPRGYRALLAWARKLGPHRWAVEDVRHVAGGLVRFLLAEDEHVVWVPTHMSADYRRRVRAIGKSDPIDALACARAALAEDLPVAVPETDMREIKMLLDHREDLVGEMVRMCCRLRWHLHDIDPDFAATIPARKLHRPKWNAVVVAFLRERAGGVAVSICLDLAERIKDLGDRAGRLERELEERVKVEAPQLLELPGCGPMSAARIVAETGDPARFKSAAAFAMFTGCAPIPASSGNSQRVRLNRGGNRRMNAALHRIAITQKRMHPLAQDYLATRRAMGNSNTEAIRALKRHLARRVFTLLRGGAPAGQVTSLAAEKAAPIAA

SEQ ID NO: 370086 - protein, 414 aa, unidentified
MKSARNTLPTEPVNGITCGIDWARDDHAVSIVDAKGREVTRKTITHDAAGLRDLLTTLNRAGAREVAIERPDGPVVDTLLEGGITVVVISPNQVKNLRGRYGSAGNKDDRFDAFVLADTLRTDRARLHPLLPDTPGTTALRQTCRARKDLVAHRVAVANQLRAHLKIVFPGAVGLFAAIDSPISLAFLTRFDCQDRADWLSVTRLAAWLANASYSGRTHPRELHRRLTSAPRATNEVTGAEITAAFVATLTALNTQISVLDDSIADQLAAHADAHIFTSLPRSGTLRAARLLSEIGDCRARYPTPEALACLAGVAPSTRQSGKITHVGFRWAADKQLRDAVCDFAGDSRHANPCAADLYNRARARGHDHPHAVRILARAWLYVIWHCWQDHTTYNPANQRALQQLLNRPQPGAA

SEQ ID NO: 370087 - protein, 365 aa, unidentified
MKKIAYVGVDYHLNSVTIAVMIEGKREFHDTIRMKNEDKAIKRYLKKLSKDFEIRSCYEASSCGYVFQRKMKTWGYPCEVIAPSLIPSKRGERRKNDFRDAQNLARLHANGLLSVVHPPSEEEESVRALIRCRMAFKESEKRAKHQINALLLAHDYRWPKTKWTDEHRRWLLGLRLPHEHLQQVLEEHLGHLAYLRSRVQCLDEQIKQLAESDIYAPSVNKLRALKGIDTLSAMVLITEITDFRRFPNPGALMSFLGLIPSENSSGDKQKAGSITKTGNPRCRKMLIEAVQHYTRRPCVIKRMSDALSQVDAHSAQIALKCMKRLPKRYWSLTMKGKIRPVAITAIAREFVGFIWAMMQPVPLGV

SEQ ID NO: 370088 - protein, 420 aa, unidentified
MGLPMEYATIIIKEPIMSHPYTRFCGIDIGKRKHVACLLDAQGQPLIKTLAFNNDAEGFARLRQRLQEAAANTPVLVGMEATGHYWYALHDQLHRWGYAQQVLNPLQSAQQAKNAIRKHKSDPRDAVHIATLVKNGEGKPAIVPDDLAMTCRQLTRLWYALSKQRARIKQLIHARLECVWPEFETYLSKPFCSTGRALLRAAQTPQDLLAINPDTLVELLRKASRNQLGFATAEHIRSSAQTSVGMRRGLEGMRAGIRTLLDQLDATDPVRENLETQIEELCQRLPGYLLTLPGSNPIRAVSIFGETDPISTFKTPDQLVAFAGLDVTVYQTGQFEASRRHISKRGSPYLRNTLWMMAFVAVQNKGTLRRHYLKRRKRGLHHLAAVTAASLKLARIVWRICTDQRDYQPKDPSKTPALYS

SEQ ID NO: 370089 - protein, 344 aa, unidentified
MDHFAGLDVSVKETSICIVDDAGRIVREVKVASEPDALLAVLTNPAYRFKRIGLEAGPLSQWLYSAFAEANLPVICVETRHMRAVLKAQINKTDRNDARGMAQMMRAGLYRPVHVKTLRSQKLRMLLTHRKLLQSKAIAVENDLRGTLRNFGLKVGIVGKLKFEARIKELVESHPDLAVLVEPLLVVRRVLREQTAVLHRRLLAIVRGDEVCRRLMTVPGVGPVVALTFRATVDVPARFTNSKAVGAVLGLTPCKHQSGESERTGAISKCGDEMMRVMLYEAAQILLVRSTRWSWLKAWAMQIARRRGMKKAIVALARRLAVVMHRIWVDGTTFRWTREEAAAA

SEQ ID NO: 370090 - protein, 334 aa, unidentified
MENIALIGIDLGKNSFHIHCQDRRGKAVYRKKFTRPKLIEFLATCPATTIAMEACGGSHFMARKLEELGHSPKLISPQFVRPFVKSNKNDFVDAEAICEAASRPSMRFVQPRTESQQAMRALHRVRESLVQDKVKTTNQMHAFLLEFGISVPRGAAVISRLSTILEDNSLPLYLSQLLLKLQQHYHYLVEQIKDLESQLKRKLDEDEVGQRLLSIPCVGTLTASTISTEIGDGKQYASSRDFAAATELVPRQYSTGGRTTLLGISKRGNKKIRTLLVQCARVFIQKLEHQSGKLADWVRELLCRKSNFVVTCALANKLARIAWALTARQQTYEA

SEQ ID NO: 370091 - protein, 340 aa, unidentified
MEKRYIGIDWHRNRFTCCIRLENERTYLTEWELEDLGKFVKKLRPSDEVAVEITGNTRLFFDAVAEHVARVVVVNTNQFRVIRQSVKKTDPNDARTLALYLSKNMLPEVRMKDKEHGQLASLTQTRDTLVKLRTALKNKINNILSARGLNLAKEALSSEKKLAEVLELPFDEIVRIELRVIVGQIRSLNQSIAELEKTIGEEGSKLDGHKGLSSIKGIGKITGAILLSVIGDVNDFADEGHLASYFGIVPRVSNSNETERSGRIHKRGTKLGRTALVQSALIAANYSPYLKRFYEQVKGRRGAGKAIIALAKKFLGIIYRTLKNKWVFEDFPNFVLAEAS

SEQ ID NO: 370092 - protein, 409 aa, unidentified
MYFVGLDWASREHAVCVIDERGSVTVRFTVEHTAAGMSALVDRLCKVAPVGELRVAIERPTGLVVDTLVDRGFFVVPIHPNAVKATRSRYSAAQGKTDLGDAYLLADLLRTDGHRFRTLVPLSDETKALRGLVRVRDDLVGQRVHVANQLRCLLEQFWPGAVGLFADIDSPIALEFLDRYPTPLAANGLGEKRMAAFLARHAYSGRRTAAELVERLRGAPTSVAGELETDAKSECVRALVAALRPLVERIATLTSAIEHAVDEHPDAKLVTPLFRSDARVCAGTILAELGDDRARFVSADHLAAEAGAVPVTRESGKHRAVTFRWACNMRLRAALATLADTTRKSSPRARAIHQRARDRGCEHPHALRILARAWCRVLWTCWQKRVAYDPAKHRAARQFTLRAVDQEAA

SEQ ID NO: 370093 - protein, 370 aa, unidentified
MKKKVLYVGLDVHKKTTDVAIAPGRSNGKVRSYGKIDSTVDALNKLIKKLEDGDKQLRFVYEAGPCGYQIYRHLDAKGIECSVVAPSLIPRRSGDRIKTDRRDAVNLARLFRAGELTSIYVPTVEDEAMRDLVRCRDDMKRFERKARQRLLSFLLRHGYQYSGKRNWTKGFYNWLATVKFTHSAQQVTLQEYIEAANECSERIKRITEQIQVHVEEWSRARFVKAYQALRGVSLIVSTTVAAEIGDMRRFPTPKQLMAYLGLIPSEHSSGKTVRRGPITKTGNSHVRRALIEAAWTYKMQARVSTILVKRQQGLPKSVCDISWKAQTRLCARYRRLFARGKSKQTVVTAIARELGAFIWAIDKEMQVAHE

SEQ ID NO: 370094 - protein, 319 aa, unidentified
MDTVSTPPTRFIGCDVGKASITVFDTASGQARTIPNRLPDLRRLARGWGPQCLVVCEATGGYEARLLDAMLAAGVPAHRADARKVKAFIRSFGTLGKSDAIDAEALARYGAERHASLPRWQQPDPIREELQALVLTRIDLVRMRQAQMNRLAAPGAAAVAGVLRAVLREIVAQLRAIEGRIAALLRRHPVLARQAGVLNGMRGVGAVTAAALLALMPELGQVSGKQAAALAGVAPHPHESGQRVGYRRTRGGRPEVKRCLFMAALTASQGQGVLAEAYRRLVERGKKPIVAITAVMRKLVVIANAKIRDDARIAAAQVS

SEQ ID NO: 370095 - protein, 339 aa, unidentified
MWYSGIDQHKRDSVITTYGPDGPRVKQARVANTLLVMAQYFAEFPGPHRAVVESTGGWYWLADVLAPLGVELVLAHATRLKAISAAKVKTDQVDSDVLALLLRADLIPVAHMIRPEQRGPRDLMRARLRLVEKCVSAQNSIDRLLEKFNVPTVADLEACYQLQASCHTAQLQLLTEQITTVERALYPHLIPNADVQRLLWIPGLGKVNAFTIYTEIDGITRFPSPGQFFSYSRLVPGADNSGGRTRHRSGSKAGNRYLKLAFSHAGIRAVQYNPEIRAFFKAKARRKPIRIARTLVALELARIVYHVLTTQEDFNGRFKNQPLSHRKHAQWPRRASPPA

SEQ ID NO: 370096 - protein, 349 aa, unidentified
MRYFQPPADARFYGGVDLHARSLYLVILDHDGQVRFGRNLPTAPEPFLRAVQPFRDGLLVACECVHPWYWLADTCRDHAIAFVLGHAWAMRAVHGSKTKCDRQDAEAIARLLKGGNFPPAYAYPRERRGLRDLLRARLRLVRQRAELYGHVHTARRQANLPPVSNDVKYKSKRGAITADIADPFVRRRVETDLALLEPLDTAIRRLEAEIEDAAREHYPAELAVLQSTPGVGAVLSLTILLEIDTIERFGTRQQFCSYARLCGAVQESAGQRVGLGNRKAGNAWLKWAFSEAAVLSAQKEERIGALLQRLSSRLGKAKALSALAHKLGRAFYHMLHTKEVFDVQRFVRH

SEQ ID NO: 370097 - protein, 312 aa, unidentified
MEKLSYGGIDVSKDRLDVVVLPEGWFFSVSNDTAGWAELVARLRPLAVCAIGLEPSGGYERGIIRALLAAGLSVRRINPNKLRQFARARGVLAKNDRLDARLIAEYVAIMPTRVVQRDGAVERLAEVVTMRRQLCDEHVAVENQAAHLQDAMLRRLSKRRLVRLEADIRLLDKRLAEMVATNAAFARLYELLTSMPGVGPVLAFTLIALLPELGKMSRKQIAALVGLAPYDFDSGKLRGHRSIYGGRMPIRNVLYMAALSASRYNPALKTFSNRLAHANKKSKVIIVAVMRKMITTLNAMLRDNAAWQPQSN

SEQ ID NO: 370098 - protein, 339 aa, unidentified
MELYAGLDLHSRNTYIGIMDKTFNRVFKKRVPNHLELILQTLDPFRDQIKGFVVESTYNWYWLVDGLMDAGYSSAHLANPSAIKQYEGLKHSDDQHDAFFLAQLLILGILPQGYIYPKNDRPVRDLARKRMFLVQHKTAHILSLQSLLQRCCAIKVRANDMRHLTVEELEMWLEEEHLVLSAQANLDSINFLKQKIKQLEKAIIQKVKLDKAFEYLLTVPGIGNILAMTIMLEVGDINRFPKVGNFTSYCRCVPSRRLSDGKSKGQGNRKNGNRYLSWAFTEAAQLGRRHNERFRRYYNRKVAQANTSLATKALGNKLARICYYIMRDQVPFREELFCH

SEQ ID NO: 370099 - protein, 346 aa, unidentified
MEHYVGLDISLKLTAICIVDRTGKIQREGVVPSDPEAIAAFIESHSSNVVRVGLEAGATSTWLWTELNKLGLPVICIDARHAKAALKMQINKSDRNDAVGIARIMQCGWYKEVRVKDLDSHAIKALLVSRALLVKIKRDLENQIRGLLKNLGLVIGRAKMNVFAARAAELIQDRPALTAAVVPLLKTREVIECQIADLDRKVLRLARNNTQVRRFMTVPGVGPITALCYLATIDDPARFKKSRSVGAYAGLTTRRYRSGEIDWTGRISKCGDAMLRTYLYEAANVLLTRIAKWSALKSWGMRIAKRSSLRKARVAVARKLAVILHRMWVDGTEFNWSSKEVAAQGA

SEQ ID NO: 370100 - protein, 320 aa, unidentified
MSDRFAVGIDADSQTLVVAYYGTKGSARIANSASAITKWLSALPARSRIGVEATNRYHELVVQAAQKAGHAVFVLNPRDVKHYAKGVACRGKTDAGDAQVIARYIAKEADNLHEHVARSPAQERLHVLLQQRDSLVRNKATLHLSQGTDAADSAIFGRIFSGLKEAIAMLDREIQRLCRSGEQSDLYRRIMTIPGIGPTVAAFVTHHITRWPLASSDAWVACTGLDPRPNESGARIGRRRLSKRGNAGLRQILYMAAMGLTRSKGGKPLYLAIRERGHSSTASFNILARKLARIAWGVFKSGRDFDPAMLKVGQACFQQA

SEQ ID NO: 370101 - protein, 331 aa, unidentified
MEKSDFKYFVGVDISKKSFDIAIIEGDDTASFVFDNSQKGTRAFIRLLKNRGIPLESTLVCLEHTGIYGRLVIARLLEKQVNFCVEMSLRITRSLGIQRGKNDRLDAIRIARYAAKNHNEMELYRPVPEILEKVNALLKVRDQLVRFRADLGKHPNELKTFDPELGKLVQRHIRKTTKCLNDEIRRMEGEIEALVLSDERLNTTVRLATSVTGIGMFTALYFTIFTNFFTRYETPKQLACYCGVVPFEHTSGSSIQKRSRVHHMANKTMKKQLHMCALAAVRHDPELKAYYERKAEEGKNKMLVLNNVRNKLVLRVCAVVKRQRPYQKSVA

SEQ ID NO: 370102 - protein, 346 aa, unidentified
MQDTTIAVDVAKSVFEVAVSQRPGKVSQRQRLSRGQFSRFLQQSEPVTFVMEACGTAHFWGREAQARGHRVVLLPPHAVRPYVLRNKTDGADAKALLEAVRNEAIRPVPVKSVDQHVLGGLHRLRSAWMATRTARLNTLRGLLRELGFAIPVGARQVVPHVYALVSDAESGLPEPLRSVFLEAAREIGELETRIQDVERQLETLASSSEVVVRLRTIPGVGLLTATALAAFVGDVGRFPSGRHFASYLGLTPRESSSGLQRHLGRISKRGDPYLRMLLIHGARSVLLHAKKASAARDRLRTWALERERARGHNKAAVALANRLARIVWAVWRNERAYCTTPEESTD

SEQ ID NO: 370103 - protein, 341 aa, unidentified
MLIIGCDYHPSVQQIAWVDRETGECGELRLTHREAAEQFYRELKTKAMNVRVGIEATGHSRWFERLLVELNYELWVGDPAQIRAKRVRKQRNDRFDAQHILKLMLEDNFPRIWVPTPENRDVRQLVLHRHRLVGMRTRVMNQLQAIAMNEGIRRKRGLWSEKGRTQLESLSLSPWTNRRRQELLELLDRFDPSIEQLSQAIKEEAERVPEVQRLQTHPGVGPVTALAFVLVLGTPTRFKCGKQVASYLGLIPCEESSADSWRLGHISKQGNALLRFLLGQAAQSVAHCEEQWRHQYAHIAMRRNKAIAKVAMARKLAVRLFWMWRRGWDYQQLKKFGSHVG

SEQ ID NO: 370104 - protein, 315 aa, unidentified
MLEERTFIGIDVSKHHLDVAFLPGGETRRHANEPAGIQVLVEQLAVGSVGSIVLEATGGLEQPVVIALAAAGLPVAVINPRHVRAFARATGQLAKTDRIDALTLARFAQLLEPRVSAVPDEKARALSALVARRRQVVQMITAERNRLHACRDAHVRADLEAHLDFLEARRGDLECELLKAVQSDLRLKAHDELLRSVPGVGVQTSLVLIAGLPELGGLPRQRIAALVGVAPLNRDSGQRRGRRSTWGGRSEVRAALYLAALSASRFNPVIRSFYERLLAQGKPKKVALLACAHKLLLILNAMTASGESWRSPAPA

SEQ ID NO: 370105 - protein, 387 aa, unidentified
MSQVSDLSRSLVPFDQNITLTVVVELSEASWLVAGLIPGVDRQPVKKQEPEPVALLRLLERWRVEAVRAGRTIGRIALAFEAGRDGFWLARWLQARDIEVHVVHSTSVAVSREHRRAKTDRLDTAMLMRVFLGWLRGERGHCRMVAIPTLEQEDAKRPSRERESLVGERTRIVNRMKAALARLGIRGFKPTLRKAPQRLDALRTPEEVSIPPNTLDEIRRDMVRLAVVREQIDVIERARLARLEQAPAAGPHAMVRLLARVIGVGLETADMLVQEVLSRNLRDRRAVARYVGLTGSPDESGRRRREKGLAKAGNARVRRGLIQLAWRFLRFQGDSTLAQWYRTRTGGPKGARKTTMIVALARKLLIALWRMVTIGEIPAGVALRQVI

SEQ ID NO: 370106 - protein, 352 aa, unidentified
MEQFIGCDAHKKFSVFVAVNEKGQAGEALRVMHDRQLYREFLARLPPQSAIAVEATGHYSWIVDEMESAGHRPKLANALEAKRRMALTKKTDKLDARGLAILLRNGTLPEVWIPPRELRDQRELLRLRIFLVHLRTRVKNRIHGTLARHNVQVPGADLFGVEARLQLGTRLPELPLHSREAIEQELATLDFLETQIESAELRLEMIMKVSAEADLLKTLPCVGKILSMVLMLEIGSVDRFPTAAHLASYAGLVPHVHSSGGHTRMGQVCGNVNRNLKWAFVETGNLVVINQRGLAGTHVVRLYHRIKRAKNHQKAVVAVARHLAEAAWWVLTKQEVYREPRNARQVLSSTHG

SEQ ID NO: 370107 - protein, 333 aa, unidentified
MGKKLVVGVDVAKGSFAVSLFDGRKFRDFSLSSSPEEFLERVTPHLPENPGEVLFIMEATGVYHLNLALFLRKKGYPVSVVNPFVAKKFAEMLQKRAKTDSVDARTLAQLGFLASPPPFVPKDEKAYLLEEIQKSIESYQKRRTEILNHLEALHHRPFHHPKLQKLYEEELQRIEKALKDLEKEVENLAMEYAPQEYELLQTIPGVGKRLAGAILAILSPLGRFQSSKELSSFLGLSPQIDQSGKRKERAWLSKRGNPLLRKLLYLASLSASRFNRQCRMLYERLVAQGKPKKVALIAVANKLLKQIFAILRSGIPYDPYYLEKKRNVVAQGT

SEQ ID NO: 370108 - protein, 352 aa, unidentified
MAQSTEGREVILGVDTHLDTHVGVVIDGVGKVLGTLVAPVGLHGYQQLLQWSRSFGACTRAGVEGTGTYGAGLARVLRDAGIEVLEVNRADRSKRRLRGKSDPTDAENAARAVLSGEAKAIPKLQSGVVEAMRAITVARRSAVKAKTQAINLRALLVTAPDSIRSKLMKSKPEHCVQACIQMRPLGTTPLLEALTRTLRILAKRWTVLAAELRELDAMLETLARRAAHRLLERFGVGPYTAATLMVVAGDNPERLRNDAALAALCGASPLPASSGKTQRHRLNRRGSREANNALWTIAMVRMRSDARTRAYVVRRTAEGLSSKEIQRCLKRHIVRELYPLILADLSDSVATS

SEQ ID NO: 370109 - protein, 431 aa, unidentified
MKSCTNQRIEEITLKTLVVGVDIAKDLHWARFVDYRGKEVGKAISFKSNRQGFESIIAKIQEIINNKLLRQTFDTVIIGMEPTGHYWKTFANFAAKRGYRVVGVNPYHTKKAKELDDNSQTKSDKKDALTIARLVKDGRYFDPYLPQDVYAELRALTNARISVTKQAVKSKNTITAILDEYFPELYTVWKNPLKSKAARQILRSCPFPSHIVEKSEDELLTEIKKGAKKTVGIKKVRQLTEAALDSVGADYGLEATRLRLNYQLDSLEQAERYLYEIEFSMEDMLLKTGYAEQILSIKGIGIVTAAGFLGEVGDPLRFSNARQISNYAGFNLIEDSSGKNRSGTCISKRGRSQLRSLLYQMAFTMVGHNAEMKELHHYLTTRATNPLKKKQSLIVISKKITTVIYSLLKNQATYDPAKALGAVRREMIAAA

SEQ ID NO: 370110 - protein, 290 aa, unidentified
MTTFVSFVGVDIASASFMACIGTTPWKITVKPVKFENDEDGFVSFLGWLKENNLKAENTVVCMEATGVYSEGLAYFLYASDYTVAVEPPLAIQRKFPVNASKTDELDCQHIAEYASRYQDKLSFWKPRAEVLEQVKVLLTTRQHFSVQLTGHKNALHAINRKKVSSELAKRSHQNMIEQIAKAIKEIDQEIRRLIDSDPTFKQTLLLLLTVPGIGLQLAAHLLILMQETPDPRVLASFIGISPLKHESGTSVHSAPTSRHFGPPTLRKLLYLAACSVRTHKKPFQRYFFR

SEQ ID NO: 370111 - protein, 340 aa, unidentified
MRYVGLDVHKEFCQASILNEKGFEEDNLRFPTTRRGLESFLDRFEDASFVLESTGVWEFVYEIIDEKGFPVKLAHPLKVRAIAEASVKTDKVDARTLAKLLRLDMVPESYIPPKDIRDLRRLTRLRSYLTQTNTGLKNRTHAELLARGIRRPDGLICPFTQKSQEWMRSLDIPGVDVQLNAISAVQGQIELVNEMIRKEFDQREEVRNLTSIPGIGIYSALVIYAEIGDVRRFPDPEHLCSYAGLTPTVSQSASSMHYGGISKEGSKQLRWILTEAVHSHRRFEPSSDLSRFYDKISKKRGKQKAAMAAARKLLHIIYWMMLSGEEFHSHGFNPVVKPAS

SEQ ID NO: 370112 - protein, 407 aa, unidentified
MELMGLYKRVIGLDIHQAQITACALIEESDGNSRIEQRQFGGFKRDRRELADWVASLRPDEVVMESTGIYWKSPYAALEAVGIRAKVVNARHVKNVPGRKTDVGDAHWLASLARAGLLRGSFVPPAKLRELRLIARQRQKLVGQLASEKNRLHKVLTDSGVRLGVVVSDLHGRSARAMVKAIIAGQPPREVLKLASARLKASREEIFDALQGELTASHCFVLDELMRHIEETEARIARFDARLLAELESERNTLALLQTIPGVDLIGAAMLLIEIGTDMDAFGSADRLASWIGICPGNNESAGKRKSGQLRKGNLYVRRLLCEFAHAASRTTSVFKSKFQSLVVRRGYKRAIIAIGHKILRTIFFMLKRREHYRDSTTDYEALSVQRNAPRWIKALTKFGFIKPTCA

SEQ ID NO: 370113 - protein, 412 aa, unidentified
MDVVYERCCGLDVHKKTVVACLIAPGPGGKPKPEVRTFGTMTDDLLRLGDWLAEAGCTHVAMESTGVYWKPVWNLLEGQFELLLVNAQHIKAVPGRKTDVQDSEWIADLLRHGLLRASFVPDRDQRELRELTRYRASLVRERSREINRLQKTLEGANIKLAAIATDILGKSGHDILTALAAGATDAATLADLARGKLRAKLPDLERALIGRFGDHQRFLVARQLGHIDYLDEVIAELSAQITERLRPFEDELDRLDAITGVGRYTAEVIVAEVGTDMARFPTDRHLASWAGLCPGNHQSAGKRQSGKTRKGNRWLRTALIEAASGAGRARDTYLSAQYHRLAARRGKKKAAVAVAHSILVDAYHLLKEGTTFRDLGGDYFDRRDKDALERRLVSRLEALGNKVSIEKLEQVA

SEQ ID NO: 370114 - protein, 453 aa, unidentified
MKKGLEISMEVIYAHAAGVDVGSQSHWVAVDQDPRNVREFGVYTKDHIMLIEYLHAHQITTVAMESTGSYWQTLFNALQSAGFQVILANGSHTKNVSGRKTDLLDCMWIQKLHALGLLSASFILSDYLQTLRTYFNHREYLVDQTTRYINKMEKALRLMNIRLDIAFRDTMGKSGRAIIEAILSGQRDPLYLASIADRRVKKSKTEIADSLQGEWRDELLFELQSCLQFYDAYVAAIRTCDQQIENLLIKYIPKNDLSLQGNDQQEFPIDKKKRNKLSPAFNVRQLAFAHLKTDLFLIPGVSHNTVLAILCTMGNDIFRFKSAKQFASWLRLVPNNKISGGKIISSRTPKSKNTFAICLRQAANSIGNQKNHPLAPFFKRIAYRKGRGAAITATARKLAIIIWNMISKSQPYNVYDYDQTYQKRKNTQLKNIRSRLAKLNLSDDELRNLIQIT

SEQ ID NO: 370115 - protein, 412 aa, unidentified
MSTSTIMFDQVISRGCGIDVHKENVVVTIRGDGIKEECRTFQTFTSDLLSCNGWLKEQKITHIAMESTGVYWKPVFNILEKDFNIILVNARHIKNVPGHKTDRKDSAWITKLLLSGLLKGSFIPTEPIRNIRDLYRYKRKLVQQGVSERNRLQKVLEDANIKLGSVVTDVFGKTGTSIINAVIEGITDPNLLASYARGSLVKKQKLLAQALNGRITVHHRYMLGASMQILADIDLMIAKVDNKMSEYLQDFTQEISLLQTIPGVGMQSAIAILAEIGTDMSVFPSSKHLASWCGISPGNNESAGKNRSGRTTQGDKFLKSALVEIAWHACRNNAKDSFLKRKFISIAMRRGKKKAVVAVGHKVLIAAYYILKNREPYREPDNNVYMIKRKQALIKRHVRRLHELGIIIPSQF

SEQ ID NO: 370116 - protein, 413 aa, unidentified
MLKIVYPVCCGMDVHKSFLVACIATTNSQGVTTYTSKRFSTFTGDLRRCGAWLVEHNCKDVCMESTGKYWIPIYNILEPTCNIVLAHPKYVKAIRGKKTDKKDAKWIADIFKHDLVSGSFIPPADIRQLRDLVRYRWKLTNFTTGEKNRAQNCLTVSNIKLDDVFSDVFGKAATAITTRLLENPAERITDVSAFRTKGMKATDEEVLAAVDGELCVEQAEKLRIIRSHMDSLDICKANLESLILSLAEKYLPQLNLVMTVPGIQSFAAIGIISEIGVDMSVFPTSKHLCSWAGLTPQNNESAGKKKTTRIGRAGAYIKPLLVQCALCAIRKKSNPEIRRRYENLKKRRGHKKAIIAIARMLLTAIYNILKKNEPYNPELYAHINTPPKQRTVSVEEAIFILQRQGYLVTPSAT

SEQ ID NO: 370117 - protein, 409 aa, unidentified
MHYYLGVDWADQTHAVWVVDERGTKITARTVPHTAEGLSEWGRELDEWRAQGIELWAAIERPEGRVVDFLLDHGVVVYPVNPKALDRARDRFRQSGAKSDPFDARVLADFLRTDHASFRALQPSSEAAQELKLLTEDCQRQIRQQTRLVNQLTATLKAYYPRGLEVAELTTALAREFLQAYPTPAAVAGLTERQWQRWARAHRLSEARTQELWAVLQRPQLPVPAHVVRAKARLLQTLLTELGVVVAAVAAYRQAVEDFFAALPAAQWIRTLPIGEHGITAPTLWARLGDAPGRWESFQHLQAHAGAVPVTVKSGKQHVVHFRFACDKMLRHVVDQVAFLSLRSSEWARAYYDQQRARGHSHRETLRALGAKWLKIIFVLWDRQVPYDEQYHLATMARQQLRQRSKKIA

SEQ ID NO: 370118 - protein, 343 aa, unidentified
MQVVRIGLDLAKYVFEVHGVDAHGKAILRKTLRRDAVVRFFANLPQCLVGMEASNGAHYWARVLTELGHQVRLISPQFVTPYVKSNKNDRNDAEAICEAVGRPSMRFVPRKSTDQLAVQAVHRIRRRLVADRVRLVNQVRGLLAEHGIVIARDIAQLRRGLACIVGNADDGLSEMVRALMGELQTELAELDARIATYDRRIREIFRASEQCQRLGKIEGIGPVTATALIAAVGDRSCFKNGRQFAAWLGLVPKQRSSGGRACLFGISKRGDRYLRTLMIHGARAALSRAGGKQDPRSLWLGKMRQRRHPNVAAVALANKNARIVWVMLSGDTAYEPALSVKTA

SEQ ID NO: 370119 - protein, 384 aa, unidentified
MRTVCGLDVHKDSIYLCILNDSGEIFERVFGVLTTQLHEMRDLMLSCGVKEVSMESTSIYWIPIWRVLEGHFTLHLVNPYFIKQLPGRKSDVKDVQWIAECTMKELISGSFVPPEDIQQLRQWDRRIFDLDEEIVRKLSKLDAVLQRCNIRLSNYVSNVDCKSYKKVVALLASGVTDPEVLVAQVHGRIINRHGRDTIKASLTGIVSEAEKDAMRQLTEEIGMAERHKRECQERMTAKCEELFPDELHRLQTIPGIKERAATSLIAEIGTDMDKFPTANHLASWSGLKPRNDESNRKVKSRRITHGNRYLRKTIIECAWAASRTKGCFFSRFSYHLTQVRRKNKMKTLVAVARKLLIAVWHVLNDKVEYKDFQKDPDTPDGNKG

SEQ ID NO: 370120 - protein, 433 aa, unidentified
MEKTIRKTAGIDIGSEKIFISIEGEKEVKNFDTYTGSYKQAIDYMLNNGVTTVAMESTGVYWVVLYEMIQKAGIEGYLVNASHIKHVPGRKSDVQDCQWICQLHKNGLLRASYIPENEIKKLRSYVRQREELIGMGAQHINHMQKALDLMNIKVHNVISQVTGVSGLAMIKAIIAGERNPDTLVEMCNIQIKKHKREEVIKSLEGTYSEENIFLLKQSLECWEFYNKKISDCDKQIEALLTKMSNDKETDIKADIIKPIRHHKPEIEGLHEMLMKITGGKNPTSIIGVTDMTILRVIAEIGPDLSKWENAKHFTAWLGLAPNKNQSGKFNKKSHFKIHTHAGQYFRTIAMSVAKSKRSALSSFYRRVKSRSGPKIAMKALARKIAEMFYNVMTKGMEYIEQGIKKYEEDYKKTFIKKLHKQATLMGYKLVTQG

SEQ ID NO: 370121 - protein, 318 aa, unidentified
MVEAPCYIGADIAKDTIEVAYANAMGASLRIENRRTAISAWLRGVPRGTHLALEATGPYHELLCTLAYRRGLVVYLLNPKRTRHYLQAMSPRAKTDRVDAPLIATFLANERPRLRPWAPLRPEERRAWALLRRRAKLVNARQRLEQSLAGLPSLRSTRAALLAELERALGVLDTQLARLLAQDPAHAHLLHDLQSIVGVGTLTSSALLLALKRGTFATSDAFIAFLGLDLRVRDSGNKRGRRRLTKHGEPELRRLLYTAAMAARRTQAWRPVFDHYLGRGFSSIQTLVIVARRIARVAWSLYKHGGSFNPQRLVQALT

SEQ ID NO: 370122 - protein, 379 aa, unidentified
MRRVCGLDVHKDSIYMCILYENGSKIESVFGVLTPELDKLRDLLVSHHVCEVALESTSIYWIPIWNILSVDFSLKLVNPYFIKQLPGRKSDVKDAEWIATVLQKGLIRGSYVPDRMIQCLRQYERRNHELSKNIVHAEQRMDMILQRCNIRISNYVSCISCKGYQKVVNTIISGESNPKVLVTLIHKRTLNKHGRQVVEDSLNGFVSDTDRDILRQYRDERMQMEQHKSENKAKMQAICEAHYCEELELLQTLPGIKEESAANIIAEIGVDMKMFLTASAIVGWAGLKPRNDQSAGKIKSRKITHENKYLRKILVEAAWSAARTKDSRFMKMYQRLLARGKSKQKALIAVVRKLLVLIWNMLSKKEAFNPEYKRRIQAA

SEQ ID NO: 370123 - protein, 347 aa, unidentified
MNILKQTVGIDVSMDNYEARFGTIDSSQEEKISLPQNFKNNISGFKKLLNWVVKQRTSESLPVIFVMEVTGIYHENLAHFLFENGQQVVIVLPNKIRNYAKSLETKSKTDPIDALVITRFGLERKLEPWTPPEPFISAIKALCREYHSLKEMSTEIKNQIHAKEYAFFNDKTTINRKKKLLNTLGKQLNEILSEIDILIKSKTELNNKINNVATIKGIGTITIITILAETNCFEHVTNINQLISYAGLDVVLNQSGKKKGKTTISKKGNKFIRKALFMPAMSACRSNYKMKEVFARLVSKGKNKKAAIIAIARKLLVLIYTLWKNDSVFIQDYHGTNSIHNNSVLCT

SEQ ID NO: 370124 - protein, 359 aa, unidentified
MKTIVSNKQNWFNKINLTKDDEIYVGIDVHKKSYAVAVWLNDAPAIDFVMPADNQKVLTMLDKLRIALKQVVYEAGPTGYSLARLLQDAKLPIRVIAPSKTPRQSARESKTDKLDCRKLAQYAAKGLLRPIAIPTKQQEADRQLFRLREQLVEKQRRLKLQIKSFLLQHGIPDPAGLKSWSVLAVEKLRTIALPDKLRYCLDIFLDELAFLKTQIKKTEQHLKETFSAPQYAKKIELLRTHPGVGPVVAGQFCTEIFNPKRFKNSTEIGKYVGLSPMVTQSGQSRKDGPVLKTGRPQLRSNLIEASWIWIRNDPHAYKTYLRLLHNTGEKNKAIVAMARRLAIHLWKMLSDNKPFIQAA

SEQ ID NO: 370125 - protein, 415 aa, unidentified
MEVMHPRCAGIDVSKRDAKVCIRVQGSGGRRTSSTVTTWGAMTNQILALRDHLAAQQVTVVVMEATGDYWRPFYYVLEADFEVMLVNARSVKNVPGRKSDVSDAAWLADLGAHGLVRASFVPPEPIRQLRDLTRTRTHITRERTREVQRLEKLLESAGIKLSSVATDITGVSGRLMLQALIDSQGTADPAVVADPAKRRMRSKIPVLTEALNGRFTAHHAFLTRLFLDRIDAHTKDIAALSERIDGLMAPFLPARDLLESIPGFSQIIAEVFIAETGGDMTQFPTPEQLASWAGVSPGSNESAGRVKSTKTRPGNRYLKGALGVAALNQAKSKKTYFSARYRRLASTRGPMKAIVAVEHAMLTAAWNMLTNAEFYRDPGADYYTCQDPAKTRARAVRQLEALGYQVTIQPVQQAG

SEQ ID NO: 370126 - protein, 362 aa, unidentified
MRIIGCDLHTRQQTLAMLDTETGEVVKMTLTHEEDNVREFYSALPRPACVGIEATGSMQWFVNLMEELGIECRVGNPARIRAAEPRKQKHDRRDADLILTLLAENRFPAIWLPSKELQDLRALLRHRHQWVRMRTRVQNALQAIALANGLRRGPSLWSREGQSRIASLPLAPHTAHRRNELQAMYVKLEADIEKLNQRVEEQAGQRPGARLLMTHPGVGSVTALATDVFLGHPKRFADGKTLASYVGIIPREYSSGGRQRLGGLSKQGNALLRFLWGEAGAHAARRDPELQRFYRRKLVQKGLGIARVAVARKLGIRLWIMLRDQIDYNEFCRRGQKQQRSGAACAGMPETRYGATSHRPVD

SEQ ID NO: 370127 - protein, 391 aa, unidentified
MIYVGIDVAKDKHDCFITNSDGEVLFKPFTITNNLDGFNELYQKIESVTEDATKVKVGLEATGHYSYNLLGYLIDKGLAAYVINPLHTNLYRKSLSLRQTKTDKVDARTIASMLMSDVNLKSYSDTSYHNEELKSLTRYRFDKVKERAKLKTSVSRLVCILFPELEKLVPTLHMASVYALLSEFPSAKHVATAHLTRLTNLLSKSSKGRYGKDTAITFRDSARASIGSNMPAKSLELKHTIKLIQELDSEIDEIENEIKIIMDEINSPILSIPGINYRMGAMIIAEIGDFNRFDSPDKILAYAGFSPSTYQSGQLDGAYAHMEKRGSRYLRYALYNATKYVCHWDPTFAAYLAKKRAEGKHYNVAISHAVKKLVRVIYHLEKTKQQYIKAA

SEQ ID NO: 370128 - protein, 320 aa, unidentified
MSSSPQPPLFVGIDVSKDTLDVVLRPTGEYLQVPNTPEGHAQIVAQLTPLPVACIVLEATGGYERACVAALLEAQLPVAIINPKRARDLAKGLGILAKTDKIDGGTLALCAQYCDLPRAKKTPEIQAQLEALVVRRRQLVTLRAMELPRLEQTVHPQTKKDIQQTITFLTKHINIIEKKITALIDSDDHFTGLAQRLRSVPGVGATTAAVLLAELPELGQLNRQEIAALAGVAPFNRDSGKHKGKRVISGGRAGLRHCLYMAALSATRSNDKIRAFYDRLLAAGKPFKVALIACIRKLLTILNQLAKNRTQWNEHVANTV

SEQ ID NO: 370129 - protein, 342 aa, unidentified
MKNTTIAIDLAKSVFEIGISQHPGHVAETHRLSREQIAEFMAKQKAATVVMEACGSAHYWGRRFQSFGHEVRLLPPLYVRPYVQRSKTDRADVKGMLEAYRNSAIRPVPVKSESQQQLTCLHRVRSGWMETRTMRINSARGLLREFGFVFPLGATTVSGRIRELIEDADTPVLMPLRELLDQMVLEIGELETRIKAVENQLKALAAQTPAVALLRTVPGIGLLTSTALAGFVGDVGRFRSGRHFACYLGLTPREYSSGSRRRLGRISKQGDTYLRTLLIHGARSVLLGAKSSSQPDRFRAWGLEVQRRCGHNKAAVAVANKLARIAWAVWKSGKPFESRPQD

SEQ ID NO: 370130 - protein, 392 aa, unidentified
MHVGIDAHKRNCTVCVIEDGAAKESFAFPTTREGVLEFMERIPSQATVVIEASTTGKVISRMLTDKYMIHMVAPPERKRSIKTDRRDAERIVREDMLQYLRRCYIPSAIIEELRFLVTQQIQIGRKIGRVKNQVHALLERNMVHDLDEFSDIFGVQGLKRMVEVELPIQDKVALARYLEELKLLTGQHRQLETELARIAESDRDALLLMSIPGIDFFTALAIKSRIGDIVRFPTKKHLCSYGAVVPGASNSGEYVSRHNRVKHGDMILKYAFTCAVRGAVSAEKNSAVKRFYLKHSKKIGAQKAEVAAARKMACIVWKVLRTQQLYREEDKRLTARKRRILSWKAKRRLSGPGDIRELVTALVGDVAVLERYPVGFNEVFGAGLPKGCGCSW

SEQ ID NO: 370131 - protein, 342 aa, unidentified
MTIVMIGIDLGKNSCSVAALDERGAVVLRRRMRPGSIVEFAAKYAPCTVAMEACCGAHYLGRQLLAQGHAVKLMPPKYVRPYVKAQKNDDRDAEAIAEAATRPTMRFVELKSQEKLDVQSLHRVRSRLVGARTTLINQMRAILLERGITIAQGRRKFEKALDEMLADEASLVPGRLRDLLLDMRAEWSALDRRIDVLDQEFAQLARTDEVARRLTSIPGIGALNATALVAAVGRAEAFEQARDLGAWLGLVPRQHTTGGKPRLLGISKRGNTYLRTLLIHGARAALPSLAKADTALGAWLRGLQARCHPNTVVVALANKLARIAWVLMRRETLFSAQRAATA

SEQ ID NO: 370132 - protein, 388 aa, unidentified
MNTANKHRTTPKQSLSQAIRSDAGPGCKAKTIKLGIDVHAERYVVVRIIDGGTPQPPQRFSPKEFSVWAQKQLSKAEQVFSCYEAGPFGYTLHRQLAEMGITNYVVRPRDWDEYGQQVKTDKRDAKQLALNLDRYVGGNRDAFCVVRVPTEAEEQKRSVSRQRESLQKEKQRLAAQGRSHALYYGHRLEPGEWWRVAAWEKLACQLPPIVVNLLEPLRRLIAALETELKARTKEVEAAAPPALPVGLGKLTGQILEREVADWSRFKNRRQVASYTGMCPREDSSAERRFQGSINKHGNRRLRPVLVECLWRLCAFQPEYRVVKKWRPVLLDPKTSKPRRKQIIVAMARSFAVDWWRVRTGRCKAEALGLKLQPLVAAKTLTKQPGKTT

SEQ ID NO: 370133 - protein, 340 aa, unidentified
MYPFYLGIDLHLKRTYAVLIDSTGKVIEERRIQNLDIEEYLKGNVPRETYAVLEATRNWAFMYDLLDSHVERVELAHPKEVRAIASAAVKTDRIDAKVLANLARLNFLPTSYAAPQEIRDLRLYMRHRECLVRQRTQAKNRIHAVLASYNLVSPLKDLFGVQGRAFLDQVLETMRPTAQRVVADNLTLADHLSEQIEALEADLELSDERKRTIQLLKTMPGVGLVTAMTILAEIGDIQRFNSPKALCHWAGLTPRVRKSDQVVRHGHITKQGSPFLRAAMTRAAASASRSSPKWYRVHENLLPRCGKKGAKVAVARRLLTVLYFMLKRQQPYQENYPSDR

SEQ ID NO: 370134 - protein, 315 aa, unidentified
MMAEPAEIQCVLGLDVSRNTVTLCDGRTRHTVTIANDADALRTALLPYQGTATLAVCEATGGHEDTLLGVLLELAIPAHRADPAKVKAYIKSFGKRAKNDPIDARWLSRYGRDRAATLPRWQSADPTQQKLELLVARRLDLVAMRVQEQNRLKAPRSRLIADNIRDHLAELERHIEALNAEIGALIGESRDLALRAEQLRSVPGVGPVLAPLLLAVIPELGTLNRRQVASLAGVAPHPKDSGKASWHRSTTGGRRQIRPALFIAALAACRGDNPLAAAYKALLKAAKPKRVALSHHAQDHHYRKRPCQGRRATPK

SEQ ID NO: 370135 - protein, 366 aa, unidentified
MKKISTMQVFGNEVFKEQKLTIGLDLGDRWSFYCILDEAGKIILEQKLPTTPEAMKQTFGKIPRSLIAMETGTHSPWVSRLLTELGHEVLVAHAQKVELITKSNRKDDRHDARTLARLARIDPELLGPVRHRSAKAQIHLTVIRARAELVSARTALVNAARGLVKSFGQRLPKCGTQQVSGKLAEGLSAELREVLEPLLREVESLNERIQEYDERMEKIAKEVYPEASLLKQVKGVGTQIALTYVLTIEDPYRFPKSRAVGCFLGLRPGRRNSGESEPQKKISKEGDRYLRTMMVQGAHYILGPFGEDSDLRRWGMKLAERGGKNAKKRAVVAVARKLAVLLHRLWVSGEVYEPLRNSQKAMRAVA

SEQ ID NO: 370136 - protein, 408 aa, unidentified
MNTLYVGIDISSKSNVVYMMLPNGDKHSNFSVASSHEGSIQLVKRIYSALTSHSLDTVLIGLEATSVYGDNLVYFLREDATLAPFNSRIHVINPKQVKRFHDAYNDLPKNDYVDSFVIADCLRFGRINKEVYSGDYRYQALRNLTRARFFTVQNLIKEKQRFMNVLFKKYSTMTQEKVFSNTFSATALAVYEEFDSAEALANMDLHELTDFIIEKGKNRFQNPDAVAKAIQKAARSSYRLPKTVNDSVNQVFSISITSMKALESQIKEFDKAIKAQTELLPNVLISIPGICPVYSAGIMAEIGDINRFDNQAALAKYAGLAWKQYQSGGFEAEVTRLIPSGNRFLKYYLCEAAFSLVRCDKEYSDFYHLKYKEVNRCQHKRALALTARKFVRLVFRLLKDNRLYCPAK

SEQ ID NO: 370137 - protein, 388 aa, unidentified
MARKRILSTLDTSIAYEAVGLDLAKTDVTLAAFDSDHKEPYFIDRIPYDKLYELLATNMAPTLVAMEPCSGAHQIAEQIQALGHEVMMISGRHVQAWVKDHCNGQKTDLNDAFAILNLAYDRWLTPIRGKTREECRLLALQASYRQLKGQRTKTMVHVKATLHAWGFPIRTGSFNQKALRELIDANREAFGGEMAETLHLMIDRVRGLDHDIATVLKLLTEATKRDPRASLLRSIPGFGVLTTSRWCAVMGDIARFDSPKQTMAFIGLVPNNRITGHHTETSSGREARGQGRMSKRGDKMLRSLCILGAASLCMLVRKDRLQDCPFIASIKERLASPRPWFKVLVYVAAKLVRIATALLKYGEKFSFEKAGISKAVLKQWELEQAKAA

SEQ ID NO: 370138 - protein, 411 aa, unidentified
MDKIYDKCCGIDVHKKLIVACFRCGRKQEVREFGATTRELLTLADWLKEGGCEMVAMESTASYWKPLFNILESSDLNAMVVNARHMKAVPGRKTDVKDAEWIADLLQHGLLQPSYIPNKDQRELRELVRYRKSLVGERTRELNRLQKMLEGANIKLSGTVSDINGKSARSILEYLLTGESFDEAKYNEMYEQKVIAHNLKATKEQIIDDLNGVISPLQRRMMKELLAHLDELNEHIKNLDDEIDNFMKPEEKQASQAIQDVTGIGNTSAQAIISVIGTDMGRFPTDKHISSWAGLCPGDNESAKKRKSGKTRKGNALLRTTLITCAHAAVKNKKSYFYAQFMRISAHRGPKRAYVAVAHSMLIAIYHILKDGVVFKDLGAEYYNQFNKERKINAYLKKLKALGWDVPVVAA

SEQ ID NO: 370139 - protein, 355 aa, unidentified
MYGLKHQKEKRSMEHFAGLDVSVKETSVCIVDDTGKIVREVKLASEPDALLAELRNPAYRFKRIGLEAGPLSQWLLSALAEAELPVICVETRHMRAVLKAQINKTDRNDARGIAQMMRVGLYRPVHVKTLRSQKLRMLLTHRKLLQSKAIAIENDLRATLRNFGLKVGIAGKVKFEARIKELVENQPDLAVLVEPLLIVRRVLREQIGILHRRLLAVVRDDEVCRRLMTVPGVGPVVALTYRATVDVPARFRKSKAVGAVFGLTCSKYQSGEIDRSGRISRCGDEMMRVMLYEAAQSMLFHSTKWSWLKAWAMKIARHRGMKKAIVALARRLAVIMHRIWVDGTEFRWTKEVVTA

SEQ ID NO: 370140 - protein, 354 aa, unidentified
MKRARKELQAGDRVFVGIDLHKKKWHVTARTAEFELFSGSIPSCWKALQRILYRYKGHQIYTVYEAGYFGFWLHDHLVEYGAECIVTPPSLIPQEYGNKVKTDRRDSRKLAHYLAKGMLKRVWVLTEKERYHRQVTRRRRQLVGDRIRTQSRIKAELKLYGIELPEPDGKWTKIYLGNLGRIRFNNRFMQESFKCLLEQYHFLDGQIVKQTKLLQKLSKAELYQERVELLMTIPGIGMIAAMELLLELQDVSRFQRADQLAAYVGLTPSQYTSADKVRMGRITRVGKNSLRATLVQASWALIRKDGVMQKKYDRLKSRSGGKRAIVAVARTLLIRMRRMLLDNEPYVIGLIATN

SEQ ID NO: 370141 - protein, 388 aa, unidentified
MHPMIYVGIDIAKLNHFASVLSSDGKVLVEPFQFTNDNDGFCMLLSVLNQYDKDNLIVGLESTAHYGNNLVEFLVTRHFPVSVLNPIQTSCMRKNRIRKTKTDKVDTAIIAQTLMTQPFRRFTQYDLDLLHLKNLGRFRRKLMKQRTRNKIMLTSYLDQAFPELQYFFNGIHHKSVYAILKEAPSPDTIASMHMTHLAHLLASASHGRFKKDKAQEVRVLARKSVGSSDSSISIQITQTIEQIELLDSQIEDVESNMETIIRSMDSVIMTIPGISCLEAGMILGETGDVHRFSAPGKLLAFAGLDPSIHQSGNFNATHTRMSKRGSRYLRYALMYAAHNVVRNNAVFKQLYDKKRDAGLNHYGALGHCAGKLVRIIYKMLTDNVTFNL

SEQ ID NO: 370142 - protein, 341 aa, unidentified
MSEYIGLDVSLKETAISVRRDGKRIWRGKCPSDPKLLAEVIRKHAPNARRVVFETGPLSVWFYHGLSAEGLPAICIDARHAKAALDMAPNKTDANDADGLAHLAEVGFYREVRVKGYDSMLIRTLVTARTRLIRIATGLSNQVRGLMKTFGLVVPKGGGLVFETNVRNLLGSNAGLERIILPLLEAWHNIRSRAAQLDRQLIAAIRQSDACRILMSIPGIGAVSSASFVATIEDPKNFRNSRSVGAWLGLTTRRYQSGEVDYDGHISRRGDSNLRGLLYEAATVILTRAHADSSLRVWGMKLREKVGFKRAAVAVARKLSVIMHRMLITGEIFDRSAGITA

SEQ ID NO: 370143 - protein, 410 aa, unidentified
MSSLEVALDPTTVIVAVDPGKVANRIWVSNGAGLLTDPVSLPVSRDGIGRLEQMLETHDAATPVIAIEATGSLHRAWATELERRHPGGVRLFAPSETKAARTQLGSGRFKTDDRDCAALTYLARQGAGRRQSEELAVDSLRSAVRHRRGLVADRKVAQQRLHDQLNALVPGLSAPSGHGRSLAIETPTGQAVLACAAAFAGHPPTRRSLTARAPGRLTRATGEYWVQRWKGCLPPPADAEQRARRLARDLDRYQRLQNDIAALEDEVAVLLAATDGQILSSLPGVAVLRAAAFAAHSLPVARFPDAEHLYSATGLAPALYQSATLRRRGRISRQGLAEHRDALMGIAWGLSVYSPSFAERNAELRARGMAPIQARVALARNACRLAYRLLVTQQPFDEQRYRQGRLSRGR

SEQ ID NO: 370144 - protein, 373 aa, unidentified
MKKRSRSQKSQKPTVKIKGIQERVTIGIDLGDKTSRYCMISHGGEILREGQVTTTKAGMVEAFGCLGRARIAIEVGTHSPWVSRLLGSLGHEIIVANPRQVKLITESSRKDDRLDAQTLARLARIDPQLLRPIQHRSETAQTALMVIRVRAALIAVRTSLVNTARGLAKAMGERLPKCDADQMGVLRAESVPPKLRQLLEPLLKEVESLTEKIKDSDREIEQIARKDYPETALLQQVGGVGPLIALTFVLTVDDKTRFQKSRDVGCYIGLRPRRSDSGQRQPQLRITKEGDPYLRTMLVQGAHYILSRRGPDTDLKRWGLRLAERGGKRAKKKAVVAVARKLSILLHRLWVTGEVYEPLRNQNLRDLQKKSAA

SEQ ID NO: 370145 - protein, 327 aa, unidentified
MMNASELIFVGIDVSKNTLEIALNDKAKTECISNDEKSIVALVKKLTSPSEKIGVVLLEATGGFERQVAVALCMAGLAVMVVNPRQARDFAKSMGYLSKTDAIDARVLSHFARTLHQSESRERLLLKLPTANQEELQALIVRRNQLIGIRVAEENRLATSHRSQHKSIKAVLKILDKQITVIDKDVHGRLKEHFADKLDLLKDFKGIGVCTKASLMAELPELGQLTHPQIGKLVGVAPLNADSGRHKGKRITWGGRANVRTALYMAALSAVRYNPVIKAFYDRLLAKGKLKKVALVACMHKILTIINAIIKSGIPWNPDHNKLIENA

SEQ ID NO: 370146 - protein, 363 aa, unidentified
MNSVYHTELSSHEETRGQFNGGKADIKLGIDVHQDFYVVVMQVGGSNPKPPQRFHKQAFLLWAAKLKSRSAEVHAVYEACGFGFGLQRKLTALGIHCYVVCPQKLDELAKRVKTDGLEAKALCLRLDRFVEGNRAALAVVRVPSLQEEQQRALHRQREQLVKVRKVLEAQGRGLMVNHGIEPVKNWWKRINFGALDLPGWMRELLHNSQPILVALQEKIQTLTLQLEAAAQSSQPRGLGKMTSVMIDREIGDWRRFNNRRQIASYTGLCPGEYSSGNTRLQSCVTKHGNPRLRAALVELAWRLVRFQPNYRAVRKWKERLSKGTLTTGAARKKAIVALARQLAVDLWRIRTGRLSPEALGLEI

SEQ ID NO: 370147 - protein, 430 aa, unidentified
MNSEIEKVDEPHFVALAAIDWGDEKHRWAAQTADSPRIERGEMEQSPEAIEEWVAQLRTRYGEGPLAIALEQSRGALVGLLRKYAHLHLYPIHSGSAANFRAALYPSGNKNDPLDADLRLELLVHHRARLRRLSPDSEATRRLQQLVEGRRKLVNEKTRQSNRLTAQLKIYFPQALTWFEKADAPILGALLARWPTLEALQKARPNTLRTFLREHHCRRPEWIEQFPQEVAQAVPALRDPAVQEPAVATVQVLLQLLDTLRQGIADFDQRIEAAAQEHPDFFIFDSLPGAGAVMAPRVLAAFGSQRERYGTAVEMQQYSGIAPVTESSGKSRWVHFRWACPKFLRQSFQEWAGHSLGESVWARAYYEQQRARGSGHQAAVRALAFKWIRIVFRCWKDRVPYDESRYLEALRKRGSPLIRAIDAAASTASA

SEQ ID NO: 370148 - protein, 402 aa, unidentified
MRYIGLDVGRDFAHAAVVQDRGTARKLGRFRMGEELRAFAATLGPDDVVALEASTNTWALAELLGRHAGKVVVSNPLRTRAIADAKRKTDDIDAASLAELLAADYLPEVWQPDEATRRLRRLVAHRAGLVRQRTATRNRVAAVLARRLVRPPMTDPFGVGGRSWLASLELPSDERLALDAALRIEAAIGAEVAAAERVIATTVVDDPRIRHLLTIPGIGLVTAAGILAVVGDIARFARPAKLVSYLGLDPRVRQSGDRPAHGGHISRQGQAHARGLLTEAAHAAVRAPGPLAVTFQRLQRRRGPGVAIVAVARKLAVLAWHLLTKDEDYRDARAALVGTKHRMLDRLAGRAASRTRPSHRGATGSSHDRGRARLRGGDDPHDPALRHAIGRVRLDDTPPFGA

SEQ ID NO: 370149 - protein, 340 aa, unidentified
MKKYVGVDLHKKQFTVCWMDDKDERKVKIEEYPVSVEGYKKFSSKLSKEHEVAVEATGNSGYFCDKVRSKVKKVVAINPMQFKVISASVKKTDENDAITIARYLRLGLLPEVRQMDKETRALRSLINTRDKLVKLRSSLKNKIHNILNENGIVSQREMFSSAVSFERLKALDLSETAQFEISVIVEQIRGLTKSVKEIEERIKAISKNTPGHKNLTSITGIGDLSAAIILNGIGDVKDFDDSSKLCAYVGLVPSVRNTGNTVSHGHITRRGNKIFRTTLVQVALIAIKYSSYLRKFYDKLKAKKGSGRAIIATARKMLEIIYRTLKNGWMFADFNNFVLE

SEQ ID NO: 370150 - protein, 340 aa, unidentified
MEIAVLGIDLGKNSCSIVGFDDGGAVVLRRRMHREGVIKLAGKLRPCVVAMEACCGAHHLGRVLRAQGHEVRLMSPEYVRPYVKSQKNDDRDAEAIAEAATRPTMRFVELKSEEQLDMQTLHRARDRLVGERTALINQLRAVLLERGITVAQGRRKLERHLAGLDAQGGLSQRMRVLIEDMRLQWCELDRRIAELDKELTEWVRNEEAARRLMTIPGIGVLNATALIAAIGQGESFARGRDLAAWLGLVPRQLTTGGRPRLVGISKRGNKYLRKLLIHGARAALPTLLESPTSLGAWLRGLMTRMHKNAVVVALANKLARLAWAVLRHGEMFRFAVSAAA

SEQ ID NO: 370151 - protein, 340 aa, unidentified
MGQYIGVDLHQKTSYVTRVNEKGKVLEQVDLKNDADTLKAYFRKQPMSSQVVVEATGHWYHFYELIEDRFPNLVLAHPQKVKAIASAKIKTDKIDSGILAQLLRVDLLPRAYVPPREIRDLREILRYRASLVQLRTQAKNRMASVMTKAGIETVTKNRFGIKNFRQLTLVETRPCYRLELDGYMEVIRKLGQEIAKSEEVIKKMAAESPEAQLMMTMPGVGAFSALLILSEIGNIRRFPDAEHLCSYGGLVPSLHASGGKSYHGHITKQGSKWIRWILIENSLHAIRKTRRYGKLYIRVKKKHGHNAGRTAVARAMLKSIFHMLRKKEVFEDCPASSEGV

SEQ ID NO: 370152 - protein, 353 aa, unidentified
MNSLTDLRDMVDVVIGVDTHVHTHSAGVVDTATGGVLDEITVEATPEGYAELVEFAGNHATLRAWAIEGTGGHGAGLSRHLLETSEIVIELDRPKRAARRNGAKSDPLDAIRAAREAMARPQLGTPRSGSERQALSVLLAARRSAINASTEAQLQVFSLVIAAPESIRTRFRGQKLAAMLNTAASLRLHSSWDVETTSTVVALRTLARRAHAMLKEARELQKAILAIIRNWRPDLLEEFGVGPIVAATVLCAWSHPGRIHSEAAFAMLAGVAPIPANSGQVTTRYRLNRYGDRNLNNALHTVVQSRIQYQPTTRDYVARRTAEGKTSREIKRCLARYVARDIYRLLENGATAA

SEQ ID NO: 370153 - protein, 321 aa, unidentified
MSEIGFTQVVSRGCGIDVHKKTVVATIKGEGLKSQTREFSTFTSSLTSLKEWLLSEGITHVAMESTGVYWKPVYNVLEPSGLTVWLVNARHIKYVPGHKTDKKDSAWLCKLLLAGLLKPSYIPKKEQRVLRDLTRYRKKLIEQNASEQNRIIRILESCNIKLSSVLSDVQGVAGTKLVEKLCEGHTITRADIDQIYHRKMQCSKDDLYEACQGLIEETHIYLLKTIRSNIAHTKSVILGITQQVRNMLEPYENKIEQLRDIPGLDRKTIEDLIAEIGLDMSVFPTEKHFASWIGICPGNNESAGKKKVDESHTETNKQNLL

SEQ ID NO: 370154 - protein, 350 aa, unidentified
MIIIGCDYHPGFQQIAFVDRDTGEFEERRLAHREEAQQFYRELAVRGVPVRVGMEASGQARWFERLLGQLQIELRIGNAAEIRAKRVRKKKTDREDARHILQLLVEDRFPQIWVPSWENRDVRQLLWHRHRLVQMRTRIMNQLQAVALNEGLRCKKRLWRERGRQQLETFQLAPWASRRRRDLLELLDRLNPTIAELSQAIEQEVGKHPTAQRLMTHPGVGALTALAFVLIIGEAERFGCGKQIAAYLGLVPEEDSSGESRRLGHISKQGSGLMRFFLVEAAQVTVRSDAEWRRKYFHLAQRRGRKIAKVAMARRLAVRLYWMWRNNWDYEQWKRFSPHAGQLGTGVGVQ

SEQ ID NO: 370155 - protein, 327 aa, unidentified
MNYNTVYVGMDVHKESFSLCAYTIEAEKASHYQRTEADYKKVLNYLEFLRTIYGDDANFICGYEAGCFGYTLYHQLTANNVKCIILAPTTMLEQRSKKRIKTDRRDAEIIAKCLAQHNYSPVHIPTAKDEETKEFLRMRDDHKLALKKVKQQILAFCLRHNYRYDGKSHWTAAHLKWLKALTPEALYKEILDEYLLTYQTLSDKIERLDKRIEELATQDEYKEAVKKLCCFIGVKTHTALSVLVEVGDFKRFASAQHFASYLGLVPGEDSSGDDQNRLGITKAGNRHVRLLLTEASQCYARGQVGFKSKELKSRQSGNTPAVIAYAY

SEQ ID NO: 370156 - protein, 530 aa, unidentified
MVTRSRKRKSKGSKNRFIGKPAGQIQERVRAVGPEHFGIVSVDCAKRRSKWMLCNFYGKVIIEPTTVEHTSGGLRVMTQLVAEACRAEGLTDTVVAVEMTGIYHKPTFRAFRKAGFDTRIVHPFASNHYRRPLHSDQKTDDHDLEAIFHAAVKGYGLAVLPVSEVYQSLQAVSRHRHNLVKQRSRLMMQIRRLLHQTMPGFADLFEEDTLFHKSIALPIALKFTSADAIRDAGVAGITSHLTKTNVRFQTRTIERIVAWASTAADPSELEEIHTRQWQQLNEVRRVFDEQVAAAEREMASFLVKTPYVLLLSVTGINVVSAARLAGEAGPIEHYASARAINGRAGLYPSRYQSDEVDHADGSLVRQCNRKLRGAAMLVAENLIKCHPYYRGLSALWTQRKVDPRDRRCRIANRAMRMVFQLVGGRQVWRGRSVDREHLLAKLQEFHRLHQTPIEQSIRDLNEAFMWLPKSTYTAEAKPLAEWARQKHRGPQRIGDLMIPLLIRLGVTREELGVPSEETLESNTSEARSSD

SEQ ID NO: 370157 - protein, 331 aa, unidentified
MKNYFIGIDVSKTTLDVTLHSLEGHLNSNHVVIENNAKGFKAMLTWLKEKKINNQDVLICMEHTGIYADKVVDFFETKHIAYSLQSALHVKKSLGLVRGKSDKVDSFRLADFCYEKRASIKESEKPSQNIILLKHLFTERRKLVGSQAQYKQIRSEIAIHQGKGFIKRKDRLIKELQRSIDEIEKEMMEIIKSDPDIYCSFILLMSIIGIGMVNALGAIIYTNNFKNFSDPRSYACYVGIAPFPYSSGTSINKRKSVSKMGRLKLKADLSQAARSAILYDPQLKAYFKRKFNGKKGAESNYGTVLNAVKFKLICRMFSIIRRKSPYVKFAF

SEQ ID NO: 370158 - protein, 406 aa, unidentified
MTIYIGIDWSEQKHDVVFLNEAGLMIGQLTMAHTPEGLLNLEKTRRHLGVSRDECLIALETAHNLVIDFLWAQQYPQIYVIPPSVIKSCRGRYGSSGARDDQRDGRLIADVLRTDRARLHPWHPDGLLTRQMRAKINFINHLTGNITAWSNRLRAVLLRYYPAALQVFGSLTSQITLHFLQRYPTPQQAAALTWSDFEAFARAQAYPVPKKLPTYFAHLQQAHLEPCPETVLAYQTETPWLASTLLALIQAKNQALRDLTDLFEQHPDHAIFASLPGTGPLLAPALLTKFGDDRQRFPTPASLQALAGTCPVTDQSGKSKKIKFRTACDHEFRQICQQWARHSLDQSVWANAYWHQVRPRCHSDQHAFRCLANRWVAVAWKLWQTGQPYDQTYHLQQRAQHAQLHA

SEQ ID NO: 370159 - protein, 424 aa, unidentified
MVALCSRREQLDELSSLSKEVTVIDPQIRVGVDVGCKAHRVAISDSDGSILEEFDISHTDAGFCDFFRRIDHHRQELDLPVAVAMEGFNGYARPLDRLIQERGYTLYNVNNLKLARFKEVFPAAAKTDPIDTRKILELFHLKDHLPLAKDALQKVVSAPLVNDKLKRLSRRRRQLVNEKVRVANRIQSDLQAVCPELLAITKKLSNLWFLRFLTCRDDLTQLAHLRHTTLLKIPGIGQKYARIIQEWQRRASFSAEVEYVGPMIIQDARRILELLSQIHILDEAMDKLADRSELACRIGSIGGFGKTCVAELAGEIGTTERFAGERSLALYVGMSPLSKDSGQHHGSKRPRQVNHRAKAAMMTAVARHINCVPESRAYYEKKRAEGKSHNQAVRALGRHLVRVIWSMLKNERDYELREVIPSVT

SEQ ID NO: 370160 - protein, 473 aa, unidentified
MAHRRPRKDQQPSRGAPHVKRATVPTALEQVHWHAAGIDVGATQHYVAVPEDRDAEPVRCVEAFTADLPRLADWLKTCGIDPVVMESTGVYWMPLFELLEQRGFEVLLVDARHVKHVPGRNTDVLDCQWLQQLHTFGLLRGAFRPSDQVCVLRSYLRQQANLVRCAAQHIQHMQTALTQMNLKLQHVVKDITGKTGMAIIQSILAGQRDPRQLATHRDHRCKHDEITIAKALVGNYREEHLFELRQAVELFNVYQAKITDCDTRIEAYLGTCADRSGGHAISTRKRHQQCGRHAPAYDLRGHLDRISGVDLTRLDGLDAQTGATVISEIGVDITAWPTVKHFCSWLGLCPGSKVTGGKNLSSRSKRSANRGAAALRLAAQSLSNSASAMGAFYRRMKARLGPPKAITATAHRLARTIYAMLTEGRQYVDLVQDIYEQQYQQRVFKNLQRRARDLGYTLIKQEGAPSVEPVPAT

SEQ ID NO: 370161 - protein, 398 aa, unidentified
MLSIGIDVSKGKSTVCGMKPGGEIVYTPFEVQHTREGMSELVSLLRGSGEEVRVVLESTGSYHCPVVAALLENGIFVSVVNSLRMKRFCSQSIRRVKTDQIDAMQIALYGLAYWQELQPTRLPENTYRELQLLARQYYQMTSLLIKAKVDFNALCDQVLPGMQELMSDHAGRHKLSDFVLRYRHTTHILEMGETRFRKDYCKWAEKKGYRNHERMAALIFATAQNGIPVLPDAPSTQIVITEAIRVLHTVEASRDAILTQMQALAKTLPEYSLVREMPCIGDTLAPRLIAEIGDVRRFHSKRALIAYAGIDAPPYQSGKFSANNRHISKRGNRYLRKTGYEVMQSYVMHKPANDPIFTFIEKKRSEGKSGKLAMVAGLNKFLRVYYGKVTELYRSLPQ

SEQ ID NO: 370162 - protein, 402 aa, unidentified
MNCVGIDVSKGKSMIAVMRPFGEVVVSPFEVLHTDSELSKLAGLLKSLDGETRVVMESTGNYHAPVAWLLHDAGLYVSVINAMLVHDYGNNSLRRAKTDKKDAVKLANYGLDHWLTLPRYVPDEDTRLMLKTCYRQYQQYSKVQTMLKNNLISLLDTAFPDANRLFTSPPRADGSEKWVDFVATFWHCECVCGRSEKAFTTQYQKWCRKHGYNFSEDKALDIYASACRHFGVIPKTDTAKLLVEQAISQLQTTSSALAALKQEMQSLAASLPEYPVVMGMFGVGPTLGPQLLAEIGDVRRFHSKKALVAFAGIDAPPYQSGQIDVRSRSISKRGSASLRRTLFLVMSVILQCAPIDEPVYQFMDKKRSEGKPYRVYMMASANKFLRIYYASVKAYLESLEHD

SEQ ID NO: 370163 - protein, 400 aa, unidentified
MLSIGIDVSKGKSTVCGMKPGGESVYAPFEVQHTREGMSELVSLLRSSGEEVRAVLESTGSYHCPVVAALLENGIFVSVVNSLRMKRFCSQSIRKVKTDRIDAMQIALYGLAYWQELQPTKLPEDTYRELQLLARQYYQMTSILIKAKVDFNAICDQVLPGMQELMNDHAGRHKLSDFVLRYRHTTHILEMGETRFRKDYCKWAEKKGYRNCERMAALIFATAQNGIPVLPNAPSTQIVITEAIRVLHTVEASRDAILTQMQALAKTLPEYSLVREMPCIGDTLAPRLIAEIGDVRRFHSKRALIAYAGIDAPPYQSGKFRANNRHISKRGNRYLRKTGYEVMQSYVMHKPANDPIFTFIEKKRGEGKSGKLAMVAGLNKFLRVYYGKVTELYRSLPAIE

SEQ ID NO: 370164 - protein, 412 aa, unidentified
MSSRIAGIDVHKRVLMVAVAEVSVSLEDMEFQCRRFGTTRKELEHLGAWLEQQGVREVVMESTAQYWRPVWLELEGRFQQYLAQAWSNRAPHGRKTDFKDAQRLVRRHVSGELTWSFVPPAQQRQVRTLTRRRVQLVHDRVRLQNQLEALLEEMRIKLSSLVTDLLGASGRRILTALAEGISDPETLAELGDARLKCTREQLQDAFPGPIPQVSRKLLALWLEQLALLDRQIEELFQLAAAAMQDWQDVLGRLVEVPGIRVLAAQQIVAEAGPDAAAFPSAAQFVSWFGACPGRNESAGENHSGRCPKGNRYLRRTLCPAAQAAVQTKNSHFQAVFRRLLPRLGYSKAIWAVARHMGVVIWHILHNQARYEERGQLSTPQAIKRRFQYLAKQLREIGYTVEIKPPVATPPPA

SEQ ID NO: 370165 - protein, 338 aa, unidentified
MTIVMGIDQHRAQITGEWIDIETGEVQRARVAPADRAGVRRFLARFAGVQLEVAVEATTGWRFVVEELRRVGAVVHLAEPAETAGLRGPKKRAKNDRADARHLRELLMVGRLPESWIPPEHILDLRARVRLRHTLMAQRSEWQQRIQAVLYHHGCPRRRSLIIGDGREWLAVQPLPVGAREQVTVALAVIDALEAQIVPLDRELRAFARRQAGCRALQAHYGIGPLVAVTILAELGDCTRFSASRHAVRFAGIDITVHASDQHRSPGHLSRQGPPALRWALFEAAQSACRPASPDHDYYRQAAARLGHNRACLSVARKLLKRSHHTLRELGEEALAPA

SEQ ID NO: 370166 - protein, 349 aa, unidentified
MKTYYVGMDVHRATIALAVLNGAGKVVMESTIETGAERVRGFLKQLRGKVYVTFEEGTQANWLHDIVRSLVTEVVVCDPRHNKLLQSGNKNDRVDARKLAELLRNKSLKAVYHGDNGVRTLKELVRTYDCLVSDTTRVMNRLKAIYRGRAIVCGGHEIYRQDRRGQWLGKLHEPGAKQRAGFLYEQLAALKPLRHKAKLAMVKEVRRQTAYLWLMSVPRLGSVSVAQLIAVVGTPHRFRSKHQFWTYVGLAVVTCSSADHEVVNGVLRRSQRPVSTRGLNRNHNHLLKRVFKNAATSACHSGPFQAGYEARVARGMAPSLARLTIARQLAATTLALWKRGEQFDPERKK

SEQ ID NO: 370167 - protein, 318 aa, unidentified
MTYTQQQTALYVGIDGSKETLAVATYPTHQVKVIPNDADHCEALADELAQQSVQFVLLEGSGGFEKLIVRALQQAGVPMAIVPPQRARYFAKSLRGNLKTDRVDARLLARFASCYLAPEATEVPAVQAQLKELWARREQLVQMLESEKKRVQVATHPLVRASLERTIAGLHAELAQIEAAIEALVASDEALAQKAALLQTVVGVGWVVASGLLAELPELGQVSHKVIAALAGLAPVRRESGRWRGSARIGGGRCRVRRLLYLAAVVAVSHDARWKAVYQALLAKGKAKKVALCAVARRILVVMNAMVRDGRAYERKRE

SEQ ID NO: 370168 - protein, 344 aa, unidentified
MQTMYYIGLDVHKRTISYCVKDASGRVYAEGSLPATRFDLDRWMKTLPQPWTAAMEAAVFTGWIYDHLQPHAAALKVAHPLMLRAIAAAKKKNDRIDASKICDCLRCDFLPECYMASTAIRERRRTLRYRNLLVRQMVQMKNKISGLLMEAGVSYNKQRLHRAGYFRELLATNAGIDEGLCSLLRLCRETVVRLQKTESAMVLSLERDSLLMDRVERLMTIPAVGPITALTWALEVGDAQRFSSIKKAISYCGLCGAEKSSANTVQRTPLSKQRNKHLQTTLIEAAKMAPRYSPNLAMLYDKEKQKGNANRATLAVARKLVAYLMAIDRGQRNFQAVETNCIAA

SEQ ID NO: 370169 - protein, 357 aa, unidentified
MDKKMQDWIVKGKEVFVGLDDAKKTWRVCVRSEKMAVHESSMPANYDVLRAYLRRRYPECTIKVMYEAGFRGFNLYDRLSEDGIECVVLPPHLMLEEKVNRVKTDRRDAWRLAKMLEGEEHLRGCHVPDKERREDRQACRTLNAVEKEIKSTRNRIRKLLQYHGIETAIPEEKAWGKSEFRSVEELSVGVVLRKPIKVLLSLLENLWTYQIELRKELLALSKNPRYQRAFAIARGLPGIGWLTAIRLVLELGEDFTRFSTGKSLANFLGLTGGEHSSGETEHKGRITGQGPTFVRSWMIESAWVSIRKDPVLREKFEKVRRNSGSKKKAIVAVARKLAVRLYACMVMNQEYQIGLVA

SEQ ID NO: 370170 - protein, 408 aa, unidentified
MEVLYPRCAGLDVHQQTVVACARLASGSAVQQAVRTFGTTTRELLALADWLTAQGCTHVAMESTGVYWKPIWHVLEGQFDLILANALQIRSVPGRKTDVNDAMWIADLLAHGLIRSSFVPPAPIHELRDLTRTRKQLVREVSQHTLRIQKVLEDANLKLTSVISDVMGMSGRAMIEAITQGEEDPERLADLSQGRLKASRPAVIAALQGRVTPHHRFLLRLHLTQIDGLEVAVRDVEARLGEALAPFQAAVDRLLTIPAIGRTVARVIVAEIGVDMTRFPTAGHLVSWAGLCPRQQESAGKRLSTRTRPGNPWLKTTLVQVAWVAARTRNTYLRAQFLRLKSRRGAKKAILAVAASMLTAAYYILKDDVRYHDLGADYFEHRDKAQIARRLVRRLEALGLSVEVRPAA

SEQ ID NO: 370171 - protein, 425 aa, unidentified
MNYKQNEKINQVKESTLVVGIDIGSTTQYARAFDWRGIELGKVFTFSNSREGFEAFKAWMQHLQDKYRKSDVIVGIEPTGHYWFDLGAYLEDEGILLVMVNPYAVKQTKELDDNSQSKNDKKDPKVIAKLVTEGRYSAPYTPDGVYADLRIMVANRKRLIREMTQIKNRFARWFAIYFPEYTDVFGDYEAQSSMLLLKKVCTPEAIVELGAEKINQIWRDAKLRAVGMKRATTLCETAKRSIGLKKGSSAARYEMKLLLEDYEYKKAQLDAVMEEIEKLCRKIPESEQMLAIKGIGVITVAGFLAEVGDVRRFESPRQIQKLAGLSLRENSSGKHKGQTTISKRGRSKLRAVLFNAAIPLIAKNPEFKSLHEYYTTRANNPLKKKQSVIAISCKLIRVFYAILANGVTYDPQKMLSDIHRQPQVA

SEQ ID NO: 370172 - protein, 538 aa, unidentified
MFLQTFPPTKAFQMATRTKSKKNRSKSLNRHFRLAVLGKPTGVIQPRVQGVGPEHFGVVAIDCAKDRSKWMLCDFYGKILVEPTEVEHRKNSLQAATQILNAAKQQYQIKDLIVCVEMTGTYHQIVFRHFRSSGFDTRIVHPFASSHYRMPEHGDVKTDDHDLASIFRAAVNGFGLVQNQWPEAYQQLQILCRHRRDLVNKRSKVQCQIRHHLERCLPGFAAIFPGNDLWEHPLGITTLRYIAENGGTHQAILDVPQNDLSDWLKQQGCRFQKRTIDRIVNWASQAASGHEMSRTLSRVWRELLEDWKLKMSQITAIEVDEASLLVQTPYILLLSHPGINVISAAELAGETGPIELYASCKSISGRAGLFPSRYQSDKTDRAGNLSRFRNGRMRAAWMMVAENMVKCNSYWQRKNNGWKEQGHDPRDIRVRIANRLTRTIFQMLAGRKLYAHPSRLDRGYVLEKLMTFHQERHTPPSQIVLDLQQATEQIPVAYFPTEAIPIKAFSQRSTRSRRSEPKELGSLLVAVLAKLGVDRLES

SEQ ID NO: 370173 - protein, 323 aa, unidentified
MQRIIIGVDVSQDFLDGHIRPTSVRQRFANTSAGIAELVAWVRPLAAERILFESTGPYQIAAVGALLAEGFPVVVVNARQVRDFAKAMNYLAKTDTIDAAVIAHFGEVATTKVRPLESEEIRTLRDLYDRRGQLVHMRAMEKNQRHSASVARASANVLHSIDKHIEYLEKQIHDLEQRMDRLIEKSAAFQARNEILQTITGIGPHVSRTLLVHLPELGQYNRQKIAALVGLAPFNDDSGEHVGHRHIRGGRNKVRVGMYQAAIAAIRHCPRMKAFYATLKARGKASRVAIIAIARKILVLANALVRDMKPYENRTNSICLKST

SEQ ID NO: 370174 - protein, 423 aa, unidentified
MKYALVRVLPEVPPGGVCAGIDWASADHAVCVVDLAGQVADRFAAAHDRAGIAGLIARLRGRGAAEVAIERGDGVLADALLAAGLTVVVIGSRQVKNLRSRYGSSGAKDDRFDAFVLADTLRTDRARLRPLVPDSPATLALRAAVRARRDLVAHRVSACNQLRAHLAVAFPGAIGLFSELDSPVSLAFLAAFPGQQAAARLDEQALAAWLATVPRRGNTAPAGVLAARLAAAPRGAAGADAAQAAVTTQLAAATAGLAGRVRALEAEIAAQLAAHPDQHIFTSLPRAGTLRAARLLAETGDCRARYPDPWSLAGLARVAPVTRRSGTCISHEFRWNVNRQLRDAICDFADGSRHASPWAATVYAAARDRGKDHPHAVRITARAWVLIIWRCWQDGTSYDPAKHRALQDVLTRQAAAGTPQPHR

SEQ ID NO: 370175 - protein, 351 aa, unidentified
MDYRVYCGVDFHARQQTISCLTTEDGVVSTHELKHQNKAELKAFYAQFRGPVLVALEASGYSPWFEQLLEELGHEVWLGDAIEIRRRARRRQKNDRRDAELILELLLHDEFPRIHRPAIKSREILRMLRYRHKLVQMRTIIKNSLQALSIQSGLSLRARLFTGVGLDQLRSLTMSPVMQYQRDQWLVALESLNQHIDAATNWLGEQATGDARVQRLRTHPGIGLLTGLAVVHTLEPVIRFRNQRKVAAYVGFDPQERSSGEKKRYLGISKAGSRVLRYLMVEASHTAIKRDPDLKRFYLRLLHRHGKAKAKVAAARKLLIRSYILLRDHIDYAEFGRRAVAARLARLASKA

SEQ ID NO: 370176 - protein, 344 aa, unidentified
MDHFAGLDVSVKETSICVVDDTGRIMKEVKVASEPQALLKVLGNPAYRFKRIGLEAGPLSQWLFSGLAEAGLPMVCVETRHMQAVLKAQINKTDRNDARGIAQMMRAGLYRPVHVKTLRSQKLRMLLTHRKLLQSKAIAIENDLRGTLRNFGLKVGMVGKVRFEARIQELAENFPDLAVLVEPLLIVRRALREQIVILHRRLLTIVRNDEVCRRLMTTPGVGPVVALTYRATVDVPARFRKSKAVGAVFGLTCARYQSGEIDWSGRISRCGDEMMRVMLYEAAQSMLRSKKWSWLKAWAMQIARRRGMKKAIVALARRLAVIMHRIWVDGTEFRWTREQAAAAA

SEQ ID NO: 370177 - protein, 344 aa, unidentified
MDHFAGLDISVKETSVCIVDDTGKIIREVKVASEPEALLAVLKNPAYHFKRIGLEAGPLSQWLFSALAEAELPVVCVETRHMQAVLKAQINKTDRNDARGIAQMMRVGLYRPVHVKTLRSQKLRMLLTHRKLLQSKAIAIENDLRGTLRNFGLKVGMVGTVKFEARIKELVENLPDLAGLVEPLLLVRRVLREQFVVLHRRLLAIVRDDEVCRRLITTPGVGPVVALTYRATVDVPARFRKSKSVGAVFGLTCSKYQSGEIDRSGRISRCGDEMMRVMLYEAAQSMLYSKRWSWLKAWAMQIAKRRGMKKAIVALARRLAVILHRIWVDGTEFRWTREQATAAA

SEQ ID NO: 370178 - protein, 409 aa, unidentified
MDLLYSRCAGLDVHSRTVVACARLGSGGEVRYEHLTVSTTTRGLLQLADWLAAHGVTHAVMEATGVYWKPVWHVLEDQVNLTLANPQHVRNVPGRKSDKNDATWLADLLAVGLIRGSFVPPAPILELRDLTRTRKQLVREIARHTQRVQKTLEDANLKITEAISDILGVSGRAVVRALIAGETDPERLAALTSGRLKASRQQLVEVLQGRVTDHHRFMLRLHLQQIEGLEEAVEVLERRIEEQLKPFRAAIDLLVTMPGLSKTAAAVIVAEIGTDMTVFPNAAHLVSWAGLCPRLDESAGKRRSTRTRPTAPWLKPVMVQAAWAATRKKDGYLRAQFLRLKTRRGPKKAIVAVAASMLTSAYHMLRDGVEFQDLGSQYFERQHKAQIAQRLVRRLRGLGVEVEIKQPAA

SEQ ID NO: 370179 - protein, 314 aa, unidentified
MSNKVVVGIDVSKSRLDCFALPLEQAWSCDNGQVGIEQLVQRVQQLGGELVAMEATGGYETQAATALAAAGLRVAVVNPRQVRHFAKAMNQLAKTDRIDARVLAEFALSINPQVRPLPDEGTRELSDLLARRSQLVAMRTQEKNRMLQAAPALRAGIKTHIKWLEVEIAKLEVDLTAKLRASEAWCDKRDLLLSVPGVGSTTTLALLAELPELGQLNRQRIAALVGVAPLNDDSGKRQGRRFTWGGRAAMRSVLYMAALSAMRHNPVIRVFYQRLRANGKPFKVAIVACMRKLLTILNAMVKQHKPWQPQSKPT

SEQ ID NO: 370180 - protein, 293 aa, unidentified
MTIVESTRSVTGGVDTRAEVHVAAVVDGNGGVLGVEPFKATPVGYDRLYRSLTSFGTVARAGVEGTGAYGAGLARHLRRSGVTVVEVNRPNRQARRRHGKSDTVDAIEAARAALSGRASGIAKTADGDVEAIRVLVVARRSGRNVRVKYLNQIRHLVFTAPDELRERLRDVHRDRLARTAASLRPTASGDTVVYATKLAIRTLGQRVLALEADAKALDVRLEALVRRRAPQLLDIYGVGVHSAAILSVAAGDNPHRLKNEAAFAHLCGVAPIPASSGKTNRYRVNPHAPTNQG

SEQ ID NO: 370181 - protein, 343 aa, unidentified
MQTVRTIGLDIAKSVFQIHGVDAAGNVVIRRRLKRRYVLSFFQKLPPCLIGIEACASSHHWSRELQALGHTVRLMPPAYVRPYVKRQKNDAADAEAICEAVTRANMRFVATKTSEQQSCLMLHRTRHLFIRQQTAVINAIRAHLAEFGIVAPVGRNGIEQLLDVVAHAGDNQLPEIARACVLALGAQLRTLQAQILNFDRQIMAWHRSSEASKRLDDIPGVGPALATALVASVADPKAFRSGRDFSAWIGLVPKQHSSGGKDKLGSISKQGDRYLRSLFTTGALAVIRYAKIHGTKHRPWLTALLARRPTKVAAIALANKIARMAWAMMARGDRYREPVALAA

SEQ ID NO: 370182 - protein, 332 aa, unidentified
MSVYVGIDVHRKRSQVAVIDQDGGVLANRNVPNGVKPILGVIGNLPSGTPAAFEAAFGWGWLVQLLEDYGFEPHLVHPLQCKAIASARLKNDKVDAAILAQLLRADLLPEAWIAPPEVRQLRALLRHRVQLVRLRTLLRNRIHAVLADHGHGRPAGCWTGPGRAWLASLELPAASRQVIDDALAVIDALQQPIDRLDQDVHQRARSEPAVQVLTTLPGVGPFTALVLLAEIGDITRFASARKLASWAGLTPTVRGSDRMVHHGHISKQGSAWARWVLCEAAQTAKRHPDYTASYQAIARRRGKKIATTAIARKLLTRAYHLLTDAASAGAPR

SEQ ID NO: 370183 - protein, 459 aa, unidentified
MPIIRSNAIRIKRFRELKQDLRTRRDRLLVGIDIAKVQDVAQVRLAHTQIVDKALTLPNTAAGFAAFWAHLQRRQRETGATEIVCAVEPTGTYHDALARFLESQGADVVLVSNTVAHHNRRTLDGTWGKSDPKDAHNLCDLLERGHVLFYSRADGPLAELRHLVRLLRHARVELGACKARFRNTLLPALGPAGEPLPPALVARLPAPLQVLLPAAQRRALPEGAADLPPALAFELTDLAARLTGVQARITQIEAALVQVATPLPAYGWLLSLPGVGPTLAAILLAEIGDIAWYTKFSQLRKLAGLDIIWVASGKWTGTTRISKCGRPLLRWALYQAALGACRNPGWRARREALIAKRQGDRYAFLKATTELAAKLLRLTWGVWRSGGPYDPARVAGRPAPPQGPAGRPAIASPVARAGRRGASPSAKEQAALGTSRPGGTGRIADRRGSDRPHRPRRRA

SEQ ID NO: 370184 - protein, 472 aa, unidentified
MKSKSSRKRNPVDPVAEEIPDAEHELVIERVAAIDVAKASGKVCVRLPGKTGRRFSRVWDVPARTGAVSELAEQLIESGVEKVTVESTSDYWRIWYYLLEAAGLDVQLVNARDVKNVPGRPKTDKLDAVWLAKLTEKGLLRPSFVPPAPIRQLRDYTRLRVDLTRERTRYWQRLEKLLEDALIKISAVASTLDTLSTRDMIEALIAGERDPGRLADLARGKMKAKRSELIAALDGRFDDHHRELARMLLDQIDTLTAQIATLTSRIEQLLAAMPDTRSRGDGGTGGDPDRPSTGHGVEPETAARFTDATLLTPVERLDEITGIGELNAQVVLAEVGLDMTRFPTPAHLVSWAKLCPRTIQSGPVTRGGKTGRGNPYLKGALGEAAAAAARTDTFLGERYRRIVKRRGKLKALVAVARAILVVIWHLLANPEARFRDLGPDYHTQRIHTERKLRNHIAQLTAMGYRVTLEPAA

SEQ ID NO: 370185 - protein, 365 aa, unidentified
MPSVTSPAGLIHLGMDTSKNTIVVAVLMPGEQIPAVDRVFNDEAPVRRLIGRFPDRGLLRACYEAGPGGYDLYRLLASMGVACDVVAPSLIPKGGSDKVKTDKRDSARLARLHRAGELTPVRVPSPAEEAVRDLARPRSAVLSDRKRAQQRLTAMLMRHGRVWRNTYWTGPHRAWIAAQAFDEPALGTALAHYRATLDTRETELACIESELAPWARQEPLAGPAGRLGCYRGIAELNGLTLAAEVVDSRRFASARAFMGFTGLVPAEYSSGQRTWRGHITKAGSGPVRTALIEAAWAYRYKPAIGVTLRRRQEGAAPETIARSWKAQRRLHGKYRAMTARGKAAPEAVTAIARELAGFVWAEMTS

SEQ ID NO: 370186 - protein, 397 aa, unidentified
MIGVGIDVSKGKSTVCIMKPGGEVLQPPFEINHTADELENLVRLIKSFDEEVRVILEDTGHYHLPIVSPLVENGIFVCCVNALRMKKFCSQSLRRAKTDKIDSIKIANFGLTYWNELTPTLPAGEIYHELKLLARQYYQTVSLLVKAKVNLSNLLDQTMPNIQTVLADNKSNSKLTDFVARYYHYSHILEMGEQGFTEDYCAWAKERGYRCNERKASQIFAIAQNGIPTLPNSISTQIAVSEAVKLIQFIDESRNIILSQMQEFCKSLPEYTVIREMIGIGDTLAPRIIAEIGDVRRFKNKHSLIAYAGIDAPPFQSGTFNAAERHISKRGNSYLRKTGFEIMQCLIRLKPHNDPIYAFVQKKRNDGKCGKEAMIAGLNKFLRVYYGKVMELYSTTA

SEQ ID NO: 370187 - protein, 456 aa, unidentified
MSRRNQPKQFKTVDLPEQLQQVNLNAAGIDVGSDRHVVAVPNGRDDVSVREFGAFTADLHALADWLSKCGITTVAMESTGVYWIPLFEVLEQRGFEVKLVDARQVKNVSGRKSDVLDCQWLQQLHTYGLLAGAFRPADQVCVLRGYMRQREMLVQAASMHIQHMQKALQQMNLLLHNVVSDITGVTGMKIIKAIIAGERNPKVLAKLRDYRCHSSAATIAKSLTGNYREEHLFALTQAVSLYETYQTKIGECEAAIAGYLNNHQKRTDEEPPPADKSSRDRDRMRGGVDVRSQLYRMTGVDLFNLPGMGADTLLTLAGEVGFDMTPWKSEKHFTSWLALCPGTKKSNRKILSRKTKRSANRAAAAFRIAAASLSRSKTALGAFYRRIKLRVGPAEAVTATARKIAVLYYSLLKYGSHYVEIGQAAYEQKYQQRRLHSLQKQALAMGYQLIPATSSF

SEQ ID NO: 370188 - protein, 434 aa, unidentified
MRILFERCCGLDIHKVSIAACVVITRDGKTEEETRRFGTMTADLLELAAWLKARGIQHVAMESTGVYWKPVWNILEGEGFDLLLANAQEVKIVPGRKTDQKDSQWIADLHQHGLLRKSFVPPRQVRDLRDLTRTRATLAQEHSSTCNRIQKVLEDANIKLGTVASDVFGASGRAMLLAMMKGESDAEALAELSKGRLRSKIPELRRALEGRVTGHHRFLIDRHWRQMESLENQMRQFEEEIAERMKPTAEEIARMRESLPAEAPLPPSPREEAIRLWMELPGVGLTTACSMVAELGVNMEQFPSSAHVASWAALCPGNNESAGKRMSGKTRKGNVWLRRTMCEAAWAAAHSKKTYFAAQFGRIAARRGKKRALLAVAHSLLVAAYEMLKHKEHYREFGADFFEGLNKDQVKRRLVQRLAKLGFQVTVTQTPTAE

SEQ ID NO: 370189 - protein, 343 aa, unidentified
MKLHVVGIDLGKTVFHLVGLDSTGRAVIRKKCSRTQLLAFTANLEVELIGMESCSGSHFLGRALREQGHQVRLMPAQYVKPYVQTNKSDFLDAEAIAEAVQRPRMRFVPIKTEEQLDLQALHRVRERWVMRRTAVVNQIRSLLLERGLTLPKGRRYVDRQLPRILEDGGLRLSGCFRVLLAQLKIELEQLTARIEEMDRVIQKTAKENEACQRLTEIPGVGPVTATALIAAVGNGSTFQKGRNLAAWMGIVPGEYSTGGKQKLLGISKRGNKYLRTLFIQGARSVLQQRDKQAPGLSSWLAQLLARAHQNVVIVALANKLVRMAWAVLCKNERYRAPVLAMSA

SEQ ID NO: 370190 - protein, 473 aa, unidentified
MGAGVTARVGRRETAAMTLPPPAPARLLIDYRGLLPEAPVSDHSTPGRVPVRGLPVPHRKATNVSLVSASYFVGIDWAARTHAVCVLDPNGRQVAAFTVEHTAAGFTGLIRRLGTFAAVAEIPVAIERPDGRLVDALLAAGHPVVPVKPNAIKTWREGEVISGAKSDPGDAHVIAEYLRLRAHRLVAATPLTEHTTALRTVSRTRSDLVEARVAATNQLSALLGSHWPGAKEVFADVESPISLAFLTRYPSPAHAATLGEKRMTAFCTKHGYSGRRAPAELLARLRRAPAGTTSPAVGEALRDTVLAMVGVLTALNTAIKDLDRSAAAHLHEHPDGAIFTSFPRAGLVNAAQIRAELAEHSAYTGPDAIAALGGLVPVTRASGKHHAVSFRWACNKRLRVALTTFADNSRHASPWAADIYRRARASGKDHPHAVRILARAWVRIIWRCWIDQKPYDPTRHEGARALHQTAKAA

SEQ ID NO: 370191 - protein, 322 aa, unidentified
MSVSNQRCAGIDVSKGTLDIAISNIASQFTVPNGTDGFTQVLRELKRNETRLILMEATGGLESGVACYLQSEGFDVVVINPRQARDFARAMGYLAKTDRIDARVLLQMSEVINQHPEREKYIRPLPDAHRQILAAMVARRRQLTAMLTAERNRLHPSHPLSHASIRSIISALKGELARIEGEMAIHIKKHFSELSELLNAVKGVGTATVAVLLAEVPELGSLSRREISALIGVAPVNRDSGTMRGRRTVFGGRASVRTALYMSALVGTRHNPIIKEFYTRLVAAGKPKKVALTACIRKLLTILNAMLKKNEAWDPMYHQHAS

SEQ ID NO: 370192 - protein, 365 aa, unidentified
MQKISSMQTSEENILNGQLTIGLDLGDRFSSYCILDEVGKILREQKVPTTPEEMKQTFGRMVRSRIAMETGTHSPWVSRLLTGLGHEVIVAHAQQVRLIVKSRRKDDRLDARTLARLARIDPELLSPVQHRSAEAQLHLTEIRARAGLVSARTALVNAARGLVKSYGERLRKCGTQQFRQEITSGLSTGLREALEPLVREVESLNERIKEYERRIERMAKETYPEVELLKQVKGVGDLIALAYVLTIEDPHRFRKSRDAGCFVGLQPGRRDSGESAPQMHISKEGDEYLRKLLVQGAHYILGPFGEDSDLRRWGKKLAERGGKNAKKRAVVAVARKLAVLLHRLWVSGEAYEPLRNSQKAMSTAA

SEQ ID NO: 370193 - protein, 344 aa, unidentified
MMIHFVGLDVSQKMTAICVVDNAGRRLWRGQCPTAPEQIAAMVRRHAGDDSRIGIETGAMTPWLVHELRALGLEVICLDARHARAALKMQINKTDQNDAEGLAQIVRTGWFRSVHVKSFDSHRARALLGARAQLVGMTTRLSNHIRGVLKTFGLLPGAMRGLRFDRKVEVLLEDRSDVAPIVRPMLVAWRQLREQISAFDKAIRVLVRSNSPCRLLMSVPGIGVLSALAYVSTVEDPARFSQSRSVGAHLGLTPRQYQSGDVDRSGRVSKCGDTLARTLLYEAAVVIMTRVKKASELKDWALAIAKRSGIGKARVALARKLSVILHSVWRSGKPFRWAEPAITA

SEQ ID NO: 370194 - protein, 387 aa, unidentified
MEVLYQSCAGIDVHQANIVVCILHGPLTSTRPKREMATFDTTTKGLRACHDFLSQFHVEAVGMESTGVYWRPVWHALCDDFELILAQPAHMKAIPGQKTDKKDAHWIAKLTRIGLLPRSFVPDETIQELRELTRQRKHYVESRNRETNRIHKFLQSGGIKLTTYIEDIMGLSGRNLLQLLVDGTPITPRIVHQSVYTSLKKKVPQLLEALDGYFSDHHRFMLKQSLEIYDFYQKQIELLEERITVYLSQYENHVETLDSIPGIDVITASVIISEVGVDMSQFPTSGHLASWAGLCPGNNESAGKKRSTKIRHGNSYLKKCLCQAAFAARNQKGSTLADRFYQIQSRRGSQKATIALAHQLLKIAYILLKEQMTYPEFLAQKRLLGTS

SEQ ID NO: 370195 - protein, 411 aa, unidentified
MTDSGKRYIGLDVHKHYLIALGVDAELNVVLPVRRVELSRLENWMEKTLTEQDEVALEMTTNTWQLYDELCEYAGSVVVVHPPHVALITRSQVMNDKIAASILARLLAKGLLAGIWVPPQEVRELRGLVAQRKKMTRLATQAKNRLHAVLQRHHLLPPDGNPFRESQNDWWLALPLGQLEKMNLQSDLETLQFAEKQEVRLTEVMTRIAAENEEISRLLHLSGFGVITAVTVWAAIGNIQRFAEPKHLVGYAGLGARVHDSGQTTRTGRITKAGRRDLRIALVEAAQVAANTHPHWKAELARLEPRLGRNKAIVAIARKLLMSVWYILSQQATDRFAEPEAIAQKLLKFAYQVGKNNRPAGQSAAEFVRQRLDVLHLGSDLSSISWGSKKPIPLPPSVWQEKGVSDVPNLS

SEQ ID NO: 370196 - protein, 353 aa, unidentified
MHTHQRSANPIATIGLDIGKNTFHLVGLDKRGAIAMRFKVSRSQLIRRLVNLPPCLIGLEAGSGSHHIARQIQPLGHDVRLIPAQYVKPFLKGHKNDYRDAEAIAEAVQRPTMHFVAIKTPEQSDLLSLHRVRSRLVRQRTAIINQIRGFLIERGITVRQGPRPLRKVLPELLSSPPQALSPRILRLIAELDYDWRHLDERIEVVSAEIESLSQNDAACQRLMTVPGIGPIISSAVVAAIGTGSGFKQGRDFAAWLGLVPKQESTGDRTKLGRISKRGNKYLRTLFVQAAHVVIERRPAAAMRALWPWIHQASKRLAHRNLLAIALANKLARIAWAVLARGRDYEPRITPNAA

SEQ ID NO: 370197 - protein, 344 aa, unidentified
MQIAVLGIDLGKNSCSVVGLDGAGAVIKRRRMRPESIAAFAQKLPACVVAMEACCGAHHLGRIMAGQGHEVRLMSPEYVRPYVKAQKNDDRAAEAIAEAATRPTMRFVELKNEAQLDVQTLHRVRDRLVGERTALINQLRAVLLERGITIPQGRRKLAEHLATMSASESGNSLSPRICRLIDDTRTEWLELDRRIAALDSEFAALARSDADARRLASIPGIGVLNATALLAAIGNGQTFARGRDLAAWLGLVPRQVTTGGKPRLVGITKRGNKYLRKLLIHGARSALPSLAASVTPLGGWLRALMQRVHKNAAVVALANKLARIVWVVLRRGEEFDASAVRAAA

SEQ ID NO: 370198 - protein, 362 aa, unidentified
MTTLELVPVPRQACARPAPGERITVGVDMARNKWASAVHWGDAVHRQLATPGALEHVQKLVGEFHPAHPVRVVYEACGFGYELAWWAQAVGVEVVVVAPSRVERVPGPRVKTDRLDAATLATKGARGQLKGVAIPTRSQHEQRQLVRTYRQVRRERARLQTAVRSLLQEHGRLGPAPASGWGPYERWLATQALPAPVSVAVHELCALRQAAATSAARLVGPLHSLATQPAYRAVIAALTTQAGVGEFTALRLVLEIGDPRRFPSAAAWVNGLGLTPSEYSSGTGPPRRGAIQKCGHTPLRAALVQCAWVAIRSDLTLRAVFDRLVPRAGKKRAIIAVARRLARRLRARWLAALPTAAAAAAR

SEQ ID NO: 370199 - protein, 320 aa, unidentified
MRNAVGLDISKLTFDATAIVGNAEYSAKFDNDSKGLDQFSDRLKSLGCQNLHICMEATGNYYEEVADYFAQYYSVYVVNPLKISKYAESRFKRTKTGKQDAKLIAQYCRSAQESELVKRQKPTDEQYRLSRMIAAYAQIKSECAAMKNRHHAAKDEEAAKAYAQIIKAMNEQLEVLKEKIKEQTEKPNCKEGVKRLETIPAIGRMTAAVLFHHLTSSKFETSNKFAAFAGLSPQQKESGTSVRGKGKLTKFGNRKLRAVLFMPAMVAYRIRAFPDFIKRLEEKKKPKKVIIAALMRKLAVIAYHVHKKGGDYDPSRYKSA

SEQ ID NO: 370200 - protein, 434 aa, unidentified
MTNRNSTPADAVLVAIDMSKHRQEILLERPEGGRRRRMTVMASKVDYDRLTNDLAAIGRPIVVGFEATGNYHRTLAHRLLTAGFELRLISSVALARTREALHNGWDKNDSKDAQVILHMLQIGATQRYVDPLAAGINDLQEMSKTHEAISKAKTQTWHQILTHYLPLYFPEIERFAGNSRSDWFLALLERFPTPGSMTGIGRKAFTEEAWPLVGRKVSKARLLGDIYETASASMALPVDDGSVAIAMFRLVIAQARSLIRQRNEIEQLAHATLAENRDYQLLRMIPGIGPINALTILAEAGDLRRFQHHRQFLKFCGLDLATCQSGMFRGRTKLSKYGNARLRRTFWMAAQVAARQRDNSFRDKLGRYMDGHDNDPDRRRKAMTALTAKMARVAHAVIKTGTEYRPFLERAGTRWKDPSLTCREGAPQDIGVTL

SEQ ID NO: 370201 - protein, 375 aa, unidentified
MSNHSEAFVAFDSSKLRNAVAIADSGRTGEIRFLGEIENSTTATAKLVRKLAGKYERLTFCYEAGPTGYELYRQIKSLGHECIVVAPSLIPKKPGDRVKTNRRDAVSLAKLLRAGELTAVWVPDRHHEAMRDLTRARDTAVDDLRSKRQQISAFLLRKGLHYCAGKKTWSQAHLNWLMSQRFEYPEHRLVFEEMMMAMRQAQERLERLEQAMRAAVPDWSLAHLVTALMAMRGIDLISAATFLAEIGDLSRFQSPCELMAYLGLVPSEDSTGDRIKRGPITKAGNRRARRTLVECSWSYQHPPRVGKDKQAKVAAAPQAVREIAWKAQSRLNRRYRALVRRGKLKTVAITAVAREFAGFIWAVAREATAARAAAK

SEQ ID NO: 370202 - protein, 294 aa, unidentified
MNSKVLSQALLSIDKIYLAIESTGGYENNWYNQLVSFDKRIIMFRINPLRTHHESKKNMHRNINDAISSEIIARHVSENYEELEKAKPRSLHFYTAKQMHKTIQGFIKQKTRNINQLEKVVYSCIPGLLTFSKNGMPKYMYKVLQKYPSKAKILNAKTASLAKIKGLTMEKAEAIQKAVKLDSGSGNTILTELNIKTLAQTINLFSTQIKELQSELAKHGANDLADFLVTIPGCGIESAVSLSIEIEDINRFNSAASLCCYFGVHPENHTSGDISKKPKMSKKEVVHIGVQYTW

SEQ ID NO: 370203 - protein, 328 aa, unidentified
MSNITAVVGVDIAKHVFQLHEISKETGEIISAQLKRKTFLAHFANRSTCLIGMEACGGAQHWARKLISLGHVVRLLPAQQVKAFVCGNKNDFADARAIWMAVQQPGIKTAAIKTEAQQAVLAMHRIRQQLVKFCTAQINALRGLLTEYGEVMPQGRSGIARRLPGIFANLIDRLPTVLIDTLREQFARIGRLDEEVVEIERRLRDWYRQDDACRRLAEVPGVGLLTATAVVAAVGDAKTFKSGREFAAWLGLVPRQTGTGGRVKLLGISKRGDTYLRTLLIHGARSVLTHSKSPPEWITKLVRRRPINVGDRGDSKQDCAHAVGASGP

SEQ ID NO: 370204 - protein, 387 aa, unidentified
MQSVTSATAVATTARANNITLFASLELSKSKWVVTINSPGSEKFSKHVVEGGDGAGLLDLLSRSRAKAEQRYGVQIKTIVIQEAGLDGFWIHRLLLANGVESHVVDAASIAVARRHRRAKTDGIDGETLLRTLMAWARGERRVCSMVRAPSPEDEDRRRLTRERGTLLKERIQHTNRIKGLLGGQGVRDYNPLRRDRFERLEALRTGDGRELPAMLKAEIRRELDRIALATTQLAAVERARDALIRTDAEEPNNPAALLLKLKGLGPEFASLLWLESLFRSFGNRRQVAAYGGLAPSPWQSGGVERDQGISKSGNRRLRKTMIELAWFWLRHQPDSALSRWFQVRVGAAKGRIRRIAIVALARKLLVALWRYVTQGVVPEGVVFKAA

SEQ ID NO: 370205 - protein, 456 aa, unidentified
MAREKRSRGRRDMTLIHPNAAAVDIGATLHVAAVDPDRDPEPVRSFGTFTGDLHHLADWFAQCGVRTVAMESTGVYWIPAYEVLEQRGFEVVLVNARDAKHVPGRKTDVSDAQWLRRLHAYGLLRGSFRPRGEVAALRSYLRQRERLLDYAAAHIQHMQKALTQMNLQLHQVVTDVTGTTGMKIIRALVAGERDPEVLASHRDPRCRASIEMIRQALVGNTREEHLFALAQALELYDVYQDKVAACDRRIEAVLKRLRETAAKPVGPLAASRHTTKQPNAPAFDARAALYAVLGVDLTQIHGLGPSLALKLVGECGTDLSAWPSAKHFTSWLCLAPGNTISGGKVLSARTRRSGNRAAALLRLAATTIGRTETALGAFYRRLSARIGKAKAVTATARKIAVLFYNTLRHGMSYTDPGASYYEERYRRRVLTNLQRRAKALGYVLQEAGPATATGAS

SEQ ID NO: 370206 - protein, 411 aa, unidentified
MHNRQNYLYVGVDLHKEHHTAVMINCWQEKLGEIQFDNKPSAFSKFLLEVETYVSDGLSVVFGLKDVGGYGRALAKYLVDHEQVVKEVNPALSFLERKSQVMIQKNDSWDAECVARILVNKFNQLPNAKPNDLFWSIQQLVSRRNALVKAQSALKNQLHIQLNHHYPSYKKFFSELDGKTALAFWQQYPSPSCLEGTNIKRLTAFLLDVSNNTCSVKKASDILKLVKEDGHTMKEYQDTRDFLVRSIVREIEFKKKEMKYIERELKQLVNLLDYQLETMPGIELVTASALIAEIGDVRRFPNANKLARFAGIAPVYFGSGGKGKTHKSKQGNRALHALFYNLAVQQVQVAKGSKMPRNPVFHAYYQKKLKEGKTKGQALVCIMRRLVNIVYGMMKYKTAYELPVVEEKEVV

SEQ ID NO: 370207 - protein, 422 aa, unidentified
MLGIGIDWAEDFHDIALGTQEKGVIEQFRIDHGPAGITALIERALRREPDPAEVRVVLETRHGLLVEALIDAGFTVVPVNPDVVARRRGPARKKDDAEDARICCLLALDRHAALKTLVPHGEVGGELRAIGRDDERAARDQRRLLNRLRADLQTTYPAALVLAGKDLGAPTVLRLLERWPTQPELAEASRDELVAFARAARHGWPERFADRVEAALAAPALPTRDYLVRAKAAGIGLAAVQLLALHEARRGWAARMAELLLGGPRAGRDHTVKDPDPGKAFPGGEIYLSMPGLGDLLAARVAGEIGEHINQFDTPAGLQCYAGSAPVTRRSGKSDFVVARRLAHNHYLGAAIHQWAFCSLLRSGWAREFYDTKIAAGKSHHAALRALSNRWLEILWHCLAKGVLYDEAVHVANRNRALGHAA

SEQ ID NO: 370208 - protein, 351 aa, unidentified
MMIIGVDYHPSFQAIAFLMEETGECGEQELNHSDGQAEKFYRDLKQRGISVRIGMEATGYSRWFERLLAELGFELWIGDPAEIKAKRVKKLKYDRYDARLLRRLMLENNFPRIWVPDPENRDLRQLLWHRHRLVQMRTRIMNQLQALAMNEGYRWKKKLFSEQGRAQLEKLALAPWASRRRQELLELLDRMNPTIEELTAAVEREARKRPEVQRLMTHPGVGPLTALAYVLIIGTPTRFQRGKQVGTYVGMIPSEDSSAHKQRLGHISKQGNSLLRFLLVEAAQAAARCNPQWRRRYMHLAMRRHRSIAKVAMGRRLGVRLYWMWRNGCEYSRKFEFGSYAGQLVTGHGVK

SEQ ID NO: 370209 - protein, 412 aa, unidentified
MLRERGRPVAAVMIGVDPHKGSHTAVAIGTAEQVLGQVRVRACTAQAERLVAWAAAWTQRTWAVEGAGGLGHLLAQQLVAAGERVLDVQPKLAARVRLLAAGTVNKNDPNDARSVAIAALRSAACPPVRADDHAAVLKMWAKRHRDLSRARNQVACRLHAVLCELVAGGVSKQITAAQAARILEHAGPRDAVSQARCELAGQFLADLRHLDTQRRDIKRTLAAAVRACGTSVTELFGVGPVVAATVIGDVRDISRFPSRACFAAYNGTAPVEVSSGNRKIYRLSLRGNRRLNHAIHMAAVTQISYRHSPGRAYYDRKIAEGKTTKEALRALKRQISDAIYQHLKADARRAIAGPGGHRGNGSAASVAGSHPEHRLFGQATPGPDPTLRSGPALSKTTARTRRSRPGPTPASR

SEQ ID NO: 370210 - protein, 348 aa, unidentified
MLADQLDYIIGVDPHRDSHALAVVHVQSGAVVFESTVVANSERYADALKLVDRHASGRRAFAVEGTGSFGAGLTRFLTRSGEQVLEVGRLRRERRSGGKTDALDAVRAARSVLAQERPATPRAGGERQGLQALVAAREGAVNAKRAGLCQLRDLLVTTPEPLRSELRPLTRARLLQRLAATRPHGRNDAELRGSMLALRSIARRVLQLTAEERELAREIETLTRKLAPQLLNQPGVGPHAAAQLLLSWSHQGRISSEAAFARLAGAAPIPASSGQTIRYRLDRSGDRKLNRALHMILVTRKRSHPATIAYIQRRLQEGKTRREANRCLKRYLARNLHRLPEHGPPLAT

SEQ ID NO: 370211 - protein, 341 aa, unidentified
MSEYIGLDVSLKETAISVRRNGERIWRGKCPSDPKLLAEVIRHRAPAAERVVFETGPLSVWFYHALSAEGLPAICIDARHAKAALDMAPNKTDAKDADGLAQLAEVGFYREVRVKGYDSMLIRTLVTARTKLIRIMTELSNQIRGLMKTFGLVVSKGSGLVFATNVRNLLGSNAALEQIILPLLEAWRSVRGRAAELDRQLVAMARRSDACQVLKTIPGVGAVTSASFVAAIEDPKNFRISRSVGAWLGLTTRRYQSGEVDYDGHISRRGDSHLRGLLYEAATVILTRAHADSSLRAWGMKLREKVGFKRAAVAVARKLSVIMHRMLTTGEFFDRSAGITA

SEQ ID NO: 370212 - protein, 343 aa, unidentified
MRNYTGKKVYLGIDVHKKTYAVTAICEGLVAKKDTLQADPVRLINYCQKYFPNAQIESAYETGFCGFHLHRLLEQSGIQNKIVHAAGIEIAAGDRVKTDKKDSRKLAEHLSMGRLKGIHVPSQQRENFRAIIRARETFINHRRRWACQIKSILFQQGLIPFDDERIVSEKWIKSLMELPLSDEIRYVIDEYSSMWLQLTIKIKALDQKIASQAQGDGDLEMIYRSVPGIGVTSARVLANELGDASQFHNEGQLFKYVGLTPTEYSSGEHTRQGHISRQGKPIIRKILVQAAWKAIKLDPDLQQIYERIGNRAGKKKAIVAIARRLIGRVRSCIRTGTLYTLRE

SEQ ID NO: 370213 - protein, 428 aa, unidentified
MNEDELSRVQEFRQLKKQIQGSESHLIVGIDVAKDRHHAFLGTATGRTLVKKLIFENSASGFSELLARVEAVRAQSGLSGVVFGLEPTGNYHKPLGRYLISKGCHVVLVGGKAVKNNRELLDERWDKHDTKDAANIADLVSRGKCFYYDMPSGQIEELRELHSLRARLKKEEHSLNLRIRNNLLAKHFPELDSFYTASERETLAIVRWCLNPQQIAGMPFDEFFKRVAPNARGIGQKLRLQKIHRLAHESIGCPVDSAVQLQAGLLVEKIKQVREQIVQVEQVIQQLCVQFPSYEYLLSIPGFGPYVASKVLATLADPRRFDTAKQVIRTAGYDLCADRSGKSSDQAVPVISKKGNSQLRYALYQAALIASSRHRFFMAYFARMLQGRERERGIRTKMRVKLAAKMLVIAWTLMKRGEPFNPEYLKMQ

SEQ ID NO: 370214 - protein, 327 aa, unidentified
MTITKYIGMDVHKESISIAVMNSTGKLVMECVIETKASMLLQFIDGLRGDVHITFEEGTWAAWLYDLLKPHVSEVVVCNPRKNALLKDGSKSDRIDARKLAELLRGNHLKPVYHGEQGLRTLSIACAGIQVYAPRHRSEWLGRISEAGVRRRAEHCYEQLDVLRLLRQQVRRDLLLESKKHQAWRLLGLIPGIGPIRAALLIALIQTPHRFRTKRQLWTYSGLGLETHDSAQYRVVEGQLQRSKKPVTLRGLNQDHNHDLKDIFKGAATRASSSRGPFHDFYEHLLAQGRKPTMARLTLARKIAAITLIVWKKEVRFDASYLKLQAA

SEQ ID NO: 370215 - protein, 367 aa, unidentified
MEKSSTVFVGMDVHKESIDITLAEPGGEVRRLGAIGGDRGSLLKMVRKQQSKGGERVFVYEAGPCGFWIYREITALGHACMVVSPALIPRRAGDHVKTDRRDSARLASLARAGELEAIHVPDIRDEAIRDLVRGRDDAVIAQRRVRQQLKALLLRNDIRYVGKTSWTGAHRRWLSELKLPEPAQQIVFEEYVDAITVATGRIERLTRAIETQVLTWRFAPVVGALQAMRGIQFVHAVTLIAELGDLTRFASARQLMGYLGLVPREDSSGEHRHQGSITKAGNSYARRALIEAAWAYRYPARVTRIIATRQAGIPKAACDIAWRAQLRLSAKYRRMNARHLNHNKIVVALARELSGFVWAIGQSVKPQ

SEQ ID NO: 370216 - protein, 343 aa, unidentified
MKITRVGVDLAKSVFQVHGVDRAGRCVWKRQLKRSGWLKVMSETLEPGCEIGMEACGGAHHWARELRARGFKVKLISPQFVKPYLKSLKNDVNDAEAICEAMSRHHMRFVAIKTVEQQDIQALHRVSEGLMQSRTAKGNQIRGLVAEYGLVAPKQMGPLRKAIPCWLEDAENGLQPAFRALLHGLWQDLQYLDERLNELDKEILLLSEHHPDAKRLKQLRGIGPLTATAMVAQFGDGRHFRRGRQAAASVGITPRHAGTGGKNWISGITKRGNPYLRSILIHGARSVVSKAKHKDDRLSLWVTELANRSHPNVAAVALANKTVRIAWAMLRNGADYDPEFTTA

SEQ ID NO: 370217 - protein, 352 aa, unidentified
MTRITTIGLDLAKKVFQVHGVDAEGKVVVARKLRRKEVLAFFAKLAPCLVGMEACGSAHYWAREIAKLGHTVKLMPPKYVKAYVKRGKTDAGDAAAICEAVTRPSMSFVPVKGLEQQGLSMLHSARSQLIGQRTQLVNAVRGHLSELGIIAERGLLGLGELTAIVRDESDQRLRVTARAAMMVLVRQIETISTEISALDSALRKENKASELGPRLETIPSIGPVIASALRARVTDAKLFENGRHLSAWIGIVPENDSTGGKVKQKGLSKKGDRYLRSLLVNGAMAVVRQAQIRPDKNPWVTKLLGRMSAKQAAIAIANKTARIAWAIMVHGGVYEAGHRAPQYRAEACAAAG

SEQ ID NO: 370218 - protein, 338 aa, unidentified
MRWYSGIDLHSNNSVMVVIDDADRIVYRRRLPNELGKILEALEPYRAELGGVVVESTYNWYWLVDGLQAAGHKVHLANTAKMKRYDGLKHGGDETDAFQLAHLLRLGILPRGYIYPKEQRALRDLGRRRMQLVRSRTVQVLAVENVQARETGARMTGWQVKQLDAAMVQGLGLLPEVTLGMQANVAVIMTLNVEIARIEKHLALSLRGRADYQLLGTAPGIGHTLTPVILLETGSIERFAAVGDYASYARCVDSVRLSNDRKKGEGNRRNGNKYLAWAFIEAANMARRWCPEARRFHDRKRAKTNAIVATKALAHKLARACYHMLKNGEAFNMQRCFG

SEQ ID NO: 370219 - protein, 335 aa, unidentified
MDKQTIAGVDVSARRLDVAAQRGEEQLVRREFANTAKGHQRVIRWLTKRGAHARVVLEATGVYSHDLALALAEAPGVEVMVANPRATHAFATACMQRTRTDLTMAIILQSYAARMRFVPWVVPPPAARALQAVGRRMAALSAEQTREKNRLHAAQAKAATPRAIVNDLKANLRQLTRRLRTLTVEAQRLIANDPQLARAAAQLTSIPGVALTSAIYLLGELLTLAPDMSVRQWVAHAGLDVRVVQSGTSVRAAPRMSKMGNAHLRRALYMPALVAIRFQPNVRAFYEELLARSKAPLQAVVAVMRKLLHAIYGMLKTDTAFDGAKFRALAAASQP

SEQ ID NO: 370220 - protein, 368 aa, unidentified
MTKNITVAGKETTRTFAEKKYTVGLDLGDRWSWYCVLDERGEVVFEHQLSTTPKALREVFGAMPQSRVALETGTHSPWISRLMKEQGHEVIVAQASKVRLIGESRKKDDRLDARTLARLARVDPELLGPIQHRSARAQADLIMIRARAGLVRARTVLINAARGLTKSYGERLQGCNPRNMDADKRKGLSAELQLALEPLLRAIESLSQQILDYNERIEQMARDGYPEVARLRQVKGVGTLIALTYVLTLEDPQRFTKSREAGCYVGLQPGRRNSGSSTPQLHISKEGDPYLRTLLVQGAQHILGPFGGDSDLRRWGLKLAERGGKNGKKRAVIAVARKLAVLLHRLWVSGEAYQPLRNSGAVELQAAA

SEQ ID NO: 370221 - protein, 344 aa, unidentified
MTYYAALDVSLRSVHLCVIDDQGEIKAETKLNSEVTDIIAYLDGLELEITSVGLEAGTLCQYLTYGLQSAGFEVVCMEARQVKAALSAMRNKTDKNDARGIAQLLRSGWYSQVHIKSMESHRVRALLSSRKAVLSKCIDLENEVRGLFKIFGIKLPPKLGHGSFDAAVRDIIETDATLSFALLPMLDARLVLYHCFRELDNRTRHLAHADPICQRLMSAPGVGFITALTYKAGVDDPYRFKHSRTVAAHFGLTPRRFQSGEIDIGGHISRCGDRNVRCTLYTAANALLTRSSKWSPLKAWGMKLAKTRGHRRAVIAVARKLAVILHRMWMDDTQFQWGSEGARS

SEQ ID NO: 370222 - protein, 410 aa, unidentified
MDVVVARCSGLDVHKDSVMATVRTPGSAGQREEVTKEFGTTTAEVLALRDWLVAQGVTLVGMESTGVYWRPIFYVLEDAMECWLLNARHLRNVPGRKTDVKDSQWICRLVEHGLVRPSFVPPKPIRELRNLTRYRKAQIDERCREAQRLDKMLQDAGIKLSSVATDILGRSGRDMLDALVKGTRDPGVLAELARGKLRAKIPALKEALKGRFGAHHALLVSSILAKLDFLEEIIDSLSAEIDRVIAPFAEHLERIDTIPGVDRRVAEALVAEVGVDMSVFATPDRLASWAGMCPGNHESAGKQRSGRSRKGPKWLQVHLTEAAKAAGRTKDTYSGAQYQRLRGRRGAAKATKAVGHSILVAYFYICQNEIPYKELGPDWFAKRRPEAQANKLVRQLEHLGYRVTLDQPSA

SEQ ID NO: 370223 - protein, 361 aa, unidentified
MKSITIIAFDQHAATTVAAVLLPGQRTPALHSLTSDSPTILRLVRRLRRDGPVQCCYEAGPCGFELQRALTADGIACDVIAPALIPRRAGDRIKTDRRDATQLAVLYRAGALTAIHVPTEDEEAVRDLLRCREDIRADLLRARHRLSKFLLRHGRRFTGTKKAWSKRHDAWLRAQTWPLPALEQTHRAYLRTVDEAVARLRAVEEDLRGLLDLAPLRPRVERLRCFRGIDDLTALTIAAELGDARRFATAPSLMAFVGLIPSEHSSGTKHARGAITKTGNAHLRRVLVEAAWHYRHHPFVGDTLRARQRGAPPTVIAHAWTAQHRLHRRYARLAARGKPIQHVVTAVARELTGFVWAALTQ

SEQ ID NO: 370224 - protein, 460 aa, unidentified
MKKKPAGQQKGSAQKKADWKALEIVHPDAAGIDVGGSEHWVAVSPDRDPEPVRRFGCFTADLREMARWLIDKGVRSVAMQSTGVYWMPVYEVLEQHGLEVYLVNARHTKNLPGRKSDVQECQWLLKLHTFGLLNNSFQPTNEIRIARTLWRHRGNLVAEAGSAIQRLQKALTEMNIQLSNVLSDLSGVSGMKIIGAILKGQRDPQVLAALARPEVKATAEDIAKSLEGNWREELLFVLEQEVELYRFYQEKIVDCDLQLRKHLESFGSTVDIQAQPLGPKPKGKKGSRNAPQFDLRTELYRITGIDWSQINGIDVLTAQTVIAEAGADLSAFPSEKQFASWLGLCPSNEQSGGKILNRRTRKVVNRATVAFRNAAATLLRSQSYLGAQYRRLRTRLGAPKAITAMARKLACLFYRLIKHGQQYVDKGTEYYEARYREQQIRSLAKRAQKLGLQLVIPKTA

SEQ ID NO: 370225 - protein, 374 aa, unidentified
MSKHSEAFVAFDSSKLRNAVAIAEGGRDEARFLGEIENSPAAISKLVRKLESKYRRITFCYEAGPTGYELHRHIHSLGHECIVAAPSLIPKKPGDRVKTNRRDAVSLAKLLRGGDLSAVWVPDRRHEAIRDLTRAREAAVIDLRRKRQQTSAFLLRQGRWYPANKKTWNKMHMTWLASQKFDQPERRIVLEELILAIGQAQERIERLEQEIRAVVPDWSLGAMVTALMAFRGIDLISAAVLLAELGDLSRFQTAPELMGFVGMGCSESSTGDTIKRGPITKAGNRRARRTLVECAWSYQHPPRIGVAKQQKVAAAPPKVREIAWKAQCRLNRRYRALIKRGKLKTVAITAVARELAGFVWAAARETTSAERAAR

SEQ ID NO: 370226 - protein, 453 aa, unidentified
MKKDRKKIAKLPVIEPNAAGIDIGATQIFVAVPPDRDTEVVRCFSTFTADLEKLADWLEACKIRTAAMESTGVYWIPLFQILEKRKIEPVLVNAQHLSNVPGRKKTDVEDCPWIQHLHAVGLLRGSFRPNDEICRLRSLWRHRDNLIQLATVHVQHMQKALDQMNLQIHHVISDLSGTTGLAIMDAILAGERDPGNLAKLRDWRIRASEETIRKALVGDYREEHLFVLRQSLQSYRHFQGLIQEVDMEVKRWMQQLPMKVDPQEHSLGTEKNSRKTPWRNEPPALREDLYRAFGVDLTQVPGLNTLTVQMLLTEIGPDFSRFPTTGDFCSWLRLCPDPRITGGKVVSSKTRPSKNRAAAALRMGAQGLHRSQSFLGSYFRRMKARLGTPKALTAAAHKLARIVYHMVTTRQEFDATVFEALERSSQHRKRIRLRAQARALGFDLVELNAEAAS

SEQ ID NO: 370227 - protein, 335 aa, unidentified
MHYLGIDLHKDESHVAVLDDDAEVVEEIRVTNANLDDVAEEYAGAKAAIEATSNYYTVYDTLDEHLDVVVADPSQTKAIGYAEVKNDRLDAKLLAQLRRAGVIAESYVPSEELRERRALVRGRKRLVEKRTDFKNEVHSLLDQHGITYDWDPFSVNGRDILASEDVSLGVVGDQLMESFLSIIDELTAQIEELEELIEETAASLEETQLLMTIPGVSFYSSLLITSEIGEIDRFDEAKQVVSYAGLDPVVRESGDSRTEGSISKRGSGDLRWVLVQCVQTAVHRCNDPYLGRFYARLKQRKNHQIAIVATARKVLVSIFHMLEREEVYNPPEVSA

SEQ ID NO: 370228 - protein, 323 aa, unidentified
MQGKVSFQEDAMPVVYAGVDVSKEWLDVHLHPLGESRRFSNDKTGIRQLKRLLARHQPKSIVMEATGKFHRPAHRSLWLDGFAVAVVDPLRARMFARACGYLAKTDRLDARFLALLAESLRPPADTPPSPHIEALQELVNARSAAKCDITALQNRSKTATTALLRGELNRLVRRLEQHVERLDKEIERCVGEDPQLCRKAEILTSIPGIGRVTALALMAGMDELGSCSGKQAAMLAGLAPIAKDSGARTGRRSIRAGRPAPRRALYMAALSARRYNPALARFADTLKAAGKPAKVILVAIMRKLLVLANCLLAHDRIWTPNPP

SEQ ID NO: 370229 - protein, 407 aa, unidentified
MKHVIALDVSKGKSTVAIYNGYKQCEFEGELYHTRVDFEHLHQRIEEIKILDGHAPEIVFEATGIYSKPVEKFLRDYGHIYCRMNPLEANQQMASMRRYKTDISDAHELAKTHFKMERETTYVQDAYYDQMRAITRYYDEIDGEIILLRSRMHAILHISFPELEQLLTPSSALFLNFVQLYPHPALLMAHSKTIIKNRLKSNTRKNLSLERAEKKAIVLLEAAENSYPAIEPTDIRCDQVRDYARRIADLLEKKDQLVKQMVEMSKGRKEYTVLRSFPGIGDTTACRLIGEMGDLRRFKNAKQLNAYVGIDIMRYQSGNTQYHDRINKRGNKKLRKILYFMICAMLMTKGKPNHFVDYYYKLKTQPQRKPHKVAIVACINKFLKVTFHLLKHDILYDYESALPAQKS

SEQ ID NO: 370230 - protein, 356 aa, unidentified
MVTGLKHQKEKRSMEHFAGLDVSVKDTSVCIVDDTGKVIREVKIASEPAALLQVLTNPAYHFKRIGLEAGPLSQWLYSALAEAGLPVICVETRHMRAVLKAQINKTDRNDARGMAQMMRVGLYRPVHVKTLLSQKLRMLLTHRKLLQSKAIAIDNDLRGTLRNFGLKVGIVGAAKFEARIKGLVEGLPDLAALVEPLLIVRRVLRAQLGILHRRLLAIVRDDEVCRRLMTIPGVGPVVALTYRATVDVPARFRKSKSVGAVFGLTCAKYQSGEIDRSGRISRCGDAMMRVMLYEAAQIMLLRSAKWSWLKAWAMKIARQRGMKKAIVALARRLAVIMHRIWVDGTEFRWTREVAAA

SEQ ID NO: 370231 - protein, 363 aa, unidentified
MKIVGCDLHARQQSIAMVDTETGVLTEKVLKHEGNAVREFYAALEGPVVVGIEATGAMQWFLELLEQLGIECRVGHPAKIRAAETRKQKHDRRDAEVILDLLLMNRFPDIWMPSTEQRDLRTLLRDRHQWVKMRTRLQHTLQAIALNHALREGRALWTAAGRRSLQDLTLPKYTAQRRDEQLSLYTQLDKRIQQLDKQVETEARQRPQARRLLTYPGVGPVTALATEVFLGDPHRFAGANQVASYIGMIPCEHSSGKRQRLGKLSKEGNSLLRYLWIEATLHAAVKDPELKRFYRRKLVQKGMGKARVATARKLGIRLWIMLRDEIDYEEFCRRGKLPQKGKAHAGMPDYNSGPARAVTGSTE

SEQ ID NO: 370232 - protein, 340 aa, unidentified
MEYGAIDLHLKTSVIRIVDADGEVVVDRTVATTRAALTGVFAGRAPLRVLVESGTESEWVAQTLEACGHAVIVADPNYALMYGHRARRIKTDKRDVAALAEACRLGIYRAAHRVSAAQREARRVVRIREQLVRIRTQTINQLRAQLRQEGIRLGPGSAETVVPRLDALAMPDALRLGLTPLRAVLASLAPVLAAATADVVARASADPVVRRFLTVPGIGPITAVTFRAALDTWERFRDASAATAFLGLVPREDSSGTRQRKGAITKAGPGPVRALLVQAAWVVWRQRQSGAALHAWVERLAARRGKRIAVVALARRLARILFALWRDETDYQAAPGVVAA

SEQ ID NO: 370233 - protein, 387 aa, unidentified
MRKEPVVRKDTRYVGLDVHAETIAAAVAESDGEVRDLGVIPNRPELIRRLMKRLGPARQLKVCYEAGPTGYVLYWQLRGMGIHCEVVAPTLVPVKAGDRVKTDRRDAMKLARSYRSGDLTAVWVPDAAHEALRDLVRAREAAQSDHLRARHRLQKFLLRHGRRAPERIKRWTERQLDWVRHEVSFEAEAQQAVLTDYLSEVDHARERVRRLERAIDEAIEAAPATQRAVIEALQSLRGIAKVSAVSIVAEVGQLSRFARPRQLMGYSGAVSREDSSGGRIRRGSITRTGNAHLRRIVGEAAWAYRHKPSVQGSLRVRQEGLPEPVKEIAWKAQHRLHGRYRRLLGKGKAKQQVITAVSRELLGFIWAIGVHVERAMAVEGGKKHRAA

SEQ ID NO: 370234 - protein, 428 aa, unidentified
MSERDYNKQVAKRQRIQSTTLVVGVDIGKAYNAVGFMNKEGKVLGSCAKVENTREGFEQFMRMVEDLKAQYGFNDVLIGMEPTGHYWRKLAYFGKEHGYEVRFVRTTALRHHRELDESSSAKSDKQDALTITNITREGKYIDTVIEDGSLRQLRTLAKARERLLRYSVSAKNSLHAALDDYFPELHELFWSMGSRSLWAILDRCPFPEDVRLIKVSTLKELIVKSSRNRAGSVQKAKALYQAATKSIGLRPIGSADRYRVQMCLEEVKRTVLTLKSMDQQMKSLLKEIPAAPYLLSIPGIGALSAAVFLGELGDPAHFHHARQIVKYAGYDPQESDSGSWVSRKFISKKGRWLMRKYLFFMSMRVVVLTNYFKAYYERKLETKNRVGQLPRRKEILCAVAIKLIKVIFALLRDKRRFEDTVTPVFQTA

SEQ ID NO: 370235 - protein, 375 aa, unidentified
MKPVRTPPVVADAFSFVVGVDTHAESHVYSVLVAITGEVRATQTFRADPEGVASALRWIMATLTGDVLLSIEGANSYGSLLAQRAIDVGFAVCNARPPRRVRTTPKTDQSDAVMAAWSVLGTPVAKLSQPRARGARRTLAMLISGRREMEVRSVAIRNRLNGLVRTTDFGLDTTIKLDIAAIRRFTTPEWVVGDRYEVMARQEVARLAGEYLRLRDQLVDNKVKLEALVQEIAPGLLDLFAVGPVTGAIILAAYSHPGRVRSESAFASLAGIAPIDVSSGKTVRHRLNVGGDRQLNRAVHTIALVRLIRDPRSRDYLERRLREGATRRQVLRSLKRYVIRDVFRRLDRIMREQHGLAVSGAEVGVVEGNATVGHS

SEQ ID NO: 370236 - protein, 357 aa, unidentified
MGRSTTSKLKISHTDFQNACCEKAFFAGVDFHKRFSVITLGGKEANILSQHKLINDEGEIKKFFLQHGPLVCAIENCRGIEWFVEIVKACGCEVRVANTFAVKQIAQTAKKTDRVDSKILMELVARNYLPTVYQPTRNERILREKLRWRTKLMRSRTQFKNVAHATLDKEHKGAQLDSALGRECLEQQSGLSVERHEQLQDCLQVIEFFHEAMDESDRALDHIAQENPDVQRLTTIPGIGNLSGLMLVAELGDITRFKSARHVAGYLGLVPRLYASADTTRLGRITKQGPGHLRRILVQDAWVAVRDSEAFRQKFNSILKRRGKKTAVVAIARMIAEIAYHVLKDKTEFDEKKMTLG

SEQ ID NO: 370237 - protein, 415 aa, unidentified
MYYVGIDIAKSFHVVSIIDDEETKVINKPFKINNDAKGFEKLLTILDSITLDKSEFTIGLEATGIYGENLQEFLKSKGYSVKLLNPFQTTRYREQITLKKVKNDEIDSLVIALLLKSGKFSSGYITDDEYQSLRTLYRNRATIQADMKDVKKRILTQITVTFPEFENFIKPFSVSGLALLDKYPTAHHYKHSSVDRIMKLFRHIQGNNFTQSKALQLLELSKESIYSGKAKDARAIAIRSTIRLLQMYLSELDIIEAEILSLLQNSSVKTTVDEAGIEIQKTDTLLHNLKTIPGVAEKTIAALISECGDLTRFPSIPKFIGYLGLFPTENSSGNSKYIGHLSKRGSPLAKHALYMSAVSCLIHNTQLKQLYDTKRSQGKSKKEALIAVSRKIATIIYSIFKYNVPYDPNRVFAKS

SEQ ID NO: 370238 - protein, 392 aa, unidentified
MGASQHYDSNVKPTEPPGIKSDRWGGRPQRHQCAMVRVVRTCTKEPPAMSITMIGLDTAKSVFQIHGVDETGKTEIRRKLSRNDLISFFKKHELCTVVLEACGAAHHWARILTGLGHDVKLIAPEAVKPFVKKGKKNDAADAAALCAAASRPDMRFVPAKSLEQQGILALHSARSLLVKQQTMLANAMRGLATEFGLTVPKGIGKLEELAVLVEEDETFPMKARQAFTGLFDQCKALTESIMTFEAEIVAHARHDETARRLATIPGIGPITASLIAATVGDISMFKSARHFAAWLGLVPRQHSTGGKTRLGRITKTGNREIRKLLVLGATSMVYRAPQWNSAAGLWFRGVLERRPVRLATVALANKMARIAWALMTRKEVYQAKGRVAATAA

SEQ ID NO: 370239 - protein, 374 aa, unidentified
MADYSEVFVGIDTSKLRNAVAVAEGGRNGEVRYFGEIENTEAATSKLVRKLAAPHRQLTFCYEAGPTGYGLYRLIKALGHDCVVVAPSLIPKKPGDRVKTNRRDALNLAKLLRAGELTAVWVPDARHEAMRDLVRAREAAVDDLKSKRQQVLSLLLRLGRHYRGKRTWTRAHMIWLVSQKLVHREQRIAFEEMLLAVRQADERVIRLERVIAAAVPDWSLSKVVMALMAVRGLDLISATIFLAEIGDLSRFASPRQLMAYLGLVPGEESTGDRVWRGGITKAGNHRARRILVECSWSYRHPPRVGKKKLAKVEAAPPAVQEIAWKAQARLSARYRALARRGKRPTLVVTAIARELSGFIWAVSRAVGAPATPTM

SEQ ID NO: 370240 - protein, 371 aa, unidentified
MECYVGLDVHSKASVFVMQDGHGQVLAQGEMPTTPEGFRRWHEAQRLPAGTPVALETGTVAFFVARELTGLGCEPIVVDAREVRLKAHRPTQKSDRRDAFELCDGLRRGIYRAIVHVPPRPVARLRETLARRRHVVRLETAQVNAVKRLLRGAGLGRLSRSLGTAVGWAKLLATLAGHGELRDYIAPHRALWRCARTQRVALESALTAQLAAPAFAPALRRLQTIPGVGPIVAATVLAVFSDVRRFADAKHAASYAGLVPSTYHSGDREAYGRITKRGSGELRAMLCEAAHHASRPSHPLHPYFAILCAKRGYKMATIAVAHRLARITFAMLRDGTDFDVGKLNVEESPFETHVECRRSGHEIGMIAEAED

SEQ ID NO: 370241 - protein, 346 aa, unidentified
MLHVGLDLSRKRIDVCLISGQGELIDRFAATPDRDGLYGLAARVAVYGEPVRAVVESMNGARFVHDELVAHGWEVLVADAQKVKGLAPLACKTDKIDSRVLAELSFRDLVPAIWLPTLELRREREISRWRLHLVKHRSTLKNRVHSTLITFGHQRHMSDLFGVSGRRLLKELDIPEPWRSHVDASLVLIDDLEARITHIAKDLRRSGADHLYIPILMTAPGFGWITSFTVACEIGDIGRFSSPVKLTGYTGLCPRVKQSGQMDQRGPLSKHGPKYLRWGLMEAAIAASAHPLYRERYQRTKRRLGKQRGPKVAQIDLARQLAEAIWYMLTRNQPFAPAGAINRLAA

SEQ ID NO: 370242 - protein, 581 aa, unidentified
MLPRSGSPRQSPAGPTAIPIGVGIDTSRYGHYAAFLDADLQTAAPDLEVLESAAGYARLRQRLSDLVARFGSVHFHVRLDAAGLYADNLLAWLGGLCINHAAVTVSCGDTQRNKNYRVAIYGHQKSDPIEARSCARYALTERPKPGTAVPSELLPLRQVAGRLQAVVRQRTRLVNQLHQLLARTYPELAVLVKDISTGWVLELLTRYPIARLLAQATDADLQAIPYLPHDRAAELLAAARDSVGSLAGAVAADLVRDQVRQVRDVQARQKRLESLLISAYRDLPDSNHLTTISGFGDVTAAVLTAFVLDIDRFDTPGKLVNYFGVLPVEASSGVDRDGTPRGPKRYRMSPRGNDLVRRYLWMAALSAARHNPACRALYARVRAKHPDKPSIAIGHVMRKLLHLAFAVWKTGQPFDPKHYPWEKPGPSTCVDGSMDEVQAAGHTLDEPARSVVTATCASTVADAGPAVDGAEVWLDFAHLKRQLPMARVLDHLGLTARLKGSGAQRRCACPIHHGDGRGRTFSVNLQTNVYQCFDAGCASQGDVIDLWAALHQRDLRAAALDLVHVFGLEPCPPGGTEKRNS

SEQ ID NO: 370243 - protein, 438 aa, unidentified
MSNKVIFNLDELFISVGIDVGADFSWMSIALPNQQFVGKPYKILHISIDSLTTAVSKIKEAEELYSLESRIFLESTGIYHYPLFCYLRDKGFNCSVINPIITKNSTNINIRKVHNDRFDSKKAALVGLKPDLKVSLMPSDLALNCRNLCREYYDLMDNRSAYVNKLQGELRMAFPQYLGIFSKVTINTSLTLLETYTSPSAFLKADKQEIIDIIKSTARFGLTYAQNKYNAIIQAATDANQFGYIIDSNIKRIRLYISFIRKYDEEINNILESLHELVDANEDADFVKQIHLIETFKGAGFLSAVSIMGEIGDFSAFSKPKQLFAYFGLDPAVKQSGKFEGTKVQMSKRGSAIARRVIHTLTLQSISISRNREAKNPVLREYYLKKCDSKPKLVAMGAVSHKVCNMIFAILRDNKPFKIIAPQEHIKQYNSAKCDIAA

SEQ ID NO: 370244 - protein, 316 aa, unidentified
MTCYVGVDIGKNQFDVHLHHQARGQSFSNSPEGFTAFLSILPAPQTCHIAMEATGKYFFNLAQFLFNHQIKVSVVNPASIKYYAQSQLKRTKTDLQDAKLIAHYCQSQQPKLWQPPSQVIVELQEWQQFQALLIKQKTQLTNQMQTTECERLKQLQLEQIVQLEQEINEVSEQIKTLISQDEKLNEQTSLLTSIKGVGEKTAIQVLTLITDIDGFDNAKQLASFAGVVPQIKQSGSSVNSSSLSKIGHSELRKCLYMPALAAIKFNPVIQTFAQNLQSRGITGKKKVVAVMRKLLHIMFAVLKHGKPFDPCYKIST

SEQ ID NO: 370245 - protein, 335 aa, unidentified
MKMFYLGIDVSKEKLDLCLMENSNVLEEMEIKNNTKVISKTISSLFKKYKDTMDNMLICAEYTGQYTYPLCCVCEEMEVSLWLENPSQIKYRSGVQRGKSDKLDAKKIATYAHRFVEEAKLFNLPQKSIEALKHLVSERDLYMVEKGKLQGQLTDQERFMDSSLYKKKKKRYEAIIRQLDKAIADVDNEIKKLMASDKMLSTQHELLCSIDGIGERTAIKMIVETNAFRDFKDPRKFCCHAGVAPFSFTSGSSQYTRNKVSNRADKSIKALLHMAALVVATRMNGELNEYFLRKVAEGKNKMSVLNAVRAKLIYRMFAVIRNQRPYEKIYMQGLA

SEQ ID NO: 370246 - protein, 323 aa, unidentified
MTRIICGVDVASKSLEVRIGQQGAAGSFANNSEGIAALGAFCRVHQVDLVAMEATGGYEQQAFAQLSEQGLPVAILNPRSVRQFAQSMGSLEKTDRIDASMIAWYAEVKKSRPVCLAPDSQQHLRALVTRLRQLTEMRAVQLNQQRLVTDRAVQASFKKLLAVLARQIRELEQRIAALVEKDPLWRELNQDFRTIKGVADRTVARLMAEMPEIGTLGNKTISKLAGVAPLARDSGQYQGKRVVRGGRAAVREILFIVASVVGRYEPDFVAFRQRLRAAGKPPKVVRIALAHKLLVRLNAKAREVRQRLAALQPDSNALMAESR

SEQ ID NO: 370247 - protein, 361 aa, unidentified
MVGTMTWVGLDVHARSMHAAAIDVMTGELSRVRFGPGVEAPLEWLQSLSGPVRACYEAGPTGFGLYRALTEAGIDAQVIAPGKTPRGPGDRVKTDRKDAELLARQLLAGALTVVVVPSREVEAAREMTRAHDVCRQELMRARHRVSKMLLRHGRVYPKLKTWTAEHRRWLSAQRFPEAPSDAVFADLLAAVDGITSRKTAIARELSQLAADERWCPTVSRLRSFRGIDTLTALSIHLELGADWGRFERASALSAWLGLTPSLSQSGESSRQGAITKTGSALARRLLVESAWHYSRTPRLGATLANRQQGQPDHVLAISNRAQQRLYKVNRRMRARGKPHNVTVVACARELACFLWAAATAD

SEQ ID NO: 370248 - protein, 341 aa, unidentified
MNAIYYIGLDIHKRVIAYCIKRIDGGLVRQGIVAAERKALNRWLSELPGPWYGAMEATIFTGWVYDFLKPHALELKVAHPAMLKAITAAKKKNDRADAEKIADLLRVNLLPECHMMPVELRELRRVLRYRNMIVNSAVKMKNKMSGLLMEVGAIYDKQKLHGKKYFGALLERVEDVPDSVKALLKMSRNGFEMFNDIQKKLVSALRTNSLIRERVQRLMSIPGVGELTALTWVLEIGEISRFSSSRNAISYCGLCSGQHESAGKEQRGPISKKRNKHLQTKLIEAAKLAPHWNEQLGQLHERELARGNRNRATLVVARKLVEFMLAVERRETDFELLKKAA

SEQ ID NO: 370249 - protein, 421 aa, unidentified
MQVLYERCAAVDVGKDVIAVAVRRPGKGRDGRVTDKRVYKTFYGVLREMAGWLASQGVTHVAMEATGVYSMPVYHALLEHGGFERVLVCNAGHVKNVPGRKTDLADAEWLAQLLECGLLAGSFIPPAKVKAVRDLVRYRAKIARQRVAEIARLGDVLQDAGIKIDSVASSIATKSGRLMIEALIDGERRGQVLADLAIGKMRAKIPDLSMALEGRFGEHHAMLCRLHLDHIDHLEAMIAQLDGRIEAMMEPFRAARELLVSIPGIAAVSAAAVIAEISPAPREYFPTAGQLASWTGICPGNHESAGKRHSGKRRHGNTHLQPVLVEIAWAAIRHDGYLRSLFHRHVIRNGGYRSKTARNKAIITVAHAILIIIWHVLTTGKPYDDLGADYFDRRIDPDRETQRLIARLEALGKHVTLHDAA

SEQ ID NO: 370250 - protein, 413 aa, unidentified
MKEYNVAGIDVHKRMLAVVITDAAAEGEFRFQRRKFGTLDTDLKALAQWLAEQAVREAVMESTAQYWKPVWRQLEEQCRLSLAQAHSNRAPRGRKRDFQDAERLVRRHVAGELILSFVPGPEQRLWRTVTRTRYQLTRDRVRLHSQLESLLEDARIKLATCVSDLLGMSGRRILLALAQGETDPTTLAALVEPEVQASPQQLADALSAAATMGALHRQILQLFLDRLALIEEQIATLKQSIAAALHTHHQAVLRLAQVPGYGVDSAQQVIAEIGPDAATFPTAGQLASWVGVCPGREESAEVSKSNRSPKGNRMMRRVLNQVANAAVKTKGSVFQSQYRRLFPRLGHNKAIWAIAHRICRLTWKILHAGAEYIEHGESRDAKAHQKRISKLLRELRSLGYQIIPPVSQTELNA

SEQ ID NO: 370251 - protein, 447 aa, unidentified
MQRRTVGIDLAISAVQVAQIFDDGVPVGKPLRFRLTANDLKQFVDAVVRDVPPGVPIVAVMEPTGMAWFPVASWLEGAGVRVIRVKGQRVKALRQYLSEHAKTDLADAHVLGALPSFGSRSLDPVHIPSPQHHALQRLTKQRHRYQELICSSRRRVLDLIRWACPELEPVLPDTTTRLTLALLADFFDPHRVLKTRRDTLARFIADNASGNHPHSGPFVDDLVESLKEAARRTIALHADRLDFQALQFEVRQEVEMVRLLSQNIAELEKRNELLYEQVHPSNALRSIPGIGITLAPLLAGVIARTERFRNERQIRGFCGLFPKKNSSGGIERPGQRITKSGSDRIKRALFLAADIARKIDPDLAAVYWRLMVKKGHHHKQAICAVATRLVNRIYKTLKTGQRYVLRAPDGREISVAEAKQIVRDQFSVPEEIRRARRCHVEIAPSPA

SEQ ID NO: 370252 - protein, 408 aa, unidentified
MKLFVGIDVSSQKLDVCFMDSEDHILHEATLLNDITGASKIKEIILKLNEKLEYDVIKVGMESTSVYSFHPATFLAEDAELKNLGIEVIVQNPKAIARFKGLFEEDKTDTIDARRIADFVRLNLNSTTVIKEEKYIALQRLTRSRLQLIEQMTECKQHFLENLYYKCNTLTRDVETSVFGATMMDLLTESLSFGEVAEMEVEDLATILQQKGRGRFGNPDKLAKALNKAIRDSYRLGKVLEGSVDVVLGTYAMMIKTLKQQIKELDKAIEALLETIPESQCLLSVPGIGPVFAAGILAEIGQIERFEDQAKLAKYGGLYWKKKQSGSWESERTSLTRTGNHYLRYYLVEAANSVKNHEPVYKEYYYKKYDEVPKHKHKRALVLTARKFVRLVDVLLRNHQLYTPERSV

SEQ ID NO: 370253 - protein, 346 aa, unidentified
MSYSTTVGVDLAKNVIQISVVNGRGKETANRSLTRKKFAEFLGKQKPSLIAFETCATAHYWARAAERHGHEARIIPAKAVAPFRQGHKTDSNDALAVAEAARRPNIKEAPIKTVEQQGLQAMLRARDRLIQECIAQSNHMRGILLEFGIVIPQGFASLLRSLPEILENGDNELPDFYRPTLHRLYHRMLELRADIDAMTKEVGQQVKNHPVCSRLTDIEGIGPICATALYASLGSGAAFANGREASAYVGLTPRQYSSGGKANIVGLSRYVGNRKLRSVLIQGALAYVYRMKKPKSSKDHWLQELIERAGPRRAAVALANKNVRTAWALIAQGTEYQRREQLEMAA

SEQ ID NO: 370254 - protein, 353 aa, unidentified
MAVKYVALDLHQASTSISIRDARGRVIRREVVPTSAARILEAIDSAGGTIHVTFEEGTLSQWIYDELVSRVAHVIVCDPRHNRLLAADNKSDRIDADKLSDLLRLGALRAVYHERSSVAALRELVRSYNTLVEDSTRVMLRLKAIFRARGINCSGIAVYRPKNRARFLGMLSDRGTRLRAEHFYAQLDGLLEVRARARHQMVDEAKRHPAVRLLRSVPFIGPVRAAEIVAIVVTPERFRTRRQLWPYAGLAVTTRSSADHRFDRGTPVRTGKTINRGLNRNFNRTLKKVFKEAAASAVCLPGPLHDCYERLIARGMRPELARLTIARKIASIVLAIWKKGVPFDPAILNAQNA

SEQ ID NO: 370255 - protein, 412 aa, unidentified
MLYLGIDVGKKWHEAALLNDSDQVLWRLRFGSNRAGLERLAERLGDVDAADLTVGLEATGVYWITLHRDLLDRGITRLLVLNPLQTRAFRNANLRGSKTDRIDAVAIARLIRWAGRSLSVHVVPEERRAAAREVHRVRSEMVRLRAQQLIKLDSVLERIFPEFREVFSSLSTKSAQAVLARWPTPRLLLHASAEEITAVLRQARGRKVSPGVAQALLRSAAESVGLEDPLDASATAIQALVSHAAHLEAQIASLGERLDALLEPDAALAALLQSIPGIGPETTRTWLSEALPVEQFEGRDAAQKLVATIGIDAQPRESGQYAGRVKMSKRGNRHLRRAILLAARSACRSDPQFRAMLSRQLARGKHYNVAVSHVARKMVHVIYSVLKNQRPYEVPTEYRLGIVEPELSVSGT

SEQ ID NO: 370256 - protein, 412 aa, unidentified
MNAVGIDVSKGKSTVTICRPGGVVLMPPCDIPHTQSAVNAFISQLRGLDGETKVCMEHTGRYYEPVATWLSDAGIFVSAVNPILIKGFGDDSLRSPKTDKADSQKIARYTLDRWAKLKQYGSMDKTRNLLKTMNRQFGFYMGQKTAMKNNLIALLDQTCPGANDFFDSPARSDGSQKWVDFVHTYWHVDCIRSKSLDAFTEHYRNWCKRKGYHFSARKAENIYHLSSDLIAVFPKNDNTKMLIRQAVAVLNSASRTVESLRLEMDKTASTLPEYPVVMAMGGVGPTLGPQLMAEIGDVRRFTHREALTAFAGVDPQKDDSGQRVRKSMPTTKKGSPCLRKTLFQIMDGLIKRSPADDPVYAFMDKKRAQGKEYYVYMTAGANKFLRIYYGRVREYLALQPQASGREEGDNGI

SEQ ID NO: 370257 - protein, 331 aa, unidentified
MAQSEVVVVGIDVAKDKVDACIRSLSQRQTFSSTAEGRRALIRWLRKHRVGKAAMEASGGYEQDWAKALREARIEVRIVDPKRVRSFARSAGRLAKNDPIDAEMIAWFAETFTEAPGQAYDAARERLVKIVNARQGLLDLQTSLKNSGEHSVPDVVQKMQARLLKKIAVEVVKLETAIAAQVKATPHFAELAEIIESVPGLGKITSAGLIATMPELGQVNDNIVAALLGVAPYDDDSGQRRGNRHIKGGRRRARNLFYMPCMGAATRHNPVLKAFYDRLIAKGKEPKVALTACMRKLIVILNTMIARRQKWDANRYKVSDSARLPPSACPA

SEQ ID NO: 370258 - protein, 330 aa, unidentified
MQYVGIDLHKRDLVIAVEDERGPVGHPRRFPCRDEAAIVAHLSGLRPFRAVIEASAGYRWLYDRLKPLGEVILAHPLRLRASIARPAKTDKLDAALLARLLRMGQIPEAYAPPKAYQELRELTRARLSRSATEAKNRLHWLLTVRNLHAPYKHPFGARGRRWMRSLDLGVVGNLERDELIARLEHYEVQLGRLDEMLEESAAEFPQIEALRDIRGIGTYTALLVVAEIGEPERFGEPGQVSSYAGLATRVYQSGAHDYHGHITRQGSPWLRWALVQAAIKAIGKDRQLANFYERVRKRSSRHIARVAVARKLAEICWIRLRRWHRERAAA

SEQ ID NO: 370259 - protein, 386 aa, unidentified
MLDAPRPALAAIRTDLGAIFVSLELSRRTWLITSLSPGAGEKMSKHAVAAADVSGLLQRFAELKRKAAARTGQDFRVIVIQEAGLDGFWIHRVLEAEGVESHVVDAASILTSRRRRRAKTDKIDGETLLRTLMAYLRGEPRVCSMARPPTPQEEDRRRLCRERKTLMTERGRHINRIKGLLFAQGVFGYEPLLKHRRERLEDLQTGDGRPLPARLKAQILRELDRLEVLLAQLKALQAERDALLGSARADAASPVASLARLKGVGPEFATILWSEGLYRHFDNRRQLAAYAGLAPTPWKSGQVDHEQGVSKAGNPRLRTAMVELAWMWLQHQPTSALTLWFQARDQALGGHKRKTTIVALARKLLVALWRYASAGVVIEGAAIRAA

SEQ ID NO: 370260 - protein, 404 aa, unidentified
MIFVGVDWAEAHHDVCVLDEGGAVLGSRRVLDTLEGVRQLHELVADHAEEPGQVAVGIEKDRGLLVVSLVAAGYAVYAVNPLASSRFRDRHQVSGAKSDRGDARVLADMVRTDRHQLREVAGDSDLAEATKVLARAHQSAIWSRQRHLNQLRNALKDYYPGALEAFGTDLASNDAVAVLTAAPTPAAGRALGTGELEALLRKGGRQRNVAARARQLRDALCRGQLEQPGIVADAYGAVTASELRLIAAATAEVATLEEALSAAFEQHPDAKVVLSLPGLGTVLGARVLGEFGDDPNRYASAKSRRNYAGTSPVTKASGLSRVVLARVSRNRRLVATCDQWAFCALTSSPGARRYYDELRQRGKTHRVATRALGNRLVGILHGCLEDHVPYDEATAWRHRAQLAA

SEQ ID NO: 370261 - protein, 445 aa, unidentified
MSEPSTTIPSEPEWAALAAIDWADQKNFWRLLPAGSRQSEAGALDNTPEAVEVWAANLQQRFGGRRIAVILEQSRGALVYMLTKYPHLVLFPVHPTTAARYRETFAPSGAKSDPSDTDSLLDLLLRHRERLRPLQPDTAETRLLHFLVEERRQTVDERTRESLRLTDCLKLYFPQVLQWFDDVASPLVGDLLERWPTLEELQRAHPGTLRRFLQEHNCRSQEKNAERIAAMQQAVAATQDQAVREACLLITRSLVAMLATLRAQIAMFDRRIAELVADHPDGALFRSLPGAGGALVPRLIVAFGTQRERYQSAYEMQCYSGIAPVTEASGKSQWVHIRLACPKFLRQTFHEFAASSIQQSEWARAFYEHQRNEKQKSHHAAVRSLAFKWVRIIYRCWKDGKPYDEEIYLQSLRRRGSLLGEVLGLTTGVGWKSIAGFQKLSENNT

SEQ ID NO: 370262 - protein, 460 aa, unidentified
MAKQREKGNQEGPKAGVLEGLPPLNRNAAGIDVGGASHYVAVPADRDAEPVQEFGSFTADLHRMAQWLKACRIDTVVMQATGVYWTALYDVLESYRLQVNVVNARHTKTLPGRKTDVQECQWLQKLHTFGLLNNSFRPAEEIRVLRSYMRQRENLVTAAGTAIQHMQKALTEMNIQLAHVISDISGTTGLKILRDIVQGERDPHKLALHKHGRIQASRAEIARSLEGTWRPELLFVLEQSLDLYDTYLKKITECDCRIDQHLKAMDAKGDAAKPAPPPRRLRGPRKHEPSFDLRGRLYRVTGVDLTQIDGVDVQTAQTVISEVGVDMSRWNSEKQFASWLGLCPDNRISGGKVLKRGTRQVVNRASTALRLAAWGLLRSQSALGAKFRRLRSRLGAPKAITAMAHLLSRLIYRMLKFGHAYVDKGMEYYQTKYRQQQLQWVAKQAAALNFYLVPATDVAS

SEQ ID NO: 370263 - protein, 344 aa, unidentified
MNVTTVGLDLAKNVFQVHGIDSTGEVIVAKTLRRRQMMPFFSKLQPCLIGIEACGTSHFWAREITALGHQVKLMPPAYVKPYVKRGKADAADAEAICEAVTRPTMRFVAIKSAEQQSVLALHRTRDLLVSQRTQLVNMIRSQLAELGIVLAKGIHHALRLVDQLVEGVVPDIPSLACRIVIALAEQVRALQARVAMIEGEIKTWFRGNEQAKRLATIPGIGTITASALAASVTDPHRFTSARQFAASLGLTPKADSSAGKDRGGRISKMGDRYLRRLLVIGMTSQLQSARRKPEAHPWITNLLVAKPNKLVAVAMANKAARIAWVIMTRGEVYRAHRGATEGTA

SEQ ID NO: 370264 - protein, 402 aa, unidentified
MNCVGIDVSKGKSMIAVMRPFGEVVISPFEVQHTASELSELAKLLKSLDGETRVVMESTGNYHTPVAWLLHDAGLYVSVVNAMLVHDYGNNSLRRAKTDKKDAVKLANYGLDHWLTLPRYVPEEDTRLLLKNCYRQYQQYSKVQTMLKNNLISLLDAIFPEVNRLFNSSPRADGSEKWVDFVSTFWHCQCVSTLSLKSFSARYLKWCRKHGYYFSQEKAFEIHSKAQSCIGVMPRNETTKLLVQQAIAQLKATSAALAALKQEMQSLAASLPEYPVVMEMFGVGSTLGPQLMAEIGDVRRFHSKKALVAFAGIDAPPCQSGKMDIHSRSISKRGSAALRRTLFLVMGVYLQSAPLDEPVYQFMDKKRSEGKPYKVYMMASANKFLRIYYASVTAYLNTLARI

SEQ ID NO: 370265 - protein, 307 aa, unidentified
MFAGIDVSKDDLEVRLNSQVEGVNCPNTAAGFARLIRWLKIYHVSRVVLEATGGYERQVMKALQAADLEVVRINPNRARSFARALGLQAKTDPIDAKLLAQFAATINPLKSQPTSPEQDDLRALVHQRENFVQQRSDDERRVKTASSDAVKALLKSHIDYLAKVIASVDIQIRQSAENLNQKRVSQLCSVKGIGLITAASLMAYLPELGSVGRREIAALSGLAPYNNDSGKHKGKRYICGGRFSVRRSLYMACWSVIRFQPEFNARYKALRDKGKCAKVALIACMRVLLIRLNAMIRDGSEWSDHVA

SEQ ID NO: 370266 - protein, 340 aa, unidentified
MGNVTTVGLDLAKNVFQVHGVDAAGTVVVRQRLTRGRMLKFFAKLPRCLVGIEACASSHYWARELVALGHDVKLMPAQYVKPYVKRGKNDAADAEAICEAVTRPTMRFVGIKTPEQQSAMMLHRVRLILNRQRTQLSNAMRAHLAEFGVVAPIGRNGIDQLLDVIADPADERVPADARFCLEMLAVQLRIVKEQILENDRRIMASARETELGRRLMEIPGVGPLLASAIVATVPDPAIFRSGRNLAAWIGLVPRQNSSGGKERLGGITKAGHQYLRQMLIVGAMAVVRYAERNGAKRPWLVQLLARRQAKVAAVALANKNARTIWAMMASGERYREPQVA

SEQ ID NO: 370267 - protein, 313 aa, unidentified
MTDLYVGVDVSKEYLDVATSEGLSLRVSNDDAGQQQLVARFSATPPALVLMEATGGLERAIAAQLSAAGIALRIVNARHVRHFAKATGLLAKTDRLDAEALVRFAQTLKPEPRPIAPEQTVALQALIVRRRQLVEMLGMERNRLRTAHRGVRKSLQASIRWLEKRLAEVDGDIDGALRECGAWREKVELLESVPGIARVISVSLLAGLPELGELNRHQISALAGVAPFNRDSGNWRGRRSIYGGRPLVRSALYMAALVGARHNPVLKAFYQRLRQAGKPGKVALTACMRKLLVILNTMLKTGQPWRKQLVAEA

SEQ ID NO: 370268 - protein, 335 aa, unidentified
MQFEFFIGIDVSKNELDFAVVQNKSLLFHREIANTPSEISRFIRELSQIKGFKLDRALFCMEHTGIYTAHLLSGLYKRKANLCLESATQIRSSLGNIRGKNDKMDAIRIAEYAVKNHQELTLWAPKRLVIQQLSRLAATRTRLIKAKKMLDVPLSEAKLFTDSILSKADCAICSRTLNSIELDLKKVDKAMDEIIASDPELTRLFNLVTSVSGIGRVTATQIIITTNEFKDINDPKKYACYSGVAPFSRESGMFRGKPRVSHMANKKVKTLLHMSALVAIQHNRDLKEFFYRKIDQQKKNKMSVINAVRNKLISRIFACVRLNKKYEENYQRLVA

SEQ ID NO: 370269 - protein, 355 aa, unidentified
MNKVNSNFEGQTIFVGMDIHKSNWNLGIHLGDMFIRNVHQKPNPHIMASYLKQHYPGAQYKAAYEAGKFGFWIQRQLMALGIECLVVNPADIPKSQKDTLQKTDPRDARNLSLRLQSGVLHGIFIPDEQQEADRLFFRHRKRIWKDLCRCKNRIKGMLAFSGIDIPGQYDNASWSHNFINWLKALDCKQTSRRRALDYMIAQMEYLRKELLSLSNELRKMMREKRYNKNYYLLRTIPGIGPLTAASILVEIGDVKRFETFYHLNSFVGLLPMEHSSGEVDNKLRLTVRKHRQLRSDLVESAWTARRTDPAMALYFQEQIKRKDSKIVIVKIARKLLNRIRFVLINQQPYEMGIVK

SEQ ID NO: 370270 - protein, 349 aa, unidentified
MTMTIVEAARGIAGGVDTHRDVHVAAALDPLGGLLGTESFSTDPAGYKALLSWLASFGDVTKIGVQGTGSYGAGLARHLRRSGVEVIEVDRPNRQKRRSSGKSDPLDAVEAARAALGGRASGRPKSRDGAVEAIRVLVVAKRSARQARVKALIQMRHLGYSAPEQLRCRMKGLSVPALVAEGAKLRPTRSADPVTAATKASLSSLAHRIEALDRELAELDERIEALLVATVPDLLDLFGVGPDTAAALVMAAGDNPERLHSEAAWAHLCGVAPVPDGSGKTSGRVKAHDGGDRQANSALWRIVMVRIAHDPETRVYFERRVKEGKTKSEVIRILKRYVAREIYRYLPRG

SEQ ID NO: 370271 - protein, 345 aa, unidentified
MKKIIIGIDFSKETFDATLLDCRNSELSEALQSAVHEKFTNKKEGFQAFLTWIKSSVKKINSDELLLCGEKTGKYSLALSNFLYAKGYSIWLDSGLRIKRSLGISRGKSDKADSLKIALYAYRYQDMAVCYVPLSNNVSRLKELFLYRQHLVSQMKAMAVRKNVTDDFKKELGDVRFIVDSATEIIQQIKATIKKCEEKMQEIIEEDEELKTTHDSITSVKGISLINATAFIAYTNNFKDFGGNAKKIATYWGVAAFAQESGTSVHKGARVSKIASKMLKSLLTQAARIAVRWEPKFRQYFEHLISRGKHQGVALNNVKNKLIHVITALAVSKEKYNPEYECINR

SEQ ID NO: 370272 - protein, 358 aa, unidentified
MQPQGKKLDFTGQNIYTGIDVHKNNWKVSIYTDELFHKTFTQPPKPDILYNYLTKKFPNGTFYSVYEAGFCGFWIHDQLQALGINSVVVNPADVPTKDKEKKQKDDGVDSNKLARQLRNGDLEAIYIHNRYVLEDRNLVRTRYTLSKDLTRNKNRIKSLLYFYGIEIPEEYCRNRSYWSKRFFKWLESLELTRTSGTECLQVLLEHCNEIRQKLLRVTREIRKLSQEEYYRKKVNLLRSINGVGLITSMVVITEIDDIHRFSSQDKLASYVGMINTSHSSGDKDIHGEMTNRGNKFLKSTIIESAWTAVRMDPVLILAFTKLRRRMDRNKAVVRIARKLLNRISYVLKNEVPYQDGII

SEQ ID NO: 370273 - protein, 389 aa, unidentified
MAQPFDASKSLATLEQDNTVIAVIEMSQSKWLVAAVVPGVKRQPLKKLQADEEALLKLLYRWRTEAGQTGREIKRVVVAYEAGRDGFWLARWLRTRGVETYVIHPASIAVSREHRRAKTDRLDTELLMRAFLGWLRGEKRHCSMAAVPAAEEEDARRPNRERENLVTERTRIANQMKAILARFGIRSFKPTLRKAAEKLDGLRTAEGTPLLENTRAELSRHLARLRVVREQIRAIEQERLHKLAAAPADEKGPHAMVRLIARVFGVGVETADMLVNEVFARHLRDRKAVARYAGLTGSPDESGKRRRERGLARAGNARVRRGMIQLAWCFIKFQKDSALAKWFDARTADGRGSTRKTMIVALARKLLIALWRLVTTGEVPEGVILRPAA

SEQ ID NO: 370274 - protein, 353 aa, unidentified
MAKRREKRECRAVVLEPDAAGVDIGAEEIYVAVPPDRDEESVRMFSTFTCDLHALADWLVQCRIRTVAMESTGVYWIPLFQILEARGLEVYLVNARYLKSVPGRKSDVSDCQWIQYLHSVGLLRASFRPSMDICAVRSLWRHRGSLLQMASEHILHMQKSLSQMNLQIHHVPSDITGASGQAILDAILAGERDPVQLAQLCNCRVKSPREKVAKALEGDYRPEHVFTLKQSLDGFRYYQKLIAELDREIQRLMQTLPSAVEAGQEIPRRKKHSAFQRQGNDPGFDLRGQLYRIAGVDLTDIPGVSAVTAQVILTEVGPDLRRFRNASAFAWWLGLCPENRVSGARFCPVKRAK

SEQ ID NO: 370275 - protein, 391 aa, unidentified
MAGVRNQAGEPDTMPSENTVHIAIELSFSSWLVAARLTGAKKSRLHRIEGGDTGALLALIAELRSRALTQLGGAAEVACCFEAGRDGFWLHRLLTAHGILVYVLEPTSILVNRRSRRAKTDRLDAEGMLRVLAAWLGGDRQVCSMVRVPTPEEEDGKRPHRERERLVQEKLRIENRIEALLFTQGIRARPSLRSWERELTELRTGDGRTLPPLLRAELDRLRRRLVLILELIRELEAERAAALAAAPDEAMAQKITSLQRVRGIGANFSAVLVREVLYRSFANRRQLASYVGVAPMPYQSGGMDRDRSISRAGNPRARTTLIQLAWLWLRYQPGSALATWFRERVGTLQGRTRRIAIVALARKLLIALWRYVEAGVLPAGVEIRTGTVPAA

SEQ ID NO: 370276 - protein, 348 aa, unidentified
MYKVDPKADARSKHPAHSKLGGCTMEVYILGIDVAKAKFDVAFLLGEGVAHHQFPNNANGFAVLKGWLRKRGATQLHACMEATGRYWEALAIYLHEMDITVSVVNPRQVKSFAESELQRQKTDRVDAGVIARFCRAARPKPWTPPPAELRQLQELVRRLHALKRMETQEKNRLSNPGIDPLVEASVKDLLAHLDGQIKEVERAIREHINSHPQLKQQRDLVTSIPGIGETTAALLLGELGEVSNYTSGRQVAAHAGLTPKHFQSGSSIKGKPRLSKIGNVHLRRGLYMCAIVAKHHNPTIKAFCERLLSAGKPTMVVIAAAMRKLLLIAFAVLKSNKPFDPNYQPCLP

SEQ ID NO: 370277 - protein, 328 aa, unidentified
MMNIIIGIDVSKAKIDCAWLRDLNTGKVKTKVLKNNAEGFQSLINWVEINTQQSLSTIRFVMEATGIYHEALAYALHDAGAEVCVVNPAYIHDYAKSLGTRSKTDKKDSVVIAGFGATHRLELWQPEPKEIRHLKALIARHEAIEKDLQRENNRLEKAEITQVSAEVIDSINTVIKELTKEKNRIRQLIDDHIDQSPALKQDAALLKSIPGVGPVIAQRMIALVHSRKFISARQCAAFIGLNPVVRESGTSVRGRSRLSKMGDAKIRAKLYMAAVVAIQYNPDIKQQYERLLKNGKSKMAAIGAAMRKLVQICFGVLKHQTPYQPQAI

SEQ ID NO: 370278 - protein, 407 aa, unidentified
MEVMYPRCAGLDVHKQTVVACVRIVGDGAPLQQVRTFATSTSELLALADWLESFGVEQVAMEATGVYWKPVWHILESHFELVLANAAHVKNLPGRKTDVNDAMWLADLLAHGLIRASFVPPVAVQELRTLTRTRKQFVRERSAHVQRIEKVLEDANLKLGVVLSDIVGQSGRAVLQAIIAGHDDPAELAAGVSERVKASRAEVQEALRGHIRPHHRFMLKLHLSHIDALDQAIATIEREVGHGLAPFRVAAKLLSTMPGLSTVSAHVVVAEIGIDMSRFTTAGHLLSWACLCPRNDESAGKRRTTRLRRGGHWLKTTLVQAAWAAVRVKGSYLQAQFHRLRARRGTKKAIIAVAASMLTAAYHMLRDGTEWQDLGAAHFDRANTKKTANRLIRRLQQIGYVVTAEPA

SEQ ID NO: 370279 - protein, 341 aa, unidentified
MKTFIRIGVDLAKNFFQIHGIEHEGAPPLTRKLSRAKFLEFFSRIAPCRVGMEACGSAHYWARELRAVGHEVVLMAPAYTKPYVKRGKNDAVDAAAICEAMSRADMRFVAVKSADQQAVLMLHKARDLLVKQRTMSVNALRGHLSEFGLIAAKGIHRVKDLLAQAFADPDLPEQARQAVQILASHGEALDAKIDELEKKIAKASANNPISRLLDEVPAIGPLIASAMAASVPDPSVFKSGSDFSASLGLTPSQHSSGGKEKLGAITKKGNRYLRKMLVVGCTSVLRVAHKYKGALAEWIAALRARKPERVAAVALANKLARICWAIMSTGESFREEIFARA

SEQ ID NO: 370280 - protein, 430 aa, unidentified
MNTPHPFAVQIRSYALSVGIDWADQKHDVFQRCWADGLGQQFQIGADPASVRAWLKQLKELAGAEGRVAIGFEQNRGALFEMLREQKDWIDLYPLNPLTLSKYRGAFFTSGAKDDPLDSQLIEELVRQHLDRLRLYQPLEPALRQLDLLCQYRRKAVDSAVGCENELRSLLKVYYPLAVELHDSLRSTLALHFLKRWPTLQSLQKAKPQTLRSFFFQHQSRSQTRIEERLHKIARAQTVSDDPALIQPMVLSVQGLVNQLLALQASAAAFDKAIQELYAKHPDRPIFESLPGAGPQLAPRLLVAFGSDRSALSTAAHLQIKSGIAPVLDRSSQSQRIHRRWCRPKFLCQTFHEFAAHSIPYSVWAKAYYEELIARGKSHHTAVRALAFKWIRIIFRLWQQRTPYDEERYLQTLKKRHSPLSPKIHLQLLD

SEQ ID NO: 370281 - protein, 390 aa, unidentified
MIYVGIDVAKDKHDCCILGSNGDVLFPPFTFPNSLQGFDLLYERIGSLTSDLSKIKVGLEATGHYHLNLLRSLLDNGLASYVINPLHTNLFRKGLSLRKTKTDKVDASSIAMMLLTDRTLKPYTDTSYHNEELKSLTRYRFDKVRERSKLKASVSRLVSILFPELETLVPTIHLVSVYALLSEFPGASFVASAHLTRLTHLLKESSKGRYGRETAISFRAAAVSSIGSVFPAKSLELKHTIHLIEVLTEEIDEIEAAINDIMDTLNSPITTIPGIKNRMGAIILAEIGDFSKFENADQILAYAGLSPSTYQSGQMTSSHARMEKRGSRYLRYALFNATQYVCIWDPAFKAYLAKKRAEGKHYFVATSHACKKLVRLIYRMQLTGEAYRIA

SEQ ID NO: 370282 - protein, 432 aa, unidentified
MDDVSRFDQFCKLRREIRGATKYLIVGIDIAKDKHHAFFGTAKGKTLWRRLIFTNDHVGYERLIEQVNTLMAQHKLEQVVFGLEPTSNYHKPLAHWLTGHEYLVVLVAGKAVKDNRELLDGRWDKNDTKDSANVADLISQGKCLFYENPEDEIISLRNLLAVRKQLKKEEHRLRMRIRNGLLAKYFPEMDRHWGKCLEENLAIVRWYLDPRKIAETDFNLFVQHVTATDRGLRQVDRLRKIYEAAQHSIGLPVNAAAVYEAKMLVERFKAVREQGLQTMGQIATICRKLPAYKLLLTIPGFGPYIAPLVLSALANPLRFQSRKQVIRLAGLDLNASRSGKKSLESVPVISKKGDADLRYGLYQAALIASYHNDCFRRVYHRMLEGRQAERGIKTKVRVKIAAKMLVIAWTMLKNNAPFNAARIALAEPDQQR

SEQ ID NO: 370283 - protein, 371 aa, unidentified
MELEVRHGVGGIDPHKHSATLAVVDSHGHLVDVVSVPVTTAGINDLLEFLTDTELVIDRIGVEGSAALGQPVAVALSAAGYDVREVQPNRTAERRRRRRRAKTDIEDAEAIARETLADPQLPPAGKHAAPEAAWEELTAVHDWRKSLILQRVRQLTEAEAVLVSLPLSLRSQLPSTSRVLPQLEMLETSAGQWDGLAAVDQVRLDRLQAALDDIRQLTCRIKALDKRIPPLLERLGCTLTELCGIGAVTAMDLLVEVGDPGRFTTEAQFARWCGSAPIALSSGEGHGPVRRHRLDVGGNRNVNSILHIVHVTQVRCHEPARSYVARKIAENKTKREARRAHKRQLANVIIRHMWRDDARRRTWPSPLPATG

SEQ ID NO: 370284 - protein, 322 aa, unidentified
METILNFIGIDVSSQWLDICSQDGSFKRIANSPTEITEWVLSLPQSTALAMEATGCYHQLLASIAFERVHEVYVLNPRDVHYYAKGIGRRQKNDKTDAEIIRRYLCNEYEHLRPWEPATSNQTLIRVLTTHRATVVRHKQAISMTCKDLPIELDALNEALMALKKLIDELERTLVAAMKNESTEQQKSFKAIKSIPGFGELSAAFFANEIAGGNFKTVDQFIAFLGLDLRYKDSGKKHGRRKLSKQGLSEGRRLLYNVAMAASRGAFKAMYEHYASRMTCTQALVAVMRKLIRIAFSVWRSQKTFDMAQYHSPIMQKAMLSD

SEQ ID NO: 370285 - protein, 444 aa, unidentified
MVSRRAYRRVSVNEIDREQLLELAKEHGNPGTVLGLDIARNEIVACLRWGQDHFERPWKIINPKETGVLVELCELLKSHCTGFRIGLESTGTYGDVIRYALSESGISVQRVSGKAVSDYHEIFDGVPSQHDGKDAAMVAELVAHGKGTLWPFATLSEHEQILRHQVFRIDAFRKQQTQWLGRIEALTARHWPELTSVLKLTSVTLLNLLATYGSPAKAIADPKLAKTLRLWGKKYLKEEKIAALVLFARTTKGLPMNASEVSWMQELAAESLRCHREQLACDKIIKEQVASDPVMQRYSDAVGAATLAVLWSEVGDPVAYSSAGAYLKAFGLNLKERSSGKRLGQLAISKRGPAMSRRWLFFWALRAVQRDELKGWYEAFIQVGNGSSSGEHRKMKGLTAMMRRLCKSLWHARVHNKLFDYSLVISGMPPRGRRRRRKAAKKAA

SEQ ID NO: 370286 - protein, 345 aa, unidentified
MYCIGVDHHKQYSLMTVLDEAGQEIKTGRMLNQRAEVERFLGGLEGEVKAVIEAGMASFEMADLLKEMGMEVTIAHPAKVKAIASARIKTDKRDARILADLLRAGLIPAVYQRGGENREAQRVLRLRAFFVKQQTQVKNKIYGLLAHQGEEVRGEAAKIRDLFSGKGLEALERLRLGGKDEEMLRALVKACRQLAALVKESDGLVRELYREMETARLIDTVPGFGVTLAVLVAVEIADIGRFRRASELHSYAGLIPSTHSSGDRTYHGRITKQGNGWLRWALVEAVYPATKVDHGLRVYYQKIASRKGANVAKVATARRLLTIIHKMLKEGRAYVLYPREKSSAA

SEQ ID NO: 370287 - protein, 419 aa, unidentified
MSFKILKNNCCGLDVHKTWIYACIGITDSNGRTEYKQARFSSFTKGLQELCDWLVKYNCNDVCMESTGKYWIPVFNILEKNNIWVTLSHPKYTKPQKGNKTDRKDAKWICDLYMCGMVQPSFIPPADIRQLRDLARYRFKLTCMITGEKNRAHNCLTVSNFKLDDVFTDIFGKSSRSITEQILQHPGETFDVAPFVDGRCKTPIEEIQAAVDGTISTEQAVKLRQCLNHIDELEMHKAEIEREIFRLSDKYEKVLNLMRTVPGFDKNPMTAIQVLSEIGGDMSVFPTAKNLVSWAGCCPRNDQSNQKIKSTRISRAGYYFKPVLVQVANALIKSKKNPEFTTRYRRIKARRGHKKAIIAICRMILTAIWHILTDLKPYTPEGFLASRPVNESKVLTTSQALNLLKQRGYVIKDDAVPVT

SEQ ID NO: 370288 - protein, 422 aa, unidentified
MSKFFYRPTVGIDISADFSVVAILAPDGEVYRKSFKIMHNRNGFDYLVDQIKKAEEEFNMKTAIFMESTGVYHLTLFHFLKDTFEVCILNPLITNCNKNGDIRKVKNDKKDALTIATIGKFQNVKYSSNFDVEIYTLKSLCRDYYKFTDSKSTFKKKFSTDLRVIFPSYSSVFSDITGKTSIAILKKYSSPEAVLSADRDELINLISTTSRKGLAHSEKTYKKLYDAAEEAAYIGLKSPSLFVKIINTIAVIEALEIQIGNLLTEIHLLMRSNRISDEFKKNVRLLYSIPGVGELTAITIMSEIGNIKGFVKPKHLVAYLGLDSSVSQSGKFNSDRNAMSKRGTRIGRRALYAVALASIRKNRNGEPINRVLLNFYNENMKDKKKKVGLVAIMHKLINYIFSVLKNQKSMNYVTPKYIQKCT

SEQ ID NO: 370289 - protein, 315 aa, unidentified
MTTKSETYVGIDVSKDRLDLAVLEEKRIEQYINTERGIKELVDEMKALKPALIVVEVTGGYERAVVKALFEAGLRVARVSGYRARQYARAKGLLAKTDPLDAMNLADYGKHVQPRVYEAKSEEGQYLAGKLARRRQLGEMVQAEKNRLRLAYGDIGPSIERVIKFLQGELKQLEEEIRAYLDANPVWLEQEQLLRSMKAVGPVTAATLLAELPELGKLDGKQIASLVGLAPINQDSGKRSRYRKTGKGRPSVRNVLYMAALTGLRYNPVIKKQYDGLVLRGKVKKVALTACMRKLLTILNAMVRDQKPFGYAAMS

SEQ ID NO: 370290 - protein, 465 aa, unidentified
MKHAQRRPRTKPASGPSLLERITPTAAAIDCGSEEHYVAVPTDRDAAPVRAFKTFTTELHRLADWLTACGVTTVAMESTGVYWIPLYEILEARGLDVVLVNARHVKNVPGRKTDVVDCQWLQQLHSVGLLRGSFRPTAAIAALRAYLRHRETLVQSAATHVQRMQKALVQMNLQLSTVISDITGVTGLRIVREIIAGQTDPRALAQHRDARCRASEEDIMAALTGNYRPEHVFVLQQNLELFDAYQRQLAACDAAIEAHVSTLAAKAPTPAGPLPAPRTRKTPRANEPRFDIRRPLHQLTGVDLTQIDAIGPYSALRLLAEIGPDMRRWPTEKHFTSWLTLAPHNKITGGRLLSSATLPSANRAAGILRMAAMSLGRTETALGAFYRRLAFRVGKAKAITATARKLAILVYRTLKDGLVYRDPGAAAYDAQHRQRVIRRLRQRAANLGLALVNRETGELLEGPVS

SEQ ID NO: 370291 - protein, 342 aa, unidentified
MSIVGGLDMHRKQITFDYVDTMTGALCRGKITPADRLTLREWLGRFADYRGSVRLVVEGCTGWRYVVEECRRAGIDIHVAEPADTASARGPKRHAKTDKLDAKHLRELLVQGRIPESWIPPEQVLEMRAKVRLYKDLRDERTDWVQRIRATLYHQGMPALPGGVLAAGNRVALEAGAGLSPAGAQAVTVALRQIDRLDTEIDALLAEIRSFAAIQPGCKALQRQYGIGKLTAVIIWAELGDTRRFSASRHAVRHTGLDISVYSSDGKRTRGHLVRQGPPLLRWALFEAAKSAAKRTSPDHAYYLQVAERAGANRATLSVARKLARRGHHTLRELGDQAFAPV

SEQ ID NO: 370292 - protein, 316 aa, unidentified
MSRDEIFVGIDVAQRRLDVAVRPGGDVESYGNEPAGIDALVAKLTDLHPSGIVLEATGGYEAPVVAALAAAGLPAACVNARQVRDFARATGRLAKTDRLDARVLAHFAEAVRPPVRALPEADAQELAALLARRTQLLEMLTAERNRLRLAPPRVGERLRAHIAWLQGELSALDTDLRGRIQASALWREKEDLLRSVKGVGPLLAATLIAELPELGRVGRREIAALVGVAPFNRDSGKLQGHRAIWGGRAAVRATLYMATLAAIRFNPIFREHYRHLRQAGKEKKVALVACMRKLLANLNAMARTKTAWDPELARAR

SEQ ID NO: 370293 - protein, 366 aa, unidentified
MLYLAIDLHRKQMTINLRGDDGEAILRRQVSTWGEDPQTFLADVQRRAGQEGFVAILEVCGFHDWLTELLPKFGCREVVLIQAEKRSSRKTDRRDANQLGELLWLNRGRLLAGRKVQGLRRIVPPQPAEREDRRLTQLRFNVTADLTRTINRVKYVLRRLNIEQHCPTKGIQAQKAKAWLKTLTLPSLDRLEMDQLLTRWTSLAQQRDQLDRRIVERAALDPRVQWLRTVPGASHYAALALACRIGEIGRFPTPRSLANYWGLTPRCASSGETERLGSITKEGSPLARYLLGQLVMHVLKRDAAMREWFRRIKQRRGAKIARVAVMRRLTVIFWHMLTQQQPYKMAAAATRRAKSCRVAQSAPGND

SEQ ID NO: 370294 - protein, 351 aa, unidentified
MKTNTPLNSETQDRIHQLKLAVDWHVEQFRVVRMCDGQSPQPAQRFTPASFLPFVQKQLALADQVCVIYEAGPGGFHLHRQLTALGVTVFVVHPVKLDPQHKGVVTDKTDARELALKLDRYLGGNRKAMSVVRVPTEAEEQRRALSRQREQLRRERQRLAAQGRSLALTQGLRLRGDWWSQPLTLPEWLRPRLEVWRKLIAAIEEQLDILTKQVEALAPKIRPKGLGPLTLGMLIAELCDWSRFTNRKQIGSYTGLCGGVSSSGQSHCDLSITKAGNARVRWILIELAWRMVRYQSQSKAVQRWKHILLNPKAAARQKKRALVALARQLAVDLWRWQTGRITPEQLGGVMV

SEQ ID NO: 370295 - protein, 343 aa, unidentified
MEYFAGIDVSLEQSSVCVVDGAGKIVREAKVASEPEALVGFFRGLETGVTRIGLEAGPLSQWLYAGLVAAGFEVVLLETRHVKAALSAMVIKTDRKDARGIAQLLRMGWFRPVHAKSPAAQEVRALLVARKLLQTKLLDVEFSIRGILRGFGLKMGEVSKGRFATRVRELAAGHAMLERITEPMLRAREALRTEYAKLHGEMLAIVKPDPVCRRLMTVPGVGALVAITFKSAVDNPGRFARSRVLGAHFGLTPRKYQSGETDVTGAISRVGDAMVRMALYEAAHIMLSRVTRFSSLKRWALDVARRRGLKRAKVALARKLATVLHRMWVDGTSFRWGKQAASV

SEQ ID NO: 370296 - protein, 320 aa, unidentified
MMAQNDRVVVGIDVAKDKVDACIRASALRQTCPSTAQGHRRLVAWLRQHQVGKAVMEASGGYERDWRKVLQGAGIEVRIVDPKRVRSFALSAGRLAKNDAIDAEMIAWFAETFSEAPGQTHDAGHEELVALVKGRLALIEFKTRLQGQSEHAAPGRVLKARSRILKGLAAEIEKLEAAIATKIRATPDFAERAEIIESVPGFAETSAANLVAGMPELGQVSNEIAAALIGVAPYDDDSGKRRGERHIKGGRRWVRNAIYMPCLGAATQNNPVIKAFYERLIAKGKEPKVALVACMRKLIVILNVLIARRQKWDPSRYALS

SEQ ID NO: 370297 - protein, 346 aa, unidentified
MEHYAGIDVSLELSSVCVVDAQGKIVRETKVASEPEALVAFFASLGFAVKRIGLEAGPLSAWLHAGLKRAGFDTVLLETRHVKAALSAMMVKTDRKDARGLAQLIRMGWFRPVHAKSMGSQEVRALLVARKQLLGRLIDVELSIRGILRGFGLKVGVVTRKGFEGRIRELVTGHITLERIAGAMLSARATLKVEYEKLHKIVLTIVREDAVCRRLMTVPSVGPLVAITYKSAMDDPNRIAKSKAAGALFGLTPKKYQSGEKDVTGGITRTGDEMVRTALYEAANVLLARITRFSKLKRWGMDVAKRRGSKRAKVALARKIAVILHRMWVDGTTYRWTDAQPTAVQV

SEQ ID NO: 370298 - protein, 344 aa, unidentified
MEHFAGLDVSVNETSVCIVDEMGRIVRETKVASEPDALLAALKSGVYHFKRIGLEAGPLSQWLYNALGEANLPVICVETRHMRAVLKAQINKTDRNDARGIAQMMRAGLYRPVHVTTLRSQKLRMLLTHRKLLQSKAIAIENDLRGTLRNFGLKVGVAGAGKFEARIRELVETFPDLTVLVEPLLIVRRVLREQIAVLHRRVLAVVRDDEVCRRLMTIPGVGPVVALTYRATVDVPSRFRRSRAVGAVFGLTPARHQSGESDRPGGISRCGDEMMRVMLYEAAQIMLTRTNKWSWLKAWAMQIARRRGMKKAIVALARRLAVIMHRIWVDGTEFCWTRPESAAA

SEQ ID NO: 370299 - protein, 344 aa, unidentified
MNISRVGVDLAKNVFQLHGVDRHGKTVLKRRLSRDKWVNALIKSAEPGCEVGMEACGGAHHWARLLMAKGFRVKIIPPQFVTPYVKSNKNDAKDAEAICEATSRPSMRFIKAKTVEQQDIQATHRIRSELMRHRTAKANQIRGLVTEYGLVAPLQMASLRVAIPRWLEDAENGLTDRFRALLHGLWDDLLTLDQRIETLNRDIESIAKSDPVAQRLQQLRGVGPLVATALIATVGNGDQFSKGRQMSASLGLTPRQHSSGGKDRLLGISKHGDAYLRSILIHGARAVVAQAKHKEDRLSRWVTELAERRHPNVAAVALANKTVRMAWAMMNHDADYDPEFAVSQ

SEQ ID NO: 370300 - protein, 356 aa, unidentified
MLKYCVGLDVSSKDFYACLSAIDPLQKVTVKCSSKFPNNPSGFHSLDAWLSKHHKQKDIRLVVVMEATGVYYEHLALFLYLKGYEVSVVLPNKAKKYLQATGLKSKNDTIDAQGLSRMGAEQSLDLWQPKDEYFYQLRSLTRQHQSLQELKTNVNNQLHADQHGMYQNEVVISQLMVLIKTLDAQIEEMEKAIVAHLDKDAEVAKLVEGITLIKGVGALTVAIILAETNGFALFKNIPQLISFAGYDVVENQSGNHVGKTRISKKGNGHIRRCLYLPALSVVRCQQSPFVQLFNRTLARHGIKMKSYVAVQKKLLVLIYVMWKKKEAYQPTRNANHSGEQEQMSSSLLSFEEAGLL

SEQ ID NO: 370301 - protein, 362 aa, unidentified
MAMKAMALVGLDVHARQTHAAVLAPDTGEVRVCKLRMAPVEVVGFLEGLGTVRAVYEAGPTGFGLARAARERGIDVRVAAPGSIPKGSGDRVKTDRRDAIRLARLLAAGELAFAFVPSVADEAFRDLVRAIEDVRGDLMRARHRLGKFLLRRGERYPGPGGTWTHAHLKWLRALDIDDACSHAAFADYLAAVQLLSARRASLLVALEAQIPESSHAPQIARLRCFRGIDTLSSAGLCAEVGDWRRFLQPMRLSGFLGIVPSERTSDTKRRQGSITKAGPSHARRLLVEAAQHYRYPPRIGPALTRRQAGQDPRVIAIAWRAQRRLHQRWQHLHHDRRKPAGIVAIAVARELAAFCWEAATLD

SEQ ID NO: 370302 - protein, 314 aa, unidentified
MIRKNGKPFDPQKFANSPADRVRLVKKLVKLPGIIVCLEATGVYHFDLSIALHDAGVLLMVVNPKASHNFAKVLMKNSKTDGVDAETLAEYAARMDFVAWTRPSDEAIALRSFARRINALTGQKADAKNYLHALITTQETPKSVLRDAHLAIAQLEKRIDRLTAEALILIGKHTELERILTLLIGIKGIAETSAIALMGELLLLPPGLSHREWVKFAGLDPQAFDSGKSVHKKTRISKAGNRHIRSALYMPALSAKQHDPHVKAYFQHLVANGKTPLQAVGAVMRKLLHAIHGMLKHDMPFDNSRFYAIPTTAG

SEQ ID NO: 370303 - protein, 404 aa, unidentified
MYNAVGIDVSKGKSTIAVLQPGGTVIRKPFDVSHTSQSLIELAHYLGSLEGSTKIVMECTGRYHEPMLKVLYEAGLFVSVVNPHLIKNFGNNSLRRVKSDPADARRIARYTLDNWAELRQYSGMDNTRTQLKTLNSQFSFFMKQKVAAKANLIALLDNTYPGVNKLFDSPPREDGSEKWVDYAYSFWHVDCVRRIGLKTFTERYRAFCRKHHYIFQPDKPEKLFHASKELVAVFPKEKTYKLLIQQSIQQLNLASGHVERLRQEMNALASTLPEYSTVMGIYGVGKTYGPQLIAEIGDVSRFTHREALTAFAGVDPGVDESGQHKSKSNRASKVGSARLRKTLFQIMTTLLQNAPVDDPVYRFLDKKRAQGKPYYVYMTAGANKFLRIYYGKVKECLRNLEQAE

SEQ ID NO: 370304 - protein, 351 aa, unidentified
MSEITTVGVDLAKKVIVAVTADGVGHELSSRQFSFEGFGEWAANLPPCTIGMEACSSSHYWGRRLSGYGHTVRLIAPDFVRPFRKSRRMKNDRNDAQAVLAAMRQPGMRFVTVKSVEQQGLLAWHRMRAGYQADRTALINRSRGILAEFGVWLGLWPKALMRALESVQGDERIPARLWPLLAEAKEQLRALEGCIERCEAQIRAHAQQNEDAQRISDIVGVGPITASAVVAAVSGARDFKNGRQLSAWIGLVPSQHSSGGQARLGPITKRGNSYLRRLLVEGACSAMRAAQRRVPEKRSRIEQWMIELAQRVGYKKATVGLANKHARMIWAILAKGESYDPEAWKRFKRAA

SEQ ID NO: 370305 - protein, 375 aa, unidentified
MTVTRTLTGSVSEPTLYVAFELGKKEWKLAMTSGFGVQPWVRTVASRDWPAVERAIAQGRARFGLAAGAPVVSCYEAGRDGFWIHRALVQRGISNRVVDSASIEVNRRARRAKTDRLDALKLVMMLVRVWHGEQRVWSEVRVPTIADEAARQVSRERTALTQERTSLTNQMGGWLATWGCALPSRRRDGWWTTVRDWAGATLPDAVQARLTRAEARLAVLEGQIAELDGQQHAAVTTAAPTSALRQLVQLKGVATTSASVLLDEGLVWRAFRNRRQIGGLLGFAPTPYTSGNSAREQGISRAGNNRLQAISIQLAWSWVRWQPDSALTQWYRAHFGTGKRARRIGIVAVARKLVIALWRYVTTGGVPAGAILKVA

SEQ ID NO: 370306 - protein, 353 aa, unidentified
MVHSSRVEAQEVVGLDVGDRSSQICRLDRQTGTVLEERRLSTTTASIQRYFGTLAPQLIALESGTHSLWLTRLLKSLGHEVIVANPSKVRAISSSLKKTDERDARFLAQLVRVDPQLLSPVHPRSEDSQQAIAVVRAREGLVKARTMLINQIRGMVKSFGFRLPAVSSAGFAGKIQKGETLPACLKTTLEPLLRVIAEVSQEIARFDKEVEALARRWPVTQRLRQIKGVGALTALVFVLTLGDPYRFAHSRAVGAYLGLVPGSRSSGLSNPQMPITKQGDRMLRRLLVQASHYVLGPFGQDSDLRRFGLQLAERGGKSGKKRAVVAVARKLAVVLHCLWVSETDYLPLRAAAA

SEQ ID NO: 370307 - protein, 342 aa, unidentified
MQNDTRIAVDLAKAVFEIAVSDRPGRVGRRERLPRAQFLSFFAQRPAATVVMEACGSAHYWGRRIEGLGHRVVLLPPYHVRPYVRRNKTDRTDAKGILEASRNEDIRPVPVKTVSQQVLTSLHRLRSGWMSERTARINCLRGLLRELGVFIPAGARQVIPAVWTLVEDADADVPDALRPFLAELCLEIRQIEARIDRVEKQLQAMAQQLPVVGQLLTIPGVGLLTATALLAFIGDIRRFPSARHLASYIGLTPREYSSGLRRHLGRISKRGDGYLRTLLIHGARSVLLRARADQSDRLRDWAHRIGKTHVHNKAAVAVANKMARVVWAVWTHARPYQPTLAA

SEQ ID NO: 370308 - protein, 401 aa, unidentified
MFVGWDWASTTHDVTVLDDAGAVVDRWALRHTEQDLAAALDRLARLGEPAALPVIIERTSGLVVDRLVAAGHPVVPVHPTAFWAARPRWGASGAKSDAGDSYKLADYLRTDGHRLRRLDRPDPGLQELQGLVRLREDHVRARTAASNQLGALLEAYWPGPKAVFYRLASPIALAFLAEYPTPQAAARLGQARMASFCRRHSYRGGKPPAALLARLRSAPTAPVGIPPATLATLVRAQVRLLRSLLGTITDLEAAIRQRVACHPRAKLLASLPGVGTINLAQLLAEVGPILDRVDSAEQAAAECGAAPVTKASGKTNGVYFRWAANRRARKALTAFAHNSRLAAPWAGQLYADARARGKRNPHATRILARAWLRVIWACWQQDSPYNPALHTAALRVAGRPT

SEQ ID NO: 370309 - protein, 343 aa, unidentified
MKLHALGIDLGKTVFHLVGLDSTGRVVIRKRCSRTQLLAFTANLQVQLIGTEACSGAHFLGRALREQGHEVRLMPAQYVKPYVQTNKSDYLDAEAIAEAVQRPRMRFVPIKTEEQLDLQALHRVRERWVMRRTAVVNQIRSLLLERGLTLPKGRSHLDEQLPRILEDAELNLSDSFRVLLAQLKLELEQLAARIEEMDRVIQKTARENEACQRLTEIPGVGPVTATALIAAVGNASAFGKGRNLSAWMGIVPGEYTTGGKQKLLGISKRGNKYLRRLFVQGARSVLQQRHKQAPGLSEWLAQLLARTHQNVVVVALANKLVRMAWAVLCKNERYRAPVFVGTT

SEQ ID NO: 370310 - protein, 325 aa, unidentified
MNDENLVVIGIDVSKNKLDFALLRNNKLKHKVFKNTSTGHQAVLKWLKANKVDEAHACLESTNIYGDAIANQLYKAGYAVSIVNPARIKGFSQSELSRTKTDKCDASLIARFCAAMNPALWAPDPIEILELKAFVRRVEALMEMRHQEANRLDVAPEVIIGDVEAHIVYLDNEIEETKQRIRKHIDNHPDLKKKKALLESIPGIGEATAAVILSEFSDVGQFKNAKCLAAYIGVAPKERQSGSSVRGRTMMSKTGRSQLRKAFFMPALVALRYNPILIEMKRRLTNAGKAKMAIVGAAMRKLVHLIYGVLKNGVPFDANYVVKSA

SEQ ID NO: 370311 - protein, 388 aa, unidentified
MTTLTTSAVGPILGIDLGKYKSVGCTHGGAGGEIAFTTFETTRAELQRLIGRDRPAVVIIEACLLAGWVHDLCGEVGVPCVVANTASEAWKFKHLKRKTDRDDALRLAQLYWLGQLPTVNLPPSRVRQWRSLIATRQNLVGRRVAVQNRIRAIFVAQGLPAPRGAKAWSATGLAGMTLQAKPIAACGPDELWRGLLDLALTEYRQIGELVTQAEERLDALGRHNAEVKLLQTAPGLGPRTAEVVAAYLHEPQRFHKAKQVSAYSGLVPRQHQSGEMDRRGRISKRGPALLRKLLVECAWCMVRYNAWARGFYLRLTGGGQRRKKQAIVALARKILVRSWAMLRDGKSWHDPQMPPKPALPPSKQRRAAEAARRRQEKARAATATAGCS

SEQ ID NO: 370312 - protein, 343 aa, unidentified
MSNVTTIGIDLAKSVFQVHGVDGAGKVVVRRQLRRRQVLAFFKKLPPCLVGMEACASSHYWAREIAALGHEVRMMPARYVKPYVKRNKNDAADAEAICEAVTRPSMRFVPIKTAEQQAVLVEHRTRQLLVRQRIMLVNALRAHLAEFGIVAGVGRNGLEKLLEVIADDQDERVPPPARRCLLALRDQLVMVRRQILEADRRILVWHRASEVSRRLAEIPGVGPLIATALVASIPDPHAFRSGRDLSAWIGLVPRQNSTGGKQRLGKISKAGNRYLRSLLMIGAFSVIKRAKLTDCRRRPWLAGLLARRATKVAAIALANKIARTAWAMMAHGTCYQEPLPRAA

SEQ ID NO: 370313 - protein, 412 aa, unidentified
MQVLFPRCAGLDVHRDTVAAAVRIQTGSGKAVTEVRTFTTTGGSLGMLADWLTECRVTIVGMESTGVYWKPVFHMLEDRFECWLLNATHVRNVPGRKTDVADAAWISDLVAHGLVRASFVPPKPQRDLRDLTRARRIVVEEKTREVQRLEKLMQDAGVKLTSVASKLLGVSGRAILEKMIEGEGSLEYLADQARGRLRSKIPQLQEALAGTFRSGHHGFLAAQLLARIDLCDEQIDELDHRIEVMIASFRQTVDRICTITGVGEVTATVLLAEVGLDMSRFPTAGHLASWAGICPGNNTSGGKRLSGRTRHGNKWLRTALTEAAHAAARSKDTYLASHHAQVRGRRGVLKAIGATRHDILIAYWHIIANNTVYQDLGGDWHARRRRDPERRRKNLVGEPEKLGYTVTVTPAA

SEQ ID NO: 370314 - protein, 420 aa, unidentified
MKVYKVDNFAVLIGIDWADQKHDVCEHYLDSGKYKYSIIKSKPEALHDWAMSLKNRYPNQKIAVVCELKKGPLIYALNKYDHLTLFTVNPSTVAKYRKAFTPSGAKDDPSDAFVQVEILTLHMDKLSVIEPESSSVRSLAQLVEYRRSLVQDRVDLSNKITAALKNYYPQALEWFKEKDTFIFCDFISKWPSLAHAKRARKQTLLDFFNSHNSHYAQVNDARLLSIKSAMPLTEDTGVIEPNQLLVEVLIAQFKVLLKGIESLDKVIKQAYKAQKDKVIFDSLPGAGPQLAPRLLVAFGSNRERYHDASELQKYAGIAPVIERSGKKMWTHWRYSCPTFLRQTFVEWAGFSIRYSFWAKAYYEQQKSKGKPHNSIIRSLAFKWIRIVFRCWKTNTPYDESKYLEALKRRGSPLLKFAISG

SEQ ID NO: 370315 - protein, 355 aa, unidentified
MNDAKYIGMDVHQATISVAVRDSRGNLVMEAILETKAETILQFIRGLRGSLYVAFEEGTWAAWLHDLLQPHVARVLASDPRKNALLKAGNKSDRIDARKLSELLYLNKLSPVYHGEQGIRTLKELARSYITITRDLTRVMSRLKAIYRGWGIPCAGQQVYAPRYRAEWLAKISEAGVRRRAELYYQQFDALAALRQGTRRELLAEARKHLAMRLLRQIPAIGPIRAALLIALIQTPNRFRTKRQLWAYCGLALRTYTSGEYRFVGGQLKRSKKVLAVRGLNINHNHDLKNIFKGAATRAAATAGPFQDFYQATVARGMKPHLARLTLARKIASITLLVWKKGARFDAEHLKQQAA

SEQ ID NO: 370316 - protein, 403 aa, unidentified
MAAVMIGVDPHKGSHTAVVISPAEEPLGELRVRASAGQAGKLIGWAAAWPERTWAVEGAAGLGRLLAQQLVAAGERVLDVQPKLASRVRLLQAGDTNKNDPSDALSVAVAALRSTVCREVIADDYRVVLKVRAERHRDLARTRNQVACRLHSVLCDLVPGGHQKEISAAHAARILAQATPSGAVALARAELAAEFLADLRHLDGQLRDTRKKLAAAVRASGTTLTQVFGVGPVIAGTVIGDVGDVARFPGRDHFASYNGTAPVEVSSGNRKIHRLSLRGNRRINHAIHMAAITQLRHKHSEGRAYYDKKAAEGKTHKEALRSLKRKVSDAIFARLQADARQARESGPGGQPGNGSDSSAASSHPERQLFGPATPGPDTTIRPGTTAGTPSPSKPALKKTRPAT

SEQ ID NO: 370317 - protein, 353 aa, unidentified
MRRDKYMGMDVHQATTVVAVIDAEGKSVLETIVPTAAGAIRRLIESISGPLHVTLEETTQAEWLHDLLQGFVAEVIVCDPRRNKLLTEGSKGDKADARKLAELLRTGMVRSVWHGRQTTRGLKEMVRAYETFAVDTRRTMMRIKALYRSRGIATKGSAVYQQKQRGHWLNQLTEVGMQQRAAWLYEQLDHVRELRKRAKAAVLTEGARHRAVEFLRTIPQVGPIRAAQIVATAGTPHRFRTKRQFWSYSGLAVVTHTSAEYELRAGRIVRRNKPVATRGLNSNCNRRLKSVFISAATAGGVCHPWQPYLDKLKGKGMKSDMARLTLARKIAALTLAIWKKGESFDAKKLNWTN

SEQ ID NO: 370318 - protein, 387 aa, unidentified
MSTLPCFVWRGLVTASKGEGSVDVSDGICFAGLDVHARKTAAAAIQLGSGEIWKARLAGSATAAIEWLQTLPGPVRAVYEAGPTGFGLARAARAAGLEVMVCSPGAIPRQPGDRIKTDVRDAVKLARLHAAGQLRAVTVPSAELEALRDLVRAREDLRGDLMAARHRISKLLLRRGRIYDGPGHAWESKHHAAWLAAIDVGDPLARVVLGEYLACHEVLLARRDRLDALIAEQAHDPQWAALVGRLRCMRGIDTLTAVGLAAEVGDFTAFAHPKQLASFLGLVPAESSSGEKRRQGSITKAGSSHARRLLIEAAWHYRRRPAVSLTLRRRQDGQSPAAIETAWRAQLRLSAHWAHLDARRAKRRTTVAVAVARELACFVWEIARQPD

SEQ ID NO: 370319 - protein, 402 aa, unidentified
MNAVGIDVSKGKSMVAIMRPFGEIVSTPFEIKHTASDIHSLVELINSVEGESRIVMEHTGRYYEVLAHQLSEANLFVSAINPKLIKDFDNDSLRKVKSDKADAVKIARYALDKWQNLKQYNVMDELRNQLKTMNRQFGFYMKHKTAMKNNLIGILDQTYPGVNTYFDSPARSDGSQKWVDFASTYWHVDCVRKVSLNAFIDHYQNWCKRKKYNFSQSKAEEIYGKAKELVPVLPKDAITKLIIKQAVDQLNSASTTVESLRTLMNETASKLPEYPVVMAMKGVGTSLGSQLMAEIGDVSRFTHKSAITAFAGVDPGVNESGSYEQKSVPTSKRGSSDLRKTLFQVMDVLIKTHPQDDPVYQFLDKKRAQGKPYYVYMTAGANKFLRIYYGRVKEYLSSLPES

SEQ ID NO: 370320 - protein, 338 aa, unidentified
MYYIGVDLHKKSITVCVVELVDRERKIIERRKFHCDEEEAMAKYFAALGQYQLVVEATASYEWFVQLVEPTADRVVLAHPGHLRVIAQSKRKTDKLDAQTLAEYLALDQIPEAWRPTPRVRQHRTLVRHRQYVVQRRTSVKNKIRRVLMHYNADTKNLFCKAGREYLATIELSEADRFTVDLLCEELDEHSERLKRVIKQLQQFAKQAPVAEQEARRVLESMACVGLVTMEVVLAEAGDIRRFGSQRKATAYAGLAPGIRESAGKSKQLAITKQGSQLLRTTLVETAWRLVNKTRRWARVYEKLQPRCGAKKAIVAVARRVWCVMVSMLKSGQKYQPM

SEQ ID NO: 370321 - protein, 391 aa, unidentified
MIYIGIDVAKDKHDCFITNSDSKVLFKAFTIFNNLDGFNDLYQKIESVMDDVTKVKVGLEATGHYSYNLLGYLIDKGLPTYVINPLHTNLYRKSLSLRQTKTDKVDARTIASMLMSDVNLKSYSDTSYHNEELKSLTRYRFDKVKERAKLKSSVSRLICILFPELEKLVPTLHMASVYALLSEFPGAKQVANAHLTRLTNLLSEASKGRYSKDTAITFRDAARTSIGSNMPAKSLELKHTIKLIQELDSEIDEIENEIKIIMDEINSPILSIPGINYRMGAMIIAEIGDFNRFDSPDKILAYAGFSPSTYQSGQLDGAYAHMEKRGSRYLRYALYNATKYVCHWDPTFAAYLAKKRAEGKHYNVAISHAVKKLVRVIYHLEKTKQQYIKAA

SEQ ID NO: 370322 - protein, 379 aa, unidentified
MTCKECGQVVKLTRTMNKCHSNTELSSHEETRCQFNGGTGAIKLGIDVHQDFYVVVEQVGATNPKPPQRFQKQAFVHWAAKLKSQATEVYAVYEACGFGFSLQRKLSALSIKCYVVCPQKLDEQNRRVKTDGLDAKALCLKLDRFVQGNRDALAIVRVPSEEEEQARAIHRQREQLVKARKQLEAQGRSLMVNHGLEPVQNWWKPRTFAALAMPQWMKELLANSQPILVALQQKIAALTVQLQSAASPNQPRGLGKMTSVVIDREIGDWSRFNNRRQVASYTGLCPGEYSSGNTRLQSCVTKHGNPRLRAALVELAWRLVRFQPDYHPVRKWRQILAKSALATGAARKKAIVAVARQLAVDLWRIKTGRLRAEELGLIN

SEQ ID NO: 370323 - protein, 389 aa, unidentified
MKIFVGIDIAKLNHFAAAISSDGEILIEPFKFTNDADGFQLLVSKLESFDKNSIIIGLESTAHYGDNLVRYLVAEFYQVCVLNPIKTCQMRKNNVRETKTDKVDTFVIAKTLMMQDDLRFITFFDLDMMDLKALGRFRQKTIKQRTRLKIQLTTYVDQVFPEIQYFFKSGLHQNAVYALLKEAPSPKEIASMHMTHLANLLKVNSHGHFTKEQAKELRVLAQKSVGANDSAISIQITQTIQQIELLDSQLQKIEAEITDIMKFNDSVIMTIPGIGYINGGMILGEIGDIHRFSNPNKLLAFAGLDPSVYQSGNFQAKTTRMSKRGSRVLRYALVNAAWNVVRNNATFKAYYDAKRAEGRSHYNALGHCAGKLVRVIWKMLTDEVEFNLE

SEQ ID NO: 370324 - protein, 322 aa, unidentified
MRYIGIDVSKATFVVAYSSDKGGEIRTFNNTTAGIRQFIGTLPKDGSIHCVMEATGNYSALLLYMLNVAGITVSMENPLKVKNFAKAMLSTIKTDKSDARLITLYGEKMNPRPFKVQGEAILRLRQKRTVIRQLTKQITAMSNLRGSLACLPVPDKGATHTVDETIEFLEKRRDRLQSELTDLVEVEFSRQLALLTTIKGIGITLATALIITTGGFTYFQNAKQVSRYLGICPTYEQSGTSVNIRGHINRNGDAYTRGLLYVAAWTASRFNTKCGETYTRLRQNGKPGKLAMIAVANKLVRQAFAVVTHDKEYVDGFVSNRP

SEQ ID NO: 370325 - protein, 343 aa, unidentified
MEYYVGLDVSLKQTSICVVDQAGLVVREGVVDSDPETISIYVTSKAPNAVRIGLETGPTSTWLWTELKRLGLPVICIDARHAKAVLKMQINKSDRNDAIGIARIMQTGWFKEVHVKDIDSHSVRALLASRALLVKIKRDLENHVRGLLKNLGLVIGRAKFNVFAVRAEELIEGRPELIAAIRPLLEARNAVEQQVSELDRKVMKLARHYAQVRRFMTAPGVGPITALAFKATIDDPARFARSRSVGAYVGLTSRRHASGEVDWTGRISKCGDAMLRSYLFEAAGVLLTRVPKWSAVKAWGVRLAKRNGLRKAKVAVARKLAVILHRMWIEGTEFNWSKMEIAA

SEQ ID NO: 370326 - protein, 337 aa, unidentified
MEYYAGLDVSMKETHICVMDRDGVVVHETRVASTPADIDAALMDAPACQRVVFETGRMAPMLYHGLIQRGVPVVCIESRQAYQALKSLATHKTDRNDARGLAQLARTGFFKPVHVKSLAAHAIRSLIIARKKLVGQRVTLENQIRGLAVAFGIRLPRSLSPAFIEQALKASDGVDGLSAAMQGLIAARTAVMAAVTAIDTDIKKMTRASNACRRLMTIPGVGQLTALAFAAAVDDPERFKRSRDIGAYFGLVPRRYQSGEVDYTGSISKCGDRRVRTLLYEAANVLLTRCKCQLKLKDWAFAIAKRSTMRKARIALARRLAIIMHAMLKHGTEFKLV

SEQ ID NO: 370327 - protein, 355 aa, unidentified
MERYLGLDVHAASSTLAVISASGKRLQTHVVETNGRALVEAVRLIPGRKHLVFEEGAQSAWLYEILKPHVDEVVVAGITKSRGQKDDRRDAYGLAEKLRTGTLDKRIFKAPRQFAMLRELARTHQMIGRDLVRAQARLKTLYRSRGIRTPGRGVYTKTHREQWQQQLPAAARTTAVRLYEQIDFLVALKAHAEQDLIRESRKHSIARLLETTPGLGPIRVARLLPIVVTPHRFRTRQQFWSYCGLGIVMRSSSDWVQTPDGRWIRAPVQQTRGLTRQHNHALKDLFKGAATTIVTQAPDDPLYHAYQRLTEAGTKPNLAKVTLARKVAATVLALWKKEEPYRPKPCTAPEIDRGA

SEQ ID NO: 370328 - protein, 405 aa, unidentified
MNAVGIDISKGKCMVAILRPLGEVVKKPFEVEHDYGKLESLAYDLKGLEGETRAIMESTGRYYEPVAQVLHEIGVFVSVVNPALIHDFGNNSLRRVKTDKKDALKIAKFGLDNWASLREYTPMEAVRQQLRNASRQLDLYTKMKTGLKNNLIALLDMTWPGINTFFNSPVREDGRQKWVDFAYTFWHADCVCLLSEEVFVEKYRQWCKRKGYNFSQYKAEDIYVESWGHFTTLPKNMSTRTLIHQAIAALNAISRTAEIFRAEMQRLAEQLPEYPVVMEMYGVGKAIGPQLMAEIGDVRRFSHRGALIAYAGVDPQPSQSGKHDRSSNPISRKGSANIRKSLYQVMVTLLRKMPADEPVYQFIDRKRGEGKPYFVYMTAGANKFLRIYYARVKEHLNKSEDLPTL

SEQ ID NO: 370329 - protein, 343 aa, unidentified
MTYDTMIGIDLAKNVFQVHGALLCGEVKFRRKLSRQHFRRFMAGQGASIVVMEACGSAHYWSREMTKLGHEVRLIAPQYVRPFVKRQKNDAADAEAIVTAAQRPGMRFVTPKLEEQQAQALLFRGRERLVRQRTELVNALRSALYEFGHPIPPGIGQLTRIEAMVEAENSDLPELVRDECRDLLLQIAEKTQRIEVKTKQIGALASLTDTARRLQTMPGIGPMSALAVEAFAPPMESFRRGRDFAAWLGLVPRQHSSGGKERLGRISKAGQADIRRLLIMGAMSRLNWLGRRTILERSWLSGMLARKPRMLVAIALANKMARAIWAMLTTGKDYQNPAQTAAA

SEQ ID NO: 370330 - protein, 409 aa, unidentified
MEVVHARCCGLDVPKDTVVACLLTPGSGGRPTAEVRTFGTLTDELLALGDWLAEAGCTHVAMESTGVYWKPIWNVLEGQVALLLANAQHIKRVPGRKTDVQDAEWIADLLRHGLLTASFVPDRAQRELRELTRYRLALVRERSREVQRVQKTLEGANIKLGSVATDIMGKSGREILAGLAAGRADAAALADLAQGQLRKKLPELERALVGRFGAHQRFLVARQLAHLDELDGLIAEVSAEIAERVRPCEDAVTRLDGIPGVGRTTAEVRVAEIGTDMTRFPTDAHLASWAALCPGHHESAGKRTSGKTRKGNRALRTALVEAAKAARRTRGTYLGAQYQRLAARRGPNKAAIAVAHSILIIAYHLLKDRGTYDDLGADFFDRRDQDALERRLVRRLEALGNKVTVEKVA

SEQ ID NO: 370331 - protein, 415 aa, unidentified
MHLDFCEVAVVEDGEVRSAGRIETTPEQLELFASSLGLDDRVALEVTGNAWEIARIIEPHVAQVLVVSPSDTGIRQARAKTDRLDARTLARLLAAGSLDGVWMPDRWTWVMRRRLSRRSQLVWARSRSKNQVHAVLMRQLVGRPPVSDLFAVNGREWLRGLQLAEEERETVDAHIRQIEFLEKEIAEVERLIAGAALESTEIKRLMSVPGVNVIVAASFMAAIGDIHRFESPRKLVGYLGLDPLVRQSGVGPATHGHISKQGSVRARHALVEACWTTVRQPGPLHAFYQRIRARRGHSVAIVAAARKLASLFWCLLTREQDYAYQQPSLTKKKLRRLEITAGAKRYTSNAAGIYSANDAVRNAERELARQAEVAYARTVSDWHATQAVKVGASVTPGRASKKPLKGEAARQTTSP

SEQ ID NO: 370332 - protein, 326 aa, unidentified
MSPPRWIPLGGLLGVGEFPATAAGYARLLGWLGGFGTVCLVGIEGTGSYGAGLARHVTAAGIRVVEVDRSDRQDRRRQGKSDPLDAVSAARAAQSGRARGEPKGRDGAVEAIRALMVAKRSARSERTQTINQARALIVTGPDDLRARFARHTAAGLVSELAALRPRPGATVGYATRIALRELGRRAEFLDGQLGRLDELIVPLVTARAPALLALHGVGPDTAALLLIAAGDHPHRLRSEAAWAHLCAVAPIPASSGKRTRHRLNPGGNREASHALWRIVITRMSSHAPTRAYVERRTKEGLSKKEIIRCLKRYAARQVYRHLRPAG

SEQ ID NO: 370333 - protein, 344 aa, unidentified
MTMVRVTGGVDTHADFHVAAAVDHNGGLLGVESFPVDLAGFEELVGWLCSFGPVQQVGVEGTGSWGVGLARFLADTGVETVEVDRPNRQKRRKKGKSDVTDAVAAARAALSGEAAVTPKSRNGPVEQMRVLLVARRSARQQRIQSLNQLRHLVFTAPEPIRIRFKDRYKTGLVTEAAGMRPRKGSDPVTYTTNTVIRNLARRITALNTEMTEIDRVLVLLLEQTAPSLLALYGVGPDTGATLLVTAGDNPDRLHTERGWACLCGVAPLPAGSGKTSGRFRLNRGGDRQANAALYRIVLTRMSSHPETRAYVARRRQEGLNTTEIMRCLKRYVARQVYKHLPQTV

SEQ ID NO: 370334 - protein, 431 aa, unidentified
MTDHKITPDAPVLVALDIAKHRHEILIEVPGKKRSRRLTIQNTREDYDRLTTLLMDYRRPIRIAFEATGNYHRVLAHHLGQAGFELKLVSSVALARTREALNNSWDKNDPKDAQVILHMLQIGLVQFFHDPLAFGTNDIQEISKTHDIVSKSKTELWHRILTHYLPLYFPEAERFHRSSRTDWFLAFLEMFPSPYFITALTKEEFTKVAWQVVGRKVSKTQLLSDIYETAKASVALPVSEKSDAIRMFRLVLSEGRSLIRQRNEIEARADDLLSDHEDYRLLTSVPGVGPINALTILAEAGDLRRFRHHRQFLKFCGMDLATYQSGMFHGQTKLSKYGNARLRRTLWLAGQVAILQRANSFRDKYERYISHDRFNKHLRRKAYTAIAAKMARTVHAIVKNGEPYRPFFEGVSPGGRTSLCSGRGGVNRPRR

SEQ ID NO: 370335 - protein, 339 aa, unidentified
MSIVMGLDQHRAQITAEWLDTVTGEVSRGRIVPGDRQGVRRFLSRFEGRGLEVALEATTGWRFVVEELRRVGASVHLAEPAETSALRGNKRHAKNDRADARHLRELLMAGRVPECWIAPDHLLDLRARVRLRHTLVDQRGEWQQRMQAVLYHHGLPKRAGLLTGENRAWVQQLVLPAAGREQITVALGMIDALDMRVAPIDKELRAYARRQPGCRALQDAHYGIGALTSVVILAELGDCSRFSSSREAVRYGGMDITVHASDKRRAPGHLSRQGPPVLRWALYEAAQAARRKTSPDYAYYQQAAERLGGNRACLALARKLLKRSYHTLRELGDQALAPA

SEQ ID NO: 370336 - protein, 421 aa, unidentified
MTPTSHDTFAAFVGIDWADAKHAICLQAAGTATREGFQLDHTPEAIEAWGTTLRTRFSGQPVAVCLELTKGPLVSALRKYDFLVLFPINPLTLARYREAFTPSRAKDDPTDAELQLELLLTHRDKLQPLQPQSPAMRALEQLVEHRRRVVGDKVRITNRLTSTLKNYFPQVLQWFQDKDTHLFCDFLSRWPTLKAAQLARRSTLEPFFRDHHVRVGDVLATRIHAIKTATPLTTAEGVIVPNALLVQALVSQLRVTLDAIEAFDHAIAQRAQRHPDFPLFQALPGAGPVFASRLLVAFGEQRERYTSATALQKYAGVAPVTERSGKKAWVHWRLQCPKFLRQTFVEWAAESIRHSFWAQVYSQQQRDKGNTHQAAVRALAFKWIRILYRCWQDRTPYDESVYLQALHRRGSSLIHNLAEAS

SEQ ID NO: 370337 - protein, 354 aa, unidentified
MKKIFIGIDFSKEKFDATLIQAEGLKECAPSVHEVFDNKTSGYRRLVKWVKTHAEGFTADTWLFCGENTGGYSIGLSNYVYASGYDMWLECAYKIKHSAGIQRVKNDKADSRTIAEYAMRNYDKMIPYKPQSASLTCLREVFLYRHSLVRQKVALQVRRDEKRLTQEKSEARAFVSFTSKHLITEVNKAIAKCDQKIKDIIASDDELREVFDIITSMPGIGIQNATCLMVYTDNFRKFDLNSRKIGCYYGIAPFGRQSGTSVNSRPQVSPFANRMIKSLLSQAALAAIKFDMNVHNYYQRLIERGKHPLLVHNNIKNKMLHILVAMVRDRVKYNPDNVYGTSNEVSLAPQVLNI

SEQ ID NO: 370338 - protein, 421 aa, unidentified
MTRTIAGIDIPKNVLMAVVATVLEKESDGGREQQIEYEGRRFGSGTREREHLVAWLRERQADEVVMESTAPYWKPVWMDLELHFPKLPVAQAHSNKAPKGRKNDFADARRLTRRMAAGERILSFVPDAEQRRWRTMTRGKQQLVRDRVRWQNQTEELLEEMRIQLSGVVSDLFGVSGRRILEALGGGETDPEKLADLGDDRLQCGREALVDALTGHSEPMHLQILKLSIERLHLLDRQIEALDQMAAGALKKHADAVTRLAGVPGLGVDSAQQVIAEVGSDAPSFPAAGELASWVGTIPGSGVSAEQNHSSRSRKGNKYLRRIFTQAAQGAVKTKGCHFQTVFRRLVPKLGYQGAIWAIANRLCRLAWKILHDHVSYIEQAAETTPQAKKRRAQRLIQALRRLGYQAAITPVTPTPAVAQG

SEQ ID NO: 370339 - protein, 372 aa, unidentified
MQQSRTLYVGLDVHKESIAVAYVAQDHGAEVLSLGTIGTRQCDIDKLLRHLQSKGQQLVFVYEAGPCGSWLYRYLMKKGYVCWVVAPSLIPKKPGDRVKTDRRDARQLARLMRSGDLTPVYVPAVDDEAIRDLSRAREDTLRDLKAAKLRLKAFLLRHDIRYTGRANWSPAHLRWLSEVVCPTPAQQIVFQAYVQTVTAQTARLQRLEHELRDQVTTWRFQPVVEALQALRGVQFTVAVTTVAELGDLTRFNNPRQLMNYLGLTPSEYSSGPRRQQGSITKTGNTHARRALVEGAWAYRYPAKVSRHLQLRLEKLPAAIQAISWKAQVRLCKRYRQLMAKGKHANQVVVAIARELSAFMWAIAKQVVVPPKA

SEQ ID NO: 370340 - protein, 435 aa, unidentified
MKKIRTNVGGIDIGAKKVFTSIEGQPVVSHFTFTEDFYKLRDYLLGHNIESIAMEATGVYWVILYEILEEAGIDVWLVDGRQTKQVPGRKTDVKDCQWIQELHSYGLLNRCLVVDADIKELRSYLRLREDHIESSSRHINQMQKALILMNIRLKEVLSQIHGASGMAIIKAILKGERDRQVLVSLCHRSVLKNKKELVLKALEGKYTTAGLFALKQAHEGYKFYQQQIAECDKKLNDVINRIGNSGDGQELKQKRKAIRHHKPNVEKLGPNLLNIFDSKDATLISGITDYTWMQLLAETGPDLTRWPSEKHYTSWLGLSPGQHSSGKMRKNARKKGKPKAGQIFRIIAQGLINSKDVAIGSFGRRLRGRKGPKVAIKAMARKVAVLYWRVMVKGLDYAEKGIQQYEEQLIVNKMKAFGRLAKDLNIEITGNLHVT

SEQ ID NO: 370341 - protein, 404 aa, unidentified
MKGPIVSIDVSKGKSDYQAFKNLNVKYTGSRSIKHTKEGFDEIVSLVREMEKKLETEVCVVYEATGVYHRVLKKVLEDNNIKQFIINPLLSAKTRKNDSLRSPKTDKLDPKSIAKTYYSHSLHNSHKQETIYHELRELSRYYEDILVHIRKDKVAFRAQLDVVFPGYDALFDDLYGPVALAVIEKYPHPEMLQKKKINTVSKVIQNKTCHRQAVSDTMADKAIEYSKTIYSGCDKDDIEVLILQRLIKKLNEDMAEAERTIGEMIKLAQELPDFSIIKSIPGIGDNLAARIIAELGDMTRFKKKNELVAFAGLDPRISESGKNDGDHMHITKKGNKRLRCLLYLAVTCSIRLKRDDNSIKEFYIKKKQQSNPMCSKAAKTACASKLVRIIYSMCKTGELYQYNK

SEQ ID NO: 370342 - protein, 418 aa, unidentified
MKCFVGLDISSTKLEVCIMTNDIEMKVLFSATFGNDIIGASEIKEQVLRFNDIYHFERILIGMEATSLYSFHPAMFFYEDSELKQLRVEVMIEQPAKIKKYREAFEENKNDTLDAFYIADYFRIERFTKSYLKEEKYNALQHLTRTRLQLIEQLVCTKQHFIENIYYKCNTLSIELKNHQLSTNIWSATIMTLMVEDYTLDELASLPLEKFVELIQKLGRGKFKAPDKLAKVIQAAITGSYRLSHVQQDSVNTVLSLLAREIRSLEKMIKEIDRAIEDMVEVLPEYQCLTSVPGIGKVFAAGIIAEIGQIDRFKDHPQVAKYAGLNWKENQSGNTSSQNTSLVKRGNRYLRYYLVEAADSVRRHNVEYAEFYKKKDEVPKHKHKRAVVLTARKLVRLVDVLLRNHQPYTPPRRFMEDN

SEQ ID NO: 370343 - protein, 408 aa, unidentified
MQVYIGIDWSQSKHDVAFMNEAGVVVIQEAIAHSEKGFEKLEWLRRRAGLQPTDCVVGMETAHNLLIDFLWSRNYSHVYVVPPNVVKSSRGRYRQSGARDDRSDAKLLADLLRTDHGRLQPWYPDSSLTCQIRAKISLTCFLTRDIVTLSNRLRASLLRYYPAAVHAFSSLTTRIALQFIRAFPDPEAASRLTFEQFSTFARQHGYHRPRDLPACFARLQADHPVALPQIVLAYQEEAPLLATRLLDALQTKQALLKSISALFEQHPDAQLFASLPGTGRFLAPALLAKFGDDRQRFPAPASIQALAGTCPVTDASGKHKAIYFRRACDHEFRHIAQQWAIAATWQSPWARRYFEQVHSRCHSYAQAYRSLANRLLCVAWKVWQTSRPYDETYHWQQCIRRSQPNQPS

SEQ ID NO: 370344 - protein, 346 aa, unidentified
MNMTNIQPNKTDTESKGSHFAGIDVGAEELVLVILKNGKPFDPQKFSNTPADRARLVKKLVKLPGIVVCLEATGIYHFDLAIALHDAGVLLMVVNPKASHNFAKVLMKNSKTDAVDAHTLAEYAARMDFVAWTRPTDETLNLRSFSRRINALTGQKAAAKNHLHALTSTQETPKAVLRDAKLAITQLEKRIDRLTADALILIGKYSELTRILALLIGIKGIGETSAIALMGELLLLPPGLSHREWVKFAGLDPRSFDSGKSVHKKTRISKAGNAHIRSALYMPALSAKQHDPHVKAYFQHLVDNGKKPLQAVCAIMRKLLHAIHGMLKHNKPYDNTRFYAIPVSGR

SEQ ID NO: 370345 - protein, 408 aa, unidentified
MYNAVGIDASKLKSTITIIQPAGVVIRKPFDVLHTSDELNTLVTYLKSLVGETRAVIECTGRYHEPVVKSLSEAGIFISAVNPKLIKVQKQNTLRNVKSDPADARKIAKYALDNWAELREYSSMDTTREQLKTLNSQFTFFMKQKVAAKTNLISLLDNTYPGVNKLFDSPTRDDGSEKWVDYAYSFWHVDCVRKIGLKAFTERYEAFCKKHHYNYQKNKPALLFEESKQLVAVFPKEKSYKLLIQQSIQQLRLASEHIEIIRKEMNELASTLPEYETVMSMYGVGETYGPQLIAEIGDVSRFTHREAITAFAGVDPGVNESGQFKQRSNRASKNGSTRLRKTLFQVMSTYLQNKPVNEPVYQFLDRKRAEGKPYLVYMTAGANKFLRIYYGKVKECLRNLEQSQIEES

SEQ ID NO: 370346 - protein, 405 aa, unidentified
MDVIIERACGLDVHKDNITACIMTSEGKEVQTFSTKTVFLLKLLDWIKENNCTHVAMESTSVYWKPIVNLLESEGIEFLVVNAQHMKALPGRKTDVKDAEWIAQLLRYGLLKASFIPDRNQRELRELVRYRRSIIEERARQHNRIQKVLEGANIKLGSVVSDIMGVSSKDMLRAIADGEDDPEKLANFARRTMKKKKEELELALQGYVNPHQRLMLKTILTHIDFLTEQIQMLDQEIAKRVSTYQEDIERLDSIPGIATRMAEQILAEIGTDVRNQFPTAAHLCSWAALVPGHNESAGKRKSSRSKKGNKYLRSALTEAAQSVRGSKNYLGALYRRTAGRKGKKKAAIVVAHAMLRIAYYLLTRKEMYVDLGENYFDKQKQASIVRHSVRRLENLGYTVTITEAS

SEQ ID NO: 370347 - protein, 367 aa, unidentified
MIYLGMDVHKDSITIAVLPAAAKTPTRLERLPNDLPKLQKWIARVAREGEIHACYEASGAGYVLHRALAEWGYACDVIAPSLIPKRSGVHRKHDKRDAADLARLYRAGELVAVRIPSEADERVRDVVRCRETFQREILKSRHYILKFLATRGFVFREGTNWCTPHLQWLQHLTTDASPLAPEDRLVYREYHALLQYKLQRREELDRQVERLAELPTLAPMVRQLQCFRGISVHSAMVLATEIVDWRRFERPAQLACYLGLVSREDSSGTRQRLGSITKAGNSHCRHVLVQAAWSYRHRPQTSVDLKRRQAGQPPAVITHAWKAQQRLHARFNHLSYRKRPQIAVVAVARELVGFLWAVMRELEPVQA

SEQ ID NO: 370348 - protein, 416 aa, unidentified
MWNKATRAKCSVEQHHNLTVGGFIMVVSVGIDVSKDKHDCFILNSEGEVLADVFTIPNNMDGFTCLLQKIRDCTTSQDKIRVGLEATGHYSYNILGFLLDNDLPVYVMNPLHTNLYRKSLSLRKTKTDRVDAKTIATMLLSDVDLKSYTDTAYHNEELKSLTRYRFDKVQERAKLKQSVSRLVTILFPELEQLVSSIHGTSIYALLSEYPGAKQISEAHLTRLANILVTTSRGHYRKDRATHIRDAARTSIGSVMPAKSLELKHTIKLIQELTSEINEIEDAIRKIMDELKPPILSIPGMGFYSAAMILAEVGDFSNFNSPDKVLAYAGCSPSTYQSGKLTNCYAHMEKRGSRYLRYALYTATKYVCYWNPVFTEYLTKKQAEGKHYNVALSHATKKLVRLIYALQKSGKAYLAIT

SEQ ID NO: 370349 - protein, 352 aa, unidentified
MKKIFIGIDFAKEKFDAAIIEACGLKEFGDRQYGTFPNDKKGYRQFIKWVKTNCGAAVEDEWIFCGEDTGSCSIGLSKWLYGKGLDIWIENAYSIRHSSGIQRVKTDKADASMIAEYAWRHQDKAVLFEPLSESLTQLREVFLYRHKLVQQRVAMEVRKKDKETSQESSKALSFIKRKSKHLMDEIDKVIKECDDRIDHIIAEDPELAENYAIVTSIKGVARQNGACLLIYTNNFKRFDMDARKIACYYGVAPFGKESGSSVHSPAHTSHFANKLIKALLGQAAQIARIYNPEIREYYERLRVKGKKHSVAINNVKNKLLRIIVALVKKRTFYDPKSYKFYRDRLNAQFNPY

SEQ ID NO: 370350 - protein, 356 aa, unidentified
MSSEVKYIGMDVHKEAIVIAVRDTKGHVVMESIVETKASSILQFIRGLQGELHVTWEEGTWAAWLYDLLKPHVHRVLVCNPRRNALLKEGSKNDKVDARKLADLLRTGMLLPVYHGEHGLRTLRELARTYQTLSQDLNRVMNRLKALYRGWGIACGGTQVYAPRYRDEWLGKIEHAGVRRRAELLYQQLDGLQALRRTLRSELLAESRKHKASKLLRQIPCIGPIRAARLVALMQTPHRFRSKRQLWTYSGLGIETHDSAQYRFVRGELQRAKKPQQIRGLNRNHNHEMKDIFKGAANRASCGVGPLRDFYVALLDKGMKPEMARLTLARKIAAIALTLWKKEERFNAEHLKTQAA

SEQ ID NO: 370351 - protein, 318 aa, unidentified
MKSLSFIGVDVAQRTLAMATAGQSRTLEIANTLSAVSAWLSTLPAGCRIGVESTGSFHRLLVRCALGAGHTVYLLNARDLAHYARALGRRAKTDRLDAALIARYLAKEHEQLHPYRLPTELQAELDELIGRRHTVVSAQATLRQSFAGLKHPPRALGRTLRSHQTLIKELDQRLQELIAQDPQLAAAAGHLRSVVGFGPLLSTALAHAITRHPFAHADAFVAYIGYDPRVRDSGQQRGRRHLSKRGPAELRRLLFTAAMSASKTQLWHPFYERYRARGLATTAALVILARKLARIAFSIVRYGTDFRPELVKNTCVQP

SEQ ID NO: 370352 - protein, 415 aa, unidentified
MKLSADQSYAAFVGIDWGDQKHDACLQAAGSDQHEHSEIVHRPEAIERWACELRERFGGRPIAVCLEIARGPLVYALQRYEFLVLFPVNPSTLASYRSTFCVSGAKDDPTDAELALELLLRHPEKLSALRPQSVAMRTLETLVEQRRVLVDEVHRVSNRMTSALKEYFPQVLEWFRDKDTLVFCDFITRWPTLTQAKRARKARLCAFFHEHNVRYRHIVEQRVQSIKAASPLTTDASVIGPYSLLVISLAQQQRVLLQSVERFDAEIAALAPSLPDYHLFAPLPGAGPVFAPRLLAAFGEQRERFASANRMQCYVGVAPVTERSGNKCWVHWRLRCPKFVRQTFVEWAAHSIPYCYWAQAYYRQQRAKGSSHQAALRGLAFKWIRILYRCWQTRTPYDEATYLSALKRRGSPLVA

SEQ ID NO: 370353 - protein, 353 aa, unidentified
MSDDKYIAFDVHQATTVVSVRNAAGRELDSTIVPTQPQPLIRYLESLRGRLHLTFEEGTSSAWLYDLLQGRVAELIVCDPRRNALLREGSQTDHTDARKLADLLRTGMLRPVYHGSRSVRNLQELAHAYLALVKDTTRVMNRMKAFYRSHGIDCAGRGVYSPKQRGIWLQRLPAGASRVRGELLHDQLEQLRPLRRKARRALLMESRKYTVAARLREIPGLGVLRVALLIAALQTPHRFRTRRKLWSYAGLGLVQEGSSEYGWAEGHAVRRPRALHLRGLNRNHRPELKALFKSAALVAIRQPGPFKEYYEARAQRGVDPAILRVTVARKLAALTLSLWKKGGRYRAEGMKQA

SEQ ID NO: 370354 - protein, 401 aa, unidentified
MTATHTTNSTVSHAPVLYLALDLGTRDWKLAFTVGLGQKPRLKTITARSTLSLVLEIKAAKRRFGLPEDAPVICCYEAGRDGFWLHRFLLDQGVQNQVVDSSSIEVNRRQRRAKSDRLDAVKLVQMLIRWHNGEHKVWSVVHAPTVAEEDARQLHREMIKLKAERTAQANSINGLLAGLGLCVIVDETLPTQLENLRQWDGAKLPPQLHQRLLRELQRWQLIDRQLRELDAQRMAKIRDDQTPHVEKVRRLLNLKGIGENGAWLLVYEFFAWRIIKNRRELGSLAGLTPTPYASGESEREQGISKAGNRRVRWMMTELAWGWLRYQPRSELSQWYQRRFGRGNRRLRKVGIMALARKLLIALWKYLEGGEAPAGAEEVGWDNKPRFRAVKTRRRKELSPTG

SEQ ID NO: 370355 - protein, 339 aa, unidentified
MNVMIGIDPHKASHTAVAIGRDEDQIASVKVRATLRQVDQLLGWAEPFEKRTWAIESVGGLGYLLAQQLVARGEDVLDVPATLASRIRVLATKRSNKNDPNDAHSIAIAALRARRLRMVEPANHAEVLRLLSKRNADLGRQRARVICRLHSLCAELVPGGIAKEMYVSDAEALLERVTPETPVQQMRYDLVLELLDDVRRLDTQTKESHRRIRTAVRASGTSVTEIYGVGPIHAATIIGYSGDIRRFANRDAYASFNGTAPIEHSSGGRVVHRLSRRGCRKLNHALHMAAVTQIRNPGTTGRIYFDRKVAEGKTKKEALRVLKRQISNAVYRQLVLDAQ

SEQ ID NO: 370356 - protein, 383 aa, unidentified
MNDAKYIGLDVHQATISAAVRDSDGKLVLEAILETKAETMLQFIHGLRGSLHVTFEEGTSADWLYTLLKPHVTEVLVCDPRKNALLKVGNKGDRIDARKLSELLRANLLRPVFHDDTGLRTLREMARSYLTITKDVTRVMRRLKAIYRSWAIPCGGQQVYSPRHRAEWLGKITEASVRRRAELYYQQLDTLRVLHQQAKKELLAEGRKHKTMKLLRQIPSIGPIRSVLLVAILQTPHRFRTKRQLWSYSGLALETRNSGEYRIEGGQLMRSKKAFAVRGLNKNHNHDVKNIFKGAAIRAMTVEGPFQKFYEALVAKGMKPTMARLTLARKIAAITLIVWKKGARLCAGINRHEVENARVLRERTSDSPGPEFCAAHREVHSEA

SEQ ID NO: 370357 - protein, 405 aa, unidentified
MEIVIDRGCGIDVHKASLTACIMGTGIKKEIRTFTTMTNDLLRLKTWLADNRITHVAMESTGVYWKPVFNILEDSFEVMLVNARHVKNVPGKKTDVRDAEWLCKLLRSGLVRGSFIPPKEIREIRDLTRYKRKLIQTIVSEKQRVEKVLEDANIKLSSIASDTFGASGKRIIEELMKGDLKAEEMADLGKGKLRSRKEELREALVGNMNDHHRFMIQAHLSHIETMEKLLLPLEEKIQEKINLHFKEEYELLKTIPPIGESASVIIAEMGVNMNLFPTEMHLSSWSGMCPGNNESAGKRKPGTTTHGNKHLKSILAEFGWTASRMKKTYLCSKYHSLVGRKGKKKALVAVGHKILVMCWYVLKYKAPYKELGPKYLDERRKDRIVRSYIKRLVGLGYAVTLKEAA

SEQ ID NO: 370358 - protein, 343 aa, unidentified
MAYFAGLDVSVKETSVCIVDDAGKIVREVRVASEPEALLQVLTNTIYRFKRVGLEAGPLSQWLYSVLAEAGFPVICVETRHMRAVLKAQINKTDRNDARGIAQMMRVGLYRPVHVKTLRSQKLRMLLTHRKLLQSKAIAIENDLRGSLRNFGLKVGMVGTVKFEARINKLVENLPDLAVLVEPLLIVRRVLREQLGILHRRLLAIVRDDDVCRRLMTIPGVGPVVALTYRVTVDVPARFRNSKAVGAVFGLTPAKYQSGENDRTGAISRCGDEMMRMMLYEAAQSMLVRAAKWSWLKAWAMKIARHRGMKKAIVALARRLAVIMHRIWVDGTDFRWTREVAAA

SEQ ID NO: 370359 - protein, 339 aa, unidentified
MQVTTIGLDLAKNVFQVHGITKDDEVGFNRPLRRAQLLPFFSKLEPCLIGMEACSSAHHWGRELTELGHEVRLIPPIYVKPYVKRGKSDAIDAEAICEAVTRPTMRFVAVKTVEQQSFLSLHRARDLLVRQRTQLINGLRGMVAEFGVYIAKGLARIIDFAENILAGEVLDLPDIANEVIHNMCEHLMALHARIRWYENRLKQVAKEDARVRLLRTIPGVGAVTASAIIASIGDGHQFENGRAFAAWLGLTPSNKSSGGKEKLGRITKMGDQYLRSLLVVGMTSLVRQTKSHPERASKWLTSLLERKPARVATVAMANKTARIVWAVLTRNEPYTPHTA

SEQ ID NO: 370360 - protein, 436 aa, unidentified
MDIVHPRVAGIDVHKKIIWVAVRLPGEGPGERIVTVRKLATFWRPLQQMAAWLAELGVTDAAMESTGIYWWPVYHALAAAGIEVCVCNAAHMRNVPGRKTDLRDCQWIAELHEHGLLRASFIPGPAVAALRQRTRYRKKLIESRTAEGQRLSKVLEDAGIKIDSVASELLGVSGRDMIEALIAGERNPGVLANLARRRLRAKIDALQMACDGRFTDSHAQMCRLHLDSYDHLTARIAELDILVAEAANPFAAIIARLVTIPGIGPRTAQVIVAETGGDMARFATPARLGAWAGLAPGDNESAGKRKKAAVRPGNQHLRAAMVEAGWSAARTATRPGARFRRLARRFGRGNEKKAAVAVAHTLICIAWAVIKHDQDYAEAGEQYYEQRDQRNREHLIRHYQQALARLGYQVTLVPPDDGSPPPGTDTPPTAAPDQAA

SEQ ID NO: 370361 - protein, 388 aa, unidentified
MLRAAKTLVTNKEETSRRFYTKQHPFYCGIDLHARTMYLGILDQAGETLLHRNMPATPEALLKAIAPYQEQIVLAAACMLTWYGLADLCADHGIPCVLGHALYMKAIHGGKAKNDNIDSHKIAALLRGGMLPQADVSPAAMRATRDLLRRRMHLARTRGALLAHVQHTNSQYNLPAIGKKIAYKANRDGVAARFADPAVHKSIEVDLARITYDDDLLRDVELTLVKTAKHHDAQTLSLLQTVPGIGTMLRLVLLDAIHDSARVPRGQDVASSCRLVQCARASAGKRAGTSGSTIGHAHLKWAFSEAAVLFLRDHPAAQTWLARLEKKHGTGQALTILAHQLARAVYYMLHRQTACDLDTFLQAYGRGAGAPTAELDRHGMTLHQRARR

SEQ ID NO: 370362 - protein, 343 aa, unidentified
MEYYVGLDVSLKQTSICVVNQTGLIVQEGVVDSDPEAIASFVRSRAPGTVRIGIETGPTTTWLWTELKRLGLPVICIDARHAKAVLKMQINKSDRNDAAGIARIMQTGWFKEVRVKDLDSHAVKALLASRALLVKIKRDLENQVRGLLKNLGLVIGRAKFNVFAVRAEGLIENRPELVAAVRPLLEARKAIERQVEDLDRKVHKLARRDVQVRRFMTVPGVGPITALCFKATIDDPTRFKRSRSVGAYIGLTTRRHASGEIDWSGRISKCGDAMLRMYLFEAAGVLLTRVPKWSGLKAWGAKLIKRNGLRKAKVAVARKLAVILHRMWIDGTEFNWSMKKAAA

SEQ ID NO: 370363 - protein, 385 aa, unidentified
MNQTSSCAISTNTLHCALELSKNSWLLAIQFPDREQPSLYPIEGGNTEKLMAKLTAARDCWAKVNSSLPAITVCYEVGYDAFWLARFLMGRSIECLVIDPGSLQVNRRGRRVKTDRVDVKMLLRTLIAWCRGERHVWSLVRIPSIDEEDLRRSHRERGRLVRERTAHINRIKGLLFGQGIRGINVKSQYKTLAVDNLVTGDGHRLPPRLACEIAREIQRLAMVQEQIAKIERERDTAPTPCEATERKRHLLLQLKSIGPAISALLSREVYYRQFANRRQVGSFLGLAPSPYNSGAEERCQGISRAGSGHVRAIMIETAWLWIRHQPKSALTRWFVERTAGQSTRVRKILIVAVARKLAIALWRYVEHGMVPQGAILNPPTTGNAR

SEQ ID NO: 370364 - protein, 360 aa, unidentified
MRKQSNTLNFEGQNIYVGIDVHLKSWTVSILSGHLHHKTFVQPPSPEALSSYLHAHFPNGNYLSAYEAGFSGFWAHYKLVEMGIQNIVVNPADVSTSQKERLQKTDAVDSRKIARSLRNNELTAIHVPCRETLEVRTLLRSRDALVRDLARMKQRVKAFLYYYGIDYPEEFQHSGTHWSRAFMNWLRNGIRMDTEEGGAGLSLLLDSVESQRRLLLEATRKLRALSRSDGYATDYELLRSVPGIGMITALSLLAELEDIRRFANSDRLAGYIGLVPTSHSTGEKDNKGEMTFRGQMQLRSKLIECAWFAARIDPALNMAFSKLTRRMEPNKAIVRIARKLLNRIFYVLKYKRRYKNETVE

SEQ ID NO: 370365 - protein, 402 aa, unidentified
MNCVGIDVSKGKSMIAVMRPFGEVVVSPFEVRHTASELSELARLLKSLDGETRVVMESTGNYHAPVAWLLHGAGLYVSVVNAMLVHDYGNNSLRRGKTDKKDAVKLANYGLDHWLTLPRYVPEEDARLMLKTCYRQYQQYSKVQTMLKNNLISLLDTAFPDANRLFTSPPRADGSEKWVDFVAAFWHCECVCGLSKKAFTTKYQKWCRKHGYNFSEDKALDIYVSACGRFGVMPKTKTAKLLVEQAISQLQATSAALAALKQEMQSLAASLPEYPVVMGMFGVGPTLGPQLIAEIGDVRRFHSKKALVAFAGIDAPPYQSGQIDVRSRSISKRGSASLRRTLFLVMGVLLQCAPMDEPVYQFMNKKRSEGKPYRVYMMASANKFLRIYYASVKAYLDSLEHN

SEQ ID NO: 370366 - protein, 429 aa, unidentified
MEEVDEVELVVQRVAALDLGKATLEACMRVPHPSKPGRRMQEIRGYATTTAALLEMAIWLRQWGIERVVMESTSDYWKGVYYLLEAEGFDCWLVNAREVKNVPGRAKTDRADAVWLAKVAERGMCRPSLVHPPPIRRLRDLTRYRRALVSDRSREMQRVEKLLKDAQIKISSVLSDIHGVSGRAMMEALIAGQRDPRSLARLAKGLARKKTDRLEEALRGFFTDHHATILQMMLDNIDRIGAQIAALDARIAEAIGPFSRQGSRLADIPGVNTVAAAELIAEIGVDMTRFPSAAHLVSWAKFCPQIHQSAGKSRSKARGKGNPWLAGTVGRIVFSASHTDTFLGARYRRLARRRGKPKAIVAVGNSVLTVVYHLLSDADLDFCELGPAHYESRINKHRRARDLATQLQALTGQHIVIRDGKAIITDNAA

SEQ ID NO: 370367 - protein, 481 aa, unidentified
MAARKKNMTKDAAPGSPAAASQPGDDGAEVAGERVEVVTYAAAIDVAKGSGMVCTRVPGVRPDRRRQAVWGAEATYDQVVALMDHLRCQGIQRLVLESTSDYWRIWYYLAEAAGLEVWLVNAKDTKHLPGRTKSDREDCVWLCKLNERGMLRRSFVPPEAVRDLRSLTRTRSRLAQDQVRHQNRVEKILEDALLKISAVISDLFGTSGRRFLDALVAGERSPAALAALGDRRLRATPAELAAALTGRFREVHAFEISLHLRLIDTINDEIARLDARIEQQLASIPGVAPACTACGLIGGGHAPGCASKDAAVLGLVERLDEITGVGTRNAQVIIAELGTDMSVFPTAGHAAAWARLTPRTIQSGASAKPGRTGKGDPYLRGALGQCVMAASRTDTRLGEQYRRTARRRGKQKGIVAVSRVICEIAWLLIGDRAARFTDLGAGYYSTQNPRRQTRSRIREIERLNPGMKVTLTPIDPAATAA

SEQ ID NO: 370368 - protein, 379 aa, unidentified
MDHANTDTPAETILHGALELSKNSWLLALQFPDRVQPSLYPISGGDTVGLIAKLMAARDRWAKVSGKAPSIVLCYEAGYDAFWLARFLKARGIECLVVDAASMQVNRRARRAKTDRIDVGMLLRALIAWGQGDRHVWSVVRVPSVDEEDLRRSHRERDRLVRERTAHINRIKGLLFAQGIRGINVKTKYKTLQIDKLVTGDGGPLPPRLASEITREIARLALIQEQITALERERDQAPTPCKATEKKRLQLMCLTGIGPAIAAVMTREVYYRQFGNRRQVAGFLGLATSPHDSGDVERSQGISRAGRGQVRGIMIQAAWLWLKHQPKSAITRWFVQRTAGQSTRIRRIMIVAVARKLAIALWRFLEQGLVPQGAMLANR

SEQ ID NO: 370369 - protein, 340 aa, unidentified
MINNFLGIDISKDRFDVSLSFISNKGKRETRKRSFKNNDHGFQGLLSFLQKHNVEQVKACMEATGCYSEALAEFLHNTGHFVSVVNPACIRFYAKSKLIRQKNDQTDAEIIADYFQRQEPIRWAPPSPELKKLKHLYRCSAALKDELTLVNNHLEKKERLPKEVANAWEDLAMNIKQKIERIKNSLRELLNKHKELLENFQLLLTIPGIGEESAVAILAEVPNIKAFKDARQLAAYAGAIPRNITSGTSVHAKPRLSKSGSRTLCKAMYFPAIVAKNHNPTIMTFCKRLKEKGKHNMAIVGAAMRKLLHIVFGVLRSKKAFDPDHIKNYRARSLAESLVL

SEQ ID NO: 370370 - protein, 346 aa, unidentified
MKDVQIIGVDLGKNGCSLVGLDHAGQVVLRRRVRRDGLTALLAKLPSAVVAMEACCGAHHLGRLLVARGREVRLMSPEYVRPYVKAQKNDDRDAEAIAEAATRPTMRFVALKSEAQLDVQVLHRVRDRLVGQRTSLMNQTRSILLERGLVVAQGRRALLDALQAVEEQGEASKLSGRVRLLLADLLDQWHALDSRIAALDEEFTEMARNDPAARRLATIPGVGVMNATALVAAVGDGRTFSRGRDLAAWLGLVPRQATTGGKPKLLGITKRGSKYLRKLIIQGARAALPSLARSPTPLGAWLRGLLARAHGNKVVVALAAKLIRVAWALLRHGTSWSWAPSQLATA

SEQ ID NO: 370371 - protein, 351 aa, unidentified
MHMLADTVELVIGVDTHKDTHTAAVVAAATGAVIQQATVPATPAGYRQLLRLTDRHHGRRVWAIEGTGGYGAGLTRFLHAHAEQVVELDRPKRTARRHGAKSDPLDATRAAREALGRDHLAQPRAAGHRAALSVRLAARRSAVQATTDAQRQLHALVVAAPDPLRGRLRNLTTPRLVSACGRLRQQATWDTETAATAASLRTLARRVQHLNTEVADHTRAISALVRTWRPELLTRCGVGPIVAAIVLCAWSHPGRCPSDAAFAMLGGAAPIPASSGQTVRVRLNRSGYRQLNQALHVVVLTRLRYDPATRAYAQRRRAQGKTNREIRRCLVRYVARQLYRLLEANPCFDPT

SEQ ID NO: 370372 - protein, 387 aa, unidentified
MTKNKGRVVGLDVHPDSFAGAVVAGSDPASAEVLSTSTRVELERLEQWALRHTRTEDTLVLEASGNAFSVAERLRGIGRKVEVLDSHRAGKVGKVYCANDRVDAVKIARIYLSALSPIVWQPDQKTLERREIFSAYQAVVKESTRAKQQLRSMLNEHCVRLEKGFRLCHPHAIRRLLALRAWTPARAMLLQQLHGSLVAARARRTMLRRHMAQEIVAEEALLRLTRLCGINLITLYGVVAAVGDVRRFAHSKKLVAYIGLNPSVSQSGNFEGNGALKRHGRGALRALLIQSGKKLLEVNNPLQKWGLAIAARRGRNKAAVAVARKLCVALWHVLMGHVIGALERLDTVETKLSKFATEIGPAALRAFGYNNKAAFVEKKLYVLRSYP

SEQ ID NO: 370373 - protein, 465 aa, unidentified
MKNNIQLTKKKKTKIKIHSGMPLLNADAAGIDIGHREHWCAVPADRCAHSVQKFGTFTQDLERLADWFKSCGIKTVAMESTGVYWIPVFQILERRGFQVRLVNARQVKNVSGRKTDVLDCQWIQRLHSCGLLNASFRPDDSMCVLRSYLRYRDELVCARSVQCQHMQKALQQMNVQLHQVLSDITGASGLRIIEAILAGERDGQKMATLADRRVRASTATIAKALQGDYRVEHLFVLKTAFELHAVYEERIHRCDEQIIAQMAQLPSRINPQVQPLSARKPGRKLHHDTVAGVDLRQELYRWTGVDLTAVEGIGVQTAQVVLSEIGTDMHRWRTEKHFTSWLGLCPDNRISGGKVLSCHTRRVVNPVSDVLRIAATTLEHSQTALGAFYRRMKGRLGPPSAVTATAHKLARLIYRLLKHGESYVRQGAEIYEQKYRQRLLHHLQKTAATFGLELTPRQALPAGVS

SEQ ID NO: 370374 - protein, 344 aa, unidentified
MKFIQFIGIDVSKKTLDVSIFVAGEVINKFPHIQVRNDKQGFKDLFRWAKEQGVKTKDTLFGLEFTGYYSDALEQFLTKKQISYAMLPTTVVKHYQRGTHDKNDKIDSAKIADYLFRFNGTECIKLRVLPSKALQKLKELKSERKFLVQNRVGCECRLQVAKSKSEEKHMQKLIDLYKEEIEQVEKEMLDVVAQDPDIYTTYRLLNSIPGIGFVNAINTIANTQNFTAFETARQYAKYVGVAPSEHSSGTSVQWRRRPSPHADLQAKADLSMAAMHAIELSREMRQLYERKLGNKPKDKDMQKKALNVVKFKLIREMFSVTKQARNFELRGLDKAQAEAHSTEE

SEQ ID NO: 370375 - protein, 330 aa, unidentified
MILGFDVSKYELVVALIDKRGIIKGNWVIENNKEEIKILLDEIVSKYPKIIIGSEATNEYHNVLAKICLSMDIPFCLLNPIVTKQFTRATVRKKKTDLTDAHIIAKCILQGEGQMISWDIFNPIKPVLRTVSRLTRIAVTLGQIEKRFKEHFPEIEGITEELEEMQKMVKSGAKKIHTKAIEGVDNELIELLSSIPGIGKTLSCVFISEIGDINKFKSVKSLVAYAGLDPKIRQSGKTLKRNTRLTKRGSPYLRRAAYLAASIGQRHDTQLKEYYEKKRGEGKRYKEATVANARHILARIYAVWKRETPYIPQILCFPQMSEEKMLDIRL

SEQ ID NO: 370376 - protein, 373 aa, unidentified
MEYSTVYVGMDVHKDSFSLCCYTNEKEEAEYPQKVAAHYSKVINYIESMRFHYGNDALFICGYEAGCLGYTLYHKLMDHNINCVILAPTTMLQQRGKKRVKTDKRDAALIARCLAHHDYSAVHIPTDQDEQIKDYIRMRDDHKLALKKVKQQILSFCLRHNYCYDGTKTHWTQAHLNWLRSLNLDGLYQEILNEYLLTYDRLSEKLERLENRIEELASGEAYVENVHKLSCFIGVKTVTALAALTEVGDFKRFKTAQQFSSFLGLTPGEDSSGDDQNKLGITKAGNRHLRMLLIEAAQCYGRGAIGSKSKALKQRQEGNKPEVISYADKANERLRRKYYRMVLHNSKRANVAKAAVARELACFIWGMMVEDFA

SEQ ID NO: 370377 - protein, 406 aa, unidentified
MYYVGIDVAKDKHYVCILDENKEIACKPFWIYSDCLGLNELVKRLYDLSLTCDDFILAVESTGAFSENIYEYLTDLDFKIILLNSYQTAKYRDFSTLKKVKNDSIDAYVIAELIATGKYKESHISSDTYHTLKVLNRLKKSLDEKIKTIKREISTVMAIVNPEINNILPNIFTKTAIAIIKEYPTAIDLQSTTPKKLCKVFRNIKGNNFNEDKAKALITLSKDSIYLGRAKDARSLMITTNINILELIVQEKTLLEHEIKILIEENQDDNFSNGVENLKTIPGVADKTISAILGECGDLTRFETAKSFIGYLGLYPTQYQSGNSHTVGRLAQRGIPIAKHALYMSAVASVLHNEQLRKIFRDKVSAGKSKKEALIIIAKKIATMIYSMFKYNTPYNPNRVLVSYGK

SEQ ID NO: 370378 - protein, 330 aa, unidentified
MKNWNVILGVDVSKLTLDISCAERNLHIKIDNCSKGFDEFKKWCKTNGIDLKETLVVMEYTGGYEYRFIQFCDSKFIPFCRLPGLEIKQSMGMVRGKNDKADSFRIGRYGEEKRDKLVPSKPLDNNILSLKQMLSFRKRLVREKAGLQSTVKERKHMYEPKKTDTITCIMQVKIKADEKYINQVEQEIRELIKSNEEFFQNYRIITSIKGIGEINGWMTIAYTENFTSFKDARTYGVYVGVIPFGHTSGTSIKGRKRVSHLANKELKSELNQAAKTAIAHDKEMRTYAERKLKDKDYALVLNNVKFKLILRMFSLVKRGVMYVDNYKRSA

SEQ ID NO: 370379 - protein, 407 aa, unidentified
MLFVGDDWAEDHHDVCLMDEAGAQLGGRRLPEGLAGVAALHALIAAHAGDPGEVVVGIEKDHGLWVGALVAAGYRVYAVNPMAVARYRDRHRVSGAKSDSADAKLLADLVRTDRHNHRQLVGDSDQVDAIKVLARAHQNLIWLRSRQVSTLRAGLLEYYPAAVRAFPNLGDRDRDRDALAVLGRAPTPEQGARLSLSRIAAALRAGGRTRSVEERARDIQAQLRSQHLHASAPVNAAYGAATSAIVSIIIELTIQISAVETELAQHFRKHPDADIYLSQPGIGVILGARVLGEFGDDPNRFTTAKCRKNYAGTSPVTVASGRKRAVKARHVRNDRLYDALDRWAFATLKCSPGARSFYDQHRAAGDTHHQALRALANRLVGILHGCLRHHTHYNEHTAWAHRTPIAA

SEQ ID NO: 370380 - protein, 319 aa, unidentified
MAQNGLVVVGIDVAKDKVDACIRELALRQTYPSTAQGHRKLVAWLRKHKVNRAVMEASGGYERDWGKVLRLAGIAVRIVDPKRVRSFAQSAGRLAKNDTIDAEMIAWFAETFSEAPGQVHDAAHEELQALVKARLNLVDLKIRLEAQNEHAAPGQARKARTRILKSLLEEIAKLEVAISAQVRATPHLAERAEIVESVPGFAETSSANLIAGMPELGQVSDEIAAALLGVAPYDDDSGKRRGERHIKGGRRWVRNALYMPCLGAATQNNPVFKAYYQRLLAKGKEPKVALVACMRKLIIILNTMIARRQKWDPSRYALN

SEQ ID NO: 370381 - protein, 369 aa, unidentified
MNERITYIGLDVHKKTISVALADGCGRGAALDHGQIPNTPAAMTRLARKLSETGSALRFCYEAGPCGYGIQRQLAAAGHDCAVVAPSLIPRKPGDRIKTDRRDAVHLAGLHRAGALTPVWIPDPAHEAMRDLVRARLAAVRSVRQARQQLSGFLLRHGHHYSRPAWTKMHRRWLAGLQFEQPAHLIVLEDGIATIEAATARRDRLTAQIEALLADWTLAPVVQALQALRGLALVSAATVIAELGDITRFDNPRQLMAYLGLVPSEHSSGGTRRQGGVTKAGNSTARRMLIEAAWSYRFPARISREQLLRQETLSKPIRDIAWKAQLRLCGRYRKLNRAGKPATTVTTAIARELAGFVWAIACQLPRPTN

SEQ ID NO: 370382 - protein, 418 aa, unidentified
MEQKVCGIDVHRDILVATILDQTNHKQTRTFTNNTQEIQELKDWLKTNNCQDIVMESTGSYWTTLFITLEDQGLKPVLANAHQVKAIPGRKTDQKDSEWIAHLLRSGLIRPSYVPEKPIRELRELARTRVRYVESRTQYKNRCQKLLAKNNMRLSSTLSDIFGTAGREILDGLKTGKSVEDILKTTKNKWLQKKKQEIIDAARGALSEIDMFLLKEMQQTIDALTVQIHNIEKRMAELVDNDALEIICSVPGVGKLSGATILAELGDVTRFSNGRQVASWCGFAPFVFQSAGVTRIGGITKRGSRWLRRVLVEVAHVAVRMDCRFRDMFWRIASKRCKNVAYVAVARKLLTVIWHLLVMGELFVEEGFSKASVVLAVRSSVVKSGYSRSGGEGGGLSLGDMAGILGRAMKAVSDDDAG

SEQ ID NO: 370383 - protein, 313 aa, unidentified
MPSPMDFGVDVAKDTLQIASAQSPTQLSLSNRRSSISAWLAKLPRGSRLAMETTGRHHLLLAELAHAAGMIVYVLNPCDLRHYARAVGLRGKTDRVDARLIARYLLREQAELHPYVPPTPVQREIDQLLRRRATLVNTKTRLQLSLRGMASYAAGLRRVLKRLEALIAKFDQRLRQLATHQADAQRRVESTLGIGPLLGVALTNTFERVPLHNGDAAVAFVGFDPRAKDSGQCKGRRRLSKRGPAELRRLLFNGARSASKTKLWRPLYQRYRNRGLSATEATVILARKLLRIAFSIYRHGTTFDPARLRSCLT

SEQ ID NO: 370384 - protein, 352 aa, unidentified
MIIIGVDFHPEFQQIASVDTDSGEFLEKRLAHREEAEKFYRALAGQKVRVGMEASGHARWFERLLGELQFELGIGDAAEIRTKRVRKQKTDRQDAQLILRLLLEDRFPRIWVPSWENRDLRQLLWHRHRMVQARTRIMNQLQAVALNEGLCCKKRLWRERGRQQLESFRLAPWASRRRRDLLELMDRLNPTIAELSQAIEQEVEKCPAAQRLATHPGVGPLTALAFVLIIGRAERFQCGKQVASYLGLVPLEESSGNRRRLGHITKQGSSMLRFLLVEAAQVTVRSLPDWRSKYLHLMMRRGRKTAKVAMARRLAVRLYWMMRQGWDYQQWNKFGSHAGQPGHRDGVQSNTE

SEQ ID NO: 370385 - protein, 489 aa, unidentified
MRKATTSTVAPLTLPCAHESVYVGIDVGKQRHIAGLVSAGLLARHERFEGCPVLAFDNSREGFRSLIDRIQTLCPLEQAYVMLEKTGHYHLALVDYLLEQDLSVYLVHVHERPRGLTKTDKRDALNLANHLYNQLEKGVQFADRSELARRALPPSEPAAQLKGLMGHRYELIHECTRRKNKLTALCDQLFPELPQVFRDPNSPTALRVRERYPTAAAVATADLEELWAVKGRTHPGRKQLASLQTLAAQSIGVHDPIRLQGLVFEQEQLIHELQLLERHLEEIACKEEHILQASREGRILRSIPGIGVHAAAAILAAIGNIDNFPNAAALKAYFGWAPAIRQSGVSVNSTTLSRAGERTMKAMMYLVAMKAIQDPGPWADLYERLVERGCSYDERRREYSGKKRILGRIAGQMIALLYGLLRSDVELRARTPAHEPLPEPLLYDATLHHAHQTGAYHSMKGPARPARIVRLARRAEPHQELCREPTTQQ

SEQ ID NO: 370386 - protein, 316 aa, unidentified
MNTQDHNEINIGIDTGQAMLDIYVRPLGEYQSFENNAEGIRAAIRFIRKFKPTRVLIEATGRLEMAFFCAAHKAGLPVCVCNLIQVRKFAQSCGRLAKTDKLDAQDIAYYGEIMKPELSRFKPAKLRLLSDLLTVRGQCLDMSTMQKNRLQRMPKTVHKPIRNVLKSITKEVARIDQQLDQLVAEIPHYQARVDQLTSAKGVGKVLAYTLISDLPELGNLNRKEIAALVGVAPMNRDSGKHKGKRKIQAGRRKVRTVLFVSMLSAIQCHPKLKPMYQRLVAAGKPKKVAIVACMRKQLVILNTMVKNGTYWDENMA

SEQ ID NO: 370387 - protein, 310 aa, unidentified
MRYAGIDVAKKTLDVCVLPDSAERQCANERRGWTSCSRWLGDPQDTLVVLEATGGYEAQAADALRAAGFAVAVVNPRRTRDFARACGRLAKTDRLDAQGIARYAQMLQPSPREAPDASHRRLRALVARRDQLLAMRTAETNRLEHAADRAIRTSLRQIVRALERQMARIEAQIRQTIDEEPSLRQAKETLTSVPGVGETTASMLVSDVPELGRLNRRQIAALVGVAPWNRDSGTFRGKRMTGGGRVRVRTRLYMPTLVAIRHNPVIHAFYERLVQNGKAKMTAVVACMRKLLTILNTLVAKNEKWKPRIA

SEQ ID NO: 370388 - protein, 334 aa, unidentified
MLYAAIDIHKQAFQAAVLDPESGEVVEERFAADRDSLARWAEQWRGRVVAVAIEATTGWRWVWRELVDRGFEVRLAEPVQTRALLGRRRSAKTDRLDARWLARLLAKEMLPESWIPPAEIQELRDRTRLRKALAEDRRRWGQRLHAYLLHEGWPCSRSNLLRPPGLRWAAALQLSEHARLQVDSLLAVMSALEAQLDTVDAELRRFARADQRCQALQSIYGIGPILACHLLAEIGEARRFRRAEQITRLAGLDPVVDESGETRRRGHLAKAGSPHLRWALVEAAVHAHRSTAPDLALYRATRQRRDTTVARLTVARKIGKRAFHTLRELELAAA

SEQ ID NO: 370389 - protein, 370 aa, unidentified
MLDTTTFIGLDVHARSIKAVSLDVMTGEVRAATFGYDAGAVAEWVRSVDPRARCVYESGVTGFDLQKRLSGLGVDCVVGAVSKMIKPSADRRRKNDRNDAEFLARMLSVGNVVEVWVPDDECEAARDLTRALEDARDDLSRSKQRLSKFLLRHGLVFDERTPTGRRKGNWTRAHWSWIESIRFAEGADNDVLAYYVDAVRRAAEEKARLEGLVEAEARKPRWRRRVDSLRCLKGVDTATAADLVFEAGEFSRFRNARSFAAWVGLTPSEHSSGESDRRGAITKAGNKHLRKTLVEAAWHYLTCSGRPKGLAKGQAPDRGARRHAAKGVRRLVERREALLARGVHGNKANVATARELACWVWAVGLMAEEA

SEQ ID NO: 370390 - protein, 393 aa, unidentified
MELVKQSLGIDIAKSTFTACLCKRYSDHSEELSEVRTFDNNKTGFNQLIKWVNKISENGKAVYYVMEATGIYFERLAYHLHKIRKCISVVLPNKVHHYAKSLNVKTKTDEVDAKIISMMGCERNLFEWTPASPLFRRLRDLCRLHKALMHDKTQTINRLKQLKCGQDPLKEALKIYQANIKRLSKELKTLEKKMEDQLKSDPQVWSKVENILKIKGLGIKTVAIVLGETQGFKLIQNQRQLISYCGYDVIQRESGTSIKGKTRISKKGNSNIRSAMHFPSMVATRYNPKMKEIYQRIIQSKSSKKIGLVAIQRRLLVLMYSLWKTEIAYDENYERKKTSGFQTEDDSSSSSTGTVDLRQQGIKVDGAYKQPSTQNEPQYDQSSEALLRQLQIL

SEQ ID NO: 370391 - protein, 348 aa, unidentified
MKITTVGIDLAKNVFQVHGVNEHGKTALKKQIKRDQMAAFFVNLPPCLIGMEACGGAHYWARKLQGFGHTVKLMAPQFVKPYVKTNKNDAADAEAICEAVARPNMRFVPLKNIEQQAVLSLHRVRQGFVGARTALANQIRGLLAEFGLVVPQGLSYVCGKVPELIEDASNELPGTFRLLIARLLDHLKELDRQVGELEAQIKASHRNSEASRKLEKIPGIGPITASALVATIGDAKSFESGRQLAAWMGLVPAQSSSGGKTNLLGISKRGDTYLRTLLIHGARSAVRAFQGKQDQSANPWLQKLLGRRNLNIAAVALANKNARIVWALLARGREYESGYAPERAGTAA

SEQ ID NO: 370392 - protein, 349 aa, unidentified
MTIVADTHDFVVGVDTHARSHTFAVIDTHSGAVRRTESFPNTPAGMRRGLTWINHHGGDDALVVVEGIGSYGAGIARLVADGGHRVVETLPIPAVLRRGKGKTDQIDAALIGRSIIGVDDTRLRQPRADLGLREASRILVGARTQMNRERTKTINTLTALVRTIDLDIDARAALTKTQIKTIAAWRTRHEPLAQTIARAEAVRLATRIIELETQLAANRTQLDTLIVDSPVVSLLNQTGIATITAAAIYVAWSHPKRIHSEAAWAALAGVAPIPASSGNTTRHRLNHGGDRHLNQALTTIVLTRLRHDPQTRAYHTRRLAQGLSTKEIMRILKRYIARQIFRQLTQATT

SEQ ID NO: 370393 - protein, 403 aa, unidentified
MIDTGDIDVFLGLDVGKGEHHATAVTPVGKKAFDKRLPNTEPKLRELFVKLQAKHGTVLVVVDQPASIGALPLAVARDMGCPVAYLPGLTMRRIADLYPGEAKTDARDAFIIADAARAMPHTLRAIDGEDETIAELEMIVGFDDDLAGEATRVANRLHGLLTQIHPSLERVLGPRLQHPAVLTLLERFGSPAQIRKAGRRRLVTLLRPKAPRMAERLVEEIFTALDEQTVTVPGTEAAALIVPSLAGSLAAVLDQRRLLAGRIEQLLDAHPLSKVLTSMPGVGVRTGARILIEVGDGSTFPTAGHPAAYAGLAPTTRSSGSSIRGEQPSRRGNKQLKRAFFLSAFAALGDPASRAYYDKKIAQGKHHTQALLCLARRRADVLFAMLRDGTFYEPQPVRATGQT

SEQ ID NO: 370394 - protein, 386 aa, unidentified
MQRNDLSRSLVAFDQNSTLVSVIELSLKTWLVAGLVPGLARQPLKKRGADPDALLALLHRWRAEAIKAGRKIDRIVVAFEAGRDGLWLARWLRARQIEAYVIHPTSIPVSREHRRAKSDRLDTELLMRAVLGWLRGEAKHCSMVAISTLAEEDARRPNREHQTLVKESSRIVNRMKATMARLGVKGFNVKLGKAVEKLAGLRTPEGVPLPANTRDELRRDMERLRLIRQQTQEIEKARLARLKKAPQSGAHPMLLMLAKVLGIGVETADMLVHEVLSRELRDDKAVGRYGGMTGAPDESGSKRREKGLSRAGNARVRRGMIQLAWRWLMFQKESPLTQWYRARTAGAGQAVRKTMIVALARKLLIALWRYVRTGAVPAGARLRAAI

SEQ ID NO: 370395 - protein, 424 aa, unidentified
MEEKESEKQIRAWIGIDWADEKHDVSLYDVGTGKHEALIIRQSPEALQEWLGQLRSRYEDGYVAVVLEQGRGGLLNALMGCEFLVLYIINPKSLSSFRDAFYGSGATSDPVDAALMRDMVRQNPSRFRAWRPDDVMTRSLRLLTEGRRHLVNQSTALTNQLTALLKGYYPQALSWVGTLDTAWACDFLEQWPTLQSLQASSRRQILRFYEKHPRASLDLTEQLKQIQDARALTQDAAVVESSALMVHALVSQLRPLLASIAEFDRKIAMIFRKHPDRPIFESFPGAGAALAPRLIAAFGTDRDRFQAATEMQELAGIAPVTEKSGKKCFVHWRYACPKFTRQTFQEFADHSRRWCQWAKAHYELLKQRGKSHNAAVRALAYKWIRILFRCWKDRKPYQDEIYTKSLLKHGSPLSSLLAKPVENQ

SEQ ID NO: 370396 - protein, 443 aa, unidentified
MINPDAAGIDIGHREHWCAVPTGRSDNPVRRFGTFTEDLEKLAAWLQECGIKTVAMESTGVYWIPAFQILERRGFEVRLVNARAVKNVSGRKTDVLDCQWLQRLHSYGLLNASFRPTDEMCVLRSYLRYRDELVCARSVQCQHMQKALQQMNVQLHQVLSDITGVSGLRMIEAILAGERDAEKLANLADRRVRASKATIQKALKGDYRSEHMFVLKVAFELHDTYEKKIHACDEQVIAEMAKLPARIDPKQKPLPPRKPGRARVCDMVAGKDIREELYRWTGVDLTAIEGIGVLSAQVILSEIGTDMDRWRTEKHFTSWLGLCPDNRISGGKILSSHTRHVINPVADALRMAATTLERNKSALGAFYRRMKGRLGPASAITATAHKLARLVYRLLKHGDAYVRQGMEVYEQKHRERLIHNLKKTAASLGFQLTGKEQVTQGVS

SEQ ID NO: 370397 - protein, 370 aa, unidentified
MITLIRKEPSMTTYYIGADVHSNSTELVIQKSNKIVASCSVPTTIPAISNILDSLQGKKHLTFEEGPMAGWLYRNLSEKVDEIVVCDPRRNKLVSADGDSDDKIDAGKLALLLRGGYLRAVYHSDNDQRAELKHWVNLYHDRVRDAVRNINKIRARCRMFGLTIPRSALRDPAHRLKWLFKIDQPVLAKQLNMLWIGYDATAKQAGMAKRQLSALGKRHDIIKLWDRLPGMGIIRATTLFAYLDTPWRFKKKNKLWKYCGVGLQRTASGTDKKGRPKPARLQLPWAVNRTLKNAVLGAAISAINQKDNVFKDYYERMVQDGVIRSNARHAVARKMLTVIWGMWKTNSQFDERLLCSLSDHNRPTASISSR

SEQ ID NO: 370398 - protein, 393 aa, unidentified
MRISVGIDVAKEVHWATAVTQDGRVLLDRKVENTAADIGRLAVEVAALKGERLIGIDLYGGIATLLSAMLLAAGERLVHVPGLAVNRSRQGSVGGQAKSDPKDARVIADQLRLRAGDFRPIALGDDTLAELRLLVGRRGELVTDQTRRISRMRYLLNTIHPDLERALDLTNAGPLSLLARYVTAAEIRSVKPKAIARHLRAKAVRNPEALAEAAYAAALAHPNLKLPAEAVTAALIREMAEEAIACRSRLAAIDRRLAELVQAHPDGALIRSLPGMGAVLAAEFLAEAGSISRFRSAAALASAAGLAPVLRQSGKSRRLQRPGYANNKLKRVFYQSAFCSLADPLSRAFYERKRREGKRHHQAVIALARRRIDVLWALIATRMPFSANHRKVA

SEQ ID NO: 370399 - protein, 337 aa, unidentified
MIVVGVDVHKQSLTAVAVDEVGRAVAEVTTADADRLLAWAASVAGERLWALEDCRQLTRALERELIAVGERLVRVPPKLMAPQRRASRVRGKSDPIDALAVARAALRERRLDHPRPGEERLRELKLLVDHRDDLVDERRRAQQRLRWHLHELDPQLAVPAGALDRTIWLDRLARRLARQEQTVLVRIARELLGRCRSLTRTILAHERELEQRTSVTAPALLALPGCGALSAAKLLGEIGPIERFQTDAQLARHAGVAPLEASSGTHQRHRLDRGGNRQLNCALHRIAITQGRIHPPARAYLERKQSEGKSRREALRCLKRQLARTIFNTLKASPALT

SEQ ID NO: 370400 - protein, 374 aa, unidentified
MNESIAYVGLDVHKDSIAVALALSQGEAVEVGQIRNEPSAVRRLVERLVQRHGRLKLAYEAGPCGYELHRQLVSLGHSCIVVAPSLIPRRPGDRIKTDRRDAAALARLLRSGDLTAVWVPDGHHEAIRELVRCREDFKHVERLGCQRLCALLLRHGRRFEGDNWTQKHRRWLQSQQFECRQTQMSFDHYLQSIIEAEERIASLERQMEDALSDWSLAPLVAGLMAMRGIKLVSAMTCAAELGDLGRFGRAVELMAFVGLIPSEYSSGQNRRQGGITKCGNKHVRRVLIESAWSYRHKPRISVSLRARGKDASEAVRAIAWKAQKRLHSRLYRMINRGKSKQAAITAVAREQLGFIWAIGCQVRKEQGTPVKTGE

SEQ ID NO: 370401 - protein, 403 aa, unidentified
MSQCFTGLDWASQTHAACVIDEHGSVSTQFEIKHDAAGLAELCRRLRSAAATAVAIERPSGLIVDALLEAGFTVVPIHPNVVKATRPRYGSHGGKSDASDAYLLADLLRTDGHRFTPLAPQSDDIRALRALVRGRDDLVDTRVQLANQLRSLLESFWPGAAEVFADVDSPIGLAFILRYPTPESAARLGPKRMAAFCAQHAYSGRRSADELLARLHQAPAVTLGELEMESKGELALRLARTLDRLVDQIRLLTSRIEHHVGSIEDGRILMSFPRAGRVCAAQILSELGSVRERFDSDEHLAAEAGVAPVTYASGKSKAVTFRWACNHRLRAALTCMADNSRHANAWAASVYAKARARGCDHPHAIRILSRAWLRVIWRAWTDRKPYDPALHGGAQLLLKTAEG

SEQ ID NO: 370402 - protein, 341 aa, unidentified
MKNLFIGVDFSKEKVDVAILFADGLVETAARVFNEFKTTVSGYRQLVKWVEQNSCGIDSSLWLFCGENTGDYSKGLCNFLYGKGYDMWLENAKSIKDASGLRRLKSDRADASMIAEYAMRNYDKAVMYEPLSESLTQLRELFLYRQMIVRHRCSFQVRRGEKRLTMEKSPVKTMISQSGRHIVSELNKEIEKIDKRIADLIKSDEELTEVFTIVTSVPGIGTQNAVCLIVYTDNFRRFNYDSRKIACYYGLAPFGKDSGTSVHSDPHVHYMANRQIKAMLTQAALAAVNFNPIMARYYMRLVERGKKKQVALNNVKNKLVHLVTAMVRNRQTFTPEYKISA

SEQ ID NO: 370403 - protein, 359 aa, unidentified
MKTQRNEISFKGQSIYVGIDVHLKSWSVAVLSQTSVMKKFRMDPNPEGLKTYLSNNFPEADYYSVYEAGFCGFWIHDRLTSLGINNIVVNPSDVPTTGGERLRKTDAVDSVKLARSLRANELKGIYTPDAASLEIRSLIRLKNSITKDMTRQKNRIKSTLRYLGVEIPKEYTEPFSNWSKRFILWLREVQMNTSSGRDALNLQIEQFEALRKQKLMMTRKLRALGRSDRFKDDLDLIMSVPGIGMTTGMALLAEICDVRRFTDGAHLAAYIGMTPMCHSSGENDGTGDITLRKNAIMRCNLVEAAWVAIRQDAAMNLFYTECCRRMVASKAIVKVARKLVNRIYYVLKRRKKYVNNVVS

SEQ ID NO: 370404 - protein, 403 aa, unidentified
MAVMVGLDWASTEHAVCVIDAQGKVRARMTVAHSAQGLAALCAGLQRFGPPASIRVAVERPSGLLIDTLLEAGYTVVPIHPNVVKASRPRYHAAGGKSDPEDAFILADLLRTDGHRFRPLRPLSDETRALRALVRTRDDLVAERVALANQLRALLESFWPGAVGIFADIDSPIALAFLARYPTPQSAERLGEKRLAAFLAREAYCGRRPAGELLARLRAAPVGLAGEGEAEAKGELVRALVTILSALVEQLQRLTAAVEHAVAAHTDGPLVMSFPRAGKVNAAQILAELGDDRARFGSEEQLAAEAGAAPVTYTSGKHRGVGFRWACNKRLRQAVVCFADNSRHSSPWAADVYRRAVARGCDHPHAVRILARAWLRVLWRCWQSATPYDPHRHRAARPFVEAA

SEQ ID NO: 370405 - protein, 346 aa, unidentified
MKFYTGQHKFYCGVDLHARTMFLCVLDQRGYPLLERNIKTDPEVFLKNIAPYREDVVVAVECMFAWYWLSDLCSREKIPFILGHALYMKAIHGGKAKNDRIDANKIAVLLRGGMFPVAYVYPPKMRSTRDLLRRRMFLNRKRAALITHIKCTFAQYNLPEPEQKISRVAHREGIAEQIPDPGASRNVQLDLDVLSFYDSTLTKLEQELTVIAKDHDPDAYFRLRTVPGIGKILSLVILYEIHDINRFPSVQDFASYCRLVKPAKESGGKRLGSGGAKIGNVHLKWAFSEAAVLFLRKNEAAKLYRARLTKRHGKAKSLTILAHKIARAVFFILKRRTVFEAETFFA

SEQ ID NO: 370406 - protein, 346 aa, unidentified
MQHYVGLDVSLKQTAVCVVDQTGKIKREAMVASDPDAIAQFMAAQAPDAVRIGLESGATSTWLWTELNKRGLPVICIDARHAKAALKMQINKSDRNDAAGIARIMQCGWYKEVRVKDLDSHAIRALLSSRALLVELKRDLENQIRGLLKNLGLVIGRAKLNTFTTRAKELIDGQPALAAAVEPLLKAREALGRQIADLDRKVLRLARSEPQVRRFMTVPGVGPITALCYLATIDDPARFRKSRSVGAYVGLTTRRYASGETDRTGRISKCGDEMLRSYLYEAANVQLTRVARWSALKAWGMRIAKRRSLSKARVAVARKLAVILHRMWIDGTEFCWSSQEPATQAA

SEQ ID NO: 370407 - protein, 410 aa, unidentified
MDVIYACCCGLDIHKKTVAACLMTRAKGQPPPKEVRTFRTMTAELLLLADWLQAAGCTHVAMESTGVYWRPVYNLLEGLFTLVVVNAQHIKAVPGRETDVKDAAWIAELLRHGLLRGSFIPAKPQRQLRELTRHRTTLVQDRARVINRVQAVLEDANIKLASVVTDIRGVSARAMLEALMAGQRDVTALADLARGRLRTKRAQLEEALQGYFTPPHSFLLTEYFSQIDDFDDAIARVSAVITQHLEAEQEAIALLDTIPGVSRRTAEILLAEIGTEMTRFPNAKHLASWAGMGPGNYESGGKRLSGKTRKGSRWLRQVLVEVAHVAAKTKQTYLAAQYQRIAARRGKKRALIALGHTILVIVYTFLTRKQPYQDLGAAYFDSLAQQRVKRRLVQRLERLGYQVSRQPSSL

SEQ ID NO: 370408 - protein, 377 aa, unidentified
MTDGSRRVIAGVDAHTDEHHAAVLDEGGRLLGTAAFPTTREGYEQLIAWVAGHGVIDRIGVESTGSFAAGLVRALAQKAIVTVEVNQPHAHTRHRRGKSDPIDAELAARAVLSAVASAIPKHTAGIVEAIRQLSVTRDSAVKARSAALNQLENLIITAPDELRAALTQRKTLPGKATLCLKLRPDLTRLREPAQAAKLALRSLARRIRDLDLEINELDRQLDQLTRTAAPRTTRLLGVGTVHTSQLLVTAGQNIDRLRGEAAFARICAAAPIPASSGRTIRHRLDRGGDRQANKTLHMIAVCRLRHCPRTRAYAARRTAEGLSKRDIIRCLKRYIARELYHSLRADLTSLLPPPTPPRHPTTIACGAGPPGISRRRH

SEQ ID NO: 370409 - protein, 341 aa, unidentified
MNITTVGLDLAKNVSHFVGCNQVGKIIKKRMLRRKDILSYFQQLAPCIVGIESCASAHYWAREIEKLGHTVKQISPQYVKAYLRGNKNDYNDALAIAEAVVRPEMRFVRTRTQTQQDIQALHVLRKKCERDRTANSNEIRGLLAEYGIIIPQGIHHVYHELPRLFDRNIDNGLSPLFKELLEFHYKKLQHLREYLDFYTDKINQLSQQEECKRLQTIPGIGPIISSAFFQHVGNGSEFKNGRSVSASLGLVPRQHSSGGKDNLLGISKRGDSYLRTLLIHGARSVIRTSKNKQTPLANWIRRLVMTRGNNKAAVALANKMARIGWALLKHGGRYDENYLTA

SEQ ID NO: 370410 - protein, 341 aa, unidentified
MAQVTTIGLDIAKYVFQVHGADVTGQVVFRKRITRGKLIGFLAAQSPCIVAMEACAGAHYWAREISKLGHSARLMAPAYVKPFIKRQKNDAADAEAVCEAVQRPSMRFVPVKTEEQQANTIVFRARDLLVRQRTQCVNALRGHLLEYGYAFSQGISQIASLVALIEDPGSSLPEGVCSILKLLVDTFNGLETQIAVLDAEINRRSKTDPAARRLMTIPGVGPIVSTAITALAPAAHSFAAGRDFAAWLGLTPLQRSTGGKQKLGAVTKRGERTIRRLLIIGASAVVRQASRRGAPKGTWLAQMLARKPKMLVTVALANKMARIVWALLAKGGSYRAQVAAA

SEQ ID NO: 370411 - protein, 288 aa, unidentified
MSITMIGLDTAKSAFQVHAIDETGTAVIRCKLRRNELIPFFEKRDACTIVLEACGAGRHWARTLTGLGHDVKLIAPEAVRPFVKKGKKNDAADAAALCAAASQPGVKFVSAKSLAQQGTLALLSVRSLLVKQQTMLANAMRGLATEFGLTAPQGIGKLEDLMALVDTDEAFPEQARQAFRGLFDQCRVLAERMKTLEAEIVAHARHDENARRLATIPGVGPITSSLIASSVADIGTFKSGRHFAAWLGLVPRQHSTGGKPNYQGRQSGDTQVACLGSNVDDPPGSTME

SEQ ID NO: 370412 - protein, 336 aa, unidentified
MDPNQHQRRQQHVTPAGVFVGIDVAKDTLDLAHSGSPPEVTTSFPNDAAGHAAVVALLAPLAPAAVVIESTGGLERPLMAALLEAGLPVALVHPGRVRSFARGVGVLAKTDRIDARVLARFGQQAAPRLAERRSRNATELQALVVCRRQLSAARVQQAGRLAATASKAARRAVERVIATLDKQVESLDRQIRALIDADDDFRHLDGLLQSVPGVGPTLAATLAAELPELGTADGGQVSALVGVAPFNRDSGKHTGRRGIRGGRTAVRCVLYMATIAAIRFNPLVRAFAQRLRSAGKASKVVIVACMRKLLTLLNAMARDGLTRDQLDVVKKLATNP

SEQ ID NO: 370413 - protein, 400 aa, unidentified
MTTRTTAWAGIDIGKTHHWICAVDADGRALVSVKVANVEAAIVAALATVTDLADQVVWAVDIVGAPSALILALLARAESPVFYASGRVVNTMSAAYTGEGKTDAKDAYVIAETLRLRRDLPMVDTVTDLTRELALLTAHRSDLIADRVRMINRLRDVMTSVFPTLEQQFDYSSHKGALILLTEYASPKRLRRLGETRLIQWLRRRQVRDAARVAARALAAARGQDIELPGQHVAEMIIAELAASLLQLDQRVHGLDQQIAATFRRHHQAMTIESMPGFGPILGAQLLVAAGDLRAYPSAGHLAAAAGLVPVPNDSGRRSGNLHKPRRYSRPLRHVFYLSAQTSMMRAGPNRAYYLKKRAGGHTHAQAVITLARRRIDVLWALLRDDRTFSIDPPSHAAAA

SEQ ID NO: 370414 - protein, 343 aa, unidentified
MSIQHAVVVGVDPHADTLAAAAIDAAGVVVWEATVPNTTQGVWGLIEAAGNGGRRWGIEGTGTFGRLLCDELLSRGARVLEVPTRLTARLRRRSGYAKTDPIDAAAIARAVLGDTLGPVRHHPVVEALRVLVRQRETLVTAQVQATNRIRSRLRELDPDRARELPRLRSRATLASLTEVVTHDANPHHQALALTIRLEAAEALERIKRIKQLETEIRHTLPDPGHRLMTITGIGLIGAATIIANTGDITRFPTDGHYATYAGTAPLDASSGRQQRHRLNRWGNRTLNRVIHTAIVTQLQHRAEAHHHITRRLAEGSTKPEAIRTAKRHLTRRIYRLLKHHPLT

SEQ ID NO: 370415 - protein, 355 aa, unidentified
MSQEKYIGMDVHQATISVAVMDGDGKLIMECLLETKAATILEFIQGLRGTLSLTFEEGTSASWLHDLLKPHVSRLVVCDPRKAALLKQGNKSDRIDARKLAELLRTNQLTPVYHGEHGIRTLKELGRSYLTVSKDVTRTMNRIKSLNRSWAIPCPGTTVYAPSHRLEWLAKIVQPGVRVRAQHLYEQLDNLQPIRQQARRELLLESHKHPAVKLLRQIPSIGPIRAALLVALLQTPHRFRSKRQLWAYSGFAVETHDSGEYRYVRGKVQRNRERITVRGLNDNHNPDLKNLFKGAAISASTRPGPLHDFYVARVAKGMRPTMARLTLARKVAAITLTMWKKGVSFDPQQLSRQSV

SEQ ID NO: 370416 - protein, 315 aa, unidentified
MDVTHSGSRFVGIDVGKAHIDVHVRPSGEAFRLTRDPAGLAELVARLNPLAPALIVLEATGGFERVVTAALSGAGLPVAVVNPRQIRDFARATGRLAKTDRVDPKVIAHFADAVRPDQRPQPDAAARELADLITRRRQVVAMISSETMRSHQARLPAVRRRLAAHLDWMNQELRQLDADLDTAVRANPAWQERATLLVSVPGVGDATTRTLLAELPELGTLGRRQIAALAGLAPVAHDSGQHRGTRHIRGGRGTVRAALYMAAWIGSRWNPTLKDIYQRLRAAGKPRKVALVACMRRLLTILNAMIRDKTPWRAA

SEQ ID NO: 370417 - protein, 355 aa, unidentified
MRYLGIDVHSKACVWCLLNAQGEIVEQGSTETTIPALQALVTRLGKDDELLAGQEVGAMAYLVHDALKDVGVRLLSFNAAHLRMIAASRKKTDRRDAYWIARALQTGMTPHEVYIPVGEVRELRGLLHRREVIQRDYVRWRHRAKSQLRASGLLVSPGLRNLRGAIAEQIASCTEGVDGLLLEGIGLCERNMELLSEELAHVDALLRRRTEHIEAIQRLMTIPGVGDIVAATLYACIGDVTRFPNAKSLAAYVGLVPSVRQSADTNVLGRITKQGAPQLRRLLVQAAHAVSSRCQTDAARPIQSTYERIRGTRGRRKVALVALARHLLRIAYYVLRDGTCYDAERLGAERTAAAA

SEQ ID NO: 370418 - protein, 345 aa, unidentified
MKKFKLVCGIDISKSSLSMASIAGDEMLAQKSYPNTAAGLEQLYQDLLKLEREAGQILICLENTGVYMEKLLLAFKESGFFLWVVNPLMIKYARVSFDRLKTDQVDARKIAQFGYMMQSKAQQYRPLRAKEAQMKDLFLLRSQLVKLRTQVKNFSTTNLDKAIPCLMSNSIWKQVREQLTAMIKEVEGQLQQLSLSDKAMKRTYQILLSIPGIGPVCAWQLIYTTQHFERFLSHKQFAAYSGTAPFEVQSGSSIKRKARISKKAAVNIKTNLSLAALRQIRKNMVFHQYYKYMKDHEHKHHLWIINSIRNMLIKLAFDLVKKDKLFDLEIFLKNKKSWAKFLTLS

SEQ ID NO: 370419 - protein, 409 aa, unidentified
MLFVGDDWAEDHHDVELQDPAGRRLARARLPEGVVGIARLHELVAAQLGADDGPEQVVVGIETDREPWVQALLAAGYQVFPVNPRQVARYRERHGTSGAKSDAGDAHTLADMVRTDRHQLRAVAGDSDLAEAIKLLARAHQRLIWDRHRHLLRLRAALVEFFPAALAAFPNLAAADALELLQAAPDPTSAARLSRARIAAALTRASRRGVPAKAAQIQQALRAEQLPQPERVVAAYAATVRAAVAVIGTLNAQIEALAGQVEAHFGEHRDAAIYRSQPGLGGVLGARVLGEFGDDPGRYRDARARKNYAGSSPVTKQSGKKKVVVARFVRNDRLADPLHQQAFCALTASPGARAYYDQLRARGTGHHAALRQLSNRLVGILHGCLKTRTLYSEATAWSHHTSDAATAAA

SEQ ID NO: 370420 - protein, 391 aa, unidentified
MPLFFVGIDISKYKHDCCILSAADQTVVSRFVFPNNADGFHELLSRLNSLSTPEDIRIGFESTAHYALNLELFLEKAQHSFMEVNPVLISKYKESTTLRRTKTDRVDCESIARWLMTVEYKPHSRGFYHSYSLKSLTRLRDRLVRQRSFYLVKLTNVLDLTFPEFKPFFGERFSKTALYLLETYGSAERMARMNSSSYEKLCSLSRGKFSPQQFLKLKQLAVNTVGVSNEILEAELTCLLSLYKSLEKQISSMEAQILTLINDIHPCYMSIPGIGPISAAVIYAEYGDISNFSSPAQMLAYAGLEPGVNDSGTESHGGRMVKRGSSQLRYALMNCALPLIRFDMTFAAYYAKKRAEGKPHRVALSHVVKKLVRVIFALERQRTAFNVQALR

SEQ ID NO: 370421 - protein, 409 aa, unidentified
MAMFCGIDWAEDHHDIAVVDDTGALVARARIENSAAGLSALLAMLAECGDTPAGLVPVAIERPNGLLVGCLRGTRPVYPINPLAVSRYRDRHGVAGKKSDAGDALVLAHILRTDLAAHRPLPADSELAQAIAVLARAQQDAVWDRQQLGNRLRSLLLDFFPAALHAFAGLAHGGLSRPDARAVLTLAPTPSEAAALTRRHLRTALVRAGRRRNIDRDVERLHGIFHAAQMRPPAVVEAAFGRQLKALIGQLGAACAAETELADAVEEAFNLHRDAPILTSFPGIGAVVGARILAEIGDDRTRFADARAVKAYAGSAPVTRASGRSRSVSSRRIKNQRLAAAGYVWAFASLRPSAGARAHYDRRRSNGDTHTEALRNLTNRMLGCLYHCLQTRTPYTESTAFSVQAAAAA

SEQ ID NO: 370422 - protein, 427 aa, unidentified
MRTGPVISCDISNGSMYYQMFIDKEKPAGKPKKVKFNKSDFSKFKKDYDKLAKKTGCKDIGVIYEATGVYHWPLRRYLVDNEITNYEVNPKVSHSYAKTDLNGNKTDKQDCGYISEVYYNSKKLQKYYVSEQIYNDLKQMNRDYESEVQIKVKRENAYKTKVASAWPGLAGVKGLDICSEIIIVAIRMFPTPELMTKHKESVVDNAVIKAMNGAKHAHSEDMICKKVHRIYEFASSCVSSVRPNEQMAKSITKAAERLQDEIELCEDDLEELVEAAKDLPEFTIITSIRGIGANLGARIIAELGDYRRFRNRKAVIAYTGLNPNVNQSGSDDGSGRAIKKNGNKHLRTILFLAIGQILIHNGSCEIANYCKEKNKIYRIRYKILHGNEKMQRLDHIRVSKAAKTAASNKLIRVIYSILLNSSPYDNR

SEQ ID NO: 370423 - protein, 338 aa, unidentified
MKFKRIAIDTSKHVFTLHGVDEQDRPVLRRELKRSQMESFFGKQPPTEVVLEACGCSHYWGRLLSKLGHRVRLIPPQYVKPFVKRAKNDRNDAEAISEAASRPTMPSVAVKTVDQQADVIILKHREMLVSQRTQAINALRGHAAEFGVVAAKGTVNVTALVAVLAADPTIPDTAKAMFEQMAQHIDALDQRVAALEGELAALHKANPVSQLLAEIPGVGPVSAITMALTVEPGHFASGRHFAAWLGLTPKEHSTGGKQRMGKISKAGNERLRQLLVVGATSVVRFAKPGSKSALAWLLQLVERKPRKLAAVALANKNARIIWAMMSRGEAYRRQPVAA

SEQ ID NO: 370424 - protein, 416 aa, unidentified
MDSGCDSQLGGIQINSVGIDISKGRSTIAVMRPFGEVVILTFKVRHTDSELSELARQLKSLNGETRVVMEATGNYHAPVAKLLHDAGLYVSVVNAKLVHVYGNNDLRRVKTDKKDSVKLANYDLDRWLTLPRDVPEEDTRLLLKNCYRQYRQYSKVQTVLKNNLISLLDTVFSNVNRLFSSLIRGDGSEKWVDFVAEFWHCRCVSEKSEKAFTNKYQLWCRKHGYNFSEAKAHLIHAEASGHIGVMPKSETTKLLVEQAVAQLRATSAALTALKHEMLALAAQLPEYPVVMGMFGVGPTLDPQLIAKIGDVRRFYSKKALVAHASLDAPPNDSGDVTGKHKSMSKIGASSLRRTLFLVMSVYLRSAPLDEPVYQFMDRKRTEGKLYHVYMMASANKFLRIYYATVKAYLESLEHTA

SEQ ID NO: 370425 - protein, 360 aa, unidentified
MLYLGIDQHRKQLTVSLRDEAGDVVLRRQVSTRWERVRAFFDELRKRAEAEGGFVAIVEVCGFNDWLLKMLREYGCREIVLVQVETRSKKKTDRRDAYQLSGLLWVNRQRLLAGQKVEGVRRVVPPTDRDAEDRQLTALRQRLGQLRARTINKVKHLLRKHNLEQEQPAKGVDTKRTRKWLAALSLGPIDRLEMDLFLQQWDVFDKQIEKLDAEICPRQAQSPAAAVIATVPGVAAYGSLALASRIGAIERFPRPASLANYWGITPGCRNSGEATDRLGSITKQGSAMARFILGQVVLHVLRRDPSMKAWYGRIKKRRGAKIARVAAMRRLATIIWHMLKNNEPYLVGGPPQRKLECQTA

SEQ ID NO: 370426 - protein, 356 aa, unidentified
MNKIIRVGIDLAKHVIQVHAVDAAGKVVTNRALKREKFLLWCADLPVGCLIAMEACSGAHHWCRKLTERGFDARMIPASSVVPYRIQGRTGKNDANDAAAVCEAASRPHINFVPPKTLAQQGMLCVHRLREGFKEERTSCINRIRGLLAEFGVVLPQSPDVLRHHLSDVIEDASNDIASISRLVLQRAQDHWRELDAHIKWCDQRIADHQKTDEQVQRAAELMGVGSITASALVATVGDFRQFKNGAQFAAWLGLTPKQNSSGGKNSLGSITKRGSIYLRTLLIQGAKAVALTRQYDNPIFLWVQKLRDRAGWQKAVVALANKNARILWAVMTREKRYDAHHISSYPAPVPVMTPA

SEQ ID NO: 370427 - protein, 352 aa, unidentified
MSITEVHTQVVVAGVDTHQLTHHAVVLDITGRRLGDRGFEASTAGYAALLDWVASFGLIEAVGVESSGSYGAGLTLALLTAGVEVVEVARPEKATRARQGKSDPLDAESAARQVLSGTASGRPKVKTGIIEAIRAIKVPRDAAVRDRTRAYGQLRDLVTTAPAELREQLLECSGKQRVAVATGYRPDPTRLAEPLQATKLALRTLARRIQALNAEIDAADAVLADLVAQAVPTLLALPRVGVQSAAQLAITAGQNIDRMRSEAAFAKLTGVAPIPASSGKSTRMRLNRGGDRHANSALYMIAIGRLQRHQPTIAYRTRRQHENLSKRDIIRCLKRYIAREVYTALKHDLLTT

SEQ ID NO: 370428 - protein, 356 aa, unidentified
MEHINKLDFSGQSIYIGLDVHKKSWSVSIFSEQCEHKTFTQPPEADKLVHYLKHNFPGAAYQAVYEAGFSGFWAHDQLRKQGVNCLVTNPADIPTTDKERTRKRDRTDCRKLARSLRSGELKGIYVPSRPKLEDRSLVRTRQSMVRKQTRCKNQIKALLYFYGINLPEEVADSHWSQKFLGYLENLPMERSSGNMTLKVHLDELHHLKRIIASLNRSIILLSREAEYGEMVRLLKTVPGISTLTAMIFLTELGDLARFASLDQLASYVGLIPDIESSGETEHIKNITHRRNPQLRASLIEAAWVAARKDPVLLLAFNEYCQRMKKTRAIIKIARKLLNRIRYVLKNHVAYVPGVVQ

SEQ ID NO: 370429 - protein, 411 aa, unidentified
MHNRQNYLYVGVDLHKEHHTAVIINCWQEKLGEIQFDNKPSAFSKFLLEVETYVSAGITVVFGLEDVGGYGRALAKYLVDHEQVVKEVNPALSFLERKSHVTTQKSDSWDAECVARILINKLNQLPDAKPNDLFWSIQQLVSTRNALVKAQSALKNQLHIQLNHHYPSYKKFFSELDGKTALAFWQQYPSPFCLEGANIKQLTAFLLDVSNNTCSVKKASDILKLVKEDGQTMKEYQETRDFLVRSIVRDIEFKKKEMKYIERELKRLVNLLDYQLETMPGIELVTASALIAEIGDVRRFPNANKLARFAGIAPVYFGSGGKGKTHKSKQGNRVLHALFYNLAVQQVQVAKGSKLPRNPVFHAYYQKKLKEGKTKGQALVCIMRRLVNIVYGMMKYKTAYELPVVEEKEVV

SEQ ID NO: 370430 - protein, 328 aa, unidentified
MKKKFILGADISKHTIDIHCFGKPDCLMISNDSKGFKELIKWIKRQVSRDFEGVIVVMEYTGIYTYNFENFLHDKSIDYVKRPALDIKRSAGIKRDKTDKADARMISKYGWQRREELQPMKPLSSIQLDLQQLMAYRDKLVADKSSYQSRIKELKGQMQQKLNQCIIQSTENIMQLLKEEIKKTEAAIKELVAKDEALAANYELVQSVKGIGFSTTVHMLIKTENFTRFDARKFACYCGVAPFKNESGTSIRGRTKTSHLANSKIKSLLTMAAISAINHDPQLKIKYEQKLQEGKAKMVALNIIRFKLIERIFSVIKRQSPYILGAAV

SEQ ID NO: 370431 - protein, 317 aa, unidentified
MKGKDTYIGIDVAKAHLDLAVHLEGDPWRVSNNEAGISAVVKHLKELDPTLVVLEPTGGLELPLTAALATAGLPVAVVNPRQVRDFAKATGRLAKTDRLDAQVLAHFAQAVRPTPRPLPDAQTRELAALLARRQQLVQMLTAEKNRLATTRPPVRQRVQAHIKWLEQELKAVDGDLSSAIQESPLWRAKDDLLQGVKGIGPVTSITFLADLPELGTLDRRQIAALVGVAPLNRDSGLFRGRRKIWGGRARVRAALYMATSIAQRFNPVIKDFHQRLLKAGKEKKVARTACMRKLLTILNAMIRDQRPWNPGLPRQNS

SEQ ID NO: 370432 - protein, 341 aa, unidentified
MNGSKNVVGIDIAKRVFQLHSIDMETGEIVSLQLKREKFLEHFANRQPCLIGMEACGGAQHWARKLTAMGHQVKLLPGKAVKGFVTGNKNDRHDARAIWTAVQQPHVKAVAIKTEEQQAILALHRMRSQLVKFRTAQINGLRGLLTEYGEVMPQGKAGVRKGITEALARLEDRLPAMVIDTLREQWARIEKLDSEIATIEQRIKLWLKSDDACKRIAEIPGVGPLTATAAVAIMGDAKAFKSGREFAAFVGLVPRQTGTGGRIKLLGISKRGDTYLRTLLIHGARSVLTHAKEPGPWVTELRQRRPLNVAIVAQANKMARTIWAILAHERTYQREFVSQPV

SEQ ID NO: 370433 - protein, 353 aa, unidentified
MTYVGIDLHANNMVNVAINGNGKVVREAKLPTSRRSLEDFFGTFEGPVKAVVECTSNWYWLSDWCRANGVGLTLAHSKMVKAISYAKVKTDKVDAKTLAELLRADLIPEAYQIKHDRRELRELTRGRLRLIQWRGKLQSTLWNQAIKYNVQISGSQWRELEKLQQWLQPQLPPAANLQAQLLCEQISQLQQHIHRIEQEIEKQVPFEETAERLMAVPGLGKVGAWTILAEIGDIHRFPSAKQFVSYCRLVPGAKDSGGSHRHKSGNKDGNRYLRAAFGQAAVSAYTHYKVVKKFYRKIKRRSGRPVARAVVAKELAKGVWHMLTKDEEYKGFKGQPVRAASQTCWPQPISPYA

SEQ ID NO: 370434 - protein, 336 aa, unidentified
MEAMREVLGIDVSKSKLDIELLINGKVKTKVLQNTTAGHKSLLEWIDKSKASRSSLHVCMEATGVYHEALALTLYDAGIKVSIVNPACIKGFGHGENIRNKNDEIDAGLIARYCLAMNPELWTPPPLEQRQLRGWTLRVQALKDIRQQEENRLEAHTIGGMEDVATHVKTHIIWLDVEIKKLEKEIDDHIDRHPGLKNDAQLIASIPGLGTTTIARVLGHIGDIRRFKNAKAFAAFLGVTPKQRTSGSSVRGRTVMSKTGSSSLRAALFMPSMVARRHNPILRQFADRLLATGMAKKAVIGAVTHKLAHLIYGVIRTGKPFDANFLSNRLAIQDGI

SEQ ID NO: 370435 - protein, 335 aa, unidentified
MLYAAIDIHKRMFQAAVLDVETGETVERRFGATREELSDWAMPLQGELAAVAIEATNGWRWVWRELSARGFDVRLVDPAQAKALRGRIKRAKTDRLDARWLCVLLAKEMLPESWLPPAEIQALRDQTRLRKALAEDRTRWAQRLHALLAHEGWPCQRARLLTVEGRRWVNALSLSPAARSQVERLLRLIEAVEDELRSLETELRRFARSDRRCIALQTIYGVGPILACHLLAELGEASRFRRARQAVRAAGLDPVVDESGETRRRGRLAKHGAPALRWALVEAAQHAQRANSPDRGLYTQAATRVGSKRAVLTVARKIGRRAYHVLNELETQAAA

SEQ ID NO: 370436 - protein, 355 aa, unidentified
MSQEKYIGMDVHQATISVAVMDAGGKLIMECLLETKAATIVEFIRGLHGTLWLTFEEGTSAAWLHDLLKPHVNRLVVCDPRKNALLKDGNKSDRVDARKLAELLRGNQLHAVYHGEHGVRTLKELGRSYLTITQDVTRVMNRIKALYRSWAIPCAGTTVYAARHRAEWLAKIAEPGVRVRAQRLYQQLDLLQPVRLEARREFLAESHKHSAVKLLRQIPSIGPIRSALLVALLQTPHRFRTKRQLWAYSGFAVETHDSGEYRSVRGKLQRNRERMTVRGLNDNHNRDLKNLFKSAAISASTRPGPLRDFYVARVEKGMRPTMARLTLARKMAAISLTIWKKGVEFDAQQLQRQTA

SEQ ID NO: 370437 - protein, 332 aa, unidentified
MDNFYFIGVDVSKKKLDFCVLFEGKVLREEQVSNHQQAVARLIGELKNDLEMDNEQFLICAEHTGQYTFPLVCACKSVECKLWLENPSQIKYSSGMQRGKNDKVDAKRIAIYASRFGDKVKYYDRPTEEIERLKQLERERALYVTDLAKYKGQMYDQKDFMPAALYRKKTKRMKGLIQELQAAIDAITAEMEKIIGSTEVLARQMELLMSIGGVGKVVALNVIIETEAFSRFDNPRKFCCHAGVAPFSYTSGSSQHSKNKVSHRANKNIKKLLHMAAVSVTHRKEGELKAYYMRKVEEGKNKMSVINALRAKIVARMFAVIKRNEVYTPIYS

SEQ ID NO: 370438 - protein, 366 aa, unidentified
MTLPTLGIDVAKATLAVVLLLANRTYRKEFANTASGHASLLAWLAHHARGQFVHAALEAPGVYGEDVALALHQAGHTVSVVNPATIAAYAHSQGARTKTDAADAALIARYCQKEQTAAWPPPAPEVRELRALVRQRQALLEMRQQEANRLSDGAPPASVRSVLTAHGEFLDEQIAGLEQQIDQHIDDHDELKRQRDLMTSIKGVGRRAASDLLGEIGDLRSFSNARELVAYAGMNPREFRSGSSVQKHTRLSKPGNARVRALRSMPALSAIQHNPLVKALRERLVASGKAKMAAVGAAMRKLLQLMYGVVKHHRPFDPHYAGRALAERNAGCAPVPAARPGHKPGRVSGAGVERAAPKALCLETAT

SEQ ID NO: 370439 - protein, 343 aa, unidentified
MYYIGLDVHKKTISFCVKDTASCVHQEGKIGSTRRELDAWIKTLPQPRVIAMEATIFTGWIYDHLLPHAEKVKVAHPLMLRAIAASKKKNDRIDARKIADLLRCDLLPECHMASTEIRQRRRTLRYRGLLVRQMVQMKNRISGLLMETGVSYNKRRLHKVGYFAELLSTNEEVNQSIRPLLKLSRETIVRCQKTDYALVSSLERDPLLAERLKRLRTVPGVGPITALTWALEIGDVTRFESIKQAISYCGLCSAEKSSADKVMRTPISKQRNKHIQRALVEAAKLAPRQCHELAVIYQKEKQRGNSNRATLAVARKMVAYLLAVERRKQDFVPAEDFASRAAA

SEQ ID NO: 370440 - protein, 467 aa, unidentified
MAAGKLNRKQRKELTRQLRSEDPGLDVVHPRAAGIDVGNSAHYVAVRPDQDAEPVRRFECFTADLHRLADWLQACGVRTVAMQSTGVYWIPLYEILEEHGFEVYLVNARHTRNLPGRKSDVQESQWLLKLHTYGLLNNSFRPTAEIRVARTYWRQRAEHVHGASTCIQRMQKVLTQMNVQLANVISDLSGLTGQTIVRAILGGERDPRKLAELSHPQIRASRPEIAKSLEGNWRPELLFVLQQEVEMYDTYQRRIGECDRELEAHLKTFADKVRSKQAEAESASDERKGSKGQKTKPAQNSKRSQGNAPRFDLRSELYRISGVDLTRIDGIHSLVAQTVISEVGLDMSRWNTEAHFASWLGLSPDNRISGDKVLSKGTRHVVNRAATALRMAATTLLRSQSYLGAQYRRLRTKLGAPKAITAMAQSAAAEIECRTDLMASADYRRQLAGVLAESALAAAAAEPVAHA

SEQ ID NO: 370441 - protein, 338 aa, unidentified
MENFAGIDLHSRNSYIAIIDNDNKRVFKKKVKNDLQNVVHVLEPHRKQIKGIVVESTYNWYWLVDGLMDVGYKVHLANPSAIKQYEGLKHADDVTDAFHLANLLRLGILPEGYIYPKEERPVRDLLRKRLQLVQQRTALILSFENLLTRNLGTRINVNEVNKLREEDVEDIFQQEYLVLSGKASIATINFLGTRIEQIEKAVHKVAKLRREYKPLMTVPGIGKILALTIMYEAGPMERFAKVGNYASYCRCVGSKRISNGKQKGKGNRKNGNKHLSRAYVEAAHYALWNYEYVKRYHQRKMAKTNNVVARKAIAHKLARACYYIIRDQKEFDPGKLFV

SEQ ID NO: 370442 - protein, 355 aa, unidentified
MTPFKYNPEQFDIYIGNDVDQNNFSLTIRERYRLIMTKKMPAKPQELYNFIRNQFPGRSVIVGYEAGPTGFGLYDYLIGRDMPCVLLSPSGILKPANERVKTNRIDSKKIATMLTDGQFHPVRVPDGPYRELRHLTILRNNYVKLQRTAKQRIKSLLLYTGLNETCRDIEQNWSNYYIQHLKTIDCTPAIRLRLDKLLEDLNYARKQLLDVTKQLRKFYTSTPEINEHIRNLRTIPGIGFVTATTVLGRIGNPVNLHNQRELAAFCGLTPREHSTGDNVRRGGITGLGDATLRSILIEASWMVIQNDTELGQFYNRIKSKNSTKSGSLKAIVAVAHKLTLRIYRVLVERRAYIVH

SEQ ID NO: 370443 - protein, 341 aa, unidentified
MRQYVGLDVSQKETAVCVVDEDGRVIFEGRARSDPGALAAILAKKAPLAERVGFETGAMSSWLWHELKRIGLPVVCIDARHAHAVLSVRMNKSDENDARGLAELVRIGWYREVAVKSEASQQVRALLVARSRLVAIRRDLENQIRSMLKEYGLIFPRAIAGQFRRRVIELTGDEHILCAVLLPLISVHDHVCRELEGLDRQIREMARADETTRRLMTVPGIGVVTALTFRHTIDDPSRFRSAASVGAYLGLTPRRRQSGEMDTTGHVSRWGDRLLRAYLFEAASVLLHRTKRWCALKAWGLRLAKRNGVKKAQVAVARKLAVILHCIWVDGTSFEWGKEPA

SEQ ID NO: 370444 - protein, 321 aa, unidentified
MNSSNIIAGVDVSKSKLDIHIHPLEHYKIFENNVQSIDEILDFLRLHNVTKVGLEATGGYEKLCAYTLLSNGFEVYIIQPRWVRDYAKSLGITTKTDKIDCSIISRYINNTDMRAIPLKVDNGNIDYLKQKLSRRNQLVEIAKIQKNQIQQITDTSIIKQIEELLAILQNQIKTLEDEMITFIDQNQELKKKYISITSIPGISKITATTLICHLPELGTLQKKQISSLVGLAPFNRDSGSSRGKRCIQGGRSQIRKVLHMCILSAQKVNSYIKPFFTRLYNQYKKPYKIASTVAMRKLLLLANSLVRDGRVFTEEYSPKSA

SEQ ID NO: 370445 - protein, 418 aa, unidentified
MLKIVYPNCCGIDVHKKFVVATVGITNKSGVTEYHTRQFSTFTENLQQLLRWLKSLNCTNVCMESTGKYWIPPFNILENDCEVVVANPKYVKGIRGKKTDKKDSIWLCDLHKHGLVPNSFIPPKIIRDIRDLMRYRYKLICFKSSEKNRIQNSLTVSNIMLSSVVSDTFGKSSMKIINHLLNNPDDTTFDVAPMLHNRMKASAETVSKSINGNLSDVQAEKMRVCFSHFDSIETCIANVESAVLKLCQPFMKQIEIILTLPSVKDIFTAITIIGEIGVDMTAFASAKHLCSWAGLTPQNNESAGKKKSVRVSRAGVYIKPLLVQCANAAIKSKECSYFKIRYDQIKKRRGHKKAIIAIAHVLLNCIYHMLVKNEPFNYDLHKIDSNPQVNYVPHITEEMEVRYLQTLGYPIPNLINST

SEQ ID NO: 370446 - protein, 317 aa, unidentified
MTRTICGVDVAFKSLEARIGQQGAAGSFANNPEGIAALGAFCQAHQADLVAMEATGGYEQQAFAQLSEQGLPVTILNPRAVRQFAQSMGSLEKTDRIDAGMIAWYAEVKKSRPVCLAPESQQHLRALVTRLRQLTEMRAVQLNQQRLVTDRAVQASFKKVLAVLTRQIRELEQRIAALLEKDPLWRQFNEAFRTIKGVADRTVARLMAEMPEIGTLSNKTISKLAGVAPLANDSGKHQGKRAVRGGRAAVREILFIVASVVGRYEPDFIAFQQRLRAAGKPPKVVRMALAHKLLVRLNAKAREVRQRLANPQPEAAV

SEQ ID NO: 370447 - protein, 332 aa, unidentified
MQMLAIDLGKQSFHIYGITGDGEVVSRKVSRAKLPDAVTKLQPRSVAMEACASSHHWGRVFEAQGYTVHLIHPRFVKPFVKGSKNDAVDAEAIFEAANRPTMRFVPLKSVEQQDLQALHRTRDRLIVQRTALINHTRGLLAEYGVVMPVGASRFRLQIDKMVEATELSDLAKNLFLKLVEEYRSLDARVSALDDMLAEICREDERCKRLTTLPGVGPIVATSLVAAIDDGRHFASGRALSAWIGLVPRQYTTGGKPRLGGIGNRANHYLRRQLIHGARSALLRVAKHDDRRSKWAQELQSRAGHNKTLVAMANKTARMAWAMLRSGENYKMA

SEQ ID NO: 370448 - protein, 361 aa, unidentified
MKTTLSKKQNWFNRINLTKDDKLYIGVDVHKNSYAIAAWLNNAIAVDFVMPADNHQLASMLKKQRIALKKVVYEAGPTGYSLVRTLEKAKLPIQIIAPSKTPRQSAPTSKTDRLDCRKLAEYAAKGLLKPITPPSVRQEANRQLCRIRENIIDKQRNIKLQIKSFLLQHSIAEPDGLASWSIRSLEKLSQIRLSSQLRYCLDIMLEQLHFLKAQLRLTEKQLCNTFAKESLDAKVKMLMTHPGIGPTIARQFATEIFNPGRFKDKTEIAKYIGLAPMISQSGQSLREGPITKTGRPQLRSNLVEASWIWIRKDAHAYKTYTRILRNTGHSNKAITAMARKLAIHLWRMSCDNRPYIQGFAQ

SEQ ID NO: 370449 - protein, 355 aa, unidentified
MDSKKYIGMDVHKESISIAVMNGAGKIGMECVIETKASTILQFIEGLRGDVQVTFEEGTSAAWLYDLLKPHVTKLVVCDPRKNASMREGNQSDKIDARRLAELLRLNHLSPVYHGEHGLRSLKELVRSYLTITKDLVRVMTRVKAIYRSWAIPCAGKQVYAPRHRTEWLGKIGEPGVRRRAEFYYQQLDALRTVRQEVRWELLAEAKKHQAWKQLCQIPSIGPIRAAVLLGILQTPHRFRTKRQLWSYSGFGIETHSSADHRSVDGRLQRVKKQSSIRGLNRNCNHDLKNLFKGAAIVASSKPGPFQEFYTALLTKGIRPEMARLTLARKIATIVLMVWKRGACFDAQHLKPQTA

SEQ ID NO: 370450 - protein, 356 aa, unidentified
MSEITRVGVDLAKSVIQVHAVDAAGKLLTNRQLSRDKFLTWCAQLPVGCVVAMEGCGGAHHWARKLIALGLNAKIIAAHLVAPYRLQGKGGKNDANDAAAVCEAASRPNMNFVPVKTTVQQGLLCVHRLREGLKEERTACVNRIRGMLTEFGLVVSKSPEKLREKLTDMLEDASNDLSGVARLVIEEAYSHWKEIEERIKWCDQRISAHVKDDAQAKAAKELMGVGPVTASAVVATVGNFNQFKNGAQFGAWLGLTPRQNSSGGKNSLGGITKRGDMYLRMLLIQGAKSAVMTAHKRDDPISKWLHQLREKSGWQKAAVAMANKNARILWAMMTKGCRFDAQHVSVKPAGLAPAMA

SEQ ID NO: 370451 - protein, 408 aa, unidentified
MNTLYVGIDVSSKSNVVYLMLPNGDKHSNFSVANSHEGSTQLVKRILSALTSHSLDTVLIGLEATSVYGDNLVYFLREDATLAPFNRKIHVLNPKQVKKFHDTYNDLPKNDYVDSFVIADCLRFGRINKEVYMGDYRYKALQNLTRARFFAVQNLVKEKQRFMNVLFKKYSTMTQEKVFSDTFSTTALAVYDEFESAEALANMDLHELTDFIIEKGKNRFPDPDAVAKAIQKAARSSYRLPKTVNDSVNQVLSISITSMKALESQIKEFDKAIKAQMELLPNVLISIPGIGPVYSAGIMAEIGDINRFNSQAALAKYAGLAWKQHQSGGFESEVTRLIPSGNRFLKYYLCEAAFSLVRCDKEYSDFYHLKYKEVNRCQHKRALALTARKFVRLVFRLLKDNRLYCPAK

SEQ ID NO: 370452 - protein, 334 aa, unidentified
MQELQFAGIDVSARQLLIRVRNPHGAVQQFDFANTEAGHRQLCQILTQRGRRARACLESTGTYSLDVAIALAKHPGIELMVVNPRAARDFAKACLHRSKTDAVDAQVLLEFAQRMPFQPWQPPSPERLQLRALARRIGSLTLMLVEEKNRLHSTEFGQPFHKAVRKDIQAHLRQLQRRLQKLEENAVDLIWANFELRQALLHMTSIKGIGRLSAILILAELCVLPSDMTDRQWVAHAGLDPRHHESGSSVHKPQRISRTGNPRLRSALYMPALSAAQHEPNVRAYYQKLLARGKLPMQALVAVMRKLLHSIHAMLRDQVDFDGQKFFAVETKAS

SEQ ID NO: 370453 - protein, 341 aa, unidentified
MEKYVGLDVSMEETSVCVVDGGGNIVFEGKTSSQPDALSKLLRAKASGAARIVLETGSLACWLWHELRGRNFPVICLDARHARAALSMRVNKTDRNDARGLAELARMGWYREANVKSMESRYTHSLLAARAKLVDLRRDVENQMRGLLKGFGLPPGKGGIKALLEKIVVIMREAPHLHMLFKPMMLAHSALVTQVEFYDVQILKLAKGDETTRRLMTAPGVGPATALAFRSTIDDPNRFKSSNDVGAYLGLTPRRYQSGELDRTGRISKRGDRLTRFYLFEAASVLLTVVKRWSVLKAWGVRLAKRVGIKKAKTAVARKLAVILHCIWVDGTEFQWGKEKA

SEQ ID NO: 370454 - protein, 352 aa, unidentified
MYYVGLDLHKKYITGCALDSQGAVVTTERRLPPVLETVLGWLAPVGQPAAVALEATLYWAWLHDRLTAAGYQVAVAHPQQVKLICHARCKTDPVDARKLADLLRTDLLPAIWIPDAETRARRTLLRGRAWVVRTRTRVKARIQAYLAAENERVPVSDLFSRGGRAWLATVALPPAVRAQVDRLLALVEQLDVQIAGQDRTVRELARATPEAEQLQTIPGIGPFGALLLLAEIGTITRFGSSHELAAYAGLVPSTRSSGGKTAHGSVGPAGSAWLKWLFVEAVQTLKRQPGPVRSQYERLLRAKGKQKATVAAARKLCCYVYWMMKEGRSYDDWLRQRQQREVRPIQAVASVA

SEQ ID NO: 370455 - protein, 399 aa, unidentified
MLAVGIDISKSKSVAAILNQDGSMHTSPFEFHHTQPELDAFIKYILNSNQSATILMENTGHYHYPVLKAFREAGLPVCMVNAYQIKKFGDMDLRKAKTDKKDAVRIARYALEKSYSLVPYTSMEQKYEDLRFLARQYNQRMLTLKTNKVFLLNLLDETMPGITNILPLTTRTPETSLSVLFINRFKSYDHIKKMGKSRFLDAFEKIARKSRNRQTKTYGLAIYEAALRNITTRGENEYTLAAQDQCLELVCESQKAADSIILKMQTLAETLPEYAVLRSMAGVGDRLGPLILAEIGDIRRFHSGKALNAYAGNDAPPYQSGTFESHNRHISKRGNAALRKYCFEVMQALKLTRPQDDPVYLFLLKKEQEGKPYNVAKMAGVNKFLRIYYARAMETLKQQ

SEQ ID NO: 370456 - protein, 354 aa, unidentified
MEQVTQLDFRGQKIFAGIDVHKKSWKVSLRNEQMELRTFSQNPSVKELSDHLLRNYPRADYHVVYEAGFCGFGYQREFSDYGINCIVVNPADVPTTDKEKHRKSDTVDCRKLGKTLSEGTLKGIFIPGVEQQDDRGIIRFYQQMVKDQTRFKNRIKGWLNFQGIIISGDADRYWSNNFIRWLKELSLTPSAKINLDLLIQGYEQARGMVLAATKQVRALSRQGRHLRSIELVRTIPGIGEITALLMVTEIGDINRFPTLDALCGFVGLVPNTHGSGDKENVMGLTNRAHHQLREKLIEASWVAVRLDPALTMAFNGYVKRMKKNKAIIKIAKKLLNRIRFVMKQQTRYVTAVVK

SEQ ID NO: 370457 - protein, 394 aa, unidentified
MFFVGIDVAKRKHEAVVIDDKGRIVQKSFSFPNSLSGYNSLISCVKRITSTRKDIVFGMESTSHYWLALYSHLIKDGYTAHVINPIQSDAFRGLFIRQTKTDPIDAVIIAEVIRFGKYSSTHFPQHKILALREMCRNRLYMVDAISDLKRKTIALIDQVFPEYDQLFSDTFLVSSIEVLYRYPTPKKLLHIRRDTLTNLLIKTSGGHFGSAKADEIIHAAKNTFGIDDPYDVYADLIKTFIKQIKFIQKNVSEIDQKITAIMDEIASPITSIPGIGITLGAVILSEIGDISRFKSADKLAAFAGIDPSLKQSGDYSSIRNHMSKRGSPYLRRALWMACIPATQVDPMFRAYYLKKRSEGKSHMKTMGHIAKKMICVIYAVLRDNKEYQPVLTAA

SEQ ID NO: 370458 - protein, 346 aa, unidentified
MNETTTIGLDIAKQVFQVHGVAADGTVTVKRQLRRSEVIRFFDKLPRCRVGLEACGGAHFWARELTVLGHDVRLIPASYVKPYVKRGKTDAIDAEAICEAVSRPTMRFVPIKTVDCQAGVMLLKTRYLLVKQRTQSINSLRGHLSELGIIAARGTGKVETLIAIIRDKTDERIPAVARRALEMLAEQVEALFQRIATLENEIVSEVRRDDTMRRLATIPGVGPITAATIVALVPDPGAFNSGRHFAAWIGLTPKMHSTGGKERLGRISKMGNPVLRSLLVVGATAVSRHARRGATVSPWLTGLLARRPAKVAAIALANKMARVIWALLTKGGVFTRRPATAAQHAA

SEQ ID NO: 370459 - protein, 468 aa, unidentified
MGAQSAKPALTESGGGQASVGSQLFVGVDVGRHQHQVAAITRVRMEDGSWERGPVRAFAVNAAGFRELLAWLEGWGLEPEQVRVGCEPTGGWYSRTVVACLETYGYQVDWLQNWAVHERRQLVLGKQTKTDALDARLIARLLYEQERLGSSRAFLHPSPPGTESLRMLVRNRFKLVNFRTRYRLQLGAVQDVLFPELKQFFRASSTGRTARLVLERFPTPADLAAATLEQLSAVVVEEAGAQKLRPRLPELQDLAANSAGLTGDEQMLRIQAWLLHQLGMLEDEIAATEKTIVEALAAWPDQRSLEIMRSFPHMSELRAAVLLSAIGDVKAFRSDRQLRKHLGWYPEAAESGTSVYRHRLGEKGNRLARREVWLWVLSLLRSDCQIGTFRAYYQRLRKRGVGGKVAVGHTASKLISLLFFCLRHGQPYDPERHARELGLGEALKRSEVQPLSTLRPAEPPLLPGHADA

SEQ ID NO: 370460 - protein, 412 aa, unidentified
MRRVIGIDIHRTFGEVVIWKNGVHRRAGRVDMTRTALEGFGQTLEATDEVVIEATGNSMAVSRVLSPFVARVVIANPLQVKAIAHAHVKTDAIDAGTLANLYAAGYLPEIWTPDARTELLRRLVARRYQIVRHRTRLKNEVHSILSANLAPKCPHADLFNRCGRAWVARQVLPDDERMAVERQLREFDRVSQDLVDLDREIALSVMDDASVRRLMTITGVNLTVAAGVMAAIGDIARFKSPQKLVSYFGLNPRVRQSGLGAAHHGRISKVGRSHARAMLVEAAWAAAKAPGPLHAFFVRIRAKRGHQVAAVALARKLTVLCWHLLTKEQGYLWARPALVAKKTRDMELRAGLPQKKGNRRGPAYAYNVKELRAQEAEVARQAERTYEQFVARWKRRPSRSSAEVSGTALGPE

SEQ ID NO: 370461 - protein, 341 aa, unidentified
MGEVSTIGLDLAKNVFQVHGADASGAVVFRKKLRRHQVLTFFAGQPSCTVAMEACASAHHWAREIGRLGHAVRLIPPAYVKPFVKRQKNDAADAEAICEAAQRPTMRFVAPKSEQAQASAVVFRARDLLVRQRTQIINALRGHLAEFGIIVAKGPAHVLHLVRAVEDEAHPIPELARPILKMLIETLHRLDEQIARLDREVAERAKTDATARRLMTVPGIGPVTAVALTALAPPADTFKRGRDFAAWVGLTPLQHSTGGKQKLGATSKMGERTLRRLLIIGANSVLLWVARNGAPAGSWIARMVARKPPMLVRVALANKMARIIWALMARGEVYRAPAAVA

SEQ ID NO: 370462 - protein, 459 aa, unidentified
MARKKKLEMEIINTEAAGIDVGSRSHFVAVGQSLEDVKEFGVYAEDNTELCQWLLSYGITSVAMESTGDYWQNLYAELLKHDISVVLCNGKFTKHAKGKKTDVKDCRWIQKLHSLGLLSSSFLPDETTEKLRTYCRQRTNMINQSATVSRKMQKYLKFLNFRLDVVVKDVCGLTGMKIIEDICSGNLDPSSLAEHRHYNCRKSKEEIAKALHGNNREDYLFGLKQEYQSYMFYQKKIQQCDNEIAKFIKETLRKSPNKKSFRTVDKPHKRINKNAPAIKDFNQIAFQYFEGVDLMAIEGVSHSTILSIMSEIGPEGFKKFNSSKEFVSWLRVAPNNKISGGKVLSHRIPKGSNRLKIALRQSANAIGNLKDTHLSDFFKRIAYRRGRQAAVSATARKLGVIIWTMITKKVPYSPPTEYLFLDQKRKLKMVSRIKKNIVKFGINLEEIRIDNMQIINDII

SEQ ID NO: 370463 - protein, 346 aa, unidentified
MCYSTTVGVDLAKNVIQISVLSDRGKELSNRSLTRKKFAAFLGKQSPSLVAFEACASAHYWARAAKRHGHAARIIPAKAVAPFRQGQKTDSNDALAVAEAARRPNIKDAPMKTVEQQGLQSIQRSRYLLIQECIALSNHMRGILLEFGVTIPQGFAALLRTIPEVLEDGDNELPDLYRPTLHRLYGRMLDLRNDIEAMSKDIDNLVKQHPVCSKLTALEGVGPIGAVSLYAALGSGAAFTKGREFAAYLGLTPRQHSSGGKTNIVGLSKKIGNRRLRSILIQGALAYVYRMKEPRTSKDRWLIDLIERAGPRRAAVALANKNVRTAWALVTQGTEYQRREQQEMAA

SEQ ID NO: 370464 - protein, 331 aa, unidentified
MEQKEQMIMGCDISKDKIDLCLLEKATGKIIISKSYANNSSGHQRIVKQLSDKDNCLVVLEATGNYHLRFISCLAAYNLCFAVINPLVLKRFAQMKMLRTKTDKLDAFIIAQYGKEQSPKAHQMPSKEQQELKALITVLNNLLKQRTQTKNLLHSQLLLPGNSIEFQKPIKKVLFTLNKQIQAIQKSIDKIIVNNFEHLKELITSIKGIGDKTAQGVIAYLGDLKSYSSYKQVASYVGINPAIKQSGQSLNKTSGISKQGNAVLRTLFYMSALSAIRVNKACKAFYIRLLQKGKKKKTALIAVADKLIKQLFAIIKKNIFYLDDYYHPKFT

SEQ ID NO: 370465 - protein, 353 aa, unidentified
MDRYVGLDAHAETCTFAVVGPSGRRLTSKVVETNGQALVEAIRSIPGRVHLCLEEGTQSAWLHEILEPEVSEIAVVSPPETRGAKDDLRDAWSRAEELRVGAIRTRVYKAPVHWAGLRSAATTYRMATQDVVRAKNRLKAVLRGRGILADAGVYEGKSRGKWLKELPAAGHRPAAEWLGRELDQLVPLREEAEDWLLKEAKAHPIIKKLSTAPGMGPLRTAQLAAIVITPHRFRTRRQFWSYCGLAIVTRSSSDWMQGQNGKWTRAVVRQTRGLNRKRQPVLKAVFKGAATTVITQLHGHPLHMDYERMLQSGIKPNLAKLTLARRLAAIVLSMWKREEVYDPQRHKPVTAKS

SEQ ID NO: 370466 - protein, 349 aa, unidentified
MSHNLNNAVAVIGIDIGKNSFHVVGLDSRGAIVLRQKWSRGQIEARLANMPPCLIGMEACVGAHHLSRKLGTLGHDARLMPAKYVRPYSKGQKNDFRDAEAIAEAVQRPTMKFVATKTAEQLDLQALHRVRERLVSQRTGIINQIRAFLLERGIAVRQGLRFLRVELPRLLATPPDVLSPRMVGVIEGLAEDGRRLDQRIEQLSGEITALAHQDAGCKRLVSVPGIGPIISSAMVAAIGTGDAFSKGRDFAAWLGLVPKQISTGDRTILGKISKRGNRYLRVLFVQAAWVVLIKPQSWERHGLKRWLDAAKQRLHRNVLAIALANKLARIAWGVLARGRAFEASKLQAA

SEQ ID NO: 370467 - protein, 379 aa, unidentified
MYRILKIGMDVHTTNYTLCALESKFGEENRVLAQATVDPDHKFIIEFIQQILKKMDPERKDEIDLECGYEAGCLGYSLYHTLTAKKIKCTILAPTTMHVEKGKRIKTDKRDAKLIADCLASGGYHSVYIPTDEDNAVKEYIRMRDDHKQDLKRIKQQILALCDRFGCHYPESYWSKAHLKWIRELKLSEIIRETLDEYLASYEELIAKIERFDQRIQEIADQASYQTRVKALECFLGIKTHTALSLIVETGDFARFRKGDIYAAYLGLAPGEHSSSTDLNKLSITKAGNSHLRTLLNEASECICRGMIGYKSKKLRARQSGNASDVIAYADRANERLRSKYYRLIRHGKPRNVAVTAVARELACFVWGMMMGDIYGRAA

SEQ ID NO: 370468 - protein, 370 aa, unidentified
MQSSIIMSQDLKKRTSQKSESEFLKYSVGTDMGKDQFDACISVIDREQNVRPIAQHKFNNNPSGYKEFVEWQTRKCKLPIPVVFAMEATGVYYERLAWYLHRRDFYISVVLPNKARKYLQSIGLKSKNDKIDAVGLAQMAAEQRLSTWQAPDETIIKLRDITRQRESLQVTRTRINNQLSSYSCGEFVNPAIVKSFQKIIALLDEQIKATEKMIKEKINSNPALKEKVNNILEIKGISRITVATVVAETGGFEMFMNQKQLVSYGGYDVVENQSGKHVGRTKISKKGNAHIRRILHMPALNVVRYGEPVFCNLYNRVYGRTKIKMKAYVAVQRELLCLIYTLWKKNEKYVKNYTEHPVLQSRSSSFRLAC

SEQ ID NO: 370469 - protein, 395 aa, unidentified
MFIVGIDIAKRSHEAIIIAEDGQVVRKAFSFRNNCTGYNLLLEQVRKLTLVKSQIVFAMESTAHYWLALYARLLKDGYAVMVLNPIQSHSLRELYIRKAKTDARDSLIIADLVRFGRCKASNVPQDKILALRELCRSRAYLVDMAADLKRKLIALLDRIFPEYESLFDSVFSKASIAVLSKYSTPQKVKNANLRKLTDILMESSNGHFGERKAHQLKEAACSSFGIDDSGGVYSTLLGMFLEQILSLTAQADSLEKQISVFFQEFNNPLTSIPGVGTVLAATILSEIGDITRFSSADKLLAYAGLDPSVKQSGEFKSNQNRMSKRGSPYLRRAIWLASTVAVHRDPMFQTYYEKKISEGLHYMNVIGHVSRKMTAVIFAVLRDGQPYQPILQSAG

SEQ ID NO: 370470 - protein, 392 aa, unidentified
MRISVGIDIAKEMHWVTAIDSNGAVLIDHKLANTASEIAELIEELARLGRAMRVGLDVLGGIADLAEAMLAAAGLTLVHVPGMAVNRARRGTVGGENKSDPRDARTIADQVRTRSDLRQIEPATELDLEVRLLVGRRRDIVQAQTQRLSRMRDRLVGIFPGLEACLDLKTKGPLHLLIKFVTSAELRAAGKKRLVRHLQAAGGLPKVEDLTNRVLTVAAEQTIAAPAERMAARLIRELAVEALASRTRLIELDRELEAMLRRHPDAALIRSLPGMGAVLTAELIAEAGNISPFRSADALASAAGMAPILRQSGRTRLLRRPSGGNKGLKRVFYQSAFCSLNHPDSRAFHNRKRREGKRHLRAIIALARRRVDVLWAIVRNRTPFQTGFKIAA

SEQ ID NO: 370471 - protein, 361 aa, unidentified
MAGQAGGVIGGVDTHKHTHYAGVIDDRGRLLGHREFAASDDGYKRLLAWIRSHGEVRSIGVESTGSFGATLTRYLTAAGVEVIEVNRPNRLARRMDGKSDRLDAEQIARAVLGQTSTAVPKTKSGIVEVIRTLRVTRSSAVKARTQAFNTLWGVMIGAPSPLRDELVVLTKRTLVNRCLRLRPETEDLLSLAGDPERMLTAGTKTALRDLARRWKALDNEIKALNKNIASLVRTAAPELVALHGVGVEIAGQFLVTAGDNPERIHSEAAFAKLCGVAPQPASSGRTTGRHRLSRSGDRAANSALYIITIVRMRHHQPTRDYLERRTAEGRTKREIIRCLKRYIAREIFNALPKPAPSLDTT

SEQ ID NO: 370472 - protein, 423 aa, unidentified
MMKLKYSICCGLDVHKNVIVATIVTTNKDGISEYLQKSFSTINSDIQRFHNWLIENNCYHVCMESTGKYWIPIFNYLENDIDVCLTHPKYVKAIKGKKTDKKDSKWIADLYKFDLVRCSFIPPKDFRQLRELSRYRFKLVCMKSSEKNRIQNCMTISNVGIASVLSDPFGKTATEIISYLLEHTADSMDEKAVRKLIKKGAKSKSDEIIEAIKGYTIETDQAKKLELARGHLEYLDDMITQTEVELYVRIKPYYEFVEFVSTMPGMTELSSTIVLAETGVDMDIFDDAKHLCSWCGLSPANNESAGKKKSVRIAKAGDYLKPMMVQCALAAIKSKKQPYFAIKYGRIKKRRGHKKAIIAIARMMMVCIYHMVSEKKPFSPTDYEELINPQNHVERVVLNENNVFAYLESLGYDSSKLVKRNDN

SEQ ID NO: 370473 - protein, 437 aa, unidentified
MRRQGSCRAGNEGRVAPGRIVAPAIFRFVTLSEAKGLCRHSPPANEEKAEILRSAQNEYMKARLRAERCPPRAYNRTGTRTRTEARMSEYISFDSHKHYTLMEREEVQTQVARQYRIEHAPGAIRAALCGCAAGTGVAVEATGNWYWIIPEIEQAGLRPLLVHPRKAKLMMGLINQTDKLDVHGLNRLQRNGTLPTVWIPPAELRDLRELTRVRMVLAAQRTRLKNRISATLAKYGLAVTDASDPYCQKARRQLGGLIDQLPPHSQWATRTLLAQLDFIEGQIREQEQRLKQLIAVTPEMRLLMSLPGVGAILAAGLWLEIGRADRFASAERLASYAGTTPRVHASGGVVRYGRLRPDLNRYLRWALVEAANSVAVNHARCPRRHVSGLYRRLKMRKGHAKAIGAVARHLAEATYWVLNRNETYRDPLWTEGRSREV

SEQ ID NO: 370474 - protein, 432 aa, unidentified
MKYKMKQKQNQRITRINGATLVVGADIAKKIHVARAVDYRGIELGRDCVFHNDAQGLTKLSSWMKEVGQAHGKTEIVFGIEPTGHYWFPLAAFLQEQGITVVVVNPHHVSKTKELEDNSPTKSDYKDAKVIADLIRSGKYSEPKLPTKAYADLRILMNLREKVSASLTQVKGRIGNWFDRFFPEYAGVFKDWDGKASLMTMRAFPLPADIAAKEARHVLAHWKTEVQRGVGIKRAETLVAAAAASIGLTEGTTAARIELSTLLGQYDLFSEQLTGIMEQVLTILTDIPGAARMLAVPGVGLVTLAGFLAEVGDLSGYDHGQQIIRLAGLNLKENSSGKRKGKTGITKRGRSRLRALLFRAVMPLVAKNEAFKALHRYYTTRSQNPLKKKQSLIALCGKLIRVLHTLGTKEREYNALEMLGPVRLTQIGQVSA

SEQ ID NO: 370475 - protein, 355 aa, unidentified
MKNTEQASYTGKEVFIGIDVHKKSYSVVARCDKEVIKKWTMAGSPKELSQQLQKCFSGAIIHSVYEAGFSGFALHRELVKHGVNNIVVHAAAIEIAANVRVKTDKRDAQKMAVLLEAGRLKGNRIPSESEEQHRLLTRTRQQLVEERTALKNKIRMKFHQLGLIEYDENRPMSHKLVKELLSGTDASELRIVIQAYWNIWQKLDEEICKLAQAIKEQAKTDPHDATYRSAPGVGPLSARILANELGDMSQFNNERQLFSYTGLTPCEYSSGENIRRGHISRQGNSRLRGILVESAWRAIKKDRALGEFFERLSPRTGKKRAIVAVARKLIGRIRAAFQKGVNYQMEYQNSQAITA

SEQ ID NO: 370476 - protein, 374 aa, unidentified
MKGGQVGKKAHTCPLMNKTTNVTKILASVIEAKAETIKLGMDLHARDVVVCMQMDGALPCRPQKMTMEQVVALVAGLIAAGCKVYSCYEAGPCGYGLHRALLAAGATNYVVAPRKLSDGRKQKTDALDATALVDQLDRYLRGHKKAFTVNTVPTPEQEQAKAQGRLRDQLKKSRQQWEARGRSLLLSQGHHVTGAWWTKRRWAALEPTLPKWLVTELAIMRTVLLTLDAEEKARRAVLEAHAPKPLPKSVGALTWVLLTREICDWKRFKNRRQISSFTGLCPGGYQSGVTQRDGSINRHGNARVRALLIEMVWRLARTQPDYPPVRALVAGIARGAARRKCAVAAARKLAVDLWRLATGQTTPQNLKLSVTAAV

SEQ ID NO: 370477 - protein, 340 aa, unidentified
MNHYAGIDVSLEASSVCVIDGSGKIVREAKVASEPEALIAWFGSLGLSLTRIGLEAGPLSQWLYAALRDAGLAVELLETRHVRNAFKIMPVKTDRKDAHGIAELMRLGWFRPVHCKSMEAQETRAMLTARKLVQKALHEVEMSLRGVLRGFGLKVGKVAPAQFEARIRELVEGHPNLETIATSMLAVRATLRRELNGFEKRLRALARSDTRARLLMSTPGVGTIVALTYAAAIDDPARFKSSKTVGAHFGLTPTKYQSGETDRDGRISKIGDGSVRAALYESAHIILTKPVKGCADLKSWAMRIAKRAGMKKAKVALARKLAVIMHRMLADGTTFTTQPA

SEQ ID NO: 370478 - protein, 357 aa, unidentified
MGKSIIDTSSVTRVGLDLAKRVFRIHAVDATGSVVIARPVNRRTLLKVFDALPRCVVAMEACSCAHHWGRQLLELGFAVRLIPPAHVKPYVRRNKNDAADAAAICEAAGRPGQRFVPVRSVENQAALMRHRARELMVGQSTAALTALRGHLSEIGVVAAQGVQNAYALKELADGGVDENGEFVVPDCVRLALAPLVRQIDALDEAIKAIDRTLEASARTDETARRLMTIPGVGPITASALLATVQDFAAFSSGREFAAFLGLTPREHSTGGKPRLGRITKMGDRYLRKLLVVGACSALGARKGHNDALRRWASGMLERKTVKHKFKLTAAALANKLARIVYALATKGGHYDDRPVAA

SEQ ID NO: 370479 - protein, 321 aa, unidentified
MQTIPVTVYAGVDVAKATLQLHLQGRQAEFSNQAAGLVQLCQQLKTIPHIHVVCEATGGYERLLVQAMHQAQIPVSVTNPAQVRAAAQAQGQRAKTDRIDAALLTDYGQRYQPKPTSPTTASQDQLVALTQWLMQLVQAQALAKTQAEHHEAAFVCGRHTKLMAHYQSQIVAVEKQIRALLAQDAQLQQRVDCLDEIKGVGARTAWLVLAHMPELGQINRQQVAALAGLAPWTRQSGTMKGMRCIGGGRPEVRLALYMAALSAARCNSVLKPFYQRLRAKEKPAKVALTAVMRRLLVYMNHQLKALQATQTDTKLQNSKIP

SEQ ID NO: 370480 - protein, 422 aa, unidentified
MKLKYSICCGLDVHKNVIVATIVTTNKDGISEYNQKSFSTINSDIQRFHSWLIENNCYHVCMESTGKYWIPIFNYLENDIDVCLTHPKYVKAIKGKKTDKKDSKWIADLYKFDLVRCSFIPPKDFRQLRELSRYRFKLVCMKSSEKNRIQNCMTVSNVGIASVLSDPFGKTATEIMSYLLEHTADSMDEHAVRKLIKKGAKAKSDEIIEAIKGYKIETDQAKKLELARSHLEYLDDMITQTEVELYVRIKPYYAFVEFVSTMPGMTELSSTIVLAETGVDMSIFDDAKHLCSWCGLSPANNESAGKKKSVRIAKAGDYLKPMMVQCALAAIKSKKEPYFAIKYGRIKKRRGHKKAIIAIARMMMVCIYHMVSEQKPFSPTDYEELMDPKNHVERVALNENNVFAYLESLGYDSSKLVKRNDN

SEQ ID NO: 370481 - protein, 342 aa, unidentified
MAKIIGCDFHPRFQQIAFLEQETGEFGERRLSHPEEAERFYRSLAGHAVRIGVEATGNLGWFQRLMQELGHEVLLGNATEIRASNPRKQKTDKRDARHILSLLVQDRFPAIWQPPVENDEMRQLLLHRCRMVRMRTRIKNQLDGMAKNEGWLSPRVWSPRRREQIEGLPLTGWRAERRRDLVALLEDLNRRIGPLDEAVRAAAEANGEARLLMTHPGVGPVVSLAYVLVIGDWRRFARGKQVGSYLGLIPVEESSGSKRRLGQVSKQGNSLVRWLLVEAAATAQRYDASWHRQYVRLSMTKHHGVAKVAIAHKLAVRLYWMLRSGENYEQVVERGSHAGRSE

SEQ ID NO: 370482 - protein, 332 aa, unidentified
MMAQNDRVVVGIDVAKDKVDACIRSLSQEQTFLSTAEGQRALIRWLRKHKVGKVAMEASGGYERDWAKTLREAGIEVRIVDPKRVRSFARSAGRLAKNDAIDAEMIAWFAETFTDAPGQAYDAAREKLVQIVNARQCLLDLQTGLQNRGEHSTPEVVQKMQARLLKTIALEVAKLEAAITAMIKVTPHFAELAEIIESVPGLGKIASAGLIAAMPELGQVSDNIVAALLGVAPYDDDSGQRRGGRHIKGGRRKVRNLFYMPCLGAATQHNPVLKAFYDRLIAKGKEPKVALTACMRKLIVILNTMIARRQKWDVTRYKVSDPARLPPSACPA

SEQ ID NO: 370483 - protein, 351 aa, unidentified
MQSKLQIKSIGIDLGKTTFHLVALGSRCQVVVRKKFSRSQLLVYTANLPSSLIGMEAGVGSHFLGRALREQGHEVRLMPAQFVRPFVKSNKNDYRDAEAIAEAVERENMRFVPIQTEDQIDLQALHRVRERLVSRRTSVINQIRAFLLERGISFAKGPARLRREIPEILENADEKLSTRMRRLLDFLWQEWKHLQLQIESLSEDLEKIANSDAACARLQQIPGVGPLVATAVVSAIGNGAAFHKGREFAAWLGLVPGQWSTGGKTKLLGISKRGNPYLRKMFIHGARAAVLRVKREGSYLGQWMGGLESRAARNVVIVATANKLARISWAVLSSGENYRPRPALAVASQTK

SEQ ID NO: 370484 - protein, 314 aa, unidentified
MSDANFVGIDVAKAHLDLAIRPAGTHERYRNDEAGIAQIRDRLQAQAPTLVALEATGGLEVPLAAALAAAGLAVAVVNPRQVRDFARAVGQLAKTDALDAHLLARFAEVVRPQPRPLPDAQAQNLSALLARRRQVIAMLVAEQQRLSTTPATLRPRVEAHIAWLRQERDELDRELRRQIRASPAWREDDDLLQSVPGIGPVVATTLIAELPELGRLNRKQIATLVGVAPLNCESGILRGRRIIWGGRARVRAALWMGTLVAVQRNPAIRAFYQRLVASGRPKKVALTAAMHKLLLVLNALLRQRTPWHDAIQPS

SEQ ID NO: 370485 - protein, 350 aa, unidentified
MLIIGCDFHTRYQQIAMMDTVTGELLERRLGHENGEAHAFYRNLQGPVRVGIEATGPMLWFERLLAELGHELWVGDSGKIRASDLRKQKTDERDASLILELLLANRFPRIWVPTLAERDLRQLLWHRHKLVRLRTMLGNQLHFLAMSQGLCRKRKLFTKKGRRELQALPLGPWASRRREELLKLLDQLEPTIADLDRAVLAQAQLREDAVRLMTHPGIGPVNALAFVLTIGPVDRFRRSKQVVSYLGLNPSEHSSGGRRRLGAISKQGNTMVRWLLIEAAHHTVRCDAKLRQDYLRLKFRRGHAVAKVAIARKLAVRMFWMLRRGADYAQLVRTQGSSGATLMDKSPSLG

SEQ ID NO: 370486 - protein, 362 aa, unidentified
MPKSTTIIAFDQHAATTVAAILLPGHRTSALQSLTSDSPTILRFVERVRRQGPVQCCYEAGPCGFALQRALAAHQIPCDVIAPALIPRRPGDRVKTDRRDAGQLAILYRAGALTAIHIPTEQEEAARDLLRCREDIRADLLRARHRLSKFLLRHGRRFTATKRAWTTRHASWLQAQRWPLAALEQTHRAYVRAVDEAVGRLQAVDAELRDLLTLEPLRSRVERLRCFRGIDDLTALTIAAELGDARRFPSAPRVMAFAGLVPSEHSSGTKQARGAITKTGNAHLRRVLVESAWQYRHHPFLGPALRRRQQGAPTAVIDQAWHAQQRLHRRYRRLAARGKPTQHIFTAIARELSGFLWAALTH

SEQ ID NO: 370487 - protein, 372 aa, unidentified
MESIIYVGIDVHKDTYYLSSYLPEKGLIFAQTEMKADSKNVMKYLDKVSEMNDGAIVICGYEAGPTGFKFCRDLIRRNYNCVVMAPTSIAKTPRDKMVKTDKADSVLLAKSLAFHSYKQVVLPDENIEALREVVRLRHCAQKECKRAKQSFLSFLLSNGFSYPYGGKDTYWSRKFMLWVNSIHFTSEYLNLCKDEYLAEAVRMIQRVKTLDKKLEELQENEKIRDKVKSLKCICGINTLTAMTLVTEVGDFNRFKTAGNFASYTGLCPGSHSSGLTDRTTGITKQGNRIIRKLLIESAKAIGRSGAQKSVTLLKRQEGMPSEIINYADKASDRLRKRIRRLENHGMNYNKISAACARELACFVWGMMTNHIA

SEQ ID NO: 370488 - protein, 423 aa, unidentified
MAYRIVGIDVHKKKLAVVVADVEVEEEYQFERRWYGSNPAQLQLLYEWLMEQQVEEVVMESTSQYWKPVWEVLERHWKPMCQRREGAGRISGTLHLAQALSNRGRRGRKKDFRDAERLVKRLVSQELILSFVPDAEQRLWRTVTRTKYQLRRDRVRLQNQLEALLEEAHIKLSSLVSDLLGVSARRMLQALAEGETDPAALAALAHENLRATPAQLRDALGACTELNPVYRRLVRLALDDLQLIEQQIGQLDQEIASLLRQHQAAVERLAEVPGLGVDSAQQIIAEVGAKATTFASAKNLVSWVGACPGDEESAGVNRSKRSPKGNRQMRRILNQAANAAVKHKGSIFEIVYRRLVVRLGHNKTIGAIAHRLCQLIWIILHRGVRYEERGPAVSEKSKRLRTTRMIRTLRNLGYRVEPLGNPA

SEQ ID NO: 370489 - protein, 427 aa, unidentified
MSERKSLEIRVSVDVGSRSHQVAIGLSSGEVLEEFEIAHRVEGFEDLFSRIERHRKGNSYRVAVAMEGFNGWARPLDSMVRGRGYRLYNINNLKLARFKEIFPGAAKSDRIDARKGLELFQLRDHLPLAKEVLQEVVGTPHENEVLKRLSRRRRRLVDERVRVVNNLQADLQAVCPGLLEITKEAGNQWFLNFLISADTLPQLARLRRTTLLKIPSVGVKYARLIQDWQERAHFSEEVEWVSAMIQEDARRILELDETIKALEVKTAEVAETSTIAKLLRSIPGYGAICTSELAGEIGTIERFNKEGSLALYLGMATLDNSSGKYQGTKRPKHINTRAKAAMMTALDRHRKYVPQLQKYYEKKRAQGKSHNQAIRALGRHLCRIIYKMLKEKREYEVRPPKRDTQAKVTSRSSRIGQIGKKKISAKG

SEQ ID NO: 370490 - protein, 424 aa, unidentified
MGKFTKTLCISERKEYSIMEGPIITVDVSKGSCHYQPFIENGHPMRKPKQLSATIDGFQKLGQTIKDLEAKTEREDIPVIFEATGVYHRPLQKYLEDHKIRYYIISPLLSATYRKTDLHSNKTDALDCVHIAKAYYCEKGLRQYQAQPQEYKRLYQLSRLYESELVHLRKRKVSLRSMLDIIYPRIDRTFKGNQNLYDPIPMEILKRYPHPSLLLSHREDTIVKTVGHCTGHLKGYTERIVHKIYEKAKECYSGCEINDIEVVKLPSLIENVQEQKKKCDSLLKEMIEIARTCPYFASVVSIVGIGENLAARIIAELGDVNRFDNRAAIVAYAGLNPKIQQSGDIDGLHLKISKKGNKHLRCLLYLGAQCNYRLRKEDPLYEFTKKKRQQTQCPLSSKAAYTASAHKLLVIIYSLCKNGTLYHS

SEQ ID NO: 370491 - protein, 368 aa, unidentified
MNTVKFIGMDVHKKTITIAIIDQGRKKRPRIYGSIANQPEALDKFCRKMVSTAAQLHFVYEAGPCGYGIYRHLTHKGFDCMVAAPSMIPKKSGDRIKNDRRDAAMLARLHRAGELTAVYVPDARDEAMRDLTRAREDAVAAARKSKQRLNAFLLRNGLTFAGRTKWSKAYFGWLSDITMAYPAQQVALQEYIDTVHESLQRVNRLTDQIRQLVPDWRFAPVVAALQAARGVSLITAVTVLAELGDLNRFDNPSQLMAYLGLVPSEHSSGESIKKGCITKTGNGHARKALVEAAWAYRMQARVSRALLKRQQGVPDRVCQIAWKAQLRLCARYRKLTARGKSKQKVVTAIARELSAFLWAMVKQLQPVV

SEQ ID NO: 370492 - protein, 387 aa, unidentified
MPQPNDLSRSLATLEQDRTLIVVIEMSLSSWLVAGIVPGIERHPAKKLEPDEVALLQLLRRWSDEATKAGHVIARTVVAFEAGRDGFWLARWLRARGVEAHVIHPTSVAVSREHRRAKTDRLDTELLKRAFLGWLRGERDHCSMAAIPTLEEEDAKRPNRERESLVGERSRIVNRMKGTLARLGIRGFKPTLRKAPEQLERLHTPEDTLLPPNTLAELRRGMARLRFVADQIREIEETRLERLEQQPEEGAHAMVRLLARVIGVGIETADMLVHEVLSRNLRDRRAVARYAGLTGSPDESGIRRREKGLARSGNARVRRGMIQLAWRFLIFQKDSALAQWFRARTADARTGTRKTMIVALARKLLVALWRMVTVGEMPEGVILRTPT

SEQ ID NO: 370493 - protein, 340 aa, unidentified
MKTTTIGIDLAKSVFQVHGVDAAGQVTARKKLRRAEVLRFFEALPPCLVGMEACATAHYWARQISALGHDVRLMPPSYVKAYVRRQKNDAADAEAICEAVTRPTMRFVPVKSVERQAVLVLHRARELLVRQRTMLINAIRGHCAEFGIIASQGGRRAPELIEQARQAEVSVLPDLARSVLMMLADQLEAIAVQIHALERRLLVWHRQDQASQRLATIPGVGIITATALAATVVDPSAFRSGREFAAFLGLVPRQNSSGGKDRLGRISKKGDGYLRKLLVVGATSVIRRARTSTSSSASWIRALLERRPARIVTVAMANKTARIAWAVLARGDVYRAPTMA

SEQ ID NO: 370494 - protein, 444 aa, unidentified
MIRKVMDAIYQIVGGLDVHEETVVACRRRLIRDGQAELEIETFRTTSAGLRELLDWLKAWGVTHVAMESTGVYWIPVWNVLEGQFKLVLENAQHLKKVPGRKDDQIDAEWIAQCMQCGLLRGSFVPGTEVRQWRQLTRHRTKLVDQRTSVVNRIHSVLEQGNIKLSNVATDIMGVSGRAMITAMSKGESDPARLAALAKGRLKAKYEELTEALDGQLNENQRWMLKRLLEQVGGLEKEIEVYSERIGEQMLPYRRQLERLDTISGVGQRSAENILAEIGPDMDQFPTDDDLVSWGALCPGKNESGGKQRSSRTPKGNKWLKRTLTEAGWAATLERDSYLAALYRRLAPRRGKKRAIIAVARTILQSAWHILKKDVDYKELGGDYFEHLNEEKSTKYFVKRLEKFGYEVVLKPKQAEKARIEPKPKKIKKAAVERKPKKAPEATT

SEQ ID NO: 370495 - protein, 437 aa, unidentified
MRRKKFKANKSLNLQVLPVVNPNAAGIDVGAKEHVVAVPCDRDPQPVRTFQAFTPELHELAAWLKRCGIETVALESTGIYWISLYEVLEQHGFEVRVVNARHVKHVPGRTKTDVRDCQWIQKLHSFGLLNGSFRPDQQIRKLRTYMRLRDNLVVASTQAVHHMQKALFEMNVQLSNVISDIVGETGLTILEAIVAGQRDPKELAALCSSRIKASRETVAKSLHGNWDSALLFALKVALETYRFSQIKIQDCDCCIQHHLAQFESRAQVNNSPQNLKIQLHRVCGVDLTKIPGIKEQSAQIIISEVGLDMANWNTEKQFCSFLGLCPNNSISGGKVLRRATRKVYNRAADTLRLCAQSLTHSKTALGAKYRRLKARLGAPKAIVAMAHHLARLVYRMLRYGQNFVEQGIHQYELKFRLQRIKWLKKEARSFNLQLVPA

SEQ ID NO: 370496 - protein, 337 aa, unidentified
MQYFAGLDVSMEETHVCVVTRNGTVVYEAKVSSTPASIAAALARAPACRRVLFETGRMAPMLYHGLSRLGLPVVCVKSRQAYQALKSLATHKTDRNDARGLAHLARTGFFKPVHVKSLPAHAIRALIIARKKLVGQRVTLENQIRGLAVVFGVRLPRALSPAFIRQALQASEGIPGLSAAMRGLVAARAAVLAAVVAIDGDIRKMARASGACRRLMSIPGVGQLTALAFTAAVDDPGRFRRSRDIGAYLGLVPRRYQSGEVDYTGAISKCGDRGVRTLLYEAANVMLTRYKGQLKLKDWALAIAKRSTMRKARIALARRLAIIMHAMLRHGTEFKPA

SEQ ID NO: 370497 - protein, 338 aa, unidentified
MSIFAGLDVSDKTTHVCVVDADGAVLKRDVVASDPELLAKWLSKHCLGLVRVVLETGPLSTFLYHGLTERSIPVECICARHAKGVLAARVNKSDVHDAEGLSQLARTGWFKRVHMKASATHIDRAALRIRTQLITTRVAMGNQLRGLLKLFGLRLGAARTPGKRRERLAALYQQRPDLEPLFAPLVASMEVVEEQLRASNRLLESRAAEDAVCSRLMSVPGVGPITALTFTASVEDPHRFARSEDVGAYAGLVPRRSQSGERDVRGNISKAGDPMLRRSLYEAANIMLCRVQRPFALQQWGQRIAESKGNKRARIAVARKLAVLLHSLWVNETEFRWA

SEQ ID NO: 370498 - protein, 434 aa, unidentified
MEIIHNHSAGIDIGSRNIYISPGYSEVKVFGTFTCDFKLAASYLLEKGVQTIAMEATGSYWVILYDILTKDGFDVWLVDGRQTRQVPGRKTDVKDCQWIQQLHSYGLLNRCFVVQGDLKNVRGYQRLREDHLRSASMHINHMQKAMIEMNIRLPEVLAQVQGASGMAIIQAILGGERDPHKLLSLCHGSVLKNKSAEILAALEGFYTDHGLFALRQAYQAYQFYQKQIGECDTALNDLLCKINQNKDHFEPGPCKPIRHHKPQIDELGNHMLDLFAGRDATVLPGITDYSWLQIYSETETDLERWPSEKHFTSWLGLSPGQNDSGNSKKRAKKKGRPNAGQIFRLLAQTLLQSKKISFGAFGRRLRGRKGPMIALKALARKIAVQYWRLMVKGQEFVDQGIANYEMIMLKQKEKYVKKLAMELNLEIVDFNNRY

SEQ ID NO: 370499 - protein, 359 aa, unidentified
MGELSKVGMKTVGLDLGDRSSHFVVLDAEGQLVEEERVATRDQALRKRFSGCQRMRIALETGTHSQWVSRVLKECGHELIVANSRKLRLIYENRRKNDRVDAMYLARLARLDPQLLSPVEHRGPQAQKDLALLRSRDVLVEARTQLINHSRGLVKSVGQRLPRCSSEAFARKVLGAIPESLQPGLLPVLEMITSLTAQIKALDRRMDALADQVYPETKLLRQVTGVGPITSLAYVLILEDAGRFGKSRAVGSYLGLTPGSYKSGDSDPQMRITKEGDALLRRLLVVAAQYILGPFGPDTDLRRFGLRIAQRGGKNAKKRAVVAVARKLAVLLHHLWRSGEVYEPLYQETRKAARLGKIA

SEQ ID NO: 370500 - protein, 423 aa, unidentified
MEVLHRRVAGLDVHKETVVACVRLMVRRKPTRECRTFATTTEGLLALLAWLTASRCTQVAMEATGVYWTPVWKILSAGDFTLIVANAAHIKQVPGRKTDINDAMWIADLLACGLIRASFVPEEDIQELRALMRTRKQLVREQTRHVQRLQKTLEEANIKLDSVISDIMGVSGRRMIEAMIAGERDPHRLAGLAARGIKASPKVLYDALHGRLREHHRFLLKLHLQQWDALDAAIRQIDRQVAGQIARMDEEAADDASPFCELILRLSAIPGVSRLSATAILAEIGRDMSRFPTAGHLVAWTGLCPGQNESAGKRKSARLRKGAPWLKTMLVQCAWAAKRAKDSYYMAQFHRLRSRRGPQKAICAVAASILTAIYHMLNSGAPHRDLGADYFDRRSPEAKAKRLVTQLTKLGFDVKLQPLAVAA

SEQ ID NO: 370501 - protein, 338 aa, unidentified
MKNMHFVGLDVHKKIIAFCVKQMDGKIISQGTIKANRNALRLWVHSLPKPWVVALEATLFTGWVYDLLQNYALEVKVAHPQMLEAITVAKKKNDLCDAEKIADLLRCNLLPECYMQPKEIRELRRVLRYRSLIVREIVRMKNKISGLLMEAGIEYDSRKLHGQKYFHQLLDQIEISDELSQILKMSRECLEFLKSIEKRIVDGLKIHPEIKQRMERLTTIPGVGQITALTWILEIGDPHRFSSIKKAVSYCGLCSDQRESGGKQYRGPISKKRNKRLQTILIEAAKLAPLWNPQLREVYEREKRKGNKNRATLAVARKLVAYLLAVDKNKRPFKMKEF

SEQ ID NO: 370502 - protein, 472 aa, unidentified
MAVFCGIDWAEDHHDIALVDQDGALLAKRRISDDAAGFAAVLHLLADAGDSPEAPIPVAIETSRGLLVAGLRATGRPVYPINPMSVSRYRNRHSVARRKSDAGDALVLANILRTDLAAHRSLPADSELAQAIAVVARAQQDAVWARTAAHNTLRSLLREFYPALLAAFAIKRGGLLRPEARALLAAAPTPQVAAQLSLPRLRALLRRAGLQRGLDAEAARLQQVLRGDYLHHPALVEEAFGRQALALLRQLDTACANAEDLAAAATERFVEHPDAAIITSMPGLAELTGARVLAEIGDDRDRFADARGLKAYAGSAPVTRASGKSTAVLHRRVKNQRLASVGYVWAFAALTASPGARAHYDRRKTAGDRHVAAQRNLFNRLLGSCTTACTPARPTTKPPRSPQPHRHPMRAPLDKITAWDVFQTVEAATRCPSPTSSPWMRLSPQRGFSRAIRSTRARIGGAVGGRPGDRWG

SEQ ID NO: 370503 - protein, 343 aa, unidentified
MEQYVGLDVSQEQTSVCVVDGGGKVIWEGKCTSTPEAIAATLRTRAPEAVRIGLESGPLSAWHWHELRKLDLPVVCLDARHAKAALALQLNKSDRNDARGLAQIVRTGWYREVAVKSVDNHLVRSLLTTRAQLVRMRVDLANQIRGVLKPFGLIAGKGGGRPFAERVRALVAGGPLQEVAGALLAAWQAIGEQIAVLGRRLVTVARQNKAARRLMTAPGVGVLVALAYVSVVDAPERFAKSSSVGAYIGLTPRRYQSGEADYTGHISRCGDKLLRIYLYEAAGIILHRVPRWSALKAWGTRLARKIGTRKATVAVARKLSVILHRMLRDSSEFRWSAKEVQAA

SEQ ID NO: 370504 - protein, 410 aa, unidentified
MQALVERGCGLDVHQATVVACLLIVRKDGKVQKQMRTFGTTTQELLSLRQWLLSEGCTHVAMESTGVYWKPVYTILEGALEIVVANAQHVKKVPGRKTDVKDAEWIADLLCHGLLRSSFVPPKPIRELRDLTRYRRKLVESQAAERNRLLKLLETANIKLASVATDVFGMSGRLMLRALVEGKATPQEMAELAKGKLRKKIPELEPALEGKVEEHHRFLLRLQLDRLEAAEKDLAVLEQRIQEKLKPYEAQLTLLDEIPGVDWTLAAGIIAEMGVDMSVFGSVSQLASWAGVCPGNNESAGKRKSSRIPKGNVYLKTALVEAANSAAKAKGTYLRDKFYRLKARRGYKRAAVAVAHKILVAIYYILSHRVCYNELGDAYLDKRNKHQLTRNLIHRLERLGYSVTLEQIAA

SEQ ID NO: 370505 - protein, 385 aa, unidentified
MRSEATRAGETIVGGQVLYMALELSERTWKVLFASPAGRRRERSVAARDVAALVGEIAAAKRRLGLPAQARVVSCYEAGRDGFWLDRALRANGIDNLVVDSSSIEVARRARRAKTDRVDLVKLMGLLLRWVAGERKVWSVVRVPAAEAEDIRQLSRSIERLKGEHGRHVTRIKALLATQGLKLARIGGAGWGKRVGELRCWDGSALGPWLQRDLVLEGERLAVVAEQLAALKAERDRLVKEGREAAAVKARELARLGAIASESSFVFATELFGWRTFSNRRQLAGSVGLTGTPYNSGQSAREQGISKAGNKRMRTMLVEIAWCWLRYQPASALSRWWRERFANTGGRARRIAIVALARKLLVALWRYLERGVVPQGAHLKTRAAA

SEQ ID NO: 370506 - protein, 424 aa, unidentified
MTRSQLTPPEGILVAIDVAKARNEVLIEAPGLRRRRLSVLNTRAEHDRLIALLSNLGQPVTCGFEATGNDHRPIAWRLFQAGFAVRLISSVALARTREALHNGWDKNDPKDAQVMLHMIRIGATQVYQDPLAAGINDVQELSKTHDAISKAKTEVLHRILTHYLPLYFPEVDRFRHNSRSDWFFAFLDRFPTPASITALSKEAFVAAAWDVVGRKVAKAQLLGDIYETARSSIGLPVPPDAPAVSMFRLVIGEVRGLIQQRDAIEVTADALLTDNSDYKLLRRIPGIGPINALTILAEAGDLRRFSHHRQFLKFCGLDLATQQSGTFRGQTKLSKYGNARLRRTLWLAGQVAIRQRENSFRDKFERYIARDRHDADLRRKALTAITAKMARVVHAVIKTGDDYRPFVEEPVPGGRTPLNGAVRA

SEQ ID NO: 370507 - protein, 570 aa, unidentified
MIKNKNPYRGVWGDAGRHLRVFFIRAILYLATTLVAWEKSIMGNRRTRRKRKQHINKVQGQRLAAEFKGQDLSRVLVVAIDGAKKSHKALLADGFGEIITDTFGFPNDLAGAKMFAGSVRKAAVDINAFKIIVGLEPTGHYAENLVAYLLEQGFDVRQVNSFAVSREREAGLTWSKTDEIDLCAIGQLIINGKSSPLGHTEAIYDNMKYAARARRSTIQRTVLLESQIHAYMDRLFPGFLDRDLFSDPFGLTSMAFMARYSSANAACRAGATRIERWLSSRRGVSNPHEITQAVVELAQGALRRPADHEEALIEALRFRLREHDLLEEQIGNLNIRLAEYLVETPGIWLLAIDRVSVVSAAEYLGELGQISRYDGANQIIARAGMVPRETQSGMIGYSGGITKLGHPKLRYILGVIGHNLLTSNRYFQAFYNRLVDRGGKNERLAKTAVAGKFVRVSWAMMNLKGAFEAPTWCEDDLKKDIRTKMERFLKQFGASQIYRNSIGPRLDKVLVSGGQPSTSNSITGSHQLPSASGTHEEHDRASTKPIHIGSLIPVVLGQMAAEQDVEAHMA

SEQ ID NO: 370508 - protein, 377 aa, unidentified
MKDLSALQHFVGCDVSKDTLDFALYERGVAYTGFKHIRVDNSTEGFQAMRKWLRGLGVGMSDTVIAMEHTGYYSVALSEWCAGKKITFVLLHPLDVKNACGRGRNKTDKADAQFIADYAYTMREKLAPSQPEPPVIGRLRQLRNERHMAVKTRASFLNMARTLTDKSALRRVRKTVETLTAQISAIEENIRQVVESDVLVAENYRLLTSITGIGLVNALATIVATGNFTRFQTARQYAKFVCVSPLRRESGTSVRDADHVSKAGHSELKATLTEAARSAINHDGQMRAYYGRKRSEGKSYGCVMNAVKFKLICRMFAVVKRQTPYVALELFRGTPQNSSVGERRAARGRTTGPDERIRPQQPLSSNVNNIERNICKI

SEQ ID NO: 370509 - protein, 341 aa, unidentified
MDIDILGIDQARRVFQLHGADRRGHALHDSKVLRAELLGAVRKLQPRVIAMEACSSAHHWGRQFQAMGIEVRLISPQYVAPFVKTNKNDANDAAAIVEAASRPTMHFVTVKSAEQQDMRAVHRVRELLVHQRTALINQVRGLLAERGVVMAQTPTAFKRALPSILEKCEGELTSICQTLITEMLEQLRTLEERIARTNQWITSCLKSSALCRKIEAIDGVGPITATAVVAAVGDAKEFKNGRHLSAWLGLVPRQYSSGGKSRLQGISKRGDIYLRTLLIHGARVVLRYAIGKADARSLWLQDLIARRGYNRAAVAWANKNARVIQVLLSGTENYRSPAVPA

SEQ ID NO: 370510 - protein, 403 aa, unidentified
MEGFAGVDWASEEHALCVVDEAGGTLAGEFFTHDEAGIEGLIACMRGLGVGRVAIERPDGLLVERLLGAGFTVLPVHPNKLKATRSRYEASGGKSDGFDAFVLAELARTDSHRLRSLAPDSDETKALRVLTRSREDLVGARVRLANELRAQLDAFWPGAARLFAEIDSAISLAFLERYPTPADARSLGEKRLAAFLARNRYSGRRSAGELLERLRVAPQGRAGDVEARARRSVVLGLVAALRPIVEQIRELTSQIADAVRAHPDGQVFLPLFKDPKSSITAARLVAEIGDDRSRYPTAEALAADAGMAPVARESGKRKVAGFRWACDKRLRDAVACLADATRHHHPWARGVYLSARGRGLDHSHAIRVLGRAWLRVLWRCWQDGVAYDPAKHGNLQRLQIVGG

SEQ ID NO: 370511 - protein, 375 aa, unidentified
MGNHSEAFVAFDTSKLRNAVAIAEAGRAGEVRFFGEIENTEAATAKLVKKLAAKYQHLTFCYEAGPTGYEVYRQIKSLGHECIVVAPSLIPKKPGDRVKTNRRDALSLAKLLRAGELTAVWVPDRGHEAMRDLTRARETTMMDLRSKRQQISAFLLRQGLHYSEGKKTWTKTHMNWLASQKLEYAEQRLVFEEMMLAMRQAQERLERLAQAIRVAVPDWSLAEVVTALMAMRGIDLISAATFLAEIGDPSRFQHPSELMGYLGLVPSENSTGDKIKRGPITKAGNRRARRMLVECAWSYQHPPRVGQEKQEKVAAAPRAVREIAWKAQCRLHGRYRALVRRGKLKTVAVTAVARELAGFIWAVSRAITTARAVAK

SEQ ID NO: 370512 - protein, 344 aa, unidentified
MHNVGIDVAMKELVVAVSEPKKKKPVKTFANTPDGHKALIKYLKPKKYQLRVCLEATGTYHLDIAILLSETDNVELMIVNPRASKNFADALNVKHKTDTEDAEILAEYAVRMPFEPWVPPGLTHRTVRQYARHLQALTHSKAQTKCQLHALTASKHTSKEIIQSTQTVIEFYEQQIEKLRAEVIKLIRDNEEINAYFERLLSIKGVGEVSAIQIMGELLMLPKDMTIKQWVAFAGLNPRHFQSGSSVSRKPRISKSGNRYLRMALYMPALTATKCDPHVRGYYQHLIEDNGLKKMQALCAVMRKLLHAIYGMSHSETMYDSKRFYRQPANIAQGKQSEPLALAA

SEQ ID NO: 370513 - protein, 354 aa, unidentified
MPQKLNTAIVVIGIDIGKNWFHVVGHDVRGAIVLRQKWSRGQVAARFANMPPCLIGMEACVGAHHLSRRLKALGHDARLMPAKYVRPYSKGQKNDFRDAETITEAVQRPTMKFVATKTADQLDLQALHRVRERLVSQRTGIINQIRAFLLERGIAVRQGQRFLRAELPRILAAHFDVLSPRMARLIEDLAGDWRRLNERIEGLSGEIETIARQDAGCERLMSVPGIGPIISSAMVAAIGTGEAFSKGRDFGAWLGLVPRQMSTGGRTILGKISKRGNRYLRVLFVQAAWVVLIKPKSWERHGLKSWIEAAKKRLHPNVLAIALANKLARIAWGVLAHGRDFEARTNTNATAQAA

SEQ ID NO: 370514 - protein, 348 aa, unidentified
MRNYVGLDVSLKSTSICILDEKGKRIQEGEVESTPEAIHEFLLNTSLEIELIGLESGNLTHYLKKGLLKKEYHVAVMESRKMAAILATIINKTDKNDARGIAEALRVGHFRECVHRSDDAVEIRSLLHLRQTAIEERTHVINSLRGHLKVYGIKFGKKAGKTFRKMVEEAIKDLRLSIQRAIQSLLNILDILDQEIKALNREVEAVAAADEDVKLLQTVDGVGPITALAFKAEIDDPKRFEDSKDVAAYIGLTPKQYSSGEVHRQGSISKKGSKRTRHLLVEAASALLTRCKAWSKLKAWGMKLQKKKGNRKAIVAVARKLAVIMHRMLITKKPFERSPGKIEQLKAA

SEQ ID NO: 370515 - protein, 355 aa, unidentified
MNAIKYIGMDVHLATISIAVLDAKGKLLMEVTIATQAGALLDLIRGLSGTLHVTFEEGTSAHWLYTVLEPHVGKVVVCDPRQNPRRLGEKKSDRLDARKLAEGLRMGSLKPVYHGNALVPALKELVRSYRTLVSDTTRVMNRLKALYRGRGIGCAGTRVYSPRFRDQWREQLQEPGVRGRADLLYKQLDLLLPLRQEARAAMLAESRKHPAHKILCSIPALGPVRVAVLMALMQTPHRFRGKRQLWTYSGLALVTRTTADYQMVDGHVARSRKPALVLGLNANHNHTLKGIFKDAAASALAHPGPFKDFYTTRVAQGMKPELARLTLARKIAAITLTLWKKGERFNAEHVKTQAA

SEQ ID NO: 370516 - protein, 497 aa, unidentified
MPNKSTIYSRCNPQLLKLFETAGHPAKVLCVALDYAKAQHTALICNGLGDLLKPSFAIDNTAQGAAKLLSEVRACVKPRKIRPEHVFFGGEDYPSYAENFLRHLRQEKFLVVRVNAWEAKQQRDNFQASSDSLDLLGIARCCLHRRGESVRDLPEAYPNLRIATRDRDKLVRIRTAVSNRIHSYVDRLFPGFLSAGQSGLEPFSKASLELMEDRFSPAQLSRRPRQALAEWLGRHGVTQPHDTADQLKRLAKNALEPAPEQTLMLQQTLAQLVGLYRDLEQSIARIDREVAHWLARTPGAWLTSIPGFGITLAAGWTAELGPPSQWHSVRQLCSYSGVVPKTKQTGGPQKEPVVGMVQQRCNKRLKNVVLQAVEKVIQYGPEELRRTAAELEARGAHTEFALAKRLVRLGKYLAVTGTVYRPKAMMDPHTPKAALSTHYQTVWEKLLPKWREKADLRDVFAPEHPLGQWRKMVQGLYALELRLPQQKAAQKSSAVAP

SEQ ID NO: 370517 - protein, 407 aa, unidentified
MNAVGIDISKGKSMVAALRPMGEVAFLPQEFLHTEVGLEQMACAIIALGEDTRVIMEATGRYHEAVAAALHEYGIYVCILNPLLIKQSGGGSIRKVKTDKADAMKIAKYGLDNWTDLQEYTPMDTVRQQLKLCSRQYNLYMKTVVSLQNNLISLTDKTFPGVNELFSSPDRADGHQKWVDFAITFWHCDCICRVSEKAFTERYQKWCKRKGYHFSAEKALDIYAASCGHFTTLPKNENTKLLIVTAAQQLLQGKMTLATLRAEMTRLASQLPEYETVRAMYGVGETTAAQLMAEIGDVRRFPRRSAIVGFAGVDPGLDESGKHSAKSVPTTKRGSPHLRKTLYQIVYTYLKKSPADEPVYQFLDKKRAEGKPYFVYMTAAQNKFLRIYYARVKECLEAFDTEAATRA

SEQ ID NO: 370518 - protein, 336 aa, unidentified
MMKLYGEIDLHSNNSVFNIIDENGHVVLKQRIANNIENILQLLEPYADRLSGLVVESTYNWYWLVDSLMKANCTVHLANTAAIQQYSGLKYGDDNSDANWLGNMLRLGVLPESYIYPKKERMVRDLLRKRMQLVQQSTQNLLSIQGLYQRHLNKKLTGDKVKQLTAEQLAMDFMDLNVRLAVQGNLAIQQCLTEQIKAIEKSLKKQLKLKDAFIQLTSIDGIGLILALTIMLETGDISRFSKVGQYASYCRCVNGKKKGKTNTKNGNKYLAWAFIEAANFAIRFNSTVKKYYQKKMAKTHMMVAKKAVAHKLARACFYVLRDQVEFDVNKAFGYST

SEQ ID NO: 370519 - protein, 367 aa, unidentified
MKKVSTAVTKQSRNISQQPLTIGLDLGDRNSWYCVLDETGRIQLEERVRTTAKVLQEVFGAMPRSRIALEIGTHSPWISRLLSELGHEVIVANARKVRLIGESRKKDDRLDAQTLARLARIDPQLLYPVKHRSEQAQADLMTIRARAGLVRARTALVNTARGLAKSYGERLRGCNVRDMDPEKAEGLSPELQAALEPLLNAIESLSERIVEYNDRIENLAQQSYPQAALLKQIKGVGTLIALTFLLTLEDPHRFRKSRDVGGYLGLQPGRRKSGESEPQLHISKEGDPYLRTLLVQGAQHILGPFGIDCDLRRWGLKLAERGGRNGKKRAIVATARKLAVLLHHLWVSGEVYEPLHNSSRVTVAAAA

SEQ ID NO: 370520 - protein, 379 aa, unidentified
MQSIKTWAGVDVSARMLAAHRLREGKQEGREFANDAAGHRDLLKWLGKRARVGVEATGVYHLQLALTLQAAGVELMVVNPRVAKDFARALSNRSKTDKVDAWTLLEYVQRMAFTAWQGPRPSVLELRELSRRLSELVHAAVDEKNRLHARNVAAISSTVVGDVKAHVAQIERRIIQIEKAAITVIDDDDDLRKQFQILSGITGIGRRSAILLLGELAVLDPAMTVKQLVAHAGLDPRVYESGTSVEKPARISKVGNARLRAILYMNALSAVRHDRGARLFFAQLVARGKKPMQALVAVMRKLLHGIWIVLQRRVGFDSSVLFAASLAKAESFDSAAAANQPEPSQDHPQGRSEAEELREQLDPGSAEATRSRKRRSKAA

SEQ ID NO: 370521 - protein, 319 aa, unidentified
MGKISQPRIVGIDVSRDWLDIHCLPEGKRARLANKLEGHEQVAQLALELGALVCFEATGGQEWRLWSTLDGAGIATRQLPPAQIKAFAASRGTRAKTDRIDAELIARFMAFRPDAGRVLPHEKLRLLRALTSKRGQVVETRKRLLAQMKAHGKLGSADMFGAMDAELKGLLDHQIAELEMRIEQIMASDDNLAATAGILRSVPGIGPVASTMLIAEMPELGQLSGEQAAALAGLAPIAHDSGAMRGKRAIGGGRRQLRHVMFQAALVASHHNPILKPFADRLRAAGKPHKVVITAVARKLVTIANALCKSRLQWTHQAA

SEQ ID NO: 370522 - protein, 357 aa, unidentified
MTQVKQLDFTGTTIFTGVDVHKKNWRVNIQDSEFELEDFSQNADVVLLHKHLNGKYPGATFKVCYEAGFSGFSTQRWLNSHGIDCQIVNAADVATTDKEKRQKTDKIDARKLCEHLQTKKMKGIYVPSLQWEHGRSLTRVRARIVSNQTRCKNRIWQLLYFSNLPLPKGYEAGQYWSRNFIKELQNIDCGTEELKITLGLYIKDFLQTRALLLEATKAIRKLCKQPEYQKEIAFLRSIGGIGEINAAVILFELQDITRFKRFDNLCSYVGFVPNTSDSGETKRIKGITNRCNHYLRASLVESSWSVIRKDPALLMKYKTYSRRMDKNKAIIRIAKHLLSRINYVLKNKKEYVSGVVA

SEQ ID NO: 370523 - protein, 346 aa, unidentified
MEHYVGLDVSLKLTAVCIVDRTGKIEREGVVHSDPEAIAAFIKSNAPHVARIGLETGATSTWLWTELNRLGLPVICIDARHAKAVLKMQINKSDRNDAVGIARIMQCGWYKEVRVKDLDSHAVKALLVSRALLVKIKRDLENQVRGLLKNLGLVIGRAKMNAFAWRAAELTEDRPELAAAVTPLLNARVAIERQIADLDRKVLKLARNNARVQQFMTAPGIGPITALCFLATIDDPKRFRRSRSVGAYVGLTTRRYASGEIDWTGRISKCGDKMLRSYLFEAANVLLTRVAKWSALKAWGIRLAKRSGLRKAKVAVARKLAVILHRMWVDGADFKWSSKETADQTA

SEQ ID NO: 370524 - protein, 408 aa, unidentified
MEVLYPRCAGLDLGKDALVACVRIHGREVQQECRTFGMTTRELLALSGWLTGYGITPVAMEATGTYWKAVWHLLEPAFALVLANAAHVKGVPGRKSDVNDAMWIADLLAHGLIRGSFVPPEPIQDVRDLTRTRKQLVREIAQHTQRIQKTLDIANLKITGLISDVLGVTGRSILRALIAGETDPVRLADLARGTLKAKRAALIEALTGRVTAHHRRLLKLHLHLIEQLEAAVAEIDQQLGETLAPFREAVTRLDGVPGINTIAAQAILGEIGLDMTRFPTHEHLVSWACLCRRLDDSAGKRKSTRTRKGACWLKTVLVQCAWAAVRTKDSYLRAQFLRLRARRGPKKAIVAVAASILTAIYYIVRDGVEYRDLGGRYFETLDQAQITKRLVQRLERLGYRVELQHVAA

SEQ ID NO: 370525 - protein, 481 aa, unidentified
MSQPKKHSPKPGQEKPAAGEGKRGGKRKGMCLEDRPILEPNAAGIDIGAREIFVAVTPDRAEDPVQVFSTFTEDLERMAQWLVSCGVSTVAMESTGVYWIPLYDVLEKHGIRPCLVDARGMKNVPGRRTDWHECQWLQFLHSVGLLRAAFRPDGEVCAVRSLMRHRNDLVQMTNQHIQHIHKALTQMNVQIHHVIDDITGVTGSAIVDAIVAGQRNPLELAKLRDPRIKASEETIVKSLKGNWRPEHLFTLKQSRQMYRHYQEQITACDAEIEKMLVAFQPRVDPQEKPLPPDRKKKKHRARQKKGALNTGFDLRTESYKLFGVDLTQIPGLMLMVLTLFSEVGRDMSRWKTAAHFVSWLALCPDNDITGGRVAWRGMRKVHNRAGELFRMAAYSLHHDRSPLGDYLRRMKSKLGPPGATTATAHKIAIIFYTMVKKQVEYDATLWAERDDQREKRFEAKIKRQAQQLGYKLVPIEEEPAA

SEQ ID NO: 370526 - protein, 386 aa, unidentified
MNNYTIYREHCSVFGMDVHARSVTVKGFEWSSGKVERKRFSDCPSAYDIAAWMRANFEGPYYAAYEAGGSGFSLCRDLRGIGIDCDVIATSSIARSAKDKKGKTDSRDASRLLAELLKPDDEGCTSVWVPPYEVEAARDIARAREDAKQIVADTKQRLRALLLRHGYVWNEKTASGNRVKSWGTRFNRWLDGIALEGEGAREALASYRESIRLNEELVAHLDSQIATLCAEPRWKPYVDALVLVKGIDTRTAFLTAAEFGRFSRFRNGRSVTSWIGCAPSESSSGEHRAHGRITKCGNSHLRRALTEGASTVRRFNKNMKQPAAGHEVSEELRVMARKATHRVHKRYASLVARGIHANKAKMAAVSEMARWLWAIGCVVERNEAAK

SEQ ID NO: 370527 - protein, 362 aa, unidentified
MQKVDRSKTLFVGIDVHKETHTIVGITPFGEKILELTIENTAKDFNGLVEKVDTKAKKMGLTPCFGLEDVQSYGERLSSFLTERSLPVRSVAPVLVDHRRSKKTHPEKSDSLDAQGVAEVMIQKIDKLPVYTLTEKEKKAKQIRELSLEREMLVKERVRIKNQLHVLLYRIHNNDYREKFKDPFSLKAVRFFLRSMPRNIDTILKRRTKRALRRLLDLRKEIKETEEEIAMLLEENGYTLSTASGCSTVIAAEIIGEVKDISRFHSPGALAKYAGCAPREHSSGKTVRWRKTRSGNRRLNRAFHRMALSQISRSGNERAKSYFQRKVSEGKTKSQALVCLRRQLVNVVWMMMKYNAQYRLPC

SEQ ID NO: 370528 - protein, 401 aa, unidentified
MNTTTMLYVGIDISKDKSDICIKDVKGNDLIQRFKITNNKADLGYLYETIERIGSKTTGSIDVVFGMEATGIYSLPLYSALKRDGYKVKLYNPIQTNGFRKMNIRKTKTDPIDSAIIADMLRHSEPPQVSDLQDLNLYQLRELVRIRHRLIEKQTLCKVQLVRNIDTIWPDYESVMKTVFGTASIAILKKYSVPSKVRAKSFEEFYELVKKASRSKISQSKAEEIYKHAGNILTIPELESIISIEIKAIILQLELYDEQIESVEFKMDQMMKQIDSKIMSVPGIGEILGPIILGEIGNVDRFSNVKKLIAFAGLDPVVSQSGRFQNISGRISKRGSPLLRQALFLAANVARQNDDNLKRFYDKKKNEGKHHFSALNAVAAKLLRIVYWVLRNNKEYQTQVN

SEQ ID NO: 370529 - protein, 423 aa, unidentified
MKSPNTQTFSAYVGIDWADTKHDICLQESGSDLREFGCIEHQVECIDEWAKSLHQRFGGPIAIALELAKGPIVYALQKYDFLVLFPINPLTLAKYREAFKPSRAKDDPSDAELALDLLVRHPERFAPLKAQSVAMRTLISLTERRRELVNDKTRLTNRLTNTLKQYYPQVLEWFDQHDTVLFCDFLTRWPTLLQAKRAHQASLKAFFHAHNAHRPKLIAGRLAAIKGAVPLTQDPGVIVPCRLHAMVLIEQLRVALQAIEQFDRHIAELAPTLPDYRLFAGLPGAGPHLAPRLLVAFGEDRQRFQRAEELQKYAGIAPVTQRSGKKSWVHWRWQCPTFLRQTFVEWAGQTINKSFWAGAFYYQQRAKGSTYQAAVRALAFKWIRILYRCWMARTPYDETKYLNALKRRQSSLLNNLVPNPQNA

SEQ ID NO: 370530 - protein, 411 aa, unidentified
METLIRRCAGLDVHKASVVACVRVIDENGELLSFTQSFGTTVSDLLKLNDWLASYAVTLVGMESTGVYWKPVYTLLEAEFECWLLNAQHLRNVPGRKTDVADAAWIAQLVAHGLVRPSFVPPKEIRELREVTRYRKTVIQERSREAQRLHKTLEGSGIKLSCVAADILDVSGRDMLQALVAGTHDPDVLADLARGRLRKKLPALRNALMGWFSPTHRILVSELLAHIEYLDESIERLSGDVAKMIAPFAAAIDLLDTIPGVDRRNAEVILSEIGPDMSRFPSSGNLASWAAMCPGNNESAGKRFSGKTRKGSKWLRVALVESAQAAAHTKGTYLAAQYARIKGRHGHKKAIIAVAHSILVIAYHILQRGQPYNELGGDYFIERQNKDAYQRRLVKQLERMGYEVALTTHAA

SEQ ID NO: 370531 - protein, 348 aa, unidentified
MRGAVHVQITTIGLDIAKNVFQVHGIDASEKVVIRKQLRRSQVLAFFKALPRCLVGMEACATAHYWARELTKLGHQVRLMPAKDVKAYVKRNKNDAADAEAICEAVRRPTMRFVQVKSAEQQGQLMPHRVRDLLMRQRTQLINALRAHMAELGIAAAQGREGIKELLKIIASEEDARLPVDAHVSLTVLAAGLQAVQTLIGSVEKRIMAQHRSNEASQRLETIPGIGIVGATAIAATVTEPKAFRSGRDFAAWIGLVPREDSTGGKHKLGPISKRGDRYLRRILVVGAHAVLKQARQKPEKYPLLTQLLARKPFKVVAVALANKMARIAWALLARGGTYRAPALTAAA

SEQ ID NO: 370532 - protein, 343 aa, unidentified
MEQYAGIDVSLESASICVVDSIGRIVREAKVVCEPEALIAWFTKLGVSMARIGLEAGPLSQWLYARLREAGLSVELLETRHVRDAFKAMPVKTDRTDARGIAQLMRLGWFRPVHCKSLPAQELRAILTARKLVQNKRHDLEMSLRGILRGFGLKVGQTTPRNFEARVRELADGQQTLLVVADAMLLARAVLVEQLGKLQKRLVSLARQDTRARLLMSTPGVGVLVALTYVAAIDDPARFRSSKAVGAHFGLTPKKYQSGETDVTGRISKIGDASVRTALYEAANVILTRPVRGSLLKSWAMRVAKRTGMRKAKVALARKLAVILHRMLANGSAFVAGKAAAKA

SEQ ID NO: 370533 - protein, 429 aa, unidentified
MQNESTPGARGPVFCGVDTHADSHWLCVLDWRGRKVLSRRFPADAAGYEALAGAIAAAGEPACVAMEGTSSYGAGLTRHLASLGMPVREALSPARMQRRRPGQGKCDEADAERAARAAMSGSKLGTPKSQDGWVDGVRCMLAARSGAVKARTSAINTARSLLTTAPEGLRSRFRGMAGPRLMEELPSVRAEGALGAALGALADLWAAARDAALDMERAIEASLEENCPALLAMYGCGPVSAAKLAVAAGDNPGRLRSEASFAAICGACPIPASSGKTVRHRLNRGGDRQANSALHEIARQRVMRDPETAEYAERARARGKSDREVMRCLKRYVAREAYRALMRPHEIRRPEDASELVAARRAARVSQVRAASILGTSEKYISMLERGQRELKPIRRAYEAWVEAGLPLDWDRQAFEAERKMNSKKHLAK

SEQ ID NO: 370534 - protein, 341 aa, unidentified
MDEYIGLDVSMKETAVSIRRAGERIWRGKCASDPSIVAELIRKRAPSVKRVVFETGPLSVWFYHSLRIEGLPAICIDARHAKAALDMATNKTDANDADGLAQLAEVGFFREVRVKGFDSMLTRTLVAARTRLVRITTELSNQIRGVMKTFGLLVPAGKGSIFEKNVRSLLADQDRLASIVLPMLEAWRGIRVRAAELGRQLVRDARLSRSCRILMSIPGIGAITATSFTTAIEEPDNFRKSRSVGAWIGLTTRRYQSGEVDYDGHISRRGDRSLRGLLYEAAAVILTRSSTHSTLRTWGLQLRERIGFKRAAVAVARKLAVIMHTMLKTGELFNPNAGAAA

SEQ ID NO: 370535 - protein, 315 aa, unidentified
MNNQTHAYIGVDISKRTLDICINPINKFYKISNAEDAIEEFVEELKQFDVKRIACEATGGYEKPLAKVLKKNGYTLWIVDPRRIKGHIVATGCKSKSDKIDASKIAEFSSKNNPTYDSTNKTENQELLHALNNRRMDLTGMLASEKTRLKDPSNVLSRSSIQNVMQILENELKAIEIQIKNLVKKDEELAAKSELLESIPGIGAISAALLLSSVPELGTITNKQIAALLGLAPFENSSGNYVGKRKIRGGRRIPRNMLYMCALSAIKYHLPFKQFFDRLIATGKAFKVALVAVMRKLIVLANVLLKKQQMCYTFN

SEQ ID NO: 370536 - protein, 356 aa, unidentified
MSYEVKYIGMDVHKEAIVIAVQNESGKLVMESVIETKASSILQFLHGLRGELHVTWEEGTWAAWLYDLLQPQVQHIVVCNPRRNALLKEGSKSDKVDAGKLADLLRTGMLRPVYHGENGLRTLRELGRSYQNISKDLTRVMNRRKALYRGWGIPCAGTQVYAARAREEWLSKIPQAGVRRRAELLYQQLDGLQALRREVRPELLAESRKHKAAKLLRQIPCIGPIRAARLIGLIQTPHRFRSKRQLWTYSGLGIETHDSAQYRFVSGHVQRSKKPQQVRGLNRNHNHEMKEIFKSAATRASCGRGPFHDFYTGLLAKGMKPEMARLTLARKIAAITLTLWKKEERFDVEQLKTQAA

SEQ ID NO: 370537 - protein, 371 aa, unidentified
MADYREAFVGIDVAKLKNAIAVAESGRDGEVRYFGEVDASDASMRRIIQRIAAKFDQVHFCYEAGPTGYGLHGLIQSLGHECMVVAPSLIPRKPGDRVKTNRRDALALARLLRAGELTAVWVPDEGHEAMRDLVRARAAAVETLRVHRQQVSAFMLKHSRIYPRKKGWTMRYLCWLQEQQFDHPAHQIALQEMVEAVRLSKERVERLEKVIEEFIPTWSLAPVVRALQTLRGVDLIVAVTFATEVGDVTRFESPRQLMGYLGLVPGERSTGETVRRGSITKAGNGRVRHMLVESAWTYRHPPKVGARKLYRMEQAPPKVREIAWKAQSRLTARYRTLTGRGKRTTVVCTAIARELSGFMWAVAREAQSIKS

SEQ ID NO: 370538 - protein, 435 aa, unidentified
MKVIRENAAGIDIGAKKVFVYVEGQEVKSFYTFTEDLEQARDYLLKFKTRTVAMEATGVYWNILYELLEEAGIDVWLVDGRQTKQVPGRKTDVKDCQWIQQLHSYGLLNRCFVAEADVKELRSYQRLREDHIRSASMHVNHMQKALTEMNIRLKEVLNQIHGVSGLAMIEAILRGERNKETLLKLCHSSVIKNKKEEILKSLNGRYTQSGLFALQQAYDGYNFYQRQILQCDQKIDEIIKKMGKEDKTDKNQNPKKARKAIRHNKPNIEDLGKYLINIFGGKDATVLSGITDYTWLQLLSETGYDLSRWATEKHFTSWVGLSPGQHWSGKMKKNKKKAGRPKAGQIFREIAQSIITSKYIALGAFGRKLRARKGPSIAIKAMARKLAVLYWRVMVKGLDYVENGIQKYEDQLLAQRQKTLLRLAKELNAQVSYNV

SEQ ID NO: 370539 - protein, 392 aa, unidentified
MIFVGIDIASEKHDYFMIQAETGLVFSSSSITISNSEDGYKKLHNDITAFCGATDDSKVRIGLESTGIYHTNIIHFLISNDYEVMMINPILTNMARKAAKVHSPKNDNLDAQTICKYMIDNSDKFLPYTTSLYHSEALKSLSRKRFLIVEDLRKAKLTVNSLVQIIFPEFKALFSNIYGDSAIAILKAYGTPIALAKARLNKVASLLHGRCKCTAEQLIDAAKRSVGISAPHYAFQLSDAIAEMEHIQNRIAGYDAQIKAYVDELCPNLLSIPGVGYVTAGLIAGEIRDIHRFHSAESLVSYSGIDVTVHESGKFKAKHLIPSKKGSKYLRYALFQVSRIIWQHDPVFRDYYEKKQSEGKHYYVILGHIQKKLTRIIYSILKNGTTYKPLYT

SEQ ID NO: 370540 - protein, 311 aa, unidentified
MRDITQTAGIDTGKKKLNLGFWPKAERLVVDNAPEDFERLAAVLDKHNIKRVGIESTATYHLAVSEFLRARGFEMIVLQPLQVKAFAKVHLQRAKNDKMDPEMVAGCAAIQTKVHTPHSPEILRLAEHLTFIEQCDDNAARLKTQLERFTNEQYRKKIKQEIARFRLMVRRELKMLEKELRLNRLLSERLDLVLSIPCVGLRSALATLIRMPELGTLSREQAAALLGVAPMDDDSGDHKGKRFIQGGRARPRKTLYMAAFSGALHHNPQLKAFYLRLIKRGKEHNLAVVFMVACMALRATFSHASAWVRGK

SEQ ID NO: 370541 - protein, 389 aa, unidentified
MPTMTYPSTASEQTYIEVTGGVDTHKDTHTAAALDASGRLLGHREFAATAAGYAALLAWLGTLGQLVRVGVEGSGVYGAGLARFLQAAGVELVEVDRPDRKTRRWQGKSDPVDAEAAARAAQAGRASGVPKTRGGKVDALRALRVARRSAVAARADAQRQIKALIVTAPDALRMTLRGLGDRELIAHCATRRPDRAAVGDPTVATMLALRALARRHQQLSVEIDELDALIGPLVTAINPTLIGLSGVGADVAGQLLVTAGDNPQRLRSEAAFAMLCGAAPLPASSGRTHRHRLNRGGDRQANAALYRIVLCRLRWDLRTHAYALRRTTEGMSKPEIIRCLKRYIIREIYTALLNPQPSSVPAITSTAPEESTWSARSAARTNDVDTDKR

SEQ ID NO: 370542 - protein, 383 aa, unidentified
MNYSAIDYHKKNSFISTCNEQGERIAEAKICGNDPSAFARYFARLGEGPGKVVVEACWNWSWLHDVLSELESIEEVVLAHPYKTRVIAEAQIKSDKLDARILSQLLRTKLIARAHVPSKQTRQRRLLLRQRMFWVRLRTMVRNRVHALLARQHGLTLPQRADLFGSGGMKFLRSVQLEGSEAKLLGQDLEVLEQLELQIKQSEKEIRRQMGQEPEVERLQSIPGVGIVLSAVIAAEFDGAERFQSNTKLWAYCGLAPSTRSSDSHTWHGPLLFRCNKWLRWAFIEAAWIAIQHSAYFAAIYQRQLTRGKIPNKAIVVVARRLCEIAWKVLREKRSFSAQPPPRQANPFSRSPSRHSGGAYCKQYRLAPSLSIGDRESNPLPCG

SEQ ID NO: 370543 - protein, 402 aa, unidentified
MLFVGIDWASDHHDLAVVAPSGEQLLKARVPHSAEGFETLHAKLSALDVPPSEIAVGVEMHEGPLVLWLLDQAYQVYGINPKVADRARDRYSPSGAKDDSRDALSLADLLRTDLARLRPLRREEPQTGLMRQYVRLREDLVQERTVHKQRLGAHLQQFAPELQALLSPFRTGWALALLLTFPTMRRFVAAKPSQLRTLARKHRMTSTTLQSLLDLKSKPALPVPEYLDAPHAFEVEHRVLAIQQLDEAIEQLDHKLEDLISNHPDANLIASLPSGGAATRGALWSGLQHGVLLCRDADELAARWGAAPVTFQSGKSRNVRQRRACDHTQEQYLLWFSFATSRRKDCWAREYYQLKRADGANHYSALRCLCRRWTRILWALFTKKVAYEESAVRRPIHAPAPV

SEQ ID NO: 370544 - protein, 316 aa, unidentified
MKKSVVQNINVGEDVGKDFLDIHIRPLGEYLKVSNDKKGIGEALKRLRKLTIVRIVIEATGRYEMAFVSACAKAELPFSVVNPIHVKRFAGAIGRKAKTDKLDAALIAHFSEVIQPALSTLKPENIQKMADTVARRNQHLEMQTREKNRLQIMPKTVQSSIKAILTVLKKQIQKMDDELADLIESCPEYQAKSELVQSMPGIGKVSAAALISYLPELGMMNSKQVAALVGVAPMNKESGRYKGKQVTQGGRHQVRTVLFMAMMSAMQCNAKFKATYERLVAAGKPKKVAIIACVRKMVVILNSMVRDGVMWEEKAA

SEQ ID NO: 370545 - protein, 406 aa, unidentified
MIMNAVGIDVSKRKSTVAVLRPGGEVLMKPFDISHQSADFQILTRKLKDLDGETRIVMECTGHYYEPVARELSQAGLFVSAVNPQIINNFQGQNNPLRKVKTDKADSVKIARYTLDSWANLKQYTLMDELRSQLKTMNRQFDFYMKHKTALKNNLIALIDQTYPGANTYFDSPARDDGSQKWVDFLATYWHVDCVRKMSLNSFTDHYQKWCCRKKYNFSKAKAEEIYGIAKELIPVLPKDNFTKRIIRQAVAQVNAASQTVEELRALMNETASKLPEYPIVMEMKGVGPSLGPQLMAEIGDVTRFTHKGAVTAFAGVDPGVNDSGDYSQKSVHASKHGSPVLRKTLFQVMDILIKTKPDDAVYWFMDKKRAEGKPYYVYMTAGANKFLRVYYGRIKEYLSTLPKSN

SEQ ID NO: 370546 - protein, 419 aa, unidentified
MAFKIFRKNCSGLDVHKTWIFACIGFTDANGRTEYKEKRFSSFSRGLRDLAAWLASYNCTDVCMESTGKYWIPVFNVLEKTCNVVLAHPKYTKPQKGNKTDRKDAKWICDLFMCDMIRPSFIPPAEIRHLRDLVRYRFKLTNMLTGEKNRAQNCLTVSNLKLDDVFSDVFGKSSRSITEYILAHPGETFDVTPFVDKRCKTPIEEIQAAVDGAISPEQAIKLRQCLDHIDELEKHKAEMEREILHVSDPYFDALNLIRTVPGFDKNPFTAIQILSEIGGDMSVFPTDQHLVSWAGCCPRNDQSNFKIKSTRISRAGSYLKPVLVQVANALIKSKKHPEITERYRRIKSHRGHKKAIIAICRMLLTAIWHILTDLKPYTAEGYLAPRPVKEEKILTTSQALSLLKLRGYVIKDALPAAAS

SEQ ID NO: 370547 - protein, 347 aa, unidentified
MEKIGIDVHKVATQVCILTEDGEFKEFRIRTEREALTETFGRRARARILLEAATESEWVARHLEALGHEVIVADPNFAPMYATRSRKVKTDKRDARALCEACHLGAYRAVHRVSDESRMLRKQLAGRAALVKTRSRMISLCRALLRQEGIRVPSGGAVSFAKRVRVLELGVALARTLEPLLRTHEQVCEQIKQFDAVIAEAVAHDERAKRLTTVPSVGPVTALSFVALVDDIERFSSSAKLCSYVGLVPREYSSGEKQQRGHITKLGDSGMRSLLVECAWGVLRRPHPSTQALRDWALSIAARRGKRIAAVALARKLTAILFAMTHHGRDFEPERLARGETKVSAAA

SEQ ID NO: 370548 - protein, 340 aa, unidentified
MDVTTIGIDLAKSVFQLHGVDAHGEVAFRKKLRRSAVLDFLRDLPPCLIGLEACATSHFWARSIAALGHEVRLIPPAYVKPYVKRQKNDAADAEAICEAVTRPNMRFVPVKTEEQQSVLVLHRSRDLLMRQRTMILNAIRAHLAEFGIITAQGPRRVAELVRRLRDPDDLGLPAIARFALLALGAQLFSLAAEIGNIERQLMAWHRQNVASQRLETIPGIGIITATALAASVPDPAVFGSGRQFAAWLGLVPRQNSSGGKDRLGHVSKMGNGYLRRLLVVGATSVTRRAATINTQTGAWVRSLLERKPARLVTVAIANKTARTAWALLAREESYRAIPAH

SEQ ID NO: 370549 - protein, 412 aa, unidentified
MEILYQSCCGLDVHKKMIVACLRRTDETGKVGKQVRTFGTTTSELMSLSDWLVEAGCTHVAMEATGVYWKPVYNILEGQIELLVVNAQHIKAVPGRKTDVKDAEWVAELLQHGLLKASFIPPQSQRDLRDLTRYRTTLVRERARIVNRLQKVLEDANLKLAGVATDVMGVSGRAMLEALLAGQTDTEQLAELAKGRLRKKIPQLKEALTGRVREHHRFMLSEQLSHIDYLDEAIERLAAEIGQRLRPFEEEIRLLDTIPGINRQTAEELIAEIGADMSRFPDGHHLASWAGMCPGHNESGGKRKSGKTRKGNRWLRSTLVEAAHGAAHTKDTYLASHYHRLVGRRGKKRALVAVGHSLLVISHYVLKRREAYYDLRSNYSEELHRQRLERNLVKRLENLGYKVTLEALSPAA

SEQ ID NO: 370550 - protein, 417 aa, unidentified
MRIVRPICCGADIHKDLIVATIAATNQDGITEYIQSSFSSQNFDLVRLKAWLIEHHCFEIAMESTGKYWIPVFNVLEGEIKVFVVHPKYTKAIKGKKTDKKDSKWIADLFKHDLLKFSFIPPKEIRELRELSRYRIKLIAMRSSERNRYQNSMTISNIGLASILSDPFGKSSRAVMKEVIRSSSVTEERISKLLERNAKKKVKEVLQSLVGSHIESDQRLKMNIASQHMDQIDSHVRRLETEMAIRCIPYATLINLLLDIPGISYLSAMTIIAEIGTDMSVFETSKQLSCWAGLAPANNESASKKKSVRISKAGSYLKPLLVQCALAAINSKSNPYYRIKYNRIKKRRGHKKGIIAIARMILVNIYHILSTGEVYSPCDMEQIINPKPVKKVMTIQNAIEFLQSQGFDTSKLISSSS

SEQ ID NO: 370551 - protein, 418 aa, unidentified
MISAVIERCAGIDVGKKFLAVCVMTGPAAENATAELRKFGTIRAGLERLREWLKAEGCTHVVMESTGCYWKPVLNVLEDDPEYRIEVVLANAQQVKGVTGHKTDPHDARWLAHLLRHGMIRPSFIPPRAQRELRDLTRRRKQMVRAAAEERNRVQKVLEDANVKIGDVLSDVFGLSGQLMLEALVAGKSSALDVAELARGNARKKIADLTAALEGHQMRDSHRFLITRAMRHMAFLADEIEALDQEIARSIGSPELSQPNQLLQTIPGIGTQAAAAMLAEGGPNMKQFPGAAHFSSWSGIAPGNNESAGKRKRAPTLRGNPHMKTALVESAWSASRTNGSEFQDRYQRLRSRIGHKRAIVAVAHVLALRIYEVLASRLPYQKARSPQSQRSVQRLIRHHSRRLQHLHRWLNDLDSKEA

SEQ ID NO: 370552 - protein, 339 aa, unidentified
MVYVGVDLHRRVSQVSAIDEKGEVVLTRRIKTEPLEFLRVFGELEPGPMSVAFEATFGWGWFAELLKDAGVAAHMAHPRDSKAIANARVKNDAVDARTLAHLLRTELLPEAWMAPVDVREARRLVRMRGALVRIRSRLKNQVHAVLADQGVLFPMSDVFGALGREELARLQLPPLVQHRLEAHVRLIADITNEVNIADHEIRGLFKNDSRRKRLQAIPGIGLLTAATVLAEVGDFARFPSADHLCSWAGLTPKERSSADNVRRGRITKQGSRWLRWALVEAAVTAERNPDLRALYARIAARGGRNGKSIARVAVARRLLTLCFYAVRDEHGCRAFPVAS

SEQ ID NO: 370553 - protein, 414 aa, unidentified
MNAHQDLTHFAGFDWAGDHHDIIIIDSVGKLIADFKFDHSAAGWQLWAEKIAAYPKLGVAIETSFGAVVEQLIDSKVSVYPVNPASAKRYRERKNPSGTKTDRHDAWALADALRTDGHAWRALSPKDPVIEELRMLCRDEVALIEERTALISQARQAAREYYPTVLEAFEDWTLPSTWAFIERFPDTTTLLKAGKRQWQKFMHTHRLYRPETADKRFAIFETSAQWRINDYMVKAKRLYLLTKIKQLRALQAQLDEYRRRIEALFASHPDSGTFGSLPGAGAKLAPRLLAEIGSDRALYESAQSLQCISGTAPVSYQSGKVSKVQMRRACNLHLRHTMHLLSDLSRAQCAWARVYYEQAKARGKTHAQALRSLGQRWLKIIYRMWQNRTRYDGELHTKNQLQHGSWVLQMMPGK

SEQ ID NO: 370554 - protein, 434 aa, unidentified
MSKFLNDFVVGIDVSSEFSVVAMLEPNGSLIRKPFRIDHNPAGFNKLLGILKKEEERLKQKPIYFVESTGIFHLPLFFFLKSNDLKGFVLNPLCVHSIKNFDLRKVKNDAKDAESIARLAKFQDVKYSLVPEPQILSLRMLLREYYAISDMLTELKNRLCTDLYLLFPGYLDVFSNPFGKSSLKILRDYKTPQAILSEDPDTLAQMIAKTSRKGLIWGQKKVAKLVAMAQLCLSMPMEFSILSRKIQFHLDGIETFQANLEGLKIQLADMIASDAFPKNVRNSIALLEAMPGIGFLTAATILAEIGDFSRFHSPKALVAFFGIDPSVNQSGKFNGDRNKISKRGTRFGRRVLFTAALASIRTTCKGDPINPVLRDYYQNKCQNKKKKVALVAVMHKLLHYIFAVLRDQKPFEFRSPEDHQSWRNSTHSSLTLAA

SEQ ID NO: 370555 - protein, 315 aa, unidentified
MSDVPCFVGIDVAKAQLDIALRPSGERWAVPNDASGVATLVAQLQVRHPTLIVLEATGGLERAVTSALATAGLPVVVVNPRQVRDFARATGQLAKTDALDARALAHFADVIRPTPRPLPDAQTQELRALLGRRQQLIVMRTAEQNRLAGTSGRLTQDIEAHIAWLNARIATLDDDLETMLRASPLWRENDDLLQSAPGIGPVCARTLLLELPELGTLTRQQIAALVGVAPLNCDSGTLRGRRTIWGGRAHVRTVLYMGTLVATRFNPRIKAFYQRLLAAGKLKKVALTACMHKLLTILNAMLKHRKAWQAQEVQN

SEQ ID NO: 370556 - protein, 357 aa, unidentified
MQPMLAGQVDYVIGVDTHRDTNTTAIVEAATGGVVDDLQCPTDAMGYKRTYAFATKHAPGRRVWAIEGTGSYGSGLTTFLLERGEWVVEIDRPSRPARRNGAKSDELDAVRAAREALSRDHLAAPRARGDREALVLLTARQGAVVGRTKAIGQLKALIVNAPQALRDQLRRGTTDEQLERCSRLRTSPAQSVEHRTTIRAIRAVARRALFLEAEAAEHESDIEELVMAICPSLLDLPGVGPVTAAQFIISWSHARRVRNEAAFASLAGAAPIPASSGNTVRHRLNRTGDRQLNRALHTVALSRLQHHPATKAYAARRTQEAKTPREIKRCLKRAIARQIYRRLESQAAAQRELSLAA

SEQ ID NO: 370557 - protein, 311 aa, unidentified
MTSAGIFVGIDVAKAQLDIAIRPSGEYFTAPHDDPGVSGVVQRLGALQPTLVVLEATGGFELDVASALGAAGVPTAVVNPRQVRDFARSTGLLAKTDRLDAQVLAHFGEVLRPAARSLPDAQAQELSAVLLRRRPLVEMLVAEKNRLPMATRRIRPQLQRHIEWLQQQVADLDRDLGALIRSSPLWRAKDDLLRSVPGVGPVLATTLLASLPELGTLNRQQIAALVGVAPLNRDSGTWRGRRTVWGGRAHVRAVLYMSTLVAVRHNPRLRSFYVRLRDAGKVPKVALIACMRKLLTILNAILKHQTPWALP

SEQ ID NO: 370558 - protein, 427 aa, unidentified
MSEEKSLELRVSVDVGYRRHSVAMGLSSGEVLEEFEIDHRPEGFQEFFARIEKHRKTKDCRVAVAMEGYNGHARPLDSLVRERGYRLYNLNNLKFARFKEIFPGAAKSDRIDARKGLELFQLGDHLPLAKEVLQEVSGTAPENEVLKRLTRRRRRLVNERVRVVNNLQADLQAVCPGLLEITREASNQWFLNFLLSADTLPQLARLKRSTLLKIPSVGVKSAAIIESWQKRCHFSQEVEWVGEMIQEDAKRCLELDEKIKRLDTKIAETAQNSKIAKFLRSIPGYGATCSSELAGEIGTIERFASEASLSLYLGMSMLDNSSGKYQGTKAPKHVNTRAKAAMMIGADRHRKYVPESQRYYEKKRSEGKKHNQAIRALGRHLSRIIYKMLKEDRDYEIRPEKRNTKIKVSPRSCVKTKIRRSKISAKS

SEQ ID NO: 370559 - protein, 370 aa, unidentified
MLDTTTFVGLDVHARSIKAVSLDVMTGEARCATFGYDAGAVAEWVRSVDPRARCVYESGVTGFDLQKRLSGLGVDCVVGAVSKMIKPSADRRRKNDRNDAEFLARMLSVGNVVEVWVPDDECEAARDLTRALEDARDDLSRAKQRLSKFLLRHGLAFDERTPTGRRKGNWTRAHWSWIESIRFAEGADNDVLAYYVDAVRRAAEEKARLEGLVEAEARKPRWRRRVDSLRCLKGVDTATAADLVFEAGEFSRFRNARSFAAWVGLTPSEHSSGESDRRGAITKDGNKHLRKALVEAAWHYLTCSGRPKGLAKGQAPDRGARRHAAKGVRRLAERREALLARGVHGNKANVATARELACWVWAVGLMAEEA

SEQ ID NO: 370560 - protein, 339 aa, unidentified
MQLYAGLDLHSRNTYIGIMNKEFKRVFGKRVSNNLPLILTTLDPFQDQLKGIVVESTFNWYWLIDGLTDAGYQCVHLANPSAMKQYEGIKHTDDQHDAFFLAQMLILGILPQGYIYPKEDRPVRDLARKRLFLVRHKTSHILSLQSLIARCSGQRISANAIRTFTVEDLQQLVKEEHIILSAQANLDTIVFLKKQILRLEKAIKKKVKLNKAFQDLRTVPGIGLILAMTIMLEVGDIGRFPQVGNFASYCRCVPSQRLSDGKRKGHGNRKNGNRYLSWAFTEAAHLSRRYNENFRSYYNRKVAQANTSLATKALSNKLARICYYIMRDQVPFRQELLSH

SEQ ID NO: 370561 - protein, 373 aa, unidentified
MKKVRFLGLDVHAETIAVAIAEPDGEVRSLGIIPNREEPIRKLLKKLGPAEQLQACYEAGPTGYVLYWQLTALGVKCEVVAPTLVPVKAGDRVKTDRRDATNLARSYRAGDLTAVWVPNEEHEALRDLVRAREVAKQDQLRARNRLSKFLLRHGRRAPTGVKVWTQKFQEWIKEQVHFEQPAQEYTLLDYLHEVEHVADRIRRLEQAVVEAVKLAPPQMQEVIQSLQALRGIAQISAITLVAELGEISRFEGARQLMGYSGAVPSEDSSGKRIQRGPITKTGNAHLRRIAIEAAWAYRHRPAIGLTLRKRQEGLSEEVKEIAWKAQHRLHKRYRTLSAAGKEKQKVITAVGRELLGFIWAIGVQVERKHKRVA

SEQ ID NO: 370562 - protein, 337 aa, unidentified
MYGGLDLHGKSTFIGIVDGEGKRVYRKKLPNDPGIILGELHPYREEIIGLVVESTFNWYWLVDLLMDHGYRVHLANPAAIQKYTGLKYADDEHDAFWLAEMLRLDILPEGYIYPKEDRPIRDLLRKRGHLVRLRTSLILSLQGIIARNCDVRLSVNKIKARRTNQVGPLLAGNEDLALAGAVSKESIDFLGENIRKVEGVVERRVELREPYRYLLSISGVGKVLSLTIMLETGPISRFPKVGNYASYCRKVKSQWLSDGKTKGKGNSKNGNKYLAWAFSEAAEFARRYDEDARTFYNRKKQKTNFMVAHNALAHKLARAAYYVMRDQVPFSAAKLFG

SEQ ID NO: 370563 - protein, 332 aa, unidentified
MQKDFYIGVDISKKTIDVAIYKKEKSNKVSVCEKFPNSSDGFKEMKRWLRKCGVSLTNALFCMEATGHYTYELCLFLEQQEVSYSVQSPLHLKRSFGLTHGKNDKVDAYRIASYAYLHREDIKLSKLATNSIRKLKALMAERKSLVVEIARCKAQLKEVGSHSSSPGTIKRTKELLEFLETQVQDIEKDMAQTIDSDAELKNNYQLLLTISGIGIVNAVNTIVATHNFKMFDNARQYASYIGVAPFEHISGTSVRGKTHVEPGAKMLKADLTGAVRTCINHDKEIQKYYERKIEKGKSYGVVANAIKFKLLLRMFAVIKRGTPFVKKADHLI

SEQ ID NO: 370564 - protein, 342 aa, unidentified
MQKIATIGLDLAKNVFQVHAATADGSTVFNRKLRRSEVLAFFAKVPSCLVGMEACSSAHYWARETRALGHDVRLMPPAYVKAFVKRGKTDAGDAEAISEAVTRKTMRFVSVKSAEQQAAAVLVKSRTLLVRQRTQAINALRSHLAEFGIIVGAGVTKVAELIAVVRDGSEQRLPLVARQALQEIARQVESLAVQIKRFDRQIVVLSRQDADTRRLTTIPGVGAIIAASVKAFVPDPAGFRSGRHFAAWLGLTPRPHSSGGKERLGRISKMGNPLLRSLLVVGATSVLRVARNNPQASPWIAGLLARRPSRVATVALANKMARIIWALLVRGSVYRAPSIAQA

SEQ ID NO: 370565 - protein, 374 aa, unidentified
MKEKVRFLGLDVHAETISVAIAEPEGEVRSLGVIANRAESVRKLIKKLGSAEQLRACYEAGPTGYVLYWQLTELGVDCAVVAPTLVPVKAGDRVKTDRRDAVKLARCHRAGDLTAVWVPDASAEALRDLVRAREAAKQDQLRARHRLSKFLLRTGQRPISDVKAWTAPYMTWVRQLRYEQPAQEWTRLDLLHEVEHMAERVKRLEEAIREAVKLAPARMQEVIRGLQSLRGIAEISAVTVVAELGQISRFASARQLMGYSGAVPSEDSSGKRQQRGSITKTGNAHLRRIAIEAAWSYRLKPAVGPGLRKRQEGVPEQIKEIAWKAQLRLHKRYARLAAAGKDQRKIITAVGRELLGFIWAIGVKTETAHQAIAA

SEQ ID NO: 370566 - protein, 387 aa, unidentified
MYYIGIDISKFKHDCAVIDDSGEIVTPSWSFTNDAKGFSQLKLLLNSLDTETRIGLESTGHYGMNLKLFLESNNFSFMEFNPLLINRFVKSKSLRKTKSDSIDCMMIAHYLMTVEYKPYPSSFYHTEKLKSLTRFRDSLIRLRSRQLVELTNILDKVFPEFKPFFGSRFSVTALYILSNYSSPEKIANMNSKSYEALRKLSRGRFSTVDFAKLKQLAKNTIGTTEDYLLLQMQIVLDIYRQLDSKVDETEVSIKECVSDMNPPMLSVPGIGIESAAVILAEFGDFSKFKNASQMLSFAGLEPGYFQSGTYETTGKMVKHGSSYLRYALMNCAQTVVNYEPTFAMFYSKKRAEGKPHRVALSHVVKKLLRVIYTLQTKNIAYDADFVR

SEQ ID NO: 370567 - protein, 417 aa, unidentified
MKCFVGLDISSTKLDVCIMLSDTSTPVTASLSNDLSGATEIKNHILDLNHTYHFERIVIGMEATSLYSFHPAMFFHEDRQLKELHVEIMVEQPNKIKKYRDAFEENKNDTIDAFYIADYFRIERFSPSFLKEEKYMALQHITRTRLQIIEQLTRTKQHFIENIYYKCNTLAYQFKKEELSTNLWSSTMMTLMTDEMTLDELANMPLQELDDWLQKLGKGHFKDSEKLAQTIQAAIRGSYRLSKLQQDSVNVILGLLGREIRNLEKMIKEIDKAIEDMVETIPEYQCLTSIPGVGKVYAAGIIAEIGQIERFKDHPQVAKFAGLNWREKQSGNSNSQHTSLVNRGNRYLRYYLVEAANSVRRYDDEYKDFYKKKYHEVPKHQHKRAILLTARKFVRLVDVLLRNHQLYTPPRRIMEDN

SEQ ID NO: 370568 - protein, 416 aa, unidentified
MSLALPEALFFTGIDWAEVTHAVCVMDAAGKIAAEFTIEHSAEGIAALIRRLARYGDPAGMPVGIERPNGRLAGLLLEAGYPVVPVSPNAIKTWREGEVLSGAKSDAGDAAVIAEYLRLRQHKLRVATPYSGETKALRTVMRTRDDLVAMRVAATSQLSALLDAYWPGARAVFADVESPISLAFLSRYPAPALAARLGEKRMTAFLVKNGYSGRRPAAELLARLHAAPAGTADETLTEALRDAVLALVAVLTALNTGVKDLDRSAAAHLGEHPDGKIFTSLPRSGQVNAAQMLAEWGDARQAYDGPDAVAALAGCTPVTRQSGKHRDVTFRWACNKRFRKAVTTFADNSRHASPWAAKVYADARASGKDHPHAIRVLARAWIRVIWPCWLTGTPYDPARHGAAAALAERASSQFAA

SEQ ID NO: 370569 - protein, 455 aa, unidentified
MRQRKASTKPDVDSGFPLIRPNAAGLDIGSREHFAAVPEGRSTSTVRSFGCTTSELKEMAAWLKSCGVDTVAMEATGVYWVPVYEVLEDAGIEAFLFDGRQTRHVSGRKSDVLDCQWSQKLHSYGLLTRAFRPDKQIATLRAYWRHREGIVESCSRQIHLMHKALEQMNVQLHKAVCDVTGQTGMRILRAIVAGERDVHALARLRDWRVKATEDEVARALEGTYREEHMFALKQALEAYDFFQQQLAACDSSLELYLASLASASQAPSATPPPPKRRKNQTHFDLRKELARIAGVDVCQIEGINALTAQTLVSECGIDMTPFPSEKNFASWLGLCPNNRKTGGRIRSRRTRRVNNRAATAFRVAAQALHHSKSALGSYYRQKKARLGAGKATTATAHKLARLYYRLIKHGEPYFAQTQAQYETLRRDRDLKALQRKARHFGFQLLNTTTGELIAS

SEQ ID NO: 370570 - protein, 354 aa, unidentified
MACKITSLEAATTIGIDIGKNTFHLIGFDKKGAIVLRQRLSRKQIDSRLANMPPCLIGMEACVGAHHLGRHLKALGHDTRLMPARYVRPYSKGPKNDFRDAEAIAEAVLRPTMKFVAIKTVEQLDLQGLHRIRERLVCQRTSVINQIRAFLLERGIAVRQGPRALRSEMSMILAMTDKLSPSMIRMIEDLCADWRYLDGRIESVSNEIETLSEQDDGAKRLMTVPGIGPVISTATVAAIGNGDVFSKGRDFGAWLGLVPRQMSTGGRTVLGPISKRGNRYLRMLFVQAARAVLLRPRSWEKHGLKSWIEAAAQRLNRFKLAIALANKLARIAWGVLHGGRQFEVRSTTPISQIA

SEQ ID NO: 370571 - protein, 401 aa, unidentified
MYNAVGIDVSKGKSTVTVLQPGGTVIRKPFDVSHTSQNLNELAAYLDSLDGDTRIVMECTGRYHEPILKALSEAGLFVSVVNPHLIKNFGSNSLRKVKSDPADTRKIARYTLDNWAELRQYSGMDNTRTQLKTLNSQFSFFMKQKVAVKANLIALLDNTYPGVNKLFDSPVREDGSEKWVDYAYSFWHVDCVRGIGLKAFTERYQAFCKRHHYIFQADKPEKLFNASKELAAVFPKEKTYKLLIQQSIQQLNLASGHVERLRREMNELASTLPEYSTVMGIYGVGRTYGPQLIAEVSRFTHREALTAFAGVDPGVDESGQHKSKSNRASKVGSARLRKTLFQIMTTLLQNAPEDDPVYRFLDKKRSQGKPYYVYMTAGANKFLRIYYGKVKECLRNLEQES

SEQ ID NO: 370572 - protein, 334 aa, unidentified
MEQITTVGIDLAKRVFALHGVDAGGRVVLRSIVRREQLLEAMAKLPPCVVGMEAGSGAHDWARQLQRLGHTPKLMAAKFVSPYRRKGKNDGNDAEAICEAVSRPGMRFVPVKSLEQQALLSLHRVRQGFIVERTATINRLRGLLAEFGVVLPVRAVVVRREACKAAESLPALGRRAIEDLLAHLRTLDERIVGYDRELEQQARQCEPARRLMKIRGIGALSALAIVATVGNARDFRSGRQFAAWLGLTPRQHSSGGKTRLGHITKRGDAYLRCLLVQGARSVLHTASRHADGMSRWAQTLEARRGYHRTLVAIASKNARIAWALLSRNEVLRPA

SEQ ID NO: 370573 - protein, 356 aa, unidentified
MADKPIVGIDISKEWLDLCTSQAVEVERIANTPEAVAAWLERTGPGLIAFEPTGGCERFVSAAARERRIPFLRVHPNDVVAFRQSRGIKAKTDAIDARLLLAFAGDRLARRELRTSVLGDERLRALAARRRQLVETLQAEGCRLGAAALPAVRNSIEAVMAVLRHSLDALEAELAAVIAANPQTAELARLLQTICGIGPVVATALIADLPELGLLSSKQIAALVGLAPYTRRSGKTQFRETTGHGRVGVRRALFNAARATLRHPSPFKDFFDRLVSDNRRPGKVALTAVMRKILITANAVARDRQPWRGLRHTTPPPGAVGTLCQPHGEQTGHRPGRVKAAAALRAVARSASLDAA

SEQ ID NO: 370574 - protein, 344 aa, unidentified
MHITTLGIDLAKTVFQLHGVDARGRAVLSRRVKRGQLLQAVASLPPCVIGMEACGSAQHWGRAFEQLGHTVKLMHPKYVKPYVKTNKNDGRDAEAICEAVSRPTMRFVSIKTVEQADLQAVHRTRSLFVKHRTAVINQIRGLLAEYGLVIAPSPGKVRPALVRFLDDTASGLTAFARDTFSELYEQLTELDSRIERVTHRVERVYRAHPVCQKLAAVPGIGPLTATALVATVGRPQAFHNGRHLAAWLGLVPRQYSSGGKERLGGISKRGSRYVRTLLIHGARAVVQRAERRTDTQGRWLCALKHRKGTHVAAVALANKNARVIWALLAHDEAYRPPASAPAGS

SEQ ID NO: 370575 - protein, 356 aa, unidentified
MQQNNRLSFAGQDIYVGLDTGKKSWTVTILTEHMEHRTFNQVPKPDALVHYLHKNFPEAHYQCAYEAGYFGFWIYEYLRDHGVDCIVVHAADIPTKDKEKRNRNDRVDSRKLARNLRNGELTQLYVPSRQSQEDRSLVRMRMQMVRKQTRCKNQIKSFLSFYGIDIPEELVRSHWSNKFINWLESLEFQYESGNHSLSALLSELRHLRQTICELTRDIRHLARQEPYNKIVPCLDSIPGVGVVTAMVLLTEIVDIERFKNIDHLASYVGLIPGEDSSGDQEKHTGISRRRNQNLRYLLIESSWVAMRKDPALLMSFNELAKRMPRNQAIIRIARKLLSRIRFVIKNQEYYEPCVVS

SEQ ID NO: 370576 - protein, 398 aa, unidentified
MKTSGLDVHKEKIFCAIYDGKSFSDVKEFSTTTNSIRSMGEYLRSESVERVAMESTSSYWVPVWDILFEMGFEQKLVNPLQIKQMPGRKSDVKDAQWIAKLLYQNMISGSLVPYPLIQELRTYTREYRKLVEQRTKVLTQIDRTLVMCGIRLSSCISNMNSKSALQIVKALIEGETSPDKLVGLVYGNRKNKESGKLKECLTGNMKEHHRIKLTMQKEQYDLFERQIEFYLNKMQTFCAEHFSEDTANLSSIPGVSVVSAITIIAETGGDMNAFENSGKFSGWTGLRPRNDESAGKFKSTATTKGNKHLRAIMIQVAWGAARKKGSYFMDKFQKLAMRKSRKKALVAIGRKILTIIWHVMKDKTPYNPKLVHIYDPVKVESKIRYHEREIEKAKKLIN

SEQ ID NO: 370577 - protein, 427 aa, unidentified
METDLSRVERFRQFKQEIRGNERYLIVGIDVAKDRHHAFLGTANGRTVLRRLAVENSRKGFEHLGAHVQFQMKKHGLHEVVCGVEPTSVYHKPLAEYLIEKDFLVVYITNAAIKQNRQLLDGRWDKNDRKDAANVADLVAQGKCHYYDLPNEVLRDVRALLGVRRRLKRQLHSARMRIRNNLVAQYFPELDTFWNTAEQENLAIVRWSLDPETIRRLSFKEFFYQLTSRSKGARQHERLRGIWEAASSSIGCRVGKALEVETRILVEEVKRTREQIAEVEKSIKARLTGLTHYELLLSIPGFGPYICAVVLSAVGNPHRFENRSQLLRLAGLDLSANRSGKRSSTAVPVISKRGKADLRYALYQAALVASSFNHHVMAYYWNLLTGREREPGIRTKMRVKLAAKLLIIAWTLMKNKEPFNPDRLKTD

SEQ ID NO: 370578 - protein, 388 aa, unidentified
MPAAETPVAYLGIDVGKSSHSACALDAGGGVAFRAELANRPDDIDRLLERAGSGALVVVDQKRNIGALVLARAHAHGNPCAYLPGYAEKQARGMFPGIAKTDAIDAEVIARTALGVPRALRPAPEEPEGTASLRILSSQREFASSARTRAKNRLRATLLEADPALEGAVDPSSRWQVSMLAEFGGAAGCSAAGWRRFSSAARRAGAPAAGARRLWEALLASSRSGRRLPAGEDVAVRMLAREIASLDADIEELDSLVADSLAGDEVYECLLTVPGIGPKTAAALVTSIDISAFRGHDELASYCGVAPSDRRSGSSIRSTSPQHGGNRQLKNLLIFSCNSLIGTDNRFGRYYGECRARGMRHSKALKAVARKRLKVIYAIMRDAVPYAA

SEQ ID NO: 370579 - protein, 343 aa, unidentified
MNVFIGLDVSLASTAICVLGPQGKVVEELEAASEPEALVRAMASLPYAVDAIGLEAGPLSQWLSKGIEEAGFDVVLMETRLVKAALKAMPIKTDRRDAQGIARLLQMGWYRPVHRKSVSSQEIRALLSARKSIQQAIINIELSMRGVLRNFGLKLGHVTRVRYEARVRELVADNDILSASALALLRARGQLRTELASLDEKVVGLAEHDDVCRLMMTMPGVGPIVALTVRSAIDDPARFAKSRDIGPWVGLTPRRTQSGEMDIVGQITRAGDRGLRSALYQAATILMHRAAPNWLQAWALRVAHRRGSKRALIALARRIGVILHRMWMDGSPFRFTLNPGPTA

SEQ ID NO: 370580 - protein, 379 aa, unidentified
MEGFNSFYNTIVELMQKSELEEALVGIEPTGHYWFALGQFMGEKDIKFVMVNPHHVHKTKELDDNSPSKNDRKDPRVIAGLVRDGRYFYSYMPTGVYAELRNASNRRFVLVEEQTRAKNRLQKWIAVYFPEYKGIYTHIDAKGGMLVLKKAPTPEEIVRLGVEGIIKIWKDAKLRGNGHKKAMLILAAAMRSIGLKAGLTEARMEIQDLIEDYELQTKRLERVNDLIKGLCQQVRYADKLLEIKGIGITTVAGFIAEVGDITRFDSTKELQKLAGLELVADSSGKHNGKTKISKRGRKRLRYLLFEAAISVVGKNEEFKEIHRYYTTREKNPLKKMQSLIAVACKLIRVFHAILTKGIRYDASKMLKDIRHPGEQLKAA

SEQ ID NO: 370581 - protein, 341 aa, unidentified
MEPLFVGLDVSKDETAICVRTQSGSVKSAYKKATDPDAIYRALMSELELIRCVVLETGRMATWLYSELSLRGLPIVCIDARQAHAVLSQMHNKTDKNDAAMLAELARTGFYKRIEVKSRVSQERRALLRAREVAIKSRLNVENTIRGLLASFGIRLPKYLKTYDQRVRTALEGQSDLMRIIMPLLRLRTEALRQAAALTKDMVRQAQMNETCRRLMTIPGIGAVSAVTYVATIDTPDRFAHSRSVGAYIGLTSRKYQSGDIDYNGRISRRGDQMLRAVLYEAANSLLCRVKSGLGQRLRDWAIALKKRTSHKKAVVALARKLAVIMHAIWKDGTEFEPRGA

SEQ ID NO: 370582 - protein, 380 aa, unidentified
MKTATARQTEYNTFQTVLHMALELGETKWKVGFTTGLGQKPRERTIAARDLVALEHEIRLAKQRFGLAPDVPVKSCYEAGREGFWLHRYLVHKGIANIVVDAASIEVKRRKRRLKTDHVDLEKMCEMLVRYHLGDSRVWSVVRAPSVAAEDARQLQRELATLRAERTQHSNRIKGLLATQGVHLAVRDDFLTRLDTVRLWDGSRVSPGLRDRLVREYVRWQVVQEQIRALEKARHELQEHSPEPAVAMVRQLLRLRGIGEESAWLFVMEFFAWREFRNRREVGALAGLTGTASDSGEDHQEQGISKAGNEWVRVMAIEIAWAWVRYQSESEVSRWFDKRYAGGSRRTRKIGIVAVARKLLIALWRYLETGEVPAGAQLRA

SEQ ID NO: 370583 - protein, 375 aa, unidentified
MREKVRFLGLDVHAETIAVAIAEPEGEVRSLGTIPNREDSLRKMIKKLGPTDKLRVCYEAGPTGYVIYWQLAELGVKCEVIAPTLVPVKSGDRVKTDRRDAEKLARCYRAGDLTAVWVPDEGSKALRDLVRAREAAKQDQLRARHRLSKFLLRSGQRPPSGVRSWTRAYLIWVAQLRFTQMAQEATRLDYLHEVEHMRERVERLELAITEAVKLASPALQQVINDLQALRGIADISAVTIAAELGQVSRFESARQLMGYCGAVPSESSSGKRTRRGSITKTGNAHLRRIVVEAAWSYHRPPGIWYGLRKRQESISEEAKEIAWKAQHRLHKRYLRLAAAGKDKRKITTAVARELLGFIWAIGTRAETEVRQRIAA

SEQ ID NO: 370584 - protein, 355 aa, unidentified
MESVKYIGLDVHQSTISVAVLNIEGKLMMQSVIATKATGVLDLLKGLRGVLHVTFEEGTYSAWLYDVVVRHVAQVVVCNPRKNALLKSGNKSDQIDARKLAELLRAGMLSPVYHGEQSTRTLQQLVASYTALTEDTGRTMRRIKALYRSQAIACAGKKPLGKRHRGEWLARLTDSGQRRRAEWLYQELDAVQVLRREARHELIAECHKYPAAKLLRTMPFFGPLRAAVLIARVQTPHRFRTKRQFWTYCGLGLETRSSADYVEKDGQIMRRRKPVYIRGLNWNYSHELKNVFKSAATTASAMEGPFRAFYEMRVANGMLPAMARLTLARKMAAIALILWKRGETFAAEHLMLQAA

SEQ ID NO: 370585 - protein, 339 aa, unidentified
MQLYTAFDLHSNNSYLGIIDEDGKWVFKRKLSNDPEVILESLRLFRNDIVGIVVESTYNWYWLVDLLMAEGYKVHLANPAEIQKYSGLKYADDQHDAFWLAEMLRLGILPEGYIYPKEDRPIRDLLRKRGHLVRLRTSLIISLQNIISRNNGIKLKSGDIKALTTDHVAPFLERNEDLALAGKVSKESIDFLPRQIKTIEAVVEKKIDLREPYDRLLTEPGIGKILGLTVMLETGPIGRFAKVGNYVSYCRKVSTKWISNDKKKGTGNKKNGNKYLAWAFSEAAELARRYDDNARAYYNHKIQQTNRMVAHNALAHKLARAAYDIIRDGVPFVPEKCFV

SEQ ID NO: 370586 - protein, 321 aa, unidentified
MGDGIRFVGLDVHKRQTVVAIADSGREGEVRHYGAVETDRSSIEKLARKLARGGKPLRFCYEAGPCGYGIQRWLTGLGHDCEVVAPSLIPCRPGERVRTDRRHAIKLARLHRAGELTAVWVPEPAHEAMRDLVRARQVAVHAVRRARQQLSGFLLRYDRTYSRKAWTQAHRRWLAELKFEHAAQRIVLEDYINAVGAAEHRRDGLTEQIRELLPSWSLAPIVEAVQALRGVAAIVAIIIVAKLGDLRRFDSPRQLMAYLGLVRSEASSGEKVYRGGITKAGNRTARRALIEAAWTYRFPARRSKHLLARCETVPPTIQAIA

SEQ ID NO: 370587 - protein, 408 aa, unidentified
MYNAVGIDASKLKSTITIIQPAGVVIRKPFDVLHTSDELNTLVTCLKSLVGETRAVIECTGRYHEPVVKSLSEAGIFISAVNPKLIKGQKQNTLRKVKSDPADARKIAKYALDNWAELREYSSMDTTREQLKTLNSQFTFFMKQKVAAKTNLISLLDNTYPGVNKLFDSPTRDDGSEKWVDYAYSFWHVDCVRKIGLKAFTERYEAFCKRHHYNYQKNKPALLFEESKQLVAVFPKEKSYKLLIQQSIQQLRLASEHIEIIRKEMNELASTLPEYETVMSMYGVGETYGPQLIAEIGDVSRFTHREAITAFAGVDPGVNESGQFKQRSNRASKNGSTRLRKTLFQVMSTYLQNKPVNEPVYQFLDRKRAEGKPYLVYMTAGANKFLRIYYGKVKECLRNLEQSQIEES

SEQ ID NO: 370588 - protein, 317 aa, unidentified
MVSAPVFVGIDVAQAHLVLAVRATTETWQVPNTDAAFPDLIARLRALAPTLIVLEATGGYEHAVLSAVAAAGLPIVAVNPRQVRDFAKAFGILAKTDQIDAAILALFAERVRPAVRALPDADTAELAALLARRRQLLDMLTAERHRLAQARPAVRRSLQQHIHWLEQRVHDFDDDLSRRIRRSPVWRAKEDLLRSAPGIGPVVARTLLAVLPELGRLPRRPLAALVGLAPFNRDSGRHRGRRCIWGGRRTVRAALYMATLVATRHNPAIRACYQRLLTAGKPTKVALTVCMHKLLTILNAMVRTHQPWRDALAAEHP

SEQ ID NO: 370589 - protein, 416 aa, unidentified
MKIVRPICCGMDVHKNIIVATIGITNKKTRITEYIQETFSTLNHDLLNLKQWLINHKCFDACMESTGKYWIPVFNILEDEINIYLTHPKYVKAIKGKKTDKKDSKWICDLFKHDLIKFSFIPPKEIRALREISRYRYKLVGMRSSERNRYQNCMTVSNIGIGSVFSDPFGKSAQAIMKEVLESDIIEDEKILKCIHRSCKNKDKILDSIKHCNIETDQRFKMNESMTHMEELQVHINNCEIEIMKRAAPMFDQFMHITQLPGISTLSAILIISEIGVDMKQFESDKQLTCWAGLAPANNESANKKKSVRISKAGQYLKPLLVQCALGAIKDKEGYFGIKYSRIKKRRGHKKAIIAIARMMLVSIYHMILTGETFNPSDYESFRNPKPPIKQQDLTEESAIEFLKKSGFDVSKLTKL

SEQ ID NO: 370590 - protein, 335 aa, unidentified
MQFKFFVGIDVSKDTLDFSVVTEGKEVRDFRIENSSKAIKAALKDLRNLNGFSISSALFCLEQTGLYNNHVTSMLHSTEANIWVEKAIQIKRSSGLQRGKSDKVDSQRIAFFAFRNQDKARMWSAPRVVIQQLKRLTGVRERLLIMVAQLNKPIQESKKFDSREVFKAIKNSCQASLKAIKADIKKVERQITEVIKTDPSLNHLFELITSVDGIGKVIACDMILTTNEFKAINDPKKYACYSGVVPFEHSSGTSVRGRTRVSHFANKNSKRLLHMAAMSIIRYKGDLQTYWLRKLEEGKHKMVVLNAIRNKLIQRVFAVVKRGSKYEKIYEHALA

SEQ ID NO: 370591 - protein, 319 aa, unidentified
MFKITIGVDIAKKKFDVASLIAGKYKHKTFTNDEPGFLAFTAWFLPLCGDNKPLICMEATGVYSQPLADFLAKQNHSVSLVNPAKIHAFGKSELSRAKTDKADAKLIARYALMMQPPLWIPTPTNIRELQALVRRVEHLLEMIQMERNRLETADTPIIDSINTVLATLDAELKATREAIHDHINNNPDLKQRAQLLESIPGIGDATIAHLLITLSEHHNFNNAKQVVAFAGLAPAPRESGQWRGNTHIAKNGDSALRKALYMPALVAWRHNPLIRIFCERLKANGKNGKAIACAAMRKLIHIAFGVIKSGKPFDPNYAV

SEQ ID NO: 370592 - protein, 341 aa, unidentified
MDYATLVGIDLGKQTFHVHGQDSKGKAVFRKKFGRKQLIEFLATCHSCTVVMEACAGSHFMARKLSSFGHEIKLISPQFVRPFVKSNKNDFVDAEAICEAASRPAMRFVTPKTESQQTLSVLHRVRESMVQDRTRTINQMHGFLLEFGVSLPAGKTGVPRLPEILDFHPLPPRLVAILKRLHEHFKYLQHQIGEIDRELALQLADDDAGQRLMGIPGIGPITASVLASEIGDGTQFRCGRDFAASVGLVPRQYSTGGKSNLLGISRRGDSHIRSLLVQCARAYMRFLDRRTGPLAEWARALASRRHSNVVACAVANKLARIAWAIVARHTSFNPGPTASPA

SEQ ID NO: 370593 - protein, 334 aa, unidentified
MSSVTVFVGLDYHQYSVQVCVLDHCGNVLSNRPCANDVKAISARVAAFGDQVFAAIECCSGSASLADQLNSLPGWSIDLAHPGYVARMKQSPDKTDMQDGHLLADLERVGYLPKVWLAPPELRDLRQLVRYRQQRMNQGRNVKLRIRALLREARLRPAEGVRPWTKAWLRWVQQVELGAQARWVMDQQLRHLRELSSDVRTSAQRLIEVTAQDAVVQRLLKQRGVGPVTAVTLRAEIGRFDRFRTGKQMARFCGLSPRNASSGTRQADAGLVKAGNPELRAVLIELAHRLIRWEARWRELGLKLKGGGKPGSVAAAAVANRWVRWLHHEMTTVA

SEQ ID NO: 370594 - protein, 324 aa, unidentified
MAKRTMICAGIDTGKHKLDVAIDGSSEQLQVDNTAEGYKVLSDWFRQHRVKRIGIEASGGYEQAVVTELRRKRFVVVMFQPARVRAYARFKGQRAKNDKIDAALIAACTAAVKTVHDAPDPRLLPFAEHLTMIDQIGEDIARLNNRLESCRNVRIQQVWKEDLAHLEKRKRTELKALVAAIREHRDLAERLELIYSVSGAGMPTAVAILVRMPEIGKITREQAAALAGLAPYDDDSGQRVGSRHIQGGRKRLRRALYTAALPASMRWNPQLKKLYERLIAAGKLHKHALVACARKLLIFVNTVVARGTPWQEQTPQRNEVPATA

SEQ ID NO: 370595 - protein, 350 aa, unidentified
MIIIGCDYHPGFQQIAFVDTDTGELQERRLEHREDAETFYRALEAQGLKVRVGMEASGHARWFERLLGELQFELWIGDAAEIRTKRVRKQKTDRQDAELILRLLVEDRFPRVWVPNVENRDLRQLLWHRHRMVQARTRIMNQLQAVALNEGLRCKKKLWREAGREQLQSFKLAPWASRRRRDLLELLDRLTPTIAELTQAIEQEVARCPEAQRLQTHPGVGALTALAFVLIIGRAERFQCGKQIASYLGLVPSEESSGQRRRLGHITKQGNSLLRFLLVEAAQVTVRSDQEWRNRYFHLVLRRGRKIAKVAMARRLAVRLYWMWRKEWDYEQLKKFGSHAGQPGNPHGVQ

SEQ ID NO: 370596 - protein, 310 aa, unidentified
MEQVFVGIDVAKAHLDVHVRPSGEAFTVPRDGESVASLADRLKALSPIVVVLEATGGFETIVAATLGGAGLPMAVINPRQIRAFARAIGQLAKTDALDAAVIARFAESVKPEPRPLADEQTRILSELVARRRQLVEMMTAERNRRPRLSRKHLIKALDRHLAMLQKDLSEIEREIDTTIRGTPIWREREELMTSVPGVGPTLARTLLADVPELGTLDRKQIAALIGVAPLNWDSGTYRGRRTTWGGRSKVRAVLYMAALVASRHNPTLKSFYQRLVRAGKAKKLALVAVMRKLLTILNAIIRDQIPWQNA

SEQ ID NO: 370597 - protein, 351 aa, unidentified
MRYCGMDVHATSTVWCVLDERGEVAREGRVATAAATLEALMRELGTQDEVLVGQEVGTMTYLVHDAVTAAGATILSFNAQQLRMIAASRKKTDRRDAYWLAKALHAGMYPHPVYIPPAEIRALRVVLSRQLLLKAEHNRWVCRTRATLRAAGHRVPAGATALRATVTTVINAATTPPLVRDTLALCQRQEATLRAELRQVETTLGAGLRPIPAIAWLMTVPAIGPLAAATIYATVGDVHRFPTAKTLAAYAGLVPTVRQSGGAARLGAITKQGAPALRTTLIQAAHVLLSRCRRAEATPLQAIGQRIHTSRGRRKIAIVALARHLLRIAYYILRDGTRYDAQRLGVMIDAA

SEQ ID NO: 370598 - protein, 397 aa, unidentified
MYIVGIDIAKRKHEAAVIDGEGTVIIKPFSFTNNCSGYNRLLAMLAKAKLPLDEVSFAMEATGHYWLALFTRLQKEGFRVQVINPVQTNSIRSFYIRQAKTDPRDALLIAEVIRFGHFSESTLHPENIYELRELCRGRHAIVSMQADVKRKVVALLDQVFPEYETAFTNLFGDTSMAILQTCPTPKELSEMRLEELCHLIEVSSHKRFRMAKAQELQALARNSFGFAMAGDVFSTMIRLYAKHLDFLKQQVREMDRKIAEIMDTLDTPITTITGIGPTLGAYILSEIGDISRFSSAAKLAAYAGIDPTMRQSGEYNGVRNRMSKRGSPYLRHAIWLAASSAVLHDPALKLYFQKKRDEGKPYMASVGHACRKMVSIIYAVMRDNKAYTPYIPNEISA

SEQ ID NO: 370599 - protein, 414 aa, unidentified
MLYIGIDWAADSHAVTLLAATGNVLESLVIDNKLAGFLALLEAIRKHLRKLEPAATPDAVSFAIEDQNQRLTDFLLAQGFQGYLIEPSRMKGYRLRYRSSGNKTDPDDSFVLADVLYRDRDQLPRIAPDSDVVRALKTLLRDREGFVRDQTRLINRLTACLRQYYPEALGFFEDVAGKTALDFIAVFPDFAAASRLSRQEVKRFLVEHHCHREAQLERILEVLGSSPTPVPTVVVRTKRQQALAIIQQLRTVQAAVAEYDAEIERLGKENDEVKRFRSMPGGGPITGAGLSTLFGDDRTRFNSAMAVQSLAGTAPKTIQSGQFRTACFRFGCNRFYRMLLQQMALGALRSSVWAKQYYRGKRKEGKTHQHALRCLANLLLKIAYAIWRDRTEYSEDRHLTQIMRHHLRPTSNSV

SEQ ID NO: 370600 - protein, 326 aa, unidentified
MTLSHLLDNTFVGIDVGGAGLDVAWHRGDGAHYANRPDAIATLVERLRSGPKLTRIVLEPTGGYEKSLVKALRQAQLPVEIIHTTRFKAYCQLVGVKAKSDTSDARLLASYAAAPDEIRGRKAGHVELPEDAIREQLSELASRRDQLKHMIHAETCRLGTVRMAELRQAIMTHLETLKAEDKQVHQMMQVLVNQRLDLKRDQRLLKTIKGIGVKSSLAFLASVPELGRVHNKAASALIGVAPFVRQSGTMAAPSRIHGGRAAVRSILYMAAVTASRHNPVLRPFYERLIAKGKPPKVALIAVLRRLVVFANAVLRSGQPWKGANAS

SEQ ID NO: 370601 - protein, 427 aa, unidentified
MSTLFVGIDVSSKTNSVYAMDFEENKYLSTSFGNNQPGADELVNRIVACMQKHKHLDTLLIVLESTSVYSVHISNFLASSEVLMPYKPYVFCVNPKATANYRKSYIGMEKTDPTDAYLIADFGRVGRTKKLEPWRGGLFIALKRLTRHRMHLSECITREKTYMVSNLYLKFSELQLLEGDDKPFGNLYGATSSAILTEFLSPQEIINMPEEDLLAFLAQKSRNRISDLSKTSELLRKAARDSYRLDKCMYEPLSISLASSFNCIQAYQKEIRLIEQAIDKCIKGMNTNALLILQSIPGIGPVWASGILSEIGDITAFHSSDALAKYAGLYWPKGDSGDFISEDNQMSKAGNPYLRYYLGEAANSVRKHIPEYADFYARKYAEVCKHQHKRALALTSRKLVRLVFGLLAKNQLYTGEKLDTEYNTWSN

SEQ ID NO: 370602 - protein, 343 aa, unidentified
MTNFVGLDVSQKITSICVVDDAGRRVWRGQCASRPDDIERVVRKQAGGDVRIGIETGPMTPWLVHELRRLGLDVVCLDARHARAALKMQLNKTDANDAEGLAQIMRTGWYRSVHVKSYHAHRARALLGARAQLVGMTTRLSNHIRGVLKIFGLLPGGMRGLSFATRVETLLADRPDVMPIVSPMLAAWRQLRAQITSFDKAVHAMVKNNPDCRLLMTVPGIGVLSVLAYVSVVEEPARFRRSRSVGAHLGLTPRQYQSGEIDRSGRISRCGDALTRTLLYEAAVVILCRVKRSSPLKDWALAIAKRGGAGKARIALARKLSAILHSIWRSGVPFRWSEGSVPA

SEQ ID NO: 370603 - protein, 370 aa, unidentified
MDENTKFFVGLDVHKETISISVCEAGREASQFRGTIRHDAPTLLKVLRKLGAPATQLVAYEAGPTGYGLYRRLVQQGYACQVIAPSLIPQRASERIKTDRRDSARLAELLRGGKLTPIWVPDVEHEALRNLWRAREDALHMRLKARQQLKAFLLRHGRIYTGKTSWSKTHAHWLADQSFEHAGDQLAFTEYVLATQAADDRLSRLDQALVQTTGGWRFEPVVSALRTLRGIDTVSAIGLVAEIGDIQRFAHPRHLMSHLGLVPSERSSGNTVRRGGITKTGNAHARRLLTEASWHYRYPARLGKHLNSRQQGQPEAIRHHAWKAQVRLRARFAHLRRRGVHINKVRIATARELTGFIWAIARTAAMTAGA

SEQ ID NO: 370604 - protein, 338 aa, unidentified
MTAIGIDTHKASLAACAVDERGAALAEMTFANQRAGHAALAAWATGLDPAAVIGIEGSATYGAALARFLLGARQAVREVPPHLTRRERIRTRRPGKSDPGDALAIARVTLREPNLPPVRRADASRELQLLVEAREDLVAEMTRTRNRLHADLLVLLPGTSGSLVGPRALSALANRLRRCSGLQAELARERLRDLRRLMVEADRREARIATRVAGHALLEIPGVGALIAAKLLGEVGDVGRFRHDDAFAALAGVAPIPASSGQVQRMRLNRGGNRQLNRALYLVALVQLRHHPPAQAFVARKRAEGKSQREAIRCLKRHLARVVFRALQRGAEALAVAA

SEQ ID NO: 370605 - protein, 411 aa, unidentified
MKFTGIDWKDKGYTTRIVNEEGNDLSGSFEVKKDREGFSEFIHKVRKYCGDDNDIIFGIERERDPIVEYLIALGYKVYLVCPNMMKSLRKRYSSTGKYNDDFDSYIIADTVRTDRNRLTRIKPRNDKIRKIEFLLRHRDKAVDDKRRLTNRLTCYLKEYFPAFLDCFSDITRPTALSFLKAYTTYDSAKELNKEDIRAFLKKNNYHKERGVLRIWKAIKKGQVKIDPIVIRERSKSIIHLIKRIEILDEEIEEYENDLKETTKGDKDKEVFKSLPGSGDTLAPGLMVIFGKDRSRYKNAQEINSLSGIVPFTKQSGNWESHLFRFGCNHFYRDIITKLAYCSLTKSEWARNYYNTKRAEGKSHYHALRCLGRIWINIAFSLWKKGEKYNEDKHMAAVQRHSIKNRLSRKSA

SEQ ID NO: 370606 - protein, 376 aa, unidentified
MDKWVLCFSNGKKFRWITLRNEQASVKRLLEEAGKARKSLGLSGEVRAMCSYEAGRHGFSVHRELVAAGVESQVVDSASIEVPRRKRRNKTDRIDAKALVKLQMRWAGGEKDALRVVRVPTVEQEDERRPEREIHRLKKERTAQTNRIKALLLLAGVRVRKLDKKFAGVLEKARQFDGSPLPPHLLEEVRHSYERRCLAERQMQGLRKARRERLRTASERLQAKQEPRSYADRAASGVVGLSRLYGIGAESAWLLMTEFFGWRDFKNRRQVAGSGGLVPTVHLSCTVQQDQGISKAGNPRVRWMLQEIAWSWLRFQPESELTKWYNAKFGAGTSRQRRTGAVALARRLVVDLWKYVAYGVIPKGARLKGEVLAQAA

SEQ ID NO: 370607 - protein, 385 aa, unidentified
MRPFGEIVSTPFEIKHTSSDINSLVKLIKSIEGESRIVMEHTGRYYEVLAHQLSEANLFVSAINPKLIKDFDNDSLRKVKTDKADSVKIARYALDKWQNLKQYSVMDELRNQLKTMNRQFGFYMKHKTAMKNNLIGILDQTYPGVNTYFDSPARSDGSQKWVDFASTYWHVDCVRKMSINAFIDHYENWCKRKKYNFSKSKAEEIYGKAKELVPVLPKDAITKLIIKQAVDQLNSASTTVESLRTLMNETASKLPEYPVVMAMKGVGTSLGSQLMAEIGDVSRFTHKGAITAFAGVDPGVNESGSYEQKSVPTSKRGSSDLRKTLFQVMDVLIKTHPQDDPVYQFLDKKRAQKKPYYVYMTAGANKFLRIYYGRVKEYLASLPES

SEQ ID NO: 370608 - protein, 373 aa, unidentified
MPKYSTAFGMDVHLRSTTVCALDADTGEAVTRRFPGNPWGEIAGWMDGFPGPSLAAYESGYLGFAPQRELAGLGVECAVAAVSKIPRSAADSASKNDRNDAARMAKAILAHDISPVWVPSPEVEGIRDLAGAYDGATARLATAKQRLLAFLAKRGFVYGGTTPAGNPRKYWTYDFLRWLDKVRPEDDGGVRALAALRNEVEAAAEARADLLSEYRAAVDASPIAAEVAALQSIKGCAFALAAAFSAEVGDFTRFRSGRQVTAYFGLAPSQRSSGDSVRLGGISGAGNALVRKLAVEGSWCYAAARHQPKLMPRDTGVPLEIRMHGRKGSERLLRRREEMLARGMPAAKANAATAAELVRWLWALGMMCREGAE

SEQ ID NO: 370609 - protein, 365 aa, unidentified
MVFLGIDLHTNCFTCCYLDQQGGKNLATFQLNADELERFFATLTTDTYVLVEATINTFAFVERFQSRVAQVVIANTHKLKIISFTDKKTDKVDAEKLARVIKTQVLSGEPQASPVMIPSHLVQNLRSLFSTYQLMRKQITSTKNRIHSLLSQNLLPFTKKYIFGKNTRPLIREISVDPVLSYQLNFLFDELEHLEWKTDQLVERILVTAHPFIREIELLTSMSGVSTFTAAAIMADIETVARFPNAKAFTCYLRSTPRIESSNTKTIIKSTNKAGRKLSIVLLSQSLNHFRDADPFLKAWNDRLCQFKRKGVVRMGLCRKAFTQIYQMLKKTELHRYCDPIPHNKKMNEYRLFLRSYGVKSKDAA

SEQ ID NO: 370610 - protein, 421 aa, unidentified
MHVLYQRCAAVDIGKDVIAVAVRLPGDGPEHRQTIKRTFKTFYGVLKHAAGWLTAQQVTHVAMEATGIYSMPVYHALIEHGQFEKVLVCNAGHVRNVPGRKTDLSDAEWLVHLLECGLLRGSFIPPAQIKAARDVIRYRTKLTESRTSELQRLGNVLQDAGIKVDSVASTITTQSVRAMVEALIDGERRPLLLAELAKGRMRARIPDLQRALEGRFDDHHALMCRLHLDHLDHLEEMIARLDTQIQDMMQPFRAQRELLTTIAGIGPFAAAAIISEAGADIGETFPSAGHFASWIGVCPGNHESAGKRHSGKPRKGNQHLQHVLVECAWAASRTPGYLQSLYRWHVRKFGGSRNPTAKNKAIVAVAHKLAIIIWHVLATGKPYTDLGADYLDRRIDPAKETRRLIARLQALGHTVTIEPAA

SEQ ID NO: 370611 - protein, 453 aa, unidentified
MATRPKAAVLKKADPTVGLPPLNHHAAGIDVGSAEHWVAVPPGCDPEPVRYFGSFTADLHRLADWLAACGVKTVAMESTGIYWIALFQVLEARGFAVHLVDARRAKSLPGRKSDLLDCQWLQKLHTFGLLNRCFRPTEEVCVLRSYLRQRENLVAAATISIQHMQKALAEMNVQLTNVISDLTGTTGLAILRAILQGERDPARLAELRDCRIQASPEEIAQSLVGTWREELLFVLRQALELYEVYQQKIAACDAQVEAHLKGLPSKAAADAPLPPPKRNQKPRKSAPQFDLRGQLYRVSGVDLTGIDGINVLTAQTLISEIGLDMSAWPTEKHFASWLGLCPDHRISGGKILRRGTRQVINRAATAFRLAASTLRNSKSALGANFRRLRTRLGAPKAITAMAHKLARLVYRMLRYGKEYVDKGMEHYEARYREQQVKWLTKQAQELKLQLIPV

SEQ ID NO: 370612 - protein, 309 aa, unidentified
MVFDVTDSDGNYYQFKNTISGFRKFVKLLGSDSHCVMEATGYYHYQLAYYLLESGIKVSVENPLSVKRFIQMKLSKIKTDKSDSKLICEYAKQVELKLWKGNSKHQTECLQMTRLLAVYTKQTTMLKNKLHGEAVLGNPSKAVVSSLKRSLKQVQKEVKTLEDKLIVLVKEVHQDVLTRLKSIPGIGAKTSLMLVVLTDGFERFTSGSELCSYAGLTPVIRKSGSSVTGRPRISKIGNQKLRSLLFMCSFNACKYNKACREIYERIVAKGKSKKLALIAVCNKLLKQAFAIAKSGLVYDDSHRSTLVKN

SEQ ID NO: 370613 - protein, 352 aa, unidentified
METDQYIGVDLHKASFQVCAITPRGERLWEARFARTPEGIAAFVARCTPRSAVAVEATTPTWHFVDQITAHVATVCVVDTRKTKLKAGYAAKTDRLDARRLADALRRESVVSIYVPPPAIREQRELARHRLMLTQMRTRVLQRMRALRLRQGLGDPPTKRLRSAAGQAWLDALELPSQAHRVLITLRQIERDLCAQLAPVEADIAREASADPIVQRLQQVHGIGPVLGLMLRAEIGDIRRFPTPAHLASYAGVVPQVDSSASRTHYGRITKDGSPWLRWALVAVGVQTLRRQDPLGRWGRKLAVRKGAMKAHVALAREMCREIMEACSHRCMTRYVSCPERDRVCRSSTYDA

SEQ ID NO: 370614 - protein, 419 aa, unidentified
MKPWNELTHFAALDWADDHHDLVVVDAQGQIALELTFSHTAEGWQQAQAALAAWPDLPVAIETSAGPVVDQLLQRSFTVYPVMPKAAARYRERKRPSGSKDDRHDAWSLAEALRTDGQHWRALSPLDPLTAELRALCRDEMALIEQRTALVNQLLAALKEYYPAALQAFADWTAPYTWAFVLAFPTPEALAQAGPRQWEKFLHTHKLWRPQTAPERLKIFAAATAFKGTPAITAAKSLLVRSLARLLQTLEQQLAAYRARIENLFARHPDHDLFGSLPGAGTKLAPRLLAELAGSNWAEVSQVQARAGTAPVNYQSGKIQRARIRRACVLPLRATLHLWADLSRRYSSWAAAYYQAHRDKGQSHACALRCLAHRWLEIVSAMCRTHTPYDAEHHLREIQKHGSWVLKLLPAQPITKLCE

SEQ ID NO: 370615 - protein, 411 aa, unidentified
MDVLIERCAGLDVHRDTVVATVRCPGPGGARRSETRTFTTMTGQLEALADWLTAQRVTLVGMESTGIYWRPVYSVLEDHFPVWVINAEHLRNVPGRKTDVADSVWIAQLLEHGLVSPSFVPPRNVRLLRDVTRHGRRLTEERTRAIQRLEKVLQDAGIKLTSVASTILGKTGRAILAALLGGEEDPAVLAELAKGRLRPKIPALREALTHRFRLEHHGALIAQMLAHIDFLESAILETHQRTEVLLRPVADIVELVMTIPGVGRRVAEVLIAEVGLDMTVFPTAGHLASWAGICPGNNSSGGKRRPARTRHGSMWLRIALTEAAQVAARGKNTYLAAHHAQIRGRRGTQKAIGATRHDILIAYYHIVRDRVPYQDLGPDWNNRRRSTEQQTRRLLRQLERLGVNVTLEPTA

SEQ ID NO: 370616 - protein, 313 aa, unidentified
MTQDSTPAAGVDIGKHRLDIAFHGQTTALQLPNTPEGHAALVAACQARGVARVGLEASGGYERALVRVLRAAGLDVVVFQPRQVHGFRTWRRRRAKTDRTDATLLAACAAGHGPGRPGPDPRLEALVEPLRLVEQIEADMARAKTRLEAYESERIRAGIRAEIARLKAWRAAELKAIRAALRAHPDLARRWALVLSVPGLGERTALTLLVRMPELGELSREQAAALAGLAPYDDSSGAREGERRIAGGRADVRTALYAAALPAAFRWNPALVALYKRLTARGRKHKQALVACARKLLIFANTVLARGTPWAQA

SEQ ID NO: 370617 - protein, 358 aa, unidentified
MKYYTSTTEFNCGIDLHSRQMYVCVMDRAGNKLVHTNIQGNEFAYFLKRVEPYRHSLTVVCECTFNWYWLADACQREGIRFVLAHALYLKAIHGGKNKNDRIDSEKLAHLLRSNLIPPSYVYPGAKRPVRALLRQRLYYVWRRAELLARIQCHQLAEGHTPVKQSRPNRDPWEERLLASYDNPLHKTALEIDLHMIRAYDEMLLRLERELLAATRELASRDYALLNTVPGIGRSLALTILYEIDLIERFPTVKDFCSYCRLVKGSVASAGKLKGTRGAKLGNPYLRWAFGEAAVIGKREQPLLRAYAQQLEAAHGKFRGNAILAHKLARAVYFMLKRGTGFDVEKLVATSVGGPVNAA

SEQ ID NO: 370618 - protein, 423 aa, unidentified
MPYRIAGIDVHKKMLAVVVADVECEGEYEFERRRFGSNPEQLQLLSEWLIEQQVEEAVMESTAQYWQPVWGALERYWRPICQKREGAAAMSGKLHLAQAQSNRGRRGRKKDFPDAERLVKRLVAEELILSFVPDPEQRLWRTVTRRKLQITRLHVRIQNQLESLLEEAHIKLSGFVTDLLGVSARRMLQALADGETDPAALAALADKRLRATPAQLCDALGACTELNPVYRRLIKMALEELQFLEQQMGQLDQEIANLLRPHEDAVKRLAEVPGLGVDSAQQIIAEVGPTVATFPSDKQLCSWVAVCPGDNETGGVNYSHRSPKGNRQLRRILNQAANAAARTKGSIFEIVYRRQVTRMGHNQAIGVIAHRLCQLIWILLHRKVRYEERGPAVTERSKRVRTLRMIRTLRNLGYRVEPLASPA

SEQ ID NO: 370619 - protein, 372 aa, unidentified
MRFYTQQHRFYCGIDLHARSMHVCVLDQAGAVLFDRNLPARPEAFLRAIAPFREDLIVGVECMFAWYWVADLCQAEDIPFALGHALYMKAIHGGKAKNDRIDAGKIARLLRGGTFPVAYAYPKGMRETRDLLRRRTYLVRRRAELLTHLQILNAQYNLAPFPKKLSFAANRTAMDIAQRFADPSVQKSAAVNLDLIDRLDELIGELELYLVRTAKVDDVQTYHRLQTIPGVGKVLALILLYEMHDVGRFGDAGPFLSYARLVRCLHESAGKKLGCGGKKIGNAHLRWAFAEAACLFLRASERAKRWKQQQAARRGEGKALAILAAKLGRAVYRMLRKREAFDEGRFWQGGPGRTGTGSSPLSRTEEACHAGD

SEQ ID NO: 370620 - protein, 363 aa, unidentified
MTVVSMPQTALPAHPEDQPAQQVILGVDTHKDMHVAAVITALGVLLNCQEFPATAAGYRQLLSWARSFGVLHRAGVECTGSYGAALTRFLTRENIQVLEVNQPDRATRRKRGKTDAVDAEAAARSVLSGRADVTPKTGEGPAADLRILRLAKESAVKARTQAKNQLKAVLIGVDPELRESLSPLSNAALITRCGDLPETGSAAVFTLRLLARRIQQLTAEVKELTRRVHHAIRACHPQLLELPGVGPDSAAALLIAAGDNPERLASEASFAALCGVSPVEQSTGKTQRRRLNRGGNRQANAALYRIVITRIRRDPRTRDYLERRTRQGMSKREIIRCLKRYVAREIYRHFQETTAPTAVHSAA

SEQ ID NO: 370621 - protein, 355 aa, unidentified
MTTVPHDEVRVTVGVDTHEDIHVAVAVDQLGRWLAETSIPTNTGGFARLIDWASEFGVIDTFGVEGTGSWGAGLARWLRAEGLVVIEVDRPKRKHRRHGKSDAIDAEAAARAVLSGEATAVPKTGDGPVEMIRVLRLTRRSAVKNRTMTANQINALVITAPDALRDQLRAMTTRRRVAVAAKFRTGDEPTTVLEATRYALRELARRYQHLTEQITRLDAQLDRLVAETAPELIAKVGVGTHTAAALLVTAGDNPQRLAREGSFAHLTGSAPLDASSGKQERHRLNRGGDRDANCALYQIALTRSSVHEDTKRYLQRRIAEGKTKKEAFRCLKRYIAREVHQTLVRTPALQAALDT

SEQ ID NO: 370622 - protein, 472 aa, unidentified
MKRKSESNKLGARQRAKRTTAGRRKGPEGLPQINPNAAGIDVGSKQHHVCAPPAADGTANVKVFGTTTPQLPAIVGWLSEHQVTSVAMESTGVYWIPLLELLEAEGLEVILTDTRQRSRVPGRKTDMLDCQWIQLLHSCGLLAGCFRPEDAIGQVRALVRGKAVMVAERSDWIRRMQKALDQMNVRVHQAVSDIDGTTGMAIVRAIVGGERDAWKLAQLPDPRCRKSVAQIAEHLTGNWRDDHLFNLAQALKMYDSLEQHIAEYQGEIMRKVRQLPGKAEEGSAPAVSNKEKAKAFKKRGQEPMRQVLYAMSGADLTAIDGVGVETMEIVLSEYGATLHQFPTEKHFVSHLGLAPRQAISGGKPLHKKRKGGARRTRLGQALRTAATALKHSPSALGAYYRHISRSKGAYVAVLSTARKLATLIFRMLHHGQSYVDQGAALYEASYLKTRINRLQASAKQLGYQLVPQDSAA

SEQ ID NO: 370623 - protein, 438 aa, unidentified
MHGTYTLKQGGEIMKNVDVLNTLFVGIDVGSQTNAVYATDFCSEKIFRLKSIDNNQPGAVSLARKIEAFIKEKQLSGLIIAMESTSVYSTHLATFLSTTEILIPFKPAVYCLNPKVTAAYKKTFVAGDKNDPKDALAIADFARADKIKSEPWRGSQYLAIQRLTRHRLHLIEAVAREKSYMLSNIYLKFSELAVIDDERQPFSDRYGATSAAVLTEFLSVEDIASTPLADLTAFVNNRGRGRFSEPEATAKLLQQAAQNSYRLDKCLCEPITIALASSFNCLRAHEKEVKAIDKAIFETIKGFNTHEYQCFTSIPGIGPVFAAGVLSEIGTIKAFKSDESLAQYAGITWPDNESGKFKADDKKLSKRGNAYLRYYLMEAANSVKNHLPDYKDFYSKKYAEATTHKHKRALALTSRKFIRLIFGLLDKNQLYTPAGGNT

SEQ ID NO: 370624 - protein, 350 aa, unidentified
MKETGEIIGETKIPADVSLIIKFIENAKKSVDSDDVQIKTGYEAGCLGYSLYWQLAAKGIECDILAPSTMHRSAKNKVVKNDRRDAKNIAANLANGTYKSVYVPTDEDVEIKEYIRMMHDFKIELKKVKQHINAFLLRFAHHYPGKSKWIPAHIKWLKELELSDMYREILDEYLSQLEILSEKIERFKHRLEELSQKETYNEKIGQLRCIKGIDTTAAMTMHAETSDFDRFPTANAFASYCGLTPGEDSSGESYHRLGITKQGNSMIRTTMVEAAQVLVRGTIGKKGKKVKSKQKDQNVKVIDYADKAVVRLQKKYHRMVFRGVKRNIAITAVARELACFVWGIETGHIS

SEQ ID NO: 370625 - protein, 364 aa, unidentified
MIVIGVDVHKRTHTLVAIDGITARELAVREVKATDAGHLDALRFAAGLGDEVVWGVEDCRHVSQRFEQALLAAGQHVLRVPPAMTGQARKGQRQPGKSDPIDALAVARTVVREGVDRFAVAFLDQPSMDIRVLHDHREQLIAERTRMINRLRFHLVVLDPDLEAELASRTLDRASILTRVRRQLSRLPRSAQARVALSELTHIAALTKEIDGLLGELDRLTAAQNPGLRAETGCGPVTAAILIGQTAGAQRFTTDAKFARQAGTAPIPASSGNTNRYRLHRGGNRQLNKALHVIAITRARLDPQTRAYLERKRAEGKTSREALRCLKRHLARRFWKLLFTANTSPQPAQPSVTVGAPALMPCSR

SEQ ID NO: 370626 - protein, 337 aa, unidentified
MVYGAIDLHLRYSQIRIVTETGAVVCERRVATTRERLTAVFAPFGAMRILVEASTESEWVAQTLEAVGHEVIVADPNFAPMYGDLRRTVKTDGRDVAALAEANRHGWYRPSYRVSTAQRQQRQRVGARRHLVEARTGTISVVRAILRQQGYRVSSGSSATVPARIAALALPAELAAIVAPLLRTVHNLSVEIAALERAIRAVSAADPVIGRLQTVPGVGPIVAASFRAFVDTPTRFAGAGQLTAALGLVPREASSAERQRRGHVTKVGPAALRSVLVQAAWAHWRTIRTGRLRTWVDQVAARRGKRIAVIALARRLSRILFAIWRDQTVFDRARLAA

SEQ ID NO: 370627 - protein, 326 aa, unidentified
MQKSLKFIGIDISKSTLDICVLDNDSSVHYQIENQALQIRKFFRVFPKKNIRICFENTGKYGWVLIEILSNLEFKFYQVNALHLKRSMGLVRGKDDVVDALRIAQFISKNHKETPLYQTSDKNIKKIQVLISKRNLLVKQRAQHKTLKKENELLKSLKLPALGKYSNAIISLLNKHIKGIEKMITNIIKQDQELNKNHRIATSVPGVGKIVSWNMLVKTNGYKGICNPRKFACYAGVAPFSQRSGTSINKKARVSHLADKTMKKLLHMAAMRAIQLENDLKKYYIRKVKQGKNKMLVLNAVRNKIIHRIFAMIKNEKLYDFNLHLS

SEQ ID NO: 370628 - protein, 453 aa, unidentified
MSARPKSKPVQASPSLPTLHPHAAGIDVGAREIYVAVPPGPGVRSVRAFATFTEDLHALRDWLKACGVTTVAMESTGVYWIPLFQTLEAAGLTVCLVNARHCKNLPGRKTDVQDCQWLQQLHAFGLLRGSFRPPEQVCAVRTILRHRDSLVRGAGRCVSHLHKALTQMNVQLHHVISDLTGVTGQAILTAILAGERDPHKLAALKDHRIKASRDVLAKSLRGDWRPEHLFTLRQSHALWQEHQRLITACDAEIAALLGKFETRTEPAATLAPAKTSHKQAQKHEPQFAARAECFRVLGVDLTGVPGFQTPTVLVLVSELGPDFAAKFPSAKHFGSWLGLCPDNRITGGKVYSVRTRDVKSRVAEALRLAAQSLWQAKNYFGDLFRRWKARLGSPKAITAMAHKLARVLWHLLKFKEPFNPAVFAKEEEKLQRKKLARLQNLATALNYSLVPNQ

SEQ ID NO: 370629 - protein, 247 aa, unidentified
MSTPLPQTIGIDISKATLDVHACPAGLDARFDNSAKGYKALLKWLTQWPVERIAYEATGTYHRALEAALAGRPCVRLNPERARRFAQATGTIAKTDQIDAAMLARMAATLQPPVRPTRSEKEVLLAELINARDGLVRDRTALKNREKNLTIAILKRHCKQRLDQIDRHIEALDTEIATFITADAKLTRRHEILTSIRGFGTLTANQLIATMPELGSLENKQAASLAGLAPVARQSGQWKGKSFIRGG

SEQ ID NO: 370630 - protein, 372 aa, unidentified
MNYNTVYVGMDVHKESFTLCSCKYEDEKASHYQRTPASYKNVLRYLAFLRTIYGEDTRFVCGYEAGCLGYSLYHQLENFNVECVILAPTTMLEQRSKRRIKTDKRDAEIIAKSLAQHNYSPVHIPTETDNQTKEFIRMRDDHKAELKKIKQQILSFCLRQGYQYDGSGNWTAKHVKWLRSLKPAGLYKEILDEYLLTYTILTDKLNRLDQRIEELASKEEYTESVSKLTCFLGIKTHTALSVIVEVGDFQRFVSARKFAGYLGLVPGQHSSGDDRNGLGITKAGNTHVRRLLVESAQSYTRGKIGYKSRVLRSRQAGNSPQVINYADRANERLRRRYYKMVLKDGKKYNIAKTAIARELACFIWGMMTDNIY

SEQ ID NO: 370631 - protein, 367 aa, unidentified
MGVLFVGLDVHKETISVAVAEDSRHGEVRSLPTISNTPQAIEKMLAKLSGKAGRLSFCYEAGPCGYGLYRQIVESGHDCMVVAPSCIPTKPGERVKTDRLDSIKLARLLRAGDLTAVWVPDAAHEAMRDLLRSRTDAMHQLKTAKQQLFAFLLRQGRVYSGRKLWGRAHLRWLSEQKFEQEAHRMVFQDYINAVQDGQQRHGALIKIVEGMIPQWSMRPLHEALCVMRGIDTISAATILCATGDLRRFDSPGKLSAYFGLVPSEHSSGGSVKRGGITKTGNNEVRRILDQSAWCYRFPARVTRAKEKIASETEKKVRDVAWRAQVRLCGRYRKLLAAGKCAPLVCMAVARELAAFIWEMGRVVPLTT

SEQ ID NO: 370632 - protein, 411 aa, unidentified
MSDSIFVGIDVSTKSNKVCILDQQGNRLSKLSVENNSHGSARIVERVIEAIVKSNSSSVSFGLEATSVYGDGLIFFLKQEPSLKPYSTKVFLLNPKQVHNFKKAYSDLPKTDDVDAWVIADCLRFGRINLREVYFDEQHKALQRLTRARYFVAQNIVREKNRYLTNLFLKFSGMCQEKLFSNNLGATATELAGSEFSLDEIVHIPLDELAIFINTTGKGKFADPEALAAGIQKAARSSYRLPKTVEDSVNQVLAVSVISIKSYLQQLKTLDQSISTLMEAIPNTLTSIKGVGPVYSAGILSEIGSINRFKDQASLAKYAGLSWSRYQSGNFDADNTHLINSGNRYLRYYLIEATNLVRRHDPEFRRFYELKYHEAPKSPHKRALALTARKFVRLVYALLRDQRLYLPPRVR

SEQ ID NO: 370633 - protein, 318 aa, unidentified
MQRQITTLDFKGQNIFVGIDVHLKSWTVTILTEELFHKTFTQPACAETLCNYLKRNFPGGDYNSVYEAGFSGFWAHYKLKEMGINNIVTNPADVPTSQKEHLQKDDPTDSRKLARSLRSNELKAIFVPNRATLEDRSLVRMRATLVKDMTRFKQRIKSFLYFYGISYPTQFEKSGTHWSKRFMKWLGEEISLEHDSGTQALKILVQEAEQQRKLLLEVLTKIRLLSRSGKYAKNIALLRTIPGIGPITAITFLVEIENIERFPNTDHFAGFVGLVPNRHSSGTKSSDGEMTFRGQKTLKSLLVESSWTAARSDPALMM

SEQ ID NO: 370634 - protein, 405 aa, unidentified
MPLSKASPHRFVGLDVHKHYLVAAAIDQDLNEVLSPRRVRLTRLDDWLRTTLTPQDAVVLEMTTNAFQLYDDLLPHVHSVTIVHPPHVALITRAQVMTDKIAARSLARLLAAGLLPPVWVPPPEVRDARALVAQRSKMMHLATQARNRLHAVLHRHHLLPPGDDPFTTAKHEWWLSLEVSALERARIQCDLDSLVFAQTQIALLENAMKILAAHDERVPLLVQIPGIALLTALTLLAAIGDIARFRTAKHLVGYTGLGTRVHDSGLTHRSGRITKAGRRDIRAAMVEAAHTASRTHPHWRAELARLEPRLGKNKAIVAIARKLLVAVWHVLSNEEADRFADPQQVARMLIQHAYRLGRDLRPDGQTVGEYVRQQLDRLGLGADLTAIRQGRRTIPLPPSLFAQSD

SEQ ID NO: 370635 - protein, 368 aa, unidentified
MSTRNTQTDATQKTLSRWCGCDVAKATFDAALLLPVEEERPFTMKDMPVRTFQRTREGVREFLAWADELLEPYMDSLCPMRVVMEATGKYSTQLAIWMTAERPSLSPAIINPQTARAFTESLSLRNKTDKTDARALAIYGVERRPVAYEPPSRELSELRSLSRHRQSVIEMRVAEENRLKETNDSPLVRQMLKRHIAQLRRDEGRLEKEMKKVLETMPELKRDAQATDQIDGVGFITAVTVLAEVGDLRRFEKARQLSAFSGISPRQNRSGQSVHHKTRMSKKGSSRVRKALYMPAMAAIRGHNDLADCYHRLLAQGKPKKAALGAVMRKLLLLMRAILISGEEYQKHYRRPCGKLLKKGLKTELILT

SEQ ID NO: 370636 - protein, 315 aa, unidentified
MITSYQNFIGIDIGKFKNVAAVHNQKNIIKFDNNSAGWQQLFQEFSNILPNAFVTLENTGKYELGLAHFLVGKNVAIHRANTRKVKSFTLSHGTLAKSDQSDARTLAQYGFERYSTLSLFVPMSKEQTTLVALCQRRDDITQMRVQEKCRLAAPENDYIKESCQKAVDFFNNQIDELNDSIQKIIDGNAELQKRQKIIRTVPGIGIKLSQDFVCLMPELGHLNKKEVASLAGVAPHPKESGKTIGYRRITGGRSNVRRKLFTAAMAAAKSKSALGAFYSKLVESGKKKMVAITALMRKIIVIANARLKEAINLHI

SEQ ID NO: 370637 - protein, 312 aa, unidentified
MAHRVVDAGVDVSKPFLDVALWPTRETTRVSRDATGLNELAAWLTLHEAGRIGVEASGGYEREVIDTLQALGFEVLLLNPLRVRRFAQAKGRLAKNDRADARTIAQFVSVMIDAPQPTRRRELDPLVEHLTLRRQLLDWITDCTNQLEHLKNAGLRATIERQKVKFESVLTTIEAKLAKLIAEHDDWSALSRRLRTVPGVGPVLSQTLIALLPELGTLSGRAITSLVGLAPFDHDSGKHAGERHIQGGRAAVRNVLYMAMLSAMQHNPLIAAFARRLVGKKFKVIMVACMHKLLVMLNAMVRDGADWRTNAA

SEQ ID NO: 370638 - protein, 314 aa, unidentified
MIGIDTGKENFDVAYCESGRMKTQKYSFSVSDIKKFISLPDAESHCVMESAGVYHLRPAHALHEAGIPVSVVNPLSVNRFIQSKMHRTKTGKSDAMVLVEYGSMMEPALWKPDEAHYTQARQLLNIQEQLIKNRTSVASQMEAVILSVSQSKTAPGLLKKQLLFMENQLIQTERELEELTGRHDDEDVHNLQTIPGTGHKTSVALTVYTRGMTGFDAHRQLSSYFGICPRTVQSGTSVRGRGKICKMGMGHIRMLLYMCARSAKKYNRACRELYERLLAKGKAKKLALIAVANKLLKQAFAIVKNKSAYVENYV

SEQ ID NO: 370639 - protein, 330 aa, unidentified
MTNACTYPSEGHATWFIGVDVAKDEFVWAVHGSSQTTSCPNDSAGAQALFSALAEHNIGLVVLEATGGHERALAGFLLERGVAVAVVNPRAAREFARSMGHLAKTDQIDACALAHYAQTLAAKADQAGIRFAPPPPHIEALQALVTRRAQLLNMRTAEKNRLAGAVRVLRSSIEDVIRTLDRQIKRLDKEIDDHLDSHFSQQRKRLESIKGIGVTTCATMLAFMPELGHVSAARVAKLAGVAPLNQDSGKMRGRRQIWGGRSLVRCTLHMAMLSAVRYNPVLQAFYQRLVAAGKPKKVALVACAHKLLRILNAMERSGQHWNEAMHTNPA

SEQ ID NO: 370640 - protein, 431 aa, unidentified
MLKINPLSTLYVGIDVSSKSNYVCALDFFKNKYINSSFANNQPGAEELALKILECLKEHPDITTIVAALESTSVYSIHIANYLSSCEELMRFKPYVFVLNPKCTANYKKSYIGLGKSDPIDAFVIADYARAGNIESEPWRGSQFLALKRLTRHRLHLVECMTREKTYLISNLYLKFSELQMLEGDDQPFCDIYGATSSSVLMEYLSPEEILASSEEDLIAFLAEKSRNRIKDISKTADLLKKAARDSYRLDKALYEPLNVSIASSFNCIETFKREIKVIDNAIEKEIKGLNPNAFIILQSIDGIGPVFAGGIIAEIGDITAFHSSDALAKYAGLTWKSNQSGDFDGEDTPMIKAGNRYLRYYLGEAANSMRKHNVEYGAYYRKKYNEVPKHQHKRALALTSRKFVRLVYGLLARNQLYSGVSLDTSIKDSN

SEQ ID NO: 370641 - protein, 373 aa, unidentified
MPKYSTAFGMDVHLRSTTVCALDADTGEAVTRRFPGNPWGEIAGWMDGFPGPSLAAYESGYLGFAPQRGLAGLGVECVVAAVSKIPRSAADSASKNDRNDAARMAKAILAHDISPVWAPSPEVEGIRDLAGAYDGATARLATAKQRLLAFLAKRGFVYGGTTPAGNPRKYWTYDFLRWLDKVRPEDDGGVRTLAALRNEVEAAAEARADLLSEYRAAVDASPIAAEVAALQSIKGCAFALAAAFSAEVGDFTRFRSGRQVTAYFGLAPSQRSSGDSVRLGGISGAGNALVRKLAVEGSWCYAAARHQPKLMPRDTGVPLEIRMHGRKGSERLLRRREEMLARGMPAAKANAATAAELVRWLWALGMMCREGAE

SEQ ID NO: 370642 - protein, 344 aa, unidentified
MKDTIYDHYIAIDWSIKNMAIARMTKKSNKITAIDVPSDIEDLQAYLTNLRGTKIVAIEETTTSQWLYTELKDYVDRIFICDPNRNKLLNEGPKTDKIDASKLVQLLKAGLMKEVYHSTDTFVYLRRVVSGYEDLVKAGVRLKNQRSALLRACGKQDNKKAGSCSIDSQGEQFVLDCLYRQIEAYEDEKEGYEHEFERLARKNPAIKHQKSLPGIGTINAVKIVARVVTPHRFPDKGCYLSYTGLIKLEKTSGGRSYGKRSPRYSRQLKSVYKSGVLAAIGGTNPINDYYEYLIQKKGYPEHNARHKACRRLAILSLGVFKSGRKYQPYRSNYVKNNNEGTSGL

SEQ ID NO: 370643 - protein, 393 aa, unidentified
MQISVGIDAAKEVHWATAVTGDGRVLLDRKVLNTADDIGKLATDLAALGGQRLVGIDLLGGIATLLSAMLLAAGERLVHVPGLAVNRARQGSVGGQAKSDPKDARVIADQLRLRAADFRPITLQDETVAELRLLVSRRGDLVVDQTRRISRMRHLLNTIHPDLERALDLTNAGPLTLLTRYVTAAQIRAAKPKTIARFLRAKDVRNPDTLAEAAHAAALAHPKLRLPAEDVTARLVREMADEAIACRSRIAAIDRRLDELVQAHPDGALIRSLPGMGVVLAAEFLAEAGDITRFRSAAALASAAGLAPVLRQSGKARHLQRPGYANNRLKRVFYQSAFCSLADPLSRAFHARKRQKGKRHHQAIIALARRRIDVLWALLASRRPFNAKHQEAA

SEQ ID NO: 370644 - protein, 341 aa, unidentified
MSVIAPAFSFGLNGYMGIEARMTRRGREKTMQPVIGIDISKDTLDAYRLSDDMHIQVSNDKPGHRALMRWIGQTDTSLIVFEATGAYHRELEARLAAADLPYAKVNPRQSRRFAEVTGRLAKTDRVDAIMLARMGAMLGLQRQEPPSDDIVDLREFLAARRALMKDKVAAKTRLQTTTQDLLKRQISVRLRQIELQIAQIDAAMSKKVMQNEALSQKLAILVSIPGIADVTAISMIVEMPELGTLDGKKAASLAGLAPVSRQSGKWRGKEHIQGGRTFLRRAIYMPALVAVQRNARFKAKYNQLVEAGKPPKLALTAIMRRLIVLANALIRDRRQWSEIRP

SEQ ID NO: 370645 - protein, 443 aa, unidentified
MHSQVTETTIGIDTAVVAAHRVAVRGSARDDFAVPPTLAGMAMLTARLAEHAPALVVAEPTGMTWLAVGHAAQAAGCEVSLVQARHSARLRGAIAGKHKTDVADADMLAGCAGVFGLTPTRLPPPAQIALRRAVRRRHGAVVDAHRCECRLWTLAAWAFPDVWHACGHSQPLLQALLGRWPHLAHLARPRTTPRTTSIAQLCHARLRDRDDVEVRAERIRAMAADWAAFWRGRLDLDALAWETTELLGDITDADARIDRATSQTQRLWAAAWGRDELLTSVPGIGPKVAPIVRAWFDDATGFATGKQAAAFVGLNPSNWESGLMAAPSRPITKEGPPELRLALYQAANVARRRDPQLAACYRRLMVERGHTHIQATCAVARKLTTRVWATLTRGTPYEFRDLDGTPISEEAAVELAASHTVPADVRRRTRARVAAVRRGRLSG

SEQ ID NO: 370646 - protein, 370 aa, unidentified
MKKHSTTPKSPKQASACKGGPITIGLDLGDKTSRYCVLGANGEVMSEGSVATTRKAMAEKFAKMRRCRVAIEVGTHSPWLSRWLSSLGFEVIVANARQVQLISASSRKNDRLDARLLARLARVDPQLLRPIRHRSETAQADLMRIRVRAALVEARTRLVNAARGFAKAMGERLPACDTDSMGVERMESLPEGLRDTLKPLLEQVESLTEKIKESDVKIEQIARTQYPETELLRQVSGVGTLIALTFVLTLEDRERFRKSRDVGCYVGLRPKQSESGQSQPQLRISKEGDVYLRTLLVQAAHCILSRRGPDTDLKRWGLKLASRGGKNAKKRAVVAVARKLAVLLHRLWVCGEVYEPLRNSQASGSSKKAA

SEQ ID NO: 370647 - protein, 343 aa, unidentified
MEAITTIGLDIAKSVFQVHGIDAEGNVILRRQLKRRYVLTFFRKLPPCLVGIEACASSHHWSRELQALGHTVRLMPPAYVKPYVKRHKNDATDAEAICEAVTRPNMRFVATKTPEQQSCLTLHRTRHLFIRQQTSVINAIRAHLAEFGIVAPVGRQGVEQLLGVAADTNDKRLPEVARACVAALGAQLRMLKAQILQFDRMIRAWHRSNEESRRLDDIPGVGPALATALVASVADPKAFRSGRDFSAWIGLVPKQNSSGGKDKLGNISKRGDRYLRSLFTTGALAVIRYAKIHGTKHRPWLTALLTRRPTKVAAIALANKIARIAWAMMAKGERYKEPAALAA

SEQ ID NO: 370648 - protein, 427 aa, unidentified
MNEVMAGMDLHRNNVVCGLVDQKGRRVVEKRLPCELETIVQWLEPYRTRLKRIAIESTYNWYWLVDGLQEADFDVVLANPARIEQYSGLKHADDSSDAFFLAELLRLNILPTGHIYDRQLRPVRDLLRRRLLLVRQAAALKLSFQSLYARTTGQTLSLSRLQQLTPAEVPGLFAHGAEQLIAQEQLRLIGELGQSIAQIELAVGREVKDWTSYRWVQTIPGVGKILGLTIALETGPITRFASAGDYASYCRCVRSQRVSNGKVKGANNGKNGNRYLAWAWVEAAQFARRYYGPCRRFFDRKAGEVNGALASKALACKLAKAGWHVMREGVPFDWSRAFPGGVPGGEPERQVRAAGAPRTPPPPHRPAPETNPTSLAPLGSVSSRVSPRRGESGTAAPSARTRSKTQAKGAKPPVSTESRTKIMKKRT

SEQ ID NO: 370649 - protein, 321 aa, unidentified
MDGRKLETVRIENSPRELRRVLGRCGQRPLVVLEATYGWYWAADVLAEAGAEVRLAHPLGVKAFSYRRVKNDERDAADLADLLRAGLLPEAWIAPPGVRALREVIRYRHKLVGQRTSCKDQVHAVLAKLGIPVTHTDIFGVHGQAWLDELKLPQPYAGKVASLRQLAGGLTAEIGLLEQVLGDLLAGHEGYAAIQQLPGIGPVLAAVIVAEIGDIRRFPGPGQLASWAGLTPRHYESDTKVIRGHITKQGSRMLRWAVVEAIQRQPAGTRPRQVRDGIIARRGKEARNIAKVAAARELLTLVFYGMRDGHVRRALQRGQAA

SEQ ID NO: 370650 - protein, 365 aa, unidentified
MNKDKYVALDVDSANIVAGVYDDKGESIMQCHIRTNSSDIQEFFRGLSGTVHVTFEEGTQAAWLYDLIRPLVAEVIVCNPRHNKLIQAGNKSDKIDVDKMGKLLRLGELRAVYHGEKTIQGLKHLDHGYQNLVEATTRAKNRLKSLFRYGGIDCRGRGVYDYATRKDWLKKLEIEGLEARAIYLYEEINFLTALREKAEKALCREARKHSAYKLIIQLPGLGPIRTAQIISAVGSPHRFRTKRQFWPYCGLAVVTHTSADYEWVDGRARRRKKRVQTRGLNKNHNRRLKAVMKGAALTAVHKDEDFKQYYQGLLDKGMREEMALLTVSRKIAAITLAVWKKGEAFDPKRLNQAAKHRQPSELELA

SEQ ID NO: 370651 - protein, 415 aa, unidentified
MSDQRRWYAGVDWGSQSHCVFLTDSDGRKIGEKIFKHGGEGLAEMAAWLMTASGAGDPGQIHVAIEVPHGPVVETLIERGFKVHAINPKQMDRFRDRFTMAGAKDDSRDAEVMASCLRTDPRCFRLLAAADPIIVELREWSRIAEDLGVERNRLANRLREQLWRYFPALLALEDDLGAEWLLELWEAAPTPPKASRVREATVAKLLKRHRIRRLDAASIVEALRKPPVQVAAGTVEAASAHIASLVPRIRLVNRQLKDAHSRIDVLTARLMPAEETKPGQKKQHDAEILASLPGVGRTVLATLLAEASDALQRRDYAALRSLAGVAPVTKRSGKSCVVVRRQACHDRLANAVYHWARVAVQHDPRSRAKYAELRSRGHSHGRALRSVADRLLNVACAMLKSGAAFNPSSAAQKPA

SEQ ID NO: 370652 - protein, 374 aa, unidentified
MEQAITYVGLDVHKDMIAVAIAETGRLGEVREYGKIANTPTALKGLVSRLTRSGTALQFCYEAGPCGYRIQRQLTAAGHGCVVVAPSLIPRKPGDRIKTDRRDATNLAKLHRAGELTPVWVPDPAHEAIRDLLRARLAAVRGLRQARQQLSGFLLRHGHHYNRPAWTLIHRRWLAGLKFEQAVHHIVLEDCIAAVEAAMVRRDRLEAYIKAALPEWSLAPVVHALQALRGMALVAAATLVAELGDITRFANPRQLMAYLGLVPSEHSSGGTRRQGRITKAGNGAARRMLIEAAWSYRFPARISRELLLRQEGLARSIRDTAWKAQERLCRRYRKLARAGKPPTVVTTAIARELAGFVWAIANQVESSGALIRRS

SEQ ID NO: 370653 - protein, 334 aa, unidentified
MENIALIGIDLGKNSFHIHCQDRRGKAVYRKKFTRPKLIEFLATCPATTIAMEACGGSHFMARKLEELGHLPKLISPQFVRPFVKSNKNDFVDAEAICEAASRPSMRFVQPRTESQQAMRALHRVRESLVQDKVKTTNQMHAFLLEFGISVPRGAAVISRLSTLLEDSSLPLYLSQLLLRLQQHYHYLVEQIKDLESQLKRKLDDDEVGQRLLSIPCVGTLTASTISTEIGDGKQYASSRDFAAATGLVPRQYSTGGRTTLLGISKRGNKKIRTLLVQCARVFIQKLEHQSGKLADWVRDLLCRKSNFVVTCALANKLARIAWALTARQQTYEA

SEQ ID NO: 370654 - protein, 343 aa, unidentified
MEHYAGIDVSLEQSSVCVVDGTGRIVREAKVPSEPEALVRFFDQLGLVVARIGLEAGPLSQWLHAGLRRAGFAVVLLETRHVKAALSAMVVKTDRKDARGIAQLLRMGWFRPVHCKSLPTQEVRALLVGRKLLQSKLLDVELSIRGILRGFGLKVGQVSKGQFVTRIRELITGQAMLERVVGPMLRAREALRTEYHKLHRSMLAIVRDDATCRRLMTVPGVGALVAVTFTAAVDDPGRFSRSRAVGAHFGLTPKKYQSGETDVTGGISKVGDAMVRSALYEAANVMLTRASRFSSLKRWAMEVATRRGMKRAKVALARKLATVLHRMWVDGTSFRFGKQVAAA

SEQ ID NO: 370655 - protein, 344 aa, unidentified
MTTIDYIGFDIHKKTISFCAKAPDGAILEEGTIPSLRNRLLAWAKARPRPWIGAMEATLFTGWIYDFLKPLAQELKVAHPPMLKAIAVAKKKNDKVDARMIADLLRCNLLPECYMAPVAIRDLRRVLRYRNLVVRQATRIKNRIAGLLMETGTAYNKGRLHGKAYFSELLGSLQEMPPSVVELLKLSRGQLELFAVIQRRLLKGLNEHPDLSERVMRLQTIPGVGEILALSWALEVGEVGRFASIGQAASYCGLTSAQHNSAGTEQRGPISKQRNKHLQTILIEAAKLAPRRNPQLAVVHERELQRGDRNRATLAVARKLVAYLMAVDKGGKRFAMRARTEVAA

SEQ ID NO: 370656 - protein, 409 aa, unidentified
MEIIYPRCCGLDVHKREVVACAVITGSDGMPSKTIRAFGTMTPDILALADWLTAHEVTHIAMESTGVYWKPIWNLLEESFDLLLVNARHVKTVPGRKTDVRDCEWLAELLRHGLLTGSFVPDRPQRELRELTRYRTSLVRERTAAANRLQKTLEGANIKLASVATDILGKSGREILAALVAGETDSAELAQLAQGRLREKIPQLERALVGRVGPHQRFLVAEQVAHIDYLDEAIARVSAEIAERVRPDEDAIGRLDTIPGVGRAVAETLVAEIGADMERFPTAKHLASWAGLCPGNHESAGNRRSSRTRKGSPWLRACLIQAAHAAARTKGTYLAAQYRRLATRRGRAKAAVAVAHSILIIVYHLLTEGTVYRDLGTNYFDERDRQAVERRLVHRLEGLGYTVSLTPPA

SEQ ID NO: 370657 - protein, 288 aa, unidentified
MRSTAIQYVGIDVHQATLVCVVKDEAGQTTIESKVATRREAIESFVRGLGGRVRIAFEEGTQAQWLYELLRPISERVIVCDPRKIATKGNKDDQRDAERLCELLRLNALQPVYHDHSDRKLKEMVQCYEALVDDSLRVMLRIRAIYRSRAITVKARSVYQSARRSEWLEQISDEGGRFRAEQLYLQLDHVLELRRHARTMVLRQACNQRAYRLLRTVPGIGPLRAAEIIAIIGDPHRFRTKRQLWAYAGLGVITRSSGEWIADSHTGRIRRSSRPPLTRGLTRTSIGH

SEQ ID NO: 370658 - protein, 337 aa, unidentified
MMSMKSANNELDKHYVHFVGIDVAKKSFVLATSLSPKTKNYDNTAQGIDQAICFIKEEHKQCDNGKTLVVLESTGGLEVPLAKAIHLAGICVMIANPRQTHQFAKSQSLTKTDNKDAKMLAFYAKMMAQRDDLATLLYCPPSQSQELLTALINRRNQFVQMCVAEKNRLEQSHHSQISSIQAHITYLTEQIHELDKQIKTHLDDDNHPDLKQTSSVIQSVKGVGQTTTATLLAMLPELGTISHKQLASLVGVAPHPKQSGETKFKGLCQAGRPEVRKALYMATLVATRFDEKIKTFYQRLRANGKPFKVAIVACMHKLLTILNARVRDELQKQVVVR

SEQ ID NO: 370659 - protein, 369 aa, unidentified
MGKYSEAFVAFDVAKRKHAVAIAEGGRTGEVRFLGDVENSPLPIERTIKRLAGRYDRLHVCFEAGPTGYGLYRQIQALGHECMVVAPALIPKRSGERIKTNRRDAVTLARLHRAGELTGVWAPDAAHEAVRDLVRAREAAADDLRRKRQQLLSFLLRHSRIYSGGGHWTLAHRRWLANQKFDHPAQQIVFQEGIDTIEDALQRLRRLEKQLALIVPEWSMAPVVEAYQAMRGASFLVAVTFAAEIGDVRRFDTPRQLMSFLGLVPAESSTGDTIRRKGLTLAGNRRARRALVEAAWTYRYPARVSDTLRARLEGLPKPARNIAWKAQVRLCARYRRLSATGKKLPIVVAAIAREIAAFLWAIGREVAPA

SEQ ID NO: 370660 - protein, 387 aa, unidentified
MIYVGIDIAKETHVAAAVDSDGVIIIESFSFTNNHEGFKLLRSKLDTLDRDNLLIGLESTAHYAENVIFFLHGCGFELAVINPVQTAAMRKTGIRKIKTDKVDSLLICKTLMVNSFRHYTENDIKTLKLKSLCRFRQNLKKSKARLKIQLTSYVDVIFPELQSFFKSGLHIRTCYELLKAYSSPDDIAALHLTKLSNILSKASRGRFGKQDAQSLKSLAMSSVGVKNTYISIQITQTIAQIELIESQLAELETVIEAAVDELDSVIMTVPGIGKLNGAMILGEIGDIKRFSDSSKLLAYAGLDPVINQSGKFNAKRTRMSKRGSKLLRYALINAAWNVSLNNDTFKRYYDSKIAQGNSHYSALGHTAHKLVRVLFKLLNDNIPFALA

SEQ ID NO: 370661 - protein, 339 aa, unidentified
MNNSVIGLDIAKNIFHLFTLLADGKTLKKKLKRSELLTFFANYPASIIGIEACGSSHHWARELTKLGHEVILLNARFVKNYVVGNKTDFNDAEAIHEAVTRPNKRVVAIKTVAQQDIQLVHSIRKELVDQRTALVNQTRGLLSERGIVINQGIGQFREQLPLIVEDAENGLTDLTRELFAEQYEKLKVLDAEIKTQDQRINRLCNANDLSKRFLDVPGVGPLTATIVAADIGDGGKGYKSSRDYAASLGVVPKQHSSADKPHYLGISKRGNRYIRTLLIHGARTVLKNCTKKSDKLSLWLQALVARRGFNKAAVALANKNARILWAMANNGKDYEALVA

SEQ ID NO: 370662 - protein, 343 aa, unidentified
MLAIAVLGVDLGKNSCSVVGLDAAGRMVLRRRLHRDGVVKLAAGSPGCVVAMEACCGAHHLGRRLRDAGHEVRLMSPEYVQPYVKAQKNDERDAEAIAEAATRPTMRFVELKSEAQLDMQSLHRARDRLVGERTALINQLRAILLERGIIVPQGRRKLEVYLETLLSEERVSLSPRIRLLVEDQRAEWRELDRRIEAFDEEFAAAARSDEAARLLTTIPGIGPLNATALVAAIGRAATFGRGRDLAAWLGLVPRQMTTGGKPKLLGISKRGNVYLRKMLIHGARAALPALLKSEGLLGGWLRGLSARAHVNTVVVALAAKLARIICAVLRSGQRFEMKVATVS

SEQ ID NO: 370663 - protein, 331 aa, unidentified
MQAGEGIIGIDISKDSFDLVLRGTGREQHRVFTNDLKGFKAMLAWVEKQPEQVLHICMEATGSYWEGVAEYMYQAGYTVSVVNPYQVKRYADFLLNRNKTDKADASLIAEFCEKERERLRVWEPHPPEIKALRSMERRLDQLRDMKQQEQNRLKSGVSDSVVIESLQENLKHLEDQIKALLKKIKEHVDQYPELREKLGLLTSIPGIGMLTAIKLIAEIGEIEDFASASQLAAYAGLAPKQFKSGSSVHKQTRISKQGRTELRRCLYMPAVVASEHNPIVMDLKRRMLASGHANMEVIVAAMKKLLHLAYGVLKSGKPFDPDYGNQFCFNP

SEQ ID NO: 370664 - protein, 327 aa, unidentified
MKKNPAPVYVGMDVAKATLQVHLNGHQFEFKNDTKGHAQLSKRLAKLTLPQVVCEATGGYEQPVVEACHKANILVSVLNPAHTLAASRAQGKRAKTDPCDAAALTDYGQRFQPEPTPAVPPAVREITELTIWLKQLIDNRAVVKTQAEHQTNAFVGQQHAALLAHYESQIAIVEQEIKKTVHAQAPFQQRVDCLTQIEGVGFRTALLTLVFLPELGAMNRGGTAALAGLAPWTRDSGTMKGKRCIGGGRARVRSVLYMAALSASRCNPVLAPFYQGLKKRGKPSKVALTAVMRKLLIHMNSKLKKLADNPGLDKPAKSNKTKKSLAK

SEQ ID NO: 370665 - protein, 328 aa, unidentified
MNEATLPTLGIDISKDSFHLELSCNNKLRHRKFTNRQEGFAELCVWLVKHKAPQVHACLEATGPYSEDLALYLYQHGHRVSVVNPAQIKAFGQSELRRNKDDQPDAGLIRRFCEKQQPAAWTPLPAPVRELQALTRHLENLHETRQQQLNRLEGNKTKGVVKSLRKLVAYLDTEIARTEKQIEDHIDNHPDLKGRCQLLESIPGIGKRTAAKLLAEIDDISQYKSARQVAAYAGLTPKNNRSGTIRGKTRLSKTGNARVRKALFLPAMTAKRYNPIVRTFCQRLASHGKSKMQIIGAAMRKLIHIVFGVLKSGKTFDPNHELLLNSEP

SEQ ID NO: 370666 - protein, 453 aa, unidentified
MAQGSGLTRGDRNRNRKIGALREVVARDRAVLAVDLGEDKQAAVLIDHEGRALARKIVRAKAYQLGGLLGWASERAVRAGFAGLAVACEPTGHRWKALMGLADAGGHGFVCVQSLAVARAREGDDYTRDKTDHRDAYLIGKLVIRLDCYLPERAGEDWARLRHLGARRFVLVADVTCCMQQAGDLLGCAWPAPLGAAARPLESVTWLAGMTVITDRCCGQPGRLRTMGYEKFLAAVRRELPRWGGKFVRHSIVRGLWEALADPGGVAAQRRGALERLHLLLGDWRALRARLADTEARMTAMLDELGLTALVTSIDGVSALSGAVMLAETGDLARFASGRAVVKHAGLNPSEHTSATITGQTRISRRGRPGLRTAAWRAVWGALRHNTVLLAKHARWTSRDHNRLADGQARTACAATVLRWLWAVITTGTMWDARIAAGQVTPRRGAAAVPAAA

SEQ ID NO: 370667 - protein, 315 aa, unidentified
MTKHLPPVNVGVDVGKTQLDLYLLERGRALTVPNQEPDLSTLIRSLRRYRIKRIVVEATGRLEQPFVRAALAAGLPVIVVSPLKIRRFAQVIGQLAKTDAIDARLIAQFAATVKPAIRPASDLNAQAIKDLVVRRRQLTSLRTMEKNRRQVMPQELKSSIDRMIKMLNHELKLLEQLIDNAVDQHGASRHKRELLTSMPGIGNSVAATLIGDLPELGSLDRREIASLTGVAPFNRDSGTLRGKRRIRGGRTQSRTALFLSAMVATRFNPDIKRFYERLLSAGKHKKVALIACIRKIITALNAMLRDNVPWRSAIA

SEQ ID NO: 370668 - protein, 361 aa, unidentified
MRYYSGKHPFYCGIDLHARTMHVCILDQDGNAVVDQGIACNPKAFLQLIAPCRQGLVVGVESIFCWYWLADLCQEEKICFVLGHAFYMKLIHGGKGKNDRLDAGKIARLLRCGSFPLAYAYPKGMRETRDLLRRRLYLVRQRSGLLTHIHIVNSQYNLPAIDKQLRWNSNQAGVAERFASASVRQNVSVDLRLIKHLSQLIVELEEYLIGTARVEDQQTYERLQTIPGVGRVLALVLLYETHAWSRFSKVGQFLSYARLVRCVHESAGKTVGSGNNNIGNPYLKWAFAEAACLMLRVSERARRWKQRYQQKRGPGKAMRVLAAKLGRAVYHMLRKQEAFAEERFWNSGSGAGNQPALAVKA

SEQ ID NO: 370669 - protein, 397 aa, unidentified
MDFMIYVGIDVASTKHDIVISSESGELFKKAFSIKNDLDGYKKLLSEISSAKEFFNDLNVRIGLESTGHYSRNILHFLILARFEVMFINPLLTNMDRKAASVRKTKTDAIDAKAICMFLIRNQNDFKPYTLSSYHIDELKTLVRQRKSLKTQINKEMNLLHAYVNQAFPEYYKIFKKINSKASMEVLSRYASLSEFKRVRLETLKELIRKSSQGHHGIREAQMLKDLHSSSIGIDSSALSFSIKQTIKRIIMLEDQVHHIELEITHHVDESQTTLLSVPGIGYTTGAIILAEIGDIHRFKTDDQLLAYAGLDPSVYQSGNFEGSYKISKRGSSILRFAIYHVAQAAVKFDPVFKAYYLKKKAEGKRHRVIIGHVTKKILRVIRSILKNNSTYSINTH

SEQ ID NO: 370670 - protein, 418 aa, unidentified
MEVLHERCAGLDVHKKTVVACVRLARGGGVEKEVRTFQTTTADLLALGEWLDGHDVGHVVMEATGVYWKPVWHILDDGERELVLANAAHVKNLPGHKSDVSDCDWLSDLEAHGLIRGSFVPSRPIQELRGLLRTRKTKVRERSSNTLRLQKTLEEANIKLDSVISNVIGVSGRRMIEAMIGGETDPVALAGLADRRIKAPPEVLCEALRGRVTRHHRFLLALQLEHIDALDGMIDKIDQQIDASVEPFRASAALLTTITGVNELAGRAIVSEIGIDMSRFETAGHLRSWAGFCPRNDESAGKRRSTRIRKGAPWLKDILVQCAWAATRTKATYLHAQFVRIRARRGPKKAIIAVAASILTAAYHMLKNGVPYRDLGPQHFDSRNKQAQAKRLLTRLRSLGYTADFDSLKPIPDAVVSY

SEQ ID NO: 370671 - protein, 370 aa, unidentified
MGKYSEVFVGIDTAKSKHAVAIADTGRDGETRYLGEIDSAPATIERVIKKLAGKYEKVRVCYEAGPTGYGLYRQIVTLGHECAVVAPSLIPKKAGDRIKTNRRDAVTLARLFRAGELTAVWVPDAVHEAVRDLVRARETAAADVRKKRQQLLSFLLRHGRIYSGSKHWAKAHARWLATQAFEHPAQQIVFQDAIDAIEDCASRLQRLEEQLHAIIPNWSMAPVVDAYQAMRGVSFMVAVTFVAEIGDVRRFENPSQLMAFLGLVPSERSTGDSVRRAGLTLAGNRRARRALVEGAWTYRYQARVSERLQKRLEGIPKPVRDIAWKAQVRLCGRFRRLTAIGKKRPVIVAAIAREMAAFLWAIGQHIAPAY

SEQ ID NO: 370672 - protein, 400 aa, unidentified
MKSVLSVDVAKGKSMIMLSTEYGEVLIEPKEIKHNFRDFNELKDKIESFNLEDLTIFMESTGIYHLPVERYFKENNFNTLVINSLTTKNNYDTLRKTKTDTKDCMRLAKLFFVNEVEYHDLSKKDLYANLKAMTRQYFYLTQLNVSCKNRYKRLINICFPEFEEIFKGSRIYEETALNFIKTFLHAYIVKEKRIDALYNNLYKTNSRHDYYYKRLANKIKDIAVNSYPGVDKDHSDVKNLSDMAAILQENIKTINELKEKMIKTAKESPYFDIINSFYGIGEVLTTELLGELGDITRFDNHRQLIAFCGLDPTIIQSGKSINVHGTISKRGNKYARWILFNISQIVVKLGHQCPGHPVYDYYLTKKAEGKHYYENLTACSTKILRMLYTMCKNNTTFKIN

SEQ ID NO: 370673 - protein, 475 aa, unidentified
MNVKGTKKKNQVVTANVFEQQELLKKEEVIRESLTASTWRELETNGKFDKNEKLSFISDDMLILGCDVGSETHYARAIDTRGRELSKSVFSFSNSLEGFQSAKEWAVKIAATYDKKQIVLGLEPTGHYWLCLATWMIQNGISVVQVNPYAVKQTKEVEDNSQLKDDTKDPKLIANLVKDGNYGMPYLPEEIYADLRRLSMFRDQLNEDRTRNINRLHREMKIYFPEYKDAFGKFDGAFCLEVLRKAPFPEDLIAIGKDGIKQIWHDAKLRGRGYNRAGEIMKCAQESVGLKEGIGAGKMAVKWFVERIIELDEQLSEVEKQLNEKCLQIPYAKNLLEISGVGENILSGILAEMGDISRFDDVKEIQKLSGLSLVACSSGKHKGQTKISHRGRKRLRYWLFQAAKSAVAHAEEFKELHAYYTTRGENPLKKMQSLIVIACKLLRVIFTTLKKGIMYDPKKLLADIKRPEQQKRQVA

SEQ ID NO: 370674 - protein, 485 aa, unidentified
MKKNIYGDRSQLVAKCFSGGGDPRESLVVAMDLAKSEHTALFCRGDGEYLLSRPLRVFNTPEGVEYLVGKVESTRQSRGIAKERVLIGGEDPGQYTFNFIYQLGLRGFPFIRVNAAEASTLRNNTRASTDFLDLDGIAQAIVQQRGRTMDAFDRIYRPMKSAARARRRLVSQETACKNRIHRDVEILFPGFLSETDTGIVPFTGSCLALLEDGFSSIKIKRMRDETLVKLLRRHHTHKPEEAAARVKALAGRVLPPPPDIVDYQSGSLATKVRMLRTVREALATEENEMARGLVQTPGFYLTTMPGMGVVLSGHIVAEFGAPTQWRAADNMVSYAGIVPRVKGTGGPSKAPVVGHLPMDANHTLKDYLLQGAHHVATTGEHRLQKHFQRVENHQGRSRLSTAKMLVRIGRQMVLGEMPYLPLEMLRPQLPLPAEYVHTFFAELTQKLTKKWGEYDLSGIPESENYLVKWEAKVNELTQLLLNRKS

SEQ ID NO: 370675 - protein, 453 aa, unidentified
MKKFLGIDVSKGYADFALIDERKQPVVGSFQLDDTPDGHTRLGDFIRQLFKEYPNLSLLAAAESTGGYENNWLDCLKKLQRCYTIKVTRLNPNGVHHYQQAKLNRAITDAISARMIAEYTLTHQEIIRFDQPDQTYSLRRQWTFIKLLSKQRTQLLNQLDNLLYQSNPELMIYCRRYWPVWLLDLLSTYPTAKDLALASIEQLAKIKYLGHDRAQLIVKQARQSVASATDAVSGEMIKMVADEILHKDELIATSKKSLIENCSLPDAELLGSIPGIGQFSAVGLTIEIGTWLRFASAAKLASFFGLHPVLRQSGDKTWVARMSKQGSSEVRALLFMCVLVAIRHNPVIKQLYAHSLQKGKCKMSAIGICMHKLLRIVYGVLKSGKPFDPDIDQANRAKRFVQQKTTIRQNRRLHPLDENAPVSARQNKKRKEQSQSQGERVTVCEIKAPALSH

SEQ ID NO: 370676 - protein, 344 aa, unidentified
MTKTPIAVLGIDLGKNSCSLAGQDATGAIVTRRKMTREGVVAFTAALPPCVIAMEACCGAHFLGRTFEAQGHQVRLMSPEYVQPYVKAQKTDDRDAEAIAEAATRPTMRFVSLKSEAQLDLQVLHRGRERLVLARTALINQLRAVLLERGIIMPKGRILLMRRLKEIGLAGLAISSRIQALVQDLLAECADLDRRIKAYDEEFAAVAREDAQARRLSGIPGVGVINATALLAAVGDASAFARGRDLASWLGLTPRQHSTGGKIKMLGISKRGNRYLRKQLIHGARAAMPHIAAKPTRMGAWLRDMLTRSHPNVVVVALAAKLARIIWAVLRHESNFDQGAVMEA

SEQ ID NO: 370677 - protein, 353 aa, unidentified
MTKKRLDWTNQVLFAGIDLHKNKWVVTVRTQDVVLKTFVTVAENDVLLRTFQHQWSGAAIYAVYEAGCFGYHLADFLISNGIKTIIVSPHTIPVAPGQFVKTDIIDSKKLALELAKGSLSGIYHRTADELYDRALIRKRQQLIKRKVQIHNQIKADLLFYGIKCEAGHRKYWSKQTIKEMKQMTVGTTSYQEALGLIIEEYEFLRKQINTIGKLLQQLSESDRYSKRMECLLSIPGIGKLSAITILLEIGDIERFPSAEKFASYLGLTPSEHSSGDVVRKGSLTGMGHSSLRKLLVEVSWVAIKKDPVLLEKFQRLSKGKSKCKAIVAVAKSLANRIRKILKDDEPYVIGVVG

SEQ ID NO: 370678 - protein, 378 aa, unidentified
MKRIIKIGMDVHTTNYTLCIFEPSFEHEGTVHCITQIKPEVKNIIDVIDKLKEKLKNDDLDITCGYEAGCLGYSLYHELKDKGVKCIILAPTTMKVEKGGKKIKNDYRDARQIAECLSYGGYSAVYVPTKLDNAVKEFIRMRDDLNQNLKSIKQQIIALLTRNGKHYGDGSYWAGKHIKWINSVHFEEELLNETLAEYMIEYHRLLDRIVCLDARIEEISTKEIYVEKVNKLKCFIGIRAHTALSLIVETSDFSRFSKGNVYAAYLGLIPGDDSSGEDSNKLGITKAGNRHLRKLLIESAQCFARGQTGHISVKLKQRQALCSSDIVAYANKANERLRRRYYKMIGKGKKYNIVKTAIARELACFIWGMMTDNIQLSH

SEQ ID NO: 370679 - protein, 377 aa, unidentified
MLSAAKSERLLRRTALNRRPDNRADTEEVVSGETMYYIGLDVHKRTISYCVKDAAGRVHMEGKVGATRRELDAWIKTLPQPRTIAMEATIFTGWIYDHLLPHAEAVKVAHPLMLRAIAAAKRKNDRIDASKIADCLRCDFLPECHMASTEIRDRRRTLRYRELLVKQMVQMKNRVSGLLLEKGVTHTKRRLHKVGYFAELMAGSEEIDASIRPLLKLSREHIVRAQKLDYALVSSLERDPMLVERLKRLRTVPGVGPITALTWALEIGDVTRFRSIKQAISYCGLCGAEKSSADKVMRTPISKQRNKHIQHVLVEAAKLAPRLNHELAQLHEKEMQKGNRNRATLAVARKLVCWILAVERRKQDFVPAEKLPGTAAA

SEQ ID NO: 370680 - protein, 338 aa, unidentified
MKITTLGIDLAKNVFQLHGVDRNGKTVLTKRVSRTKLKEAVATLPPCLIGMEACGGAHFWARELTKLGHTVKLMSPQFVKPYVKSNKTDRNDAAAICEAVGRPSMRFVPVKTLAQQDIQMLHRVRSRLIKERTAMVNQIRGLMSEYGIVMPQSVATVRKELPFILEDVENGLTAPARASFADLLGELRMLDQRTARQDAKIKQIYAHHPLCQRLAKIPGIGPLTATALVAAVGNGKTFKNGRQMAAWLGLVPRQRASGGKQRLGGISKRGDKYLRMLLIHGARSSVYYADRKADAKSRWLHSLKTRRGTNIAAVALANKNARTAWALLAREVEYQQAA

SEQ ID NO: 370681 - protein, 365 aa, unidentified
MNLNTATKAGQIIGTMKGLQVIGLDIAKNVFQLHSVDMSTGEIINVQIKRAKVLEYFVNKPPCLIAIEACGGAHHWAREFTALGHSVRLLHAKIVRPFVAGNKTDATDARAIWQVVQQPGVKFVGIKTTEQQATLTLHRQREMMMKMCTMQTNALRGLLYEFGATFAQGRQALFKDVERALEGLADQLPQMVRDSLREQVARIKAVIEDIKTIEKRLKVQLRQDRQMQRIFQIPGVGLLTATAAIATMGEASAFKSGREFCAWLGLVPSQTGTGGKVRLGNITKRGDTYLRTLIIHGARSVLTHTKEPGPWLEAIKGRRPASVVIVAQAAKMARTIWAVTAKEQDYKRDFQSVRPVVAAKASVQA

SEQ ID NO: 370682 - protein, 411 aa, unidentified
MVKENFIYVGIDLHKETHTAVMIDCYNQKLGEITFPNRPADFPKLVTKVKKCNTDAKEVVYGLENAYGYGRPLAVWLIDKGYFVKDVNTAISHRQAKHRGAMYRKSDSDDAEAIALATLNMLDKLPDACPNDAYWSLGQLVHRRDNIMKQRTRLVNQLHEQLCIAYPSYKQFFNDISRPTALYFWEHYPSRKYLKGKSVEDLRTELVPVSHNRCSTKNCEKILDAVASDKVKNNAYQDARDMVTLSIVSDLQHYDSQLAEVDKMLEQMYKMLGCTLTTIPGVNVITAVKILAEIGDIKRFSNANKLAQFAGIAPLHLSSSGKGKDVATKQGNRRLQATIYFLAIQMVQVSSKGTPRNSVVRAYYEKRKAEGKNSQQALICISRRLISIIYGMLKNGTEYRMPVVENAGENR

SEQ ID NO: 370683 - protein, 341 aa, unidentified
MQITTIGLDIAKNVFQVHGIDAAEKVVVRKQLRRGQVLKFFAALPPCLIGMEACATAHYWARELTKLGHEVRLMPAKDVKAYVKRNKNDAADAEAICEAVRRPTMRFVGAKSAEQQGRLMQHRTRDLLMRQRTQVINALRAHLAELGIVAAQGREGLKQLLTIIADEKDARLPIDARGSLIVLAAQLQALQTMIGSVEKRLTMQHRANEASKRLESVPGIGTIGASAITATVTDPNAFRSGRDFAAWIGLVPRQDSTGGKQKLGPISKQGDRYLRRILVVGAHSVLRRARQNPEKYPWLTQLLARRPFKVVAIALANKMARVAWALLARGGTYRVPALAAA

SEQ ID NO: 370684 - protein, 378 aa, unidentified
MKRIIKIGMDVHTTNYTLCVFEPSFEHDGTVHYITQVKPEAKNIIDVINKLKEKLKDDELDIVCGYEAGCLGYSLYHQLKDKGISCIILAPTTMKVEKGGKKLKNDYRDARQIAECLAYGGYSAVYVPTALDNSVKEFIRMRDDLKQNLKSIKQQIIALLTRNGKQYDDGSYWTVRHIKWISSIKFEEGILQETLSEYMIEYYHLIDRISKLDERIEEISGKEIYIEKVNRLKCFLGIKTHTALSLIVETSDFKRFTKGNIYAAYLGLIPGDDSSGNDDNKLGITKAGNRHLRRLLIESAQCYTRGRIGHISIDLRQRQSKCSSEVVAYANKANERLRRKYCKMIAKGKKYNVAKTAIARELACFIWGMMSDHIELAH

SEQ ID NO: 370685 - protein, 339 aa, unidentified
MNNSVIGLDIAKHIFHIFTLGIDGKTIKKKFKRSELLAYFANYPLSIIGIEACGSAHHWARELTKLGHEVILLNARYVKSFVVGNKNDFNDAAAIYDAVTRPNKRVVAIKTVAQQDIQLIHNIRKELVDKRTALVNQTRGLLSERGIIINKGITQVRQQLPLILEDAENGLTVLSRELFAEQYEKLKALDDEIKAQDLRINRLCNANELSKRFLDVPGVGPLTATIVAADMGDSGKGYESSRDYAASLGGGPRQHSSGDKQVYLGISKRGNRYIRTLLIHGARSVLKNCTKKTDKLSVWLQGLVARRGFNKAAVALANKNARILWAMANKNKAYEALVA

SEQ ID NO: 370686 - protein, 416 aa, unidentified
MNNLLLSAFERYIAVDLHRKYVVVGGVNSRQEVVLPPRRVELDAWPRWAQANLRKTDVLVVESTSNAWDFYDQVEPLVGRAVVANPRLVKLIASARVKTDKVDTLALARLLAANLIPEVWVPPLIVRQVRGLLAHRRRLVETRTMSSNRLQSVLQRHNLPAPRGGPFSTANRTWWETLKISLTEKLRVRQDLDTLAHLDKHIAEIEDEVYRLSTTEPWAAQVAFIIQLPGFSVLLAMTILAAIGDISRFLHPKKLVGYSGLGAGIHSSGQTHRSGHITKTGRRELRWALVEAAWSAVRYSPHWQAEFKRLSSRMPENVAIVAIARELLVVIWHVLTQQVADKHADQQRVAAKLMRWSWGLTQQQRGGLSTRLFVRRQLMRLQLAHDLTHFTYGGMPRRIASVQELLAACPEWAASG

SEQ ID NO: 370687 - protein, 358 aa, unidentified
MVSQISTRSIPGAPVRRVCAAARGKRLIAEPLVSLSLPLPLGPDSLLADPAFVGVDVSKSWVDFADTNGRKGRVENEYAPLKAALLGPWSNCANMVCEATGGYERVLMRVAREVGAPLRRIHPNRARAFGQATGRLARTDPLDARTLAKFAAFTVDEPCAPLPDPKAQELADMVSRLTQLTDLHQSEACRVKMLVGPAIKKSILAVMKTIKAQIDAMQEAIDAFVAADSRLSENTKILRSCKGVGPKSAQAILGMLPEIGTLNRRKIAALVGVAPITKASGSSINHATITGGRKGLRDILFMAALTASKPNPTFTSFYDRLRAAGKPHKVALIAVLRKLITTLNAMINSRQMFDSALT

SEQ ID NO: 370688 - protein, 352 aa, unidentified
MKKSNKKSAAVAAPQLVIGMDVSDKKSQLAILKGDRLRFDTVQNTRKALRLQFCSLPASRVALEAGTHSPWLSRELEALGHEVIVANPRKLALITQNVRKSDTRDAETLARLAKADPKLLSPIHHRGEDAQKALALIKVRDRLVSARTSLINCARGIVKPLAHVLPSCDAARFVKRVSEAMDAELAPILTPLLKSLVPINEQIKVLDREIELLAKDNVAARCVRQIHGVGPITALSFVMTIDDPARFAKSRDVGAYLGLTPARSQSGEEDPQMHISKQGDVMLRRLLVSCAQVVMKRNAPDSALKRFGTRLAQRGGKAAKKKAIVAVARKLAVLMHRLWVTGEVYEPKRGCK

SEQ ID NO: 370689 - protein, 340 aa, unidentified
MEKITTVGLDIAKQVFQVHGIDAGGAVVVRQKLRRDDVAPFFRSLPPCLIGLEACATGHHWARVLLALGHEVRLMPAAYVKPYVKRQKNDATDAEAICEAVTRPTMRFVPIKSEEQQSVLMLHRVREILIRQRTMLINALRGHLAEFGIVTRQGVAGVSVLVALVEDEDHDLIPLLARSALLPLIQQLREVHEKVSEMDRQIHAWHRSNELSRRLETIPGVGPITASAIVATVTDASLFKSGRQLAAWLGLVPRQNSSGGKERLGRISKQGDPYIRRLLVVGAHAVLRFSRKGKAAPTLWAAELLSKKPYTVVAVALANKMARIVWALMTTGKRFEARLA

SEQ ID NO: 370690 - protein, 364 aa, unidentified
MNCVIVNTELSSLEETRRQFNGGKAYIKLGIDVHQDFYVVVMQEGSSNPKPPQRFHKEAFLRWAAKLVCSGAQVYAVYEACGFGFSLQRRLSALGIECYVVCPQKLDEQNKRVKTDSLDARALCLKLDRFLQGNRHALALVRVPTEEEEQTRALHRQREQLVKVRKVLEAQGRSLMVNHGIEPVQQWWKRRAFAALSMPEWIRVLLQNTQPIVLSLQSQIDQLTLQLQNAATAEPPRGLGKMTSVIIDREIGNWHRFNNRWQIASYTGLCPGEYSSGQKRLQSCVTKHGNPRLRAALVELAWRMVRFQPNYRAVRKWNERLRKGALTTGSARKKVIVALARQLAIDLWRIRTGRLSHAQVGLEM

SEQ ID NO: 370691 - protein, 482 aa, unidentified
MKKRTIFPYQSQELNTLFEEAGNNAKVMCIPIDYAKKEHVVMFCNGHGNILRKPFSIKNSPKGIEYLTQQVLSSCHHRGIDPKYAFFGGEDVGSYAENFINTLRSGGWLIAGVNAHDAKKQRANVQASTDVLDLMGIASMLLNRRANCSPAQTGIYRNLRGLTRHRKKLVDMSTEEKNRIYTVVDQIFPGFLDEKNTGISPFSNSSLYLMADRFSPAQIRRRKRQKLIETLRRYGTVKPEVSADKLQLYAAHVLNTPTEYLSALQISLAQHIKHFNCLQESTEQLEKEMALWLAQTQGAFLTTLRGIGIVLAAGATAEIGDPTKQKPVANLVSYSGIIPRVKQTGGPEGQTRTGKVSKRCNHILKNYVVQSAHHIGLHGPEDLMADYKRRDANGQHADFGIGRRYIRTAMCLMRNAQIYIPKRLRSKGINPEERAGYFLMIWPSLRDKWAKLGALETAFTNDNPLGRWRNMVQELYEIKLKL

SEQ ID NO: 370692 - protein, 313 aa, unidentified
MLPSLVYVGMDIAKATLDLHAPTTPCPRSRQFANIPAGHRALVRWLQGLGPVHVVCEASGGYERSVVMALQQAAIAISVVNPRQARDFARAQGRLAKTDRLDAQVLAEFGQRLQPAATPAPSAAQRQLVELVSRRQQVQQVRIAEHNRLEHTTHPAVRRQVQRHLLGLDRQLKQLQAWITELVQAEPSLAHKVARLCEVVGVGQITAVVLLATMPELGALNRRQAAALAGVAPFNRDSGPRRGHRLIRGGRSVARRALYMAALVAAFANPRFKVFYQRLIAAGKAPKVALVAVMRKLIILLNQMLKNPSFQLT

SEQ ID NO: 370693 - protein, 409 aa, unidentified
MQVVHEVCCGLDVHKKSVTACVLWASGRRRQTRAFGTFTRELLELGDWLRACGVTHVAMESTGVYWKPVWNLLEGLFEVLLVNAQHIKAVPGRKTDQKDSEWIADLLQHGLLRASFVPPSPIRELRDLTRYRASLAQEINRIANRIQKVLEDANIKLASVATDTLGASGRAMLEAMVQGEQDSQRLAEMAQGKLRNKIPELQEALQGRVSRHHRFLLRELLDHLYFVESKMQRIEQEVAERLGPFQSEVARLCTIPGVDRVTAWGLLAEIGLSMKQFPDAQHLASWAGLCPGSHESAGKRRSGKIRKGSLWLRRCLCQGAWAVSTKKNNYLSALYRRLAARRGSKRATIAVAHKLLVIAYHILRDGTCYSDLGADYFDRLNPEGLRRRLTKRLEGLGFKVTLEPLAQVA

SEQ ID NO: 370694 - protein, 385 aa, unidentified
MALTGLSGNEGAAMSEESEAFVGLDTSKTKISVAVADGGRCGEVRFYGDIDSSPDAVNRLVKKLSARYQRLHFCYEAGPCGYGLYRQLTALGHQCDVVAPSMIPIRPGDRIKTNRRDAITLARLHRAGELTPVWVPDEAHEAVRDLVRAREGAMLDLRMKRQQLTAFLLRHDRIFPGRKTWSRAHVRWLCEQRFEHPAHQIVMQEYRHTIDDAETRLDRLEGQLAEVVPQWSMAPVVEAFQAMRGVGFLAAVIFVAEVGDVRRFESASQLMGYLGLVPSERSTGDRVRRGGITKAGNRRARWVLIEGAWTYRLPARVGRTLQARLDGLPKAVRDIAWKAQTRLCGRYRRLTAAGKKPCLVTTAVAREMAAFLWAIGQQVAPRLAG

SEQ ID NO: 370695 - protein, 446 aa, unidentified
MSNVVAAVAPSEPEWAALAAIDWADKKNFWRLLPAGSRQSEAGELDNTPEAVEVWAANLQQRFGGRPIAVILEQTRGPLVYMLTKYPHLVLFPVHPTTAARYRETFAPSGAKSDPSDTDSLLDLLLRHRERLRPLRPDTVETRLLHFLVEERRQTVDEKTRANLRLTDCLKLYFPQVLRWFDDVTSPLVGDLLERWPTLEQLQRVHPGTLRRFFHEHNCRSEEKNAERMAAIQQATSSTQDQAVREACVLIAHSLVAMLATLRAQINVFDKRIADLVADHPDGALFRSLPGAGDALVPRMIVAFGTQRDRYQSAYEMQCYSGIAPVTEASGNSQWVHFRFICPKFLRQTFHEFAGCSIPQSEWAHAYYDHLRHDKNKSHQVAVRSLAFKWLRIIYRCWKDGKPYDEAIYMQSLRRRGSLLAGVLGTPTRVGWKSVAGFQKLSENNA

SEQ ID NO: 370696 - protein, 343 aa, unidentified
MSVVTIGVDLAKSVFQVHGVDADGRVVLKRRLARGQLLEFFSRRPACLVGMEACSSAHHWAREPVRLGLAVRLIPPQYVKPYVKGNKTDAADSEAICEAVGGPNMRFVPIKNREQQAVLALHRTGSLLVRQRTATINAARGLLAEFGLIAAKGLRRVADLQDRMQRLSSEVLPEGAREALTLLFDRIDAFGEQLAIVEGRILAWHKSNETSQRLASAPGVPITATALVAAVGGGTQFRSARHFAAWLGLTPRVRSSGEKERIGWISKGGDRYLRTLLIHGARAVVGKTFRRQVTVPPWLLALTRRRPVNAATVAVAHKTARALWAMLTRGVNYRQPTVVSAAA

SEQ ID NO: 370697 - protein, 316 aa, unidentified
MEIAPIFIGIDVSKARLDVAMRPSAEKLSVSNDEAGIQALVKRLSELKPVLIVLEATGGLERSVSGTLGSAQLPVVVVNPRQVRDFAKATGQLAKTDRIDAEVMARFAEVIRPPLRPLPDEVSLELRALIARRRQLIEMMVAEKNRLSAASKAVRKRIAAHIRWLETELDRADKDLDHSIRQSPIWQEHEDLLRSAPGIGPVVSRTLLAELPELGRLNRKQIAALVGIAPLNCDSGTFRGRRGIWGGRATVRAVLYMAALVASRRNSVIRDFYKRLRDKGKAPKVALVACMRKLLTILNAMIKHNTRWSEIIPQTS

SEQ ID NO: 370698 - protein, 487 aa, unidentified
MAKRRMSTFERLRRGKKLSRHERRELERCLEAEGAELEIVHPNAAGIDVGKESHFVGVRPRQGEPPVQEFGSWTADLRRMVEWLKSQGVETVAMQSTGVYWIALYEILEQAGFEVYLVNARGTKNLPGRKSDVQECQWLRKLHTYGLLRNSFRPPEQIRGVRTLWRLRERHVEEAGRAVQHMQKALTTMNVQLANTLSNVSGTTGLAILRAILAGERDPRQLAKLRDRRVQAREEEIAHSLEGNWRQDVLFELQQVVEAYDFLQRQIAVCDLELQKYMAALPNREVAEAQPAQPAASPSLTVEPPPRGRKAKAKRPSKGSPRFDLAQELRRTMGVDLVTIDGINVMTAQVILSEIGPDLSAFPSEAHFSAWLGLAPQRDLSGGKVIAQKSRRVKNRVANALRMAAESLSHSESYLGARYRHLRGRLGGLKAVKAMARYLACLVHRLLTKGQAWVDRGSAEFERKRKGRELIALQRRAAEMGMRLVAA

SEQ ID NO: 370699 - protein, 424 aa, unidentified
MHLTAVSPASITATVACDVSAYKLNLICRDLSAPGAVSEWEIANRTEPIIDTLTAIRNAAAARGITAIRIIVEPTGIYHKLLLRIAASLGFETALVDAGHVTKMRSVLFGDDGKTDQRDPYAIQAVAAQGRLIADRRPSEIYQLLRQWGKLYYDAERALIDAKSRIHRALMLLFPDFDFSTDFLYSSSGRAIFLCFAFNPHVIASLSVRRLYDRLRKRSTIRRSSAQRLLMQARQTIRAATAGRVSDLLAHELALAWQDLDLADGRREHARLQLERLYDEARTSDPHLPETAGSVLSKSALARFLAETGPLSDYCGWRPLMRMGGVNLRERKSGMYVGQTRIARTGRPLCRAILNQMALPLVKRDRIYGPYYHHKIAVQKMPGSKAMTAVSRKILKMIWGWYRSGRAFDATRVFRCEGQHRKAA

SEQ ID NO: 370700 - protein, 346 aa, unidentified
MNNHNKKCTIKVLGIDLAKQSFQLHGVDELGKVVLRKNLSRNKLTSFVANLPPCLIGLEACGGAHHWVRVFKSLGHTVRMMAPQFVKPYVKSNKNDAVDAEAICEAVQRPNMRFVPEKSISQQDIQCIHRIRSQLIARRTAQANQIRGLLMEYGIIIPKGISYIRKVIPHILEDADNKLTSLLRELLNELYDEMVYLDERISSLENKLKTISHQNEDCQRLLTIPGIGLLTATALIAAIGNISVFRSGRELAAWLGLVPRQHSTGGMPTLMGISKRGDCYLRTLLIHGGRTVVRVAHLYTDKRNLWISELDKRRGKNISAVAVANKNARIAWALLSKKESYQVTAI

SEQ ID NO: 370701 - protein, 414 aa, unidentified
MLKIVYRICCGMDVHKSFVVACVASTNEQGVTTCKSKRFSTFTGDLHRCAAWLAENNCKDVCMESTGKYWIPVYNILEQTCNIVLAHPKYVKAIRGKKTDKRDAKWIADIFKHDLVAGSFIPPADIRQLRDLVRYRWKLTNFTTGEKNRAQNCLTVSNFKLDDVFSDVFGKAASAITARILENPTAKITDVSSFRTKHMKATDEEILAAVDGEMCAEQAEKLRIIRSHMDSLELCKSNLESLILSTAENYFPQLELVMTAPGIQSFAAIGIISEIGVDMSVFPTSKHLCSWAGLTPQNNESAGKKKTTRISRAGAYIKPLLVQCALCAVRAKQFPEVRNRYLALKKRRGHKKAIIAVARMLLTAIYNMLKKNEPYNPELYRKGDRPPAHREVSVDEAIFILQRQGYLVTAPSTT

SEQ ID NO: 370702 - protein, 359 aa, unidentified
MAKARTLVGLDVHAAKIVAATLDAETGELGFRRLGGSTATAVGFCSQLPAPVRATYEAGPTGYGLARTLEQAGVDCLVAAPGKIPRGATDKVKTDRRDAEHLVRLLLAGRLHRVRVPDQAEEALRDLVRAREDIRTDLMRARHRLSKLLLRHDVRFDGRAWTQRHRAWLGTVELGHQAAQAALLDYRGAVEVLLQRRAGLEHEIARLVPCSPWAQAVERLRCLRGFDTLSAVGLCCEVGDFERFARAAQLMSFLGLVPSESSTGNQRRLGSITRSGSSHARRLLVEAAWHYRRQPRVSRELEHRQVGQPAQAVAISWSAQRRLHRLWARMERRGKRRSLIAVAVARELTGFAWAIARVN

SEQ ID NO: 370703 - protein, 315 aa, unidentified
MEKSNWVGVDTHQDTLACYQNGRFKEFKTTQKGFQKALEWAGKDAIWAIEGAYCFGKPFSSYLIDNGCKVYEVNPILTKSYRKSLSICGQKNDYGDAKVISLFASSVKLQAVSLQTIQLKEKLTARELLIKQRVELINSIKNLYAIRGEKVPFNRLNTQKAQKWLSSQNDTIIKSYGNVLKEQAVAIKLLEKEIEELLPQKALKLTELTGVSSIRAAVIYTELKDKITTRESMASYAGVAPIENSSGKTLKHRNNKGGNRKLNSIFYQISLNQSINDEIGRNYYEKKLKEGKSKRHARKCLARQLVNIVWKILKD

SEQ ID NO: 370704 - protein, 388 aa, unidentified
MLYVGIDLAKFKHTAAVVGEGGERLLGGFDFPNRRDGFEALLRRLAAVGATSGESGVCLEATGHYGRNLIAFLEGHGYEVFEVNPLLTANWRRATSVRKAKSDAIDAEALARWLLAGNPTARRRAKDESDDLRALARSRASLSHMIGDCKRRAVAILDVTFPELHGFFSDDFCVAATAVLMRWQSAEALSHARLDSIRKEVREAGGRLAEARAAELRELARSSVGTASAPLEFCLRQLLAQIAFTRGQMAELEAELARMVEGSPVLTVPGIGTVLGAGILGELGDVSRFASAKKVLAFAGCDPSVFESGEFVGSRAHMSKRGSPYLRWYLWLAAERARLCDPALAAYYARKRSEGKCHKVAVSAVVRKLVSIVYAVLRDGTSYVCPAT

SEQ ID NO: 370705 - protein, 359 aa, unidentified
MTDAIRWVGLDVHAAQTTVAVIDKASGELSRARLRGSPSAVLDLLAGLEGRVVAVYEAGPTGMTPARQARARGIEMKVCAPGLIPRRPTDRVKTDRRDAEILARQLAAGGLSFVRVPSEQEEALRDLVRAREDVRQDLSRARHRLSKFLLRRDLRFAGSNWTQKHLHWIGQLRFAEVSSQLTCAEYVQAVRTLMHRRDTLERALEQILPDAPFAQTALRLRCFRGIDTLTAIGLCAEVGDFRRFDKPTKLGAYVGIVPAEYTTDSKRRLGSITKAGSSHARRLLVEAAWHYRRPPRVGEKLERRHRGIDPAVIEIAWRCQRRLYERHTALAARRKPAGVTNIAVARELACFLWEAATLD

SEQ ID NO: 370706 - protein, 321 aa, unidentified
MTYVGIDVSKATFVVAYSSAKSSKTKTFKNTTKGVHEFIQTLSADDYHCVLEATGNYSSLLVYLLSQAGITVSLENPLKIKNFARVMLSVTKTDETDARLIALYGEKMHPAPYKLRSDAILILKQKRTVIRQLKKQLIATRNLKGSMEALPFFDSKCKKTIEKTIAFLERQVKDLEEELANLAQGEYRKQMGLLTSVKGIGVTLAAALIMATGGFAYFDNAKQLTRYLGLSPTYQQSGTSVNVKGHINRNGDSSLRSLLYVAAMASLRCNAECKECFNRLRSNGKPGKVVVVAVANKLVRQAFAVVTQEKPYIDGFKSAKP

SEQ ID NO: 370707 - protein, 326 aa, unidentified
MEHELHYIGIDTAKEKLDVDVLRPDGRHRTKKFANTTKGHDELVSWLKGHKIDHAHICIEATGTYMEPVAECLYDAGYIVSVINPALGKAFAQSEGLRNKTDTVDARMLAEFCRQKRPAAWEAPHPLERALRALVVRHQALTDMHTQELNRTETAREVQRPSIDAHLLWLEAELKRLEKQIKDLTDDDPDMKHRRKLLESIPGIGEKTSAVLLAYIGLKDRFAHARQFAAFAGLTPRRYESGSSVRGASRMSKAGHVSLRRALYMPAMVATSKTEWGRAFRDRLAANGKKGRVILGAMMRKLAQVAYGVLKSGVPFDASRHNPVAA

SEQ ID NO: 370708 - protein, 344 aa, unidentified
MGEVSTVGLDIAKSVLQVHGVDVDGAVVIRKRVSRVKVLEFFAALSPCLVGIEACPTAHHWSRKLQALGHTVRLMPPSYVKAYVKRSKNDANDAAAICEAVTRPSMRFVPTKSEPQQSALMLHRSRQLLVRQRTMLSNAIRGHMAELGIISAKGRNGTAELLEIIASQDDDRIPAVARLSLTILAHQYAAVTTEIGTIEKHIHAWHRSCEESRRLEEIPGVGPIVATALVAEVGDWTAFSSGRSLAAWIGLVPRQHSTGGKERLGRISKQGNRHLRWLLVAGAMAVIRYARRHGTKRLWLVRLMGRRPVKVAAVALANKIARMAWAMMVRGERFKEPKLLPAAA

SEQ ID NO: 370709 - protein, 431 aa, unidentified
MNCNTQNAKIETIKEETLVVGIDVGSETHYARAFDWRGYEYSKKAFSFSNTEAGFVSFLEWMQDIAKDNGKQELVPGMEPTGHYWFDLGKFLQDKGIKPVLVNPYHVKQSKELDDNNPSKNDRKDPKVIAGLIKDGRFTYPYLPEGVYAELRSASNLRFQTQEELTRILNRIARWFSIYFPEYKDVYGKSDSKSGLMILEQAPLPADIRVLGVDGVNKIWRDAKLRGVGIKRATKLVEAAEHSIGSQEGLTTARMEIKNLLSDYERYSKRMEELVELIDELVKEIPYVEKMLQIKGVGIKTISGLVAEIGDIRRFDNPKQIQKLAGYALVEDSSGKHQGETRISRRGRKKLRYLLFEASLSLVGKNEEFKELHYYYTHREENPLKKKQSLVAVACKFLRIAYKILTTGVDYDGAKMINDIRRPQKQMLQAA

SEQ ID NO: 370710 - protein, 408 aa, unidentified
MLNAVGIDVSKGKSTVAVLRPAGETVRKPFNVVHSVKGLSELVSFVGSLDGETKVVMEATGHYHEPVLKAFLDAGIFVSAVNPSLIKRHDSDENPLRKVKSDPADARKIAKYTLDKWEHLRQHSAMDTIRTQLKTLNTQFHFFMQQKVSLKNNLISLLDLTYPGANNLFDSPVRTDGSEKWIDYVHSFWHVDCVRKIGLKAFTERYQNFCKHHGYNFQPDKPEELFNASKDLVAVVPKDPIYKQLILSNIEQLDTVSRQIEEFRRKMNELASTLPEYDTVMSMYGVGPTYGPQLMAEIGDISRFDHRSAITAFAGVDPGVNQSGTVNYESNRASKHGAPRLRKTLFQIMTTLLQLAPADDPVYLFMMKKKSEGKPYQVYMTAGANKFLRIYYGRVKEYLSEHPETAVN

SEQ ID NO: 370711 - protein, 313 aa, unidentified
MILHQNILGVDVAKDWIDLCDLASGQIRRIDTRPRTLLAFATGLPQTTLVVFEASGGYERPLMAALEAKGVPYARVNPRQAREFARATGCLAKTDKVDARILAKMGRALELAPTPPVDPARRTLAELVARRADLVAAISAETNRLGQAADRFVRADIKACIAMLKRRKLALEKEIAAHTRSHEDLQHLDRRLQTAPGVGPAIASVLIACMPELGHTDRRGAASLGGLAPQVCDSGLSKGKRRVWGGRGDVRRALYLAAFIASRCDPELKAFRKRLEAAGKPFKVAIIAVARKLLTILNAMLRDGHDYQSKTTA

SEQ ID NO: 370712 - protein, 449 aa, unidentified
MSKSVSTQSGLPVVHARAAGIDIGSRFHVVAVAPNLTDEPVRTFQAFTADLGRMADWLVALGITTVAMESTGVYWVPAFEVLESRGLDVILANAREARAVPGRKSDVNDAQWLQRLHACGLLRASFHPRRDIAALRVYMRLRERLVDYAAAHIQHMQKALTFMNLQLHHVVSDVTGVTGMKIIRAIVSGERNLEVLATMRDVRCKANTETLRGALTGNYQPEHVFALRQALALYDFYQSRIDECDVQIEQVLAALTADKPTPATPLPQPRHRTKQPSDLSFDLRPVLYQLTGLDLTQIHGIGPHLALRLIAECGTDLGKWPSAKHFASWLTLAPGCKISGGKVLSARTRKTTNRLAAHLRLAAVTVGRTSTALGAFYRRLAARIGKAKAVTATARKIAILFYNAMRFGRDYRDLGADQYERRYRERVIKHLHRRASEFGYTLQQVVRVS

SEQ ID NO: 370713 - protein, 419 aa, unidentified
MEAMEVLHHHVAGIDVHRKSLSVGVRHVGADRKVHQEVRTFGTMTRDLLELRDWLEAQAVTYVAMEATGVLWKPVWGALWALLEGHLEVLLANAHHVKQVEGRKTDVKDCQWLAQLLSCGLLRASFIPPKPQRELRDLTRMRSQLVGERTRVANRIHKVLEDANIQLGAVATDILGASGREMIEALIRGEQDPEKMAQMARRRLREKLPQLRLAMDGHVSEHHQFLLQMLLEQYDNMTKQIGRLTERIEKVCAPFASAIEKMIEVPGYSRTSAQNVIAEIGTNMNQFPSADHLCCWATICPGNRESAGKRKSGRTVQGNRWLKAALCQSAWAAVRTKGSYFGAQYHRLAGRRGKKRAIIAVAHAQLKVLYHLLKSGESYRDLGADYFLKLNADRAAHYHRKVLESLGYTVILPPADQVA

SEQ ID NO: 370714 - protein, 342 aa, unidentified
MQITTIGLDIAKNVFQVHGIDATEKVVVRKQLRRSKVIAFFEALPPCLVGMEACASAHYWARELRKLGHEVRLMPAKDVKAYVKRNKNDAVDAEAGCEAVRRPTMRFVGVKSAEQQGRLMQHRTRDLLLRQRTQVINALRAHLAELGIVAAQGREGLKELLAVIADEKDDRLPIDARASLIVLAAQLQALQTLIGSIEKRIIAQHRASEESKRVATVPGIGTLGASAITATVTDPSAFRSGRDFAAWIGLVPRQDSTGGKQKLGPISKQGDRYLRRILVVGAHSVLRRAKQNPEKYPWLTQLLARRPFKVVAVALANKMARMAWALLAKGGTYRAPALAAAA

SEQ ID NO: 370715 - protein, 421 aa, unidentified
MDTQMLSEEPISVVHPRCCGLDVHKRAVQACVLVSTPGGQVRQEQRAFATTSAALLVLADWLVAEGCTPVAMESTGVYWEPLYNLLEGQIEVWVVNAQHIKQVPGRKTDVSDAAWIAGLLRHGLLRPRFIPDRAQRELRTLTRYRTSLVQERAAEVNRLQKTLEGATIKAAGIATAIPGKSGREMLDLWVAGETDPAVRAQCAQGRMKEKIPQLERALAGRFGPHQRFLVARQLAHIDSLDGAIAEVSAEVAQRMAPCEAQIALLDTIPGVGRETAEALIAEIGTDMGQSPAAAHLASWAGMCPGTHESAGKRKGGKTRKGSRWRRATVVNAAHAAGRTKHTAVGARYRALVARRGKKRGAVAVGHTLLLIAYHVLRDHEPYDDLAHQPVVCPPAPHPHHLVQQVQEMGCDVTITPKAPAA

SEQ ID NO: 370716 - protein, 359 aa, unidentified
MFTERTSVGLDVHARSVVAAAIDGVTGELFQARLSPAYAHVRDWIRRLPAPVAVAYEAGPTGFDLFRALTADGVRCQVVAPSRLQRPSGDRVKTDARDAVHLARLLRLDEVTAVAVPSVEQEAARDLVRAREDARRDLTRARHRLSGLLLRHGLVYYDGHRWTGRHDRWLRTLEFAQHGTRLAFADHYETAVAAAARRARLDAEIEAMAAESEFTAVVRRLACLRGVGTLTGFALAVEIGDWHRFTGNSIGSFVGLVPSEHSSGESTTRGPITRAGNGHARRLLIEAAWHHRKPYRAGATMRARWHQATPAVAARGDKGNRRLHRRWTGFDARNKKPVVANTAIARELAGWCWSLAVMD

SEQ ID NO: 370717 - protein, 366 aa, unidentified
MEKIYIGVDFHARQQTICYLKTETGELVISELQHQDKEQVHAFYQQFPSPVIVGLEASGYSPWFEALLEQLGCEVWLGHATEIRRRARWRQKNDRRDAELIWDLMVHDEFPRLHRPAATSREVLRMLRYRQKLIKLRTMAKNSLQAIALQAGLAKGKQLFSRAGQEEFKSAAMSPVLQWQREHWFQLLQPLNAQLLETMVWFKAHSKDDLGIQRLRTHPGIGLLTSLCLLHTLQPVSRFRNTRKVTAYAGFDPVERSSAERQHFLGISKAGSRLLRYLLVEAVQTAVRYDEDLKRFYKRLAERRGRPKAKVAAARKLLIRAYIMLRDEIDYAEFRRRAVAARLARTGQGPINVPEVLIGQPASPGA

SEQ ID NO: 370718 - protein, 414 aa, unidentified
MKLFVGIDVSSQELEACFMNADGDNFESFTVPNNLHGASHLRDRIVVAADKLAVSEIHIGLEATSVYSWHPAMYFHQDPALRERKTKVFTLNPKLICKFREAYADMDKTDRLDAWVIADRLRFGRLTTTLVMQEQYIALQRLTRMRFHLVHNLAREKQYFLQNLFYKCNAFTTEVDSSVFGHALMEMLSEKFSLDDIAEMNVTDLADYLRDKGRNRFPDPERVARCIQQAARASYRLSKVVEDSIDLVLGTSIESIRSIQKQLKDLDKAIERILDGIPGAQCLLSVPGIGKVYAAGLLGELGDIERFKDQAAVAKYAGLTWRKHQSGAFEAEHTARIKSGNRFLRYYLVEAANSVRLRDEEFGEYYRKKYNEVPRNQHKRALVLTARKLVRLVDVLLRNGQLYTPRRKVNSAKN

SEQ ID NO: 370719 - protein, 340 aa, unidentified
MTHIIRMGIDLAKHVFQLHGVDAQGHTVLRRRLSRTQLRPFVAQLHPCLVGMEACGSAHYWARELTTLGHEVRLIAPQFVAPYRQNDKNDGHDAEAICEAVGRPPMRFVPIKTLTQQAVLTVHRARQLLVAERTALVNQTRGLLAEYGLIVPAGIGALRRTLPGLLETPALPTLAREVFTDLADRLRAVDERIAAYDRRVDQLARQMEPAHRLMQVPGVGPVTATALVATVGDARTFRNGRQLAAWLGLVPRQHSSGGTRRLGRITKRGDVYLRTLLIHGARSVLRQITRRTDATSRWVTALQARRGFNKAVVALAAKQARILWALLATGRTYTPAATCP

SEQ ID NO: 370720 - protein, 383 aa, unidentified
MKSVCGLDVHKDSVYLCILSEFGELIEKVFGVLTYQLEEMRDLMLHHHVVEVSMESTSVYWIPIWRVLSPHFKLNLANPYFIKQLPGRKSDVKDAQWIAECTMKELIRGSFVPPETIQQLRQYDRRIFDLNEEIVRKLSKLDAVLQRCNIRLSNYVSNVDSKSYKAVVRAISQGITDHEELVKLIHGRIINHHGIDVITASLKGVVSLAEIDMISQLRDELDMAEAHKEKCQARMLEICEREFPEELRRLQTIPGIKERAATSLIAEIGTDMNKFETANHLASWSGLKPRNDESNKIIKSRSITHGNVYLRKTIIECAWAASRTKDCFFSRFSYHQTQVRKKNKMKVLVAVARKMLVAIWHVLHDNTNYIDFTTDRKTSRTRG

SEQ ID NO: 370721 - protein, 419 aa, unidentified
MSKSMFCGCDVSLDNNTVWLMLEDGSQPAKLFNADNNQPGAEVLAERIYAIAKEHCVSDILIGTEATSMYDWHLLEYFAECRLALEFNLKLYRFNAKWIKNFKKSLAPRGKTDPIDSFAIAERLRIGRLPKEYIPDIKYQPLRKLTRFRFHLQQQTTREKDFFLANLFLKASAYSSVNPFSSTFSATSLAVINDFFSVDDLAAMPMEELTEFILEKGKAHFSQPSEIVDNLKRVARESYRLKPELAPSVNLILASTYNNIRCYKEQVKLVDAAIAENLKAFKHTLDSIPGIGPVYAAGILAEIGDVHRFSNDSALAQFTGLTWPKYQSGKFQAEETRMSHTGNQYLRYYLVEAANSVKRRDATYKAFYEKKYVESSKHHHKRALVLTARKLVRLVWTLLTRQTLYQPGYCSFEDLSKIG

SEQ ID NO: 370722 - protein, 520 aa, unidentified
MHQTKYRGIITEGRIIDVSSLGASGFPLVKPLRKSVNPFGGDLCFGWLGSLRLYLYKPLGCVSTLWKWMPAGKDITMHYHKVLEMFESIPYLSVGLDVGADFTWMSIMLPNGILTGKPFKIIHSDPQSRELAVSKIKEAQEMYSLESRCFLESTGIYHIPLLYFLRDKGFDCAVINPIITKNSTNRNVRKLHNDKFDSKKAAKVGLDASLKTSIVPDDAIIDLRNLVRDYYYFKDLQSAIVLKLNAELKVSFPAYLNVFSKVTTQTSLKLLEAYPLAADMLAAPKDELVEIIRSTARFGEKYALAKYDAICTAAKDAAVFGRALKSNALRIRLYIKMYWEYHAHLDSILEELHQAVDKLEGTPDYDRICLIQTLHGIGFLSAVVLIAEMGSFDLFPSPKKLYAYFGLDPGVNDSGKFHGDRVHMSKRGSSLARRILHMVAINNLKVDKATKAPVNPVIYNYYIRKCASKKKIVAVGAVMHKICNIIFAMLRDNKPFELITPKEHCERYATEHPESVNNAA

SEQ ID NO: 370723 - protein, 352 aa, unidentified
MITLGVDAHKAIHVAVAVDEAGRELGEWRGPNAPDAWVSLTQWAVAFGQDCWWGIEGAWGNGRGLAQHLVALGYTVFEISPNWTSRLRRSNRRQGKSDRLDARAVARCVREEAPKLPLVQAEDDTVVLDLLTTEREAAVAEATRLRNQIHALLSQIDPQYEQSLPSLTSAAGLRALVSYATPENTLIQQHRAACVRRLAERLQLATSQAEDVAKQIRLLAQAHYEPLTSLCGVNLLTAGMLAGMLGPGRRFENEAQLAAYAGTSPIEASSSGLTRHRLNRGGNRRLNSVIYRIALTQAHFHPEARTYIERRVSEAKTRREAHRCLRRYIARAIWRLWQECLQQPNTKNVEAA

SEQ ID NO: 370724 - protein, 385 aa, unidentified
MSAHPTQIQAAAQLQANTLFASLELSKARWLVTVSAPGSDKLSRHQVPGGDGQALLELLWRLQAAAARRTGAPVMIIVIQEAGLDGFWIHRLLVQNGITSHVVDPASIAVNRRHRRAKTDKIDGVKLLRTLMAWMRGERQVCTMVQPPSPEDEDRRRLARERARLLKERIQHTNRIKGLLSGQGIPDYDPLHRDRRRCLAALTTGDGRPLPERLKAEIGRELDRLEMVVSQLTVVERERDALVARTAEADACAAPAALARLRGIGPELAALLWLEALFRRFDNRRQIAADAGLTPSPWQSGGIDREQGIAKSGNPRLRRAMIELAWFWVRHQPGSALSRWFVERVGTARGRVRRIAIVALARKLLVALWRYVTQGVVPQGAVLKA

SEQ ID NO: 370725 - protein, 450 aa, unidentified
MGHGTGVSRGDRNRNARLARLRVLVPVTNAIVGIDLADRKQMVVVCDHDSKVLARKTFRCRAWDLGSALDWARDRATAGGWVGVTVACEPTGHRWRVLGQLAADRSMPFVCVQPMVTSWSRRTEDLTSDKTDEKDAVLIARLTAQLRCYVPEPTDETWGRLRHLGARREQLITETGSQIQQVRDLLECVWPAALEAAQQPFRSRTWIASLWVVLGRDGADFDRTRRLGAARFEQAVRREITRRGGQKPCLRIARRIFAALADRAGVIAHRAGALERVQLLLTDWQLTKDRLADTETRMTAVLDELGLTGLVTSITGLSPVGVAAILAETGDPRRFATARALVKHAGLAPREKTSGAFTGRTKLTGQGRPGLRLAAWRAVWGAQRANGVYAARYQHLTTREHNKLTPTQAQTVIAAAILRHLHAVITTGKAWDPQIATHGTRPAKKTPAAA

SEQ ID NO: 370726 - protein, 344 aa, unidentified
MQIVGCDFHPSFQQVAILDISTGEVRELKLMHATGEAERFYRELEAPGLIGMESTGNSLWFERLMEQLGHELWVGDAARIRASYVRRQKTDRRDAGHILTLLLEKRFPRIWVPSQLERDRRQLLLHRHRLVEMRTRVKTELQHLAMNQGLQQKRGLWSVRGRADLEKLPLEGWTARRRGDLLKVLEMLEGQVAGLDEAVGKVAFSNAQARLLMTQPGVGPITALAFVVTVGDVARFKRGKQVASYLGLIPSERSSGGKQRLGAISKQGNVFLRTMLVEAAQSAVRHDEEFKKEYAHRCHSKPKGVAKVAAARKLAVRLYWMLRTQAPYCRAVHNEGSPSHPLVG

SEQ ID NO: 370727 - protein, 314 aa, unidentified
MSKAIVGVDVSKGWLDIARADGSEVVRIANTQAAIAAWVLEARVDGLQLVAFEPTGGYERDLRDVLRAHGVVFVRVHPNQVVAFRKSRRIKAKTDRIDARLIAQFAAEELLRRGLPIAIAGDEALRELAARRRQLVDTLQAEKCRLAIARSAVVRASLTASISGLQASLEAIQVALLSHITANPELAQQHALLQTLKGIGPVSAMTLIAELPELGRLSGKQIAALIGLAPQTHESGKSSHRAATGKGRGDIRRVLFNAARCAIRHNHIMRDFYRRLVEQNKRAGKVALVGVMRKMLVTLNAIARDQQPWKHHAA

SEQ ID NO: 370728 - protein, 371 aa, unidentified
MASLSGEPPMLYVGIDQHKRHLTICVRDEQGDVVRKRQVSTDWQEVDRFLESLRQQGDSEGGYFAVMEVCGFNDWLLKRLSRWGCSRAYVIAAPPRLRNKTDRRDANKLSELLWINRERIAAGNRLVQIRVVYQPSEPEAEARQVVHLRHRLGRESTRIKNRIGGLLRRHNLEQECPTKKLFTQQGLRWLTTVKLPELDRFILNMELERYHLCEKHLARVERRIHQEAQRQPAIKRLRTLPKIGEYTALALWAHIGSITRFPCARSLAHYFGLTPGCRNSGESDRPGNVTKAGHPIARFLLGQAVLHALRGDPGLRSWYVKVKRRRGAKVARVAVMRRLCEALWHMLSKQEAYQPVGSAKPTPRRRAGCAA

SEQ ID NO: 370729 - protein, 338 aa, unidentified
MDCSNQYRYFIGVDVSKSELDFAVVEANQVLFHVEVSNDKKGIQAFFRQLKDLNQGEIKHSLFCLEHTGIYNNPLLSFLFQKQASVWVEKATQIRESMGVSRTKNDKVDAIKIARYAYKNREDVQLWHHKRDVIEQLDRLTAMRKRIVSAIHMLKVPLNESAEFVTKKASRSDTKACTHSLLALQKDLKGVDIAIKQVIKSDPALHELFEIVTSIKGVGITVATEVIITTNEFKDITDPKKFACYAGVVPFEQSSGRKRGKPQVSRIANKKVKALLHLAALSASRHSEEFQTYFDRKVSEGKNKMLVLNNIRNKIVLRIFACVRRGQKYENFYPSPVV

SEQ ID NO: 370730 - protein, 267 aa, unidentified
MTVYVGMDVHRKRSQVAVVDDAGVQQRNRNLANDPAKLVPVLGGLPPGTPVAFEAAYGWGWLVDLLEELELEPHLVHPSRCKAIASARLKNDKMDAATLAHLLRADLLPEAWIAPQATRDLRALLRHRASLVRRSTACKNRIHAVLADRGIPDHFSLWAGPGRAWLADLELPATPRGIIEDCCGLLDALATPIGRLEREIATLAKPDPRVQALMALPGVGKLTAMTLVAEIGDITRFPTARKLCAWAGLTPQVRNSDRKVRHGHITK

SEQ ID NO: 370731 - protein, 401 aa, unidentified
MKEFNREQQRIETASALEIVRTEENVNVHAAYVGLDVHKETIAVAVAEPGREEPIYRGEIANKPKTVAKLLAKLSAAYDGGLLLFCYEAGPCGYVLYRQILACGHDCQVVAPSKIPKTPGERIKTDRRDALKLARLLRGGDLTAVWVPDQEQERMRDLSRARDDMKGQERKARQQLNAFLLRHGHHWPRGKTRWTTAHESWLAGLKMDHPWQQVVLQEYIAAERAAGERVAQLTDHLMRALPEWSLAPVVDSLIALRGVDKLSAIVLLAELGDISRFESPKQLMAFLGLVPSEHSSGPRRRQGGITLTGNGHARRMLVESAWSYRFPARQSKHLKGKARNASAQAKQIAWKAQTRLCGRYRTLTRAGKNTKLVCVAIARELAGFIWDIVRQEMPRLALQEG

SEQ ID NO: 370732 - protein, 378 aa, unidentified
MAQPGWPPELGRRSIGSVPTEALRAVWRSEIAIGTSSGPEWLNELKVRITREGSTKMVKHSTICAGVDAGKRKLDVAIEGRREQLRVENTSEGHEALLAWLRQHRVKRIGIEASGGYEQPVVAELRRKRFVVVVFQPAQVRAYAKFHLQRAKNDKIDAALIAACTAAVRKIHAAPDPRLLPFAEQLTMIDQIGEDIARLKNRIESCRNVGINKLWHEDIARLEQREKAALKALVASIRKHPDLAKRLALINSVDGIGLPTAVAILVRLPEIGRITREQAVALAGLAPYDDDSGDQVGVRHIEGGRKRLRRALYTASLAASFRWNPQLIHLYQRLTAAGKEHKRALVACARKMLIFANTVVARGTPWCGEPPMGSFSVS

SEQ ID NO: 370733 - protein, 301 aa, unidentified
MCGAVGVDRVETVVNGPAGFPKIIEYFRSHGVTRVGIESTGIYHREVTRALRAAGFTVDVLQPKQVKAYAQFRLQRAKSDAIDAKLIARCTADLDRPCRVHDPRLEAFAERLTMLDQLVEDVACLKTRRESFRDPHVLDLLNGQIAALEKVIAAERKTLMEAVKKHADLKRRYALLESIRGIGDKTALMLVIRMPELGDLTREEAASLLGVAPFVHQSGKYEGLRRTGGGRARARTALFAATQAAIQWNPALKALYGRLIANGKAHAVAIIACVRKLIVYANTVLARGTPWVQDAPLPTTR

SEQ ID NO: 370734 - protein, 372 aa, unidentified
MGSIIYVGIDVHKDTYYLSSYLPEKNLIFAQTEMKSECKNVMKYLDKVSEMNDGAVVLSGYEAGPTGFKLCRDLIKRNYNCVVMAPTSIAKTTRDKMVKTDKADSILLAKSLAFHSYKQVVLPDENIEALREVVRLRHTAQKECKRAKQAFLSFLLSNGFSYPYGGKDSYWTKSFMLWVNTIHFNSDYLNFCKDEYLAEAVRMIQRVKALDKKLDELQEDDEIKEQVRSLKCISGINTLTAMTLITEVGDFNRFKTAGNFASYTGLCPGSHSSGLTDRSTGITKQGNRIVRRLLIESAKAISRSEAQKSAALLKRQEGMPSDIINYADKASNRLRKRIRRLQNHGLNYNKVSAACARELACFVWGMMTRHIA

SEQ ID NO: 370735 - protein, 430 aa, unidentified
MGFIVPTDMHPEPADQPMPYECFVGIDWGSQQHQVCVLDGDRRRVGERTVDHDGASLARLADWLWTVSAGQPQRVAVAIEVPRGAIVEGLLERGFHVFAINPKQLDRFRDRHSVAGAKDDRRDAFVLADSVRTDQPSFRRLHLDAPQLLRLRELSRAEETLLEDFRRSANRFRDQLHRFYPQMLQLCSAADEPWLWDLIDVAPTPAHVALLSEEQVQRVLKAHHIRRVTAQEVLTCLQALALPVAPGAAEAAQAHCQFLLPCLRVLAEQLQACSQQVSALLHTLAEAPGDGEGPSDVAIVLSLPGVGRKITAWLFAEAAQPLAERDYQMLRTHSGVAPVTKQSGKRRVVVMRRGCNPRLRHALYHMARVAMQCDAHFNSVYAALRAQGQRHGQALRHIGGRLLRILIAMLRHRTCYDASRIRREPVVQMG

SEQ ID NO: 370736 - protein, 347 aa, unidentified
MRFYNRQHRHYCGIDLHVKTMYVCILDAAGQSLVHRNVKSTPEAFLEVVAPYREDLVVAAECMFTWYWLADVCAAEGIAFVLGHALAMKAIHGGKAKNDKLDSFKIATLLRGGLLPQAYVYPAAMRATRDLIRRRLHLVRKRGQLLAHIQNTRAQYNLPAFERRIAYPANREGVAEYFADSSVRKSIEVDLTLIDQYDTLIVDLELTIVREAKRHDADAFPRLRSVPGIGKVLALTILYEIHDIARFDRVQEFASYARLVKCKKQSGGKTLGTSGAKMGNVHLKWAFSEAAVLFLRHTTGGKKLLAGMEKKHGKGKALSILAHKIGRAVFYMLSRGTVFSMEKFLAA

SEQ ID NO: 370737 - protein, 431 aa, unidentified
MSKFFYRPTVGIDVSADFSVVAILAPDGEVHRKPFKIKHNRNGFDYLVDQIKKAEEEFNMKTAIFMESTGVYHLTLFHFIKDTFETYILNPLITNCNKNVDIRKVKNDKKDALTIANIGKFQNVKYSSNFDVEIYTLKSLCRDYYKFTDSKSMFKKKLSADLRVIFPSYSAVFSDITGKTSIAILKKYSSPEAVLNADSDELTTLISTTSRKGQSYSEKTFKNLIAAAEEAVYIGFKSPSLFVKLINAIAVIESLEIQIENLLKEIHLLMRSDRIPDEFKKNVKLLYSIPGVGELTAITIMSEIGNIKGFIKPKHLVAYFGLDPSVRQSGKFNSDKNVISKRGTRIGRRALYAVALASIRKNRNGEPINKVLLNFYKKNMNGKSKKVGLVAVMHKLLNYIFSVLKNQKEYELRDPKTHKKMYLNNESTPAA

SEQ ID NO: 370738 - protein, 373 aa, unidentified
MDKGISYVAMDTGKRSFRVAAGYAGRGERVEWEVVNEPAAVKRMVRKAQREGGGEVIFCYEAGPCGYALKRQIEALGVRCVVVAPSLIPVKPGQRVKTDRRDARKLLELFRAGLLTEVWPPTVEEESVRDLVRCREDVLEDLARCRHRLGKMLLRRGYLFGAGRSPWTQSHRRWMVAIGWEREADRMVFSDYLLAVDAAQSRLENLTAQLEAFAQQEPYKMAVAALGCFRGVSTVTAMTIVTELHGIERFTSPRQLMAYLGMVPSEYSSSEKVRRGSITKAGNAHVRRVLVEAAHQYRHSPSVGRILRKRREGKPASIIAIADKAQLRLHRRYRRLLFRGKPYGTMIVAVARELVGFLWAALQENAAIKRQTA

SEQ ID NO: 370739 - protein, 389 aa, unidentified
MKRVCGLDVHKDNAFVCILGENGEKIEFKTGVLTVELDSFRDRLVELGVGEVAMESTAVYWMPIWRILESDFKLYLVNPLSIKQLPGRKSDVKDAEWIATCLQKGLIRGSFVPPLAVQQLRQYNRRLFDLNKQAVYVQNKMDAALQRCNIRISNYVSNVDTKGYREVVELLSEGTTDPELLTGKIHRRTINKHGRDTIKAALTGVVTDVDSDLLRQYREELDLLRRHKQECLSKMREMCEELYPEELKRIEEIPGISAQSATQIIAEIGADMKMFLTARTLVAWAGLKPRNDGSNGKIKSRRITHGNKYLRKLLIECAWAASRTKDCFFSSFSYRMVTVRKKGRLKVQVAIARKLLVVIWNLLAKGVQYSDRLAQADDTKDESSDTPQG

SEQ ID NO: 370740 - protein, 404 aa, unidentified
MISVGIDVSKGKSTVCAMKAYGEVLLSPKDYKHTTEELDRLIKNLSKFNEEIHITLEATGNYHLPIYMYLKSKGYFISIINPLEMKRYRCQGIRNPKTDRIDSMIIAQYGIDFWYRVKQQNDRVQERQELRLLGRQYEQFMKSRVARCQALNGLLDQTVPGVYELLSGFNRNNGKDKLSDFAYDYWHNDNIIKSSEKVFIKKYLNWLKKKEYHQNEKEARQLYVLAKTSISTLSSTAQSTKLLVQEAVNVLKGINLSLFTILNQMRELAKTMPEYSTVLSMGGVGETLAPRLIAEIGDTHMYHSGKALVAYAGIDAPPYQSGQFIGTKRHISKRGSSTLRKIGYELMDSINKHQVKLNEDAVSQFFMKKRAEGKAYRVAMIAGYNKFLRIYYAKVKEVLNKTIQ

SEQ ID NO: 370741 - protein, 351 aa, unidentified
MPATAQTAVAVIGIDIGKNSFHVVGLDSRGAIVLRQKWSRGQVEARLANMSPCLIGMEACVGAHHLSRKLKALGHDARLMPAKYVRPYSKGQKNDFRDAEAIAEAVQRPTMKFVATKTAEQLDLQALHRVRERLVSQRTGVVNQIRAFLLERGVAVRQGLRFLRAELPRLLATPPDVLSPRMVRVIESLAEDWHRLDERIDHLSDEITALARQDAGCERLVSVPGIGPIISSAMVAAIGNGDAFSKGRDFAAWLGLVPKQISTGDRTILGKISKRGNRYLRVLFVQAAWVVLIKPQSWERHELKPWIEAAKKRLHRNVLAIALANKLARIAWSVLARGRSFEARPAMASAA

SEQ ID NO: 370742 - protein, 370 aa, unidentified
MSVRRILAKTIDTDLEYEAIGIDLAKNCVSAALLTTDGEVVCIDRLDYSELEKSAQALSPTTFAMEPCTEMNYLVQKLEAWGHRCLVIGGKNVQNYVENHYSGQKTDLNDAQALAFLAQDKQLRTIKAKDIEQQKYASLTTLREQYIKQYRQTIVSLKGICQAWGLNISKGISGKARLKDLIENHAAFPEELRESLVDMVTHAQTTQKVLNKITKTLEVLAKNDKVCQLIQTIPGLGTICSCRLRATIGDIKRFKNPKDFPPYYGLVPRSIATGHNEKKGKITHRGDRTMRSLMVQGAGCVIRLATCGKLKSKQLTKWILKKQKEKMPWGKLVCAVAAKLLRIVRAILISSKPYNPKIAGVAKCSLSKGS

SEQ ID NO: 370743 - protein, 368 aa, unidentified
MGEIIRIGVDTSKSVFQLHGVDATEQPVLRKKLRRRDFLKFFEQLAATKVGLEACGGSHHWARALTELGHEVKLLPAQHVKPYVRRNKNDRNDADAICEAMSRPRMSFVAIKTAEQQAAQMLMATRERLVAYRTQLINVIRGHAAEFGLTAAKGPAHVEPLLARIAEDDTVPKLAKELFALHGQEYSRLKNQLHEVEVKLKVWHRQNEMSRRLAEVDAIGPIGGCLLAIKAPDPHAFSCGRDFAAWMGVTPKDHSTAGKMRLGVITRAGDEALRRTLVLGATSVIKQVSNGKGNPSPWLRDLVARKPPKLAAVALANKVARVAWRLMVSGEHYDAARAGIVSPRPRVAPCSPRQGRCAPPAAVASGQP

SEQ ID NO: 370744 - protein, 336 aa, unidentified
MSSTLLPPLGIDMAKLTFEARLKLEHQQPTRSFANTPHGFEQVATWLRSCGVERVHACLEATGTYGDGLALYLYEQGHQVSIVNPARVVAFRKSEGIHTKTDKQDAKVLVRYCEQKRPRAWSPTPAEVQLLENLVLRRADLQGMKQQEVNRLENSRWDSESRQSILSHIQSLETQIKALTKRISTHIAAHTSLQEPRTCLVSLPGIAEVTAAWLLAEGVSATAFSTASQLVGYSGLAIKEEISGTSVRGKASIDRLGNAQLRKCLYMPALVAMRRDPDFALWVAQMRARGKPTKVIIVAVMRKLLRLIYGVLKSKQPYDPRKAFPTHYAQEEKPAA

SEQ ID NO: 370745 - protein, 412 aa, unidentified
MELLYQRCAGLDVHKETVVAAVRLAVDGKVITEVKTFVTTTQGLLSLSDWLAENGCTHVAMEATGVYWKPVWHVLEDGELELVLANASHVKNVPGRKTDVSDAAWLAELLAHGLIRASFVPDGQTQELRALLRTRKQLVREKTRHTQRIHKTLEDANIKLDAVLSNVLGKSGRAMLDALIAGESDPARLAALAHAGVKCPQDKLREALRGRVTRHHRFLLQLHLRQIDALDAAIAAIDQEVEGNLAPFRTAVELVSTVPGVSTLSAQVIVSEVGTDMSRFPTAGHLLSWAGLCPRNDESAGKRRSTRLRKGAAWLKTVLVQCAWAASRKKASYLQAQFLRLKARRGPQKAVCAVAASILKAVYHMLKNGTLYHDLGPDHFHRRSKTTQTQRLVRRLEHLGYAVEIKPLPTAA

SEQ ID NO: 370746 - protein, 418 aa, unidentified
MVISLAEKRRICMKQIVSVGIDVSKGKSTVCAMIHPNTIIKESFEVLHTVEEMSMLADYIGSLDGEIRIVMESTGHYHLPVAQFLYQKGFFVCVENAYIIRQFSRIMLHGAKTDPLDAKKLAKYGLAYWSELKPYKFHPSCYTELSLLSKQYQTYIKLLIAAKQNVIHLMDEMLPGFKEALDTASSVQFSKVKYVDFAKEFYHVDMIKSMGKEIFRENYKQWCKEKGYRFQSEKADELFHLAEDGIPTLPTEFPSTRLCMEVATEQVSQLGYALEQILSQMQNLAKTLPEYQTIRQMGGMGEKLCVRFIADIGDVRRFHNGKALVAYAGIDAPPYQSGQYTGTKRRISKRGNSVLRKTGYEVMKSLKSHPPKTDTRVYDFIIKKENEGKSKKQAKIAGLNKFLQIYYARVMEIYKNIV

SEQ ID NO: 370747 - protein, 341 aa, unidentified
MREFIRIGVDLAKNVFQLHGVEREDGSPFQRKLTRAKFRAFFARLAPCRVGMEACGSAHYWARVLRAMGHEVVLIAPAYVKPYVKRGKNDAADAAAICEAMSRPEMRFVPVKSADQQAVLMLHKTRDLLVKQRTMTVNALRGHLQEFGLIAAKGIHRVQELVALALADEGLPEEAKQAAALLAWQSEQLNMKIDGLEKTIAAASAKHPMSRLLQDIPAIGPLIASAMAASLPDPSVFKSGRDFAASLGLTPSQHSSGGKEKLGAITKRGNRYLRKMLVVGCTSVLRVAHKRKGALAEWIVALKAKKPERVAAVALANKLARICWAVLSTGEAFREELYARA

SEQ ID NO: 370748 - protein, 425 aa, unidentified
MNYKQNEKINQVKESTLVVGIDIGSTTQYARAFDWRGIELGKVFPFSNSREGFESFKAWMQHLQDKYKKLDAIVGIEPTGHYWFDLGAYLEDEGILLVMVNPYAVKQTKELDDNSQSKNDRKDPKVIAKLVTEGRYSAPYTPDGVYADLRIMVANRKRLIREMTQIKNRFARWFAIYFPEYTDVFGDYEAQSSMLLLKKVCTPEAIVELGAEKINQIWRDAKLRAVGMKRATTLCETAKRSIGLKKGSSAARYEMKLLLEDYEYKKAQLDAVMEEIEKLCRKIPESEQMLAIKGIGVITVAGFLAEVGDVRRFESPRQIQKLAGLSLRENSSGKHKGQTTISKRGRSNLRAVLFNAAIPLIAKNPEFKSLHEYYTTRANNPLKKKQSVIAISCKLIRVFYAILANGVTYDAQKMLSDIHRQPQAA

SEQ ID NO: 370749 - protein, 388 aa, unidentified
MNKQYANVTSAGMDVHRKFSNVTLRDAKGDVVVREKIKHEDRQNIQWWFSQWPTDLEVVMEASFGWAWLSDVMKASGLRPRLSNCFKVEKMRQARGWVKTNKKDADLVSLMPFERSNWWEVWLAPPEVRDRRERMRYRSDLVGVQTETKNRIHAVFHRHGVFHKYTNVFRGAGRLFLSELCRDGGGLLSGGALAAFRGQVRLLDHIRGQLAEIAQTLRKEIKIDDLLRRLMTIPGIGLILGATLRSEIGRIERFARENNLAAYSLLAPRADDTGESDKTRAPMGRHLGRQGNHTLKWAFIEAAHGAMKTGGLWREMFDRYTDNGKRNRGRAYIKIARKLVQIVYVVWSKQTDYTDTPPPRNGSKTGAKMKKKKRKSHLVRERASSMPL

SEQ ID NO: 370750 - protein, 327 aa, unidentified
MTASVASHNQIFIGIDVGGLSFEAAWHRGGSTQYQNRPDAIAAFVARLSVEKQIIRIAVEPTGGHEKALVKALRGAGLPVEMVHTSRFAAYRKLIGAKAKSDTSDARLLAAYAAAPEEVRGRKAGYVVLPQDDVREQLAELAARRDQLKHMIHAETCRLSTVRSPSIRDEITAHLQALRQADRKTHDAMMLLVRQRDELRNAKRLLQTIKGIGDKTALTSIAAVPELGLISNKAAAALVGVAPFVRKSGTMTAPAHIHGGRALVRNAFYMAAVTASRHNPVLAPFYARLIAAGKPVKVALVAVMRRLVVYANAVLRSGQPWKGAEIG

SEQ ID NO: 370751 - protein, 364 aa, unidentified
MSSSVLKHPRKSRPALHGEGVILGVDTHKDVHVAAILTITGVLLATHSFPTTRDGYAATLEWVHRFGDVNAAGIECTGSYGSALMKYLQTQNVKVFEVNQPDRALRRKAGKTDAVDAEAAARAVIAGRSLATPKTGIGAAEDLRQMRLVKSSAVKARTTAINQLKGLVVGAEPALRDQLRGLSTKALSRACALLLPSTVERMLMSELATRIYHLTEQLRRLETAMTRTVTACAPELLDRPGVGYDSAAALLIAVGDNPERMKNEAAFAALCGVSPVEFSSGKTTKRRLNRGGNRQANAALYRIVLTRLRWDETTQNYLQNRTAQGKSKRDVIRCLKRYLAREIFTILKTIPDQHKNPAQHELTT

SEQ ID NO: 370752 - protein, 344 aa, unidentified
MSIAILGVDLGKNFCSVVGVDAAGAVVVRRTMRRQTLIDYVTKLPACVVAMEACCGAHHLGRLFMAQGHQIRLMSPEYVRPYIKAQKNDDRDAEGIAEAASRPTMRFVELKSQDQLDIQTLHRVRSRLVAERTNLLNQLRAILLERGVIFPAGRRKFELDLGRMLSEGNETLSPRMRQLIDGLRAEWKELDAKIGALNDEFVQLARNDAATRRLTSIPGIGVLNATALVAAVGNASSFAKARDLGSWLGLVPRQYSTGGKARLLGISKRGNTYLRTLLIHGARAALPSLSKSETPLGRWLTAMIERGVHRNAVVVALANKLARIAWAALRKETRFEHGYLVVTA

SEQ ID NO: 370753 - protein, 355 aa, unidentified
MGGCPLRPGSLKTVGELGAPPVILSNPNSRQGRKARSPIRQGRVDMESIIVGIDVSKDRLDVAVRPSGEVFVAERNAAGLELLVARLRELSPRIVALEATGGFETVVAATLGAAGLPIVIVNPAQIRDFAKAIGQRAKTDPIDAAVIAHFAEATKPEPRPLPDQATRLLADLVARRRQIIEMIVAERQRERRITIPRLKKSILRLLKALEKELATVDTDIDDAVRGSPAWREMEDLLASVPGVGPAIARTLIAELPELGRLGRKEIAALAGLAPFTRQSGQWRGRSFIGGGRKTVRSAVFMGAMVAKKYNPVLKAFFDRLVAAGKPKMVALIAVARKLLTILNAILRDRRPWQIA

SEQ ID NO: 370754 - protein, 292 aa, unidentified
MNNVSTLSIDLAKNVFQLLSFDKQGNKCFSRRLDRAKLLQTLTQLPACNVVMGSCSTSHYWGRYCLQAGHQVQLIPAQHVTPFVRGNKNDKNDCMAIYEASLRPNIRFVPVKTEHQQAILALHRYRERLIHNRTACINQTCGLLLEFGIVIKKSLKSFRATIADLLNRNLHGALNLLLRDVYEEMQKLDANIKNVEAQFKQFNEQSQAAQIIQSIPGIGIINTSALSATIDKGEAFSNKKELAVWLGITPRQYASGETNKMGGITKRGDRYLKKTTHSWCPYSGQSCAQKAG

SEQ ID NO: 370755 - protein, 346 aa, unidentified
MTTVDTARPITGGVDTHLDINVAAALDSIGGLLGVAEFPTTEAGHDEMLGWLGDFGPVARVGVEGTGAYGAGLARFLRRSGIEVLEVDRPNRQARRRHGKSDTVDAVEAARAAQADRQLGAAKTRDGNVEAIRALVVAKRSAKSTKVKSLNQIRHLGFTAPEDIRQSLQGLSPHMVAHKTAAMRPRAGSDAVVLATKTALAALGRRVLALDAETDHIDKLLVPLVAATAPKLLAVFGVGTDTAAALLITAGDNPERLRSESAWAHLCGVAPIEASSGKVTRWRLNRGGDRQANAALWRIVICRMSNDERTRAYVVRRSEEGLSKGEIIRVLKRYVAREVYPLLPRH

SEQ ID NO: 370756 - protein, 379 aa, unidentified
MKKHGPASSNVHVVVGFDVHKDSISACAFDCENGEVLLEQQLRNEPAAIRKLIRRIRDRFGEPRCCYEASSCGFVLFRLLREMGVDCDVIAPSSIPRRSGDRVKNDPVDAYKLATFYAAGLLTGVDVPDEELESTRALLRCRAALVEELGRSKKRATQFLQTRGYVYRGGSNWSQKFWEWLARIELETVDQVVLDAYVDLIHYLEAQIRSLETVIDEEAERPRYQEPVRLLKAFRGIATITALTLACELGDIRRFEHPRQLMAYLGLVPSEYTSANKTHRGSITKAGNRHARKAIVSAAWKYAARPTRSHALKERQRKVSPHVVAISWKAQKRLYKRFHALAVRKPRSVAATAIAREFAGFLWEAMNTLSPVPPRALAA

SEQ ID NO: 370757 - protein, 391 aa, unidentified
MQDEEDFNMSLQNAPNINVDGKMDVSNIHFINENAGGAFMAKYNIGVDYHKKFSYLVVKEEKGRVLRSGKITNSKKAVADFLKPFKDDSTAVLESCRNWCVMHDWLEDIVGDVILANPYKVKAIAEAKIKTDKIDATVLADLLRADLVPQAYIAKRPVRDMRNLLRERIYFVRLRTMTKNRITTIFDRYPEEVRKEKAKTDLFGKKGRAQLENIELRPADRALINRELNFIDFINVFIKEVEEVIAENFQISKNAKYLKTIPGIGQFFSMLIDAEVGDINRFRNEKKFAAYIGLVPSTYSSGGNTVNGRIIKRGNKLLRRAFIEAVIPAIAHDEYMRWEYDKLRERMNYNKAKTAMARKLSSIAFKCLKEQRNYKKFNKIELEYKKLGRAS

SEQ ID NO: 370758 - protein, 388 aa, unidentified
MDVLYQSCAGIDVHQATVVVCILHGPLTSTRPKREMAQFDTTTKGLKACHNFLSQFHVEAVGMESTGVYWRPVWHELCDDFELILAQPAHMKAIPGQKTDKKDAHWIAQLTRIGLLPRSFVPDETIQELRELTRQRKHYVESRNRETNRIHKILQSGGIKLTTYIEDIMGASGRNLLQLLIDETPVTPRMIHQSVYTSLKRKVPQLLEALDGYFSAHHRFMLGQCLEIYDFYQKQIDCLEERINGYLNLYERPVEILDSIPGIDLITASVIIAEIGVDMSQFPTAGHLASWAGLCPGNNESAGKKRSTKIRHGNSYLKRCLCQAVFAAKRQKGSPLAERYYQIQSRRGPQKATIALAHQLLKIAYILLKENLTYQEFVLQKRLLETSQ

SEQ ID NO: 370759 - protein, 415 aa, unidentified
MALKIVYKICCGIDVHKTFVVACIASTDNKGITSYESHRFSTYTSGLKDLLQWLLTRNCKDVCMESTGKYWIPVYNILESDCSIVLAHPKYVKAIRGKKTDKKDAKWIADLFKHDLVAGSFMPPADIRQLRDLMRYRFKLTCFKSSEKNRLQNCLTVSNIQLGNVVSDTFGKSAQAILDKILEDPADTSFDLEPLVFKSLKKKLPELRDAIDGYITPEQAGKLKVIKAHYENLEARKAELEELILALATPYQQELAILQTAPGISSDFTAIGIISEIGTNMEAFPSAKHLCSWAGLTPTNNESAGKKKSVRVSKAGCYIKPLLVQCANAVVKSNKHPEIRNRYLRIKKRRGHKKAIIAIARMLLTALYHMLKNGENYNAELYQKSDLPPVDREITVEQALIITRNQGYKIKSATI

SEQ ID NO: 370760 - protein, 321 aa, unidentified
MNTRTSLGIDVSKAKLDCALALGSKYRTKVFANTQQGFAQLSDWLHHHGADQVHACMEATGIYWEAAALYLADAGQRVSVINPALAKAHGQSLGLRSKTDAMDAKLLADFCREKQPPMWTPPSEAERRLRALVLRHQSLVEMQTQEKNRCESLREEVRSSVETHLTWLASELARIEQAIARLLDDDDHLRGQRALLASIPGLGERTIAVLLAYGVNGERFQSARQFVAFAGLSPRLHESGSSVRGKPRLSKIGHAFLRRALYMPAMVTLYKTAWGQRFRQRLATHGKPPKLIIGAMMRKLAQVAFGVIKSGRPFNPALHGA

SEQ ID NO: 370761 - protein, 310 aa, unidentified
MDSITVGIDVSKDRLDVAVRPSGEVFAIERNPAGLEQLTLRLGALSPNLVALEASGGFETVVAAALAAARLPVVVVNPAQIRAFAKAIGQRAKTDPIDAVVIAHFAEATRPEPRPMPDEATRLLADLVARRRQILEMMVAERQREERVTVPHLRKSIMRLLKVLERELTSVDTDINDAVRGSPAWREKEDLLASVPGVGPTIARTLIAELPELGQLSRRQVAALAGLAPFTRQSGQWRGKSFIGGGRTSVRTALFMGAMVAKKYNPVLRTFFNRLVAAGKPKMIALIAVARKLLTMLNAILRDRRPWQTA

SEQ ID NO: 370762 - protein, 320 aa, unidentified
MMAQDDLVVVGIDVAKNKVDACIRMFSLRQVFPSTAQGHRKLVAWLRKHQVNKAVMEASGGYERDWARALRQAGIEVRIVDPKRVRSFAQSAGRLAKNDAIDAEMIAWFAETFSEAPGQTHDAAREELQTLVKARIALVDLKTRLQSQNEHAVPGPVQKAHARILKSLAAEIAKLEAAIAAKIKATPDFAERAEIIESVPGFAETTSANLVAGMPELGQVSDDIAAALIGVAPYDDDSGKRRGERHIKGGRRWVRNAIYMPCLGAATQNNPVLKAFYQRLIAKGKEPKVALVACMRKLIVILNTLIARRQKWDPSRYVVS

SEQ ID NO: 370763 - protein, 296 aa, unidentified
MAILMGLDQHRAQITTEWVDTVTGEVSRARVAPADRAGVRRFLTRFRGQPLEVALEATTGWRFVVEELQRIGAVVHLAEPADTAALKGSKKRAKNDRADARHLRELLMAGRLPESWIPPAHILDLRARVRLRHTLSEDRGEWQQRIQSVLYHHGCPQRGDLINRAGLAWLAALPLPACAREQVATALAMIDALERQLAPLDSREAVRFSGLDITVHASDQRRAPGHLSRQGPPALRWALFEAAQCARRPNSPDHPYYQQAANRLGGNRACLSVARKLLKRSYHTLRELGEEALQPA

SEQ ID NO: 370764 - protein, 401 aa, unidentified
MIKEGPSISVDVSKSGVAYQGWLSYGKPHGKARTADMTRTGLSAIKALADDLGAKDGVAVPVAYEDTGIYSKPLRMFLSESGMVEAVISPLLSAKVRKADDKPIKTDMRDCASIAEAYYTKDKVRIAAAAVGQDALKQLSKSHQTRKAELRKAKERFRKNLDEVWPLWDSVFADPYRKGPWAMVSKYRHPYVLARKRKSDVVALLEANGIRGKRADAMADKAMAYAKDCVSGALESSPEVESLGRWMAGVESAAAEDSAVMGKMVAMLEGNRDFEHLKEIRGIGASLAAIIVAELGDAFRFGSAKAVVSYAGLNPMVCQSGKMTGRHLPITKKGNARLRWALVMAVRVMGLTDADNKVTRFRDHLINENRLSSEAAIVAASSKLLRIIYSMMKSGQPFEQD

SEQ ID NO: 370765 - protein, 354 aa, unidentified
MSQTQNAAIAVVGIDIGKNSFHIVGHDERGAIVLRQKWSRGQIEARFANTPPCLVGMEACVGAHHLSRKLNSLGHNARLMPAKYVRPYSRGQKNDFRDAEAIAEAVQRPTMKFVATKTADQLDLQALHRVRERLVSQRTGIINQIRAFLLERGIAVRQGQRFLRAELPRILATPPDVLSPRMVRIIEDLAGDWRRLDERVEGLSNEIKTIARQDAGCERLMSVPGIGPIISSAMVAAIGAGDVFTKGRDFAAWLGLVPKQISTGDRTILGKISRRGNRYLRVLFVQAAWVVLIKPKIWERHGLKPWIEAARKRLHHNVLAIALANKLARIAWSVLAGGQAFEVRKINQAAPEPT

SEQ ID NO: 370766 - protein, 401 aa, unidentified
MLDTRDVAVFLGLDVGKGEHHATGLTPDGKKVVDKPLPNSEPKMRAMLDKLTAKYGKVLVVVDQAASIGALPLAVARDAGCEVAYLPGLTMRRIADLYPGEGKTDARDAAIIADAARTMPHTLRSIELDDETIAELHMIVGFDDDLAGEVTRVANRLRGLLTQIHPHLERVLGPRIQHPAVLTLLEQFGSPKAIRKAGRRRLVTLLRPKAPRMAERLVEDIFTALDEQTVVVTGTDAAAVIVPKLAKNLAALLDQRKQLAADIEELLKSHPLSELLTSMPGIGVRTGARILIDVGDATAFPTAGHLAAYAGLAPVTRRSGSSIRGESPSRRGNKHLKRAFFLAAFASLSDPASRAYYERKKAEGKRHKQALMCLARRRVDVLFAMLRDGTFFEPQAVPQAA

SEQ ID NO: 370767 - protein, 320 aa, unidentified
MSASSVVVGIDVAKAHVDVSVLGAKLDVQRIDNLAEGHSALTAALKPLDVALVVMEATGGYETELACALQAAGLPVAVVNPRQARDFAKSMGRLAKTDAVDARMLAEFAAVLLRREDLARFLRPLVDEQQRWLAALVTRRRQLLSMLLSERQRLQITPKGLHPSIEAIIAAIKAQLDDIELQMVTHVGQHFAELDALLQSASGIGPVASATLIAELPELGRLNRREIAALVGIAPMANDSGSSKGRRRIQGGRFDVRRVLYMAALTASRRNPVVKAFYERLIAAGKLPKVALVACMRKLLTTLNAMVRTNKPWDNSLHGA

SEQ ID NO: 370768 - protein, 403 aa, unidentified
MSEVFAGLDWASRLHAVCVIDERGVVRLQCEAAHDATGLAELMRRLHAAGVQRIAIERPSGLIVDALVEAGFTVVPIHPNIVKATRPRYRSHGGKSDASDAYLLADLLRTDGHRFKSLTEQCDDIRALRALVRGRDELVDARIQLANQLRNLLESFWPGAASIFADIDSPIALDFIQRYPTPESARRVGPKRMAAFCAEHAYSGRRSADELLERLHGAAQIALGDMETQTKGELALALARTLAKLVEQIRLITSRIEHRVAALDDGRILMSFPRAGRVCAAQILAELGSVRERFDSEEHLAAEAGVTPVTYASGKSKSVGFRWGCNHRLRRAITCLADNSRHASAWAAAIYANARARGCRHPHAIRILARAWLRVIWRAWLDRKPYDPASHGGLQAMLKAVEG

SEQ ID NO: 370769 - protein, 355 aa, unidentified
MSAKTRQDFSAVAVIGMDIGKDVFHLVGFSSDGSLVLRQKIKRLALVATFQTLPPCIVGMEACLSAHFVSRTLRRMGFEPRIIPAIYVKPFNKGQKNDYNDAEAIAEAALRPNLRTVSEKSQDQLDLQALHRVRSRLVSRRTATINQIRAFLIEQGITIRKGLRAVRNSLLSVLDERQDEISPRMRHIILDLHDDWIRLDVRIEAVSDEIEGIGQSEAHCRDLRTIPGVGPIISTALVAAVGKGEAFESGRDMAAWVGLVPRQYSTGGRTTLGRISKRGSRYLRTLLIQAAKIILMRPHNWPGLSFGAWLAEADLRMHRNKLAVALANKLTRIAWAVLRHGRGFDARRDTVAEAL

SEQ ID NO: 370770 - protein, 390 aa, unidentified
MFVIGIDVSKYKHDCIVLNDAGEVVRKQFTIANDRSGFNQLLSAINELGPSQEKRIGFESTGHYQGNLETFLENAGIPFMELNALLVHRFKGAGTLRGTKTDKADALLIAQYLLRTDFKPYPPKAYHIHELGRLTKRRFDLVKQRTLYLEKITDWLDRCFPEFKPFFGEKLKSATAMFVLREYGSPSRIANMNQASYERLRKASMGRFSSARFAELKALAKSTVGACYGADEWELGSLLRVYDSIQREVEETESLIGSALSKIDSKIPTIRGLGPVSCASIVAEVGDMGRFSSASKLLAYAGLDPRVCQSGTMEARGRMNKKGSVVLRRVLMNAAEYLLCCNSVFYDYYRKKRDEGKPHRVAISHCARKLVRIIYKVEAEKTDFDPNLVK

SEQ ID NO: 370771 - protein, 350 aa, unidentified
MTTLTAKDVVVTGGVDTHQDVHVTAALNQLGRVLGTQSFPTTPAGYRQMLRWLRAFGPVQVVGVEGTGSCGSALARHLTSQGVDVIEVARLNRQLRRRHGKTDVIDAIAAARAVLSGEAAGKPKSHDGPAEALRTLKAVQRSGDKARTQALNQIHQLLVSAPEDLRTKLRGLPRKELHATCCAFRVRPDDDSLPAMTRLALRELAQRVLHLDCQLADVTARLRRITTSIAPELVAIKGVGPDVASTLLMTAGDNPERMTTEAAFAALCGSNPIPARSRKTNRCGHGRGGDRNANAALWRIVVVRLSCDQRTRDYLERRTSEGKSKTEILRCLKRYLAREIHNAMPNLAGV

SEQ ID NO: 370772 - protein, 310 aa, unidentified
MQVESSIIGIDVAKAELVIYFLGQTYSIENTPQAIRAWLKDLPSLCEIAIEATGTYHMDVIELAHRKGHHIYVIDGSRLHHYRKGTGGRAKTDASDAQLLARHLQNEKGALRRWSPPPKAYRTLQTLLRRRAALVKARTIIQQSLGAEPLLKAGLKRLISQINTLDAQIQKHLRDTVRDAGLSEQVQRCKALEGVGDLTAYALVMAFLRGDFRNSDAFVAFLGMDVHVRDSGTKTGKRKLTKKGDSEARRLLYCAAMAARRSKRWAGVYQAYLDRGLATTQALVILARKLVRIAFALMKNGTDYQPAPAS

SEQ ID NO: 370773 - protein, 309 aa, unidentified
MKEELVYLGVDIAKSYLDAAIGNEKRRFSNERIGHRELIKWVKQLSAAVQVICESSGGYERALVQGLARARVKISLVQANRVRQFARAAGILAKTDRIDAELLCEFGKVMRPQTVTAAKLEQEHLRELESQRRHLTHLLVMEQNRGARVNDASVQRLNRSLINQIKKQIEQLDLLIKGHIDQSPELSAKAAKLTSISGVGARTAALLLAQLPELGELNRREIAALVGVAPFNRDSGRMRGKRAIYGGRKPVRHGLYMAALVAAHHNPILRNFYLRLRAAGKPAKLALTATMRKLLIVLNSALKTDLSYA

SEQ ID NO: 370774 - protein, 370 aa, unidentified
MKQRLLYVGLDVHKKTTDVAIASGRSNGKVRSYGKITTTLDALNKLIKKLQDGDKELRFVYEAGPCGYQIYRHLDAKGIHCGVVAPSMIPRRSGDRIKTDRRDAINLVRLFRAGELTSIYVPTPEDEAIRDLLRCRDDMRRFERKARQRLLSFLLRHGHQYSGKRHWTKGFYTWLATVRFSHSAQQVTLQEYIDVTNECSERIKRITQQIQVHVEEWSRAPFVKAYQALRGVSMIVATTVVAEIGDMNRFQNPKQLMAYLGLIPSEHSSGKTVRRGPITKTGNSHVRRVLIEAAWTYKMQARVSTILLKRQKELPKSVCDISWKAQTRLCARYRRLYARGKSRQTVVTAIARELSAFIWAIDKEIQFAVL

SEQ ID NO: 370775 - protein, 441 aa, unidentified
MEIINPNAAGIDIGSRSHFVAINQDHSDVREFGVYAEDMQKLVKWLLENDVQTVAMESTGSYWQNLFTELQNSSIEVILTNGKFTKNIQGKKTDVLDCMWIQKLHTLGLLRGSFLPDLQTEHLRTLVRHRGNLIDTTSKACKRMAQNMRLMNLRLDVVVKDIVGLTGLRIINAICNGQTSGEELAKLRHGNCKKSEQEIARALQSNARQDYLFVLKQELQKYQDAQRLILECDIEIKKLLDGFINQDDVKKSLYIDKKAHKRINKNTPKNIDLNLISYQYFDGVDLYAIEGFSHGTVLTLMSELGENGILKFQNAPHFTSWLRLAPNNKISGGRILSSRTPKGSNRLKIALRQAANSIGNLKDTHLSNFFNRIAYRKGRAVAVSATARKLATILWNMLYKNQQYNPPTVYEYLDQKRKRKVIELQKQIANLDTRMRGIKPA

SEQ ID NO: 370776 - protein, 330 aa, unidentified
MNYSHFVGLDVGKKSFDASLVSLDQELSHHTFPNTPEGIEELLHWIKQHGVEVETALFCAENTGSHVIDLCLSSYQYHFPLALECPLTIKKSIGLQRGKNDRIDARRIAQYASLHYRKLRLYELPDKDLVRLRNWLVIRDNLVKQKVSSLKLLELTRETSRLADLMVPMTFLENQICQIKEKISYVEEEMEKIITEHITLSTNYRLLTSIKGIGPVNAIVLLCVTDNFQRFSDPRKFACYSGVAPFEYSSGTSIRGKTKTSHLANREVKVYLTRAAITAIAWDPQIKAYYKRKIAEGKHKASVINAVRAKIIARCFAVIKRKTPFVTLSA

SEQ ID NO: 370777 - protein, 340 aa, unidentified
MQITTIGLDIAKNVFQVHGIDAAEKAVVRKQLRRGQVMKFFAALPPCLVGMEACASAHYWARELTKLGHEVRLMPAKDVKAYVKRNKNDAVDAEASCEAVRRPTMRFVTVKSAEQQGRLMQHRTRDLLLRQQTQVTNALRAHLAELGIVAAQGREGLKQLLAIIADEKDERLPIDARASLIVLAAQLQALHTMIGSIEKRLTVQHRANEASKRLQSIHGIGVIGASAIAATVTDPKAFRSGRDFAAWIGLVPRQDSTGGKHKLGPISKQGDRYLRRILVVGAHSVLRRAKHNPQKYPWLTQLLARRPFKVVAIALANKMARIAWALLASGGHYRPRLAAA

SEQ ID NO: 370778 - protein, 332 aa, unidentified
MNMNLQGGAVQHQSRPNVGIDVSKQYLDVCWETNELRVGNDGAGWSELAAKLKAAEVDLIVVEATGGYERQLLLALQEAGLTVARVNPRQARDFAKSMGVLAKTDALDARTLRDFSDVLARHPQRARFITALVDERRQLLASLMTRRRQLVDMRAAEQQRLEHADAMAIRSINAVIRALDKQIRQIDHDVDGHIDRHFKQQRKLLDSVKGVGAVTTLTLLSALPELGRLGRKPIAKLAGLAPLADDSGKRRGVRRIWGGRAQVRSALYMATLSAMRYNPVIAAYYQRLLEAGKPKKVAMVACMRKLLVILNAMLRDNAQWDAARHLVTATGA

SEQ ID NO: 370779 - protein, 343 aa, unidentified
MQSISTIGLDIAKSVFQVHGVDAAGQVVIRRQLKRRFMLSFFEKLPPCLVGIEACASSHYWSRELQALGHTVRLMPPAYVKPYVKRQKNDTTDAEAICEAVTRPNMRFVPTKTVEQQSCLMLHRARHLFIRQQTAVINSIRAYLAEFGIVAPVGRRGVEQLLEVVADTADHRLPEAARACLAALGSQLRTLKAQILEFDRRIIAWHRSSATSKRLDAIPGVGPALATALVASVADAKAFRSGRDFSAWVGLVPKQNSSGGKDKLGSISKQGDRYLRSLFTAGALAVIRYAKIHGTGHRPWLTALLARRPTKVAAIALANKLARMAWAMMARNERYKEPAALTA

SEQ ID NO: 370780 - protein, 349 aa, unidentified
MTMTIVEAARGVTGGVDTHLDVHVAAALDPLGGLLGTERFETNSAGYKALLDWLASFGDVTKIGVEGTGSYGSGLARYLRRVGVEVLEVDRPDRQKRRRSGKSDPLDAIEAARAALSGRAKGKPKSRDGAVEAIRVLVVAKRSARQARGKALVQMRHLGYSAPEQLRCRMKGLSVTALVAEGKGLRPGRSPDPVTAATKASLSSLARRISSLDDELAELNERIEALLVATVPDLLELFGVGPDTAAALVMTAGDNPERLHSEAAWAHLCGVSPIPKGSGKNSGRVKAHDGGDRQANSALWRIVMVRIAHDPETQLYFERRVKEGKTTHEVIRILKRYVAREIYRYLPRG

SEQ ID NO: 370781 - protein, 367 aa, unidentified
MKKVSTVAAKQSRNFSQQKLTIGFHLGDRSSWSCVLDEAGEIVLEQKVSTTPRALKEVFGGMPRCRIALETGMHSPWVSRTLSELGHEVIVAHARNVRLIGESRKKDDRLDAQTLARLARIDPQLLCPVKHRSAKAQADLSVIRARAGLVRARTALVNTARGLAKSYGERLRGCNVRNMNPEKAEGLSPELRTALEPLLAALGSLSEQIREYNERIEKLAQTNYPQVALLKQVKGVGTLIAMTFLLTLEDPHRFRKSRDVGCYLGLQPGRRNSGQREPQMHISKEGDPYLRTLLVQGAQHILGPFGPDCDLRRWGLKLAERGGKSGKKRAIIATARKLAVLLHHLWVNGEAYEPLHNSNRAAMPAAA

SEQ ID NO: 370782 - protein, 390 aa, unidentified
MYYCGIDVAKRKHAVALLNEKGHLVQPSFTIENTRAGFDQLLQALTALDGPVLIGLEATGHYWWALYDELTRHDYAVVVLNALQVHAFRKSGVRKVKSDRTDAVWIAEFLRFSQPEPAKPTTAVFLQLKDLSRFRYHLSDQMGDAKRKLLSVLDRIFPEYETLFSSVFLTTSRQLLAHAASAQELADFDLHELTDLLQTASRGRFDRAKAEALQMLAKQSVGVRFLADAAQLQVRCLLAQMDLLEEQRQRVDDALAQLMEQVPQHLTSLPGVGPTTGAALLAEIGDIQRFDAPEKLVAYAGIDATVYQTGQFEARQMHMSKRGSPYLRHALWQAASMAILHDAELRAYYDRKRQEGKAHGTALGAVCRKLLTRVYIVLKENRPYEVRTKH

SEQ ID NO: 370783 - protein, 341 aa, unidentified
MLEVNTIGLDLAKNVFQAHGADGSGAVLFRKKLRRDQVLRFLADQPACTVAMEACAGSHYWAREIAKLGHEVRLIAPGYVKPFVKRQKNDAADAEAICEAALRPTMRFVAAKSEEQQAAAMVFRVRDLVVRQRTQTINAIRGHLAEFGLVAAQGLFHVAKLVAQIEKEDSAIPEAARSILSLLVAQLRTLDDRVAVLDREIARRAREDAEARRLMTIPGIGPITATALAALAPAATTFKRGRDFAAWLGLTPLQRSSGGKQKLGETSRMGERTLRRLLIIGASASVRWAMRKGSTGEPWLSRMLERKPPMLVIVALANKTARIVWALMARGGTYRTPAIEG

SEQ ID NO: 370784 - protein, 410 aa, unidentified
MQVLYPRCCALDVHKATVVACLRLVIDGKVVKEVRTFETTTASLMALSDWLADNKCTHIAMEATGVYWKPVWHILAAGEFELVLANAAHVKNVPGRKTDVSDAEWLADLLAHGLIRASFVPDTPTQELRALLRTRKQLVREQSSHVLRVQKTLEDANIKLDSVISDVMGKSGRAMLKALIAGVTDPAKLALLADGRLKASPAQLREALRGRVTKNHRFLLRLHLRQIDALDDAIAAIDRQVEADIEPFRAAVKRLITAPGVKALGAQVILSEIGLDMSRFPSAAHLISWACICPRSDESAGKRRSTRIRKGSPWLKTTLVQAAWAAVNKKDSYLRAQFHRIKARRGAKKAIIAVAASILTAIYHMLKNGTTYQDLGPQHFDRRSKAQQADRLLKRLADLGYAVPLQPRTA

SEQ ID NO: 370785 - protein, 455 aa, unidentified
MSKRKRKAIQFDALEQLNLHAAGIDVHAEEIFVAVPQGRDAESVRSFPTFTIDLHQLADWLESCRIETVAMESTGVYWIPLYEILEHRGFDVCLVNARHLKNVPGRKSDVLDCQWIQQLHTYGLLRASFRPPEEICAIRALVRHRQMLVRYRAAHIQHMQKALQLMNVQLANVLSDISGVTGMKIIRAIVAGERDPQVLASFRHGQCARSEADIAKSLQGNYRREHLFALQQAVQLYDMYGRQILACDAELETLYRDSAPPHKPDRIANRPPKPSRSKRRKNQASFDLSLSLYQLTGVDLTQVDGIDALTAQTIVSEIGLDMSKWPTVKHFTSWLGLSPQNEVSAGKVKRRGTPRTQNRANTALRVAAQTLARSDSACGAFYRRMRAKHGSPKAIVATAHKLARIIYHILKYREDYVDPGAAYYEAQHRERTIRNLLRKAAKLGFRLEPAGLPVS

SEQ ID NO: 370786 - protein, 415 aa, unidentified
MEPMHQRVAGIDVHRMKHVVTILIGQEDGAVSSQTREFGGFKRDMRALVAWLQTHHIQQVVMESTGIYWKSVFAHLEAAGIPALVVNAFHVKNVPGRKTDVGDSEWLAQLARFGLLRGSFIPPKDLRELRIVSRYRRKLTGMLAGEKNRLHKLLDDAGIKLGGVVADIDGVCASKMVEGLIAGGKPDELAALGRGKVRATTDILEAAMDGELSARHRLVLDMAYDHLRYLEGKLAALDRYLLAAMQPYAWAWRLLQTIPGIDAISAAMILIEIGDDPHRFGSSARLASWSALCPGNNESAGKRKSGKTRHGNPLVRYLLCEAANAARRTKTVFRAKYESLVIRRGHKKTIIALAHKLVRTIFCVLVRRKPYRDSTVDYEAASVAKNAPRWIRALKKYGYWPQVAAPSAPIVATAS

SEQ ID NO: 370787 - protein, 344 aa, unidentified
MDKVSTIGLDIAKNVFQVHGVDATGAVRIERQLRRSDVVKFFRKLPPCLVGMEACASAHYWGREIAALGHEVRLMPPTRVKPYVKWGRKNDRADAAACCEAVTRPSMRYVPIKTVESQSALLLHRARQLLVEQRTRLCNAIRAHLAEFGIAAAKGEAGFSALRAMLVNEEDPRVPATIRPILAILAAQWCSTDEHIALLNRQIVAWHTSNSDSLRLASIPQIGPIVASALVATAGDAKRFDNGRQFAAWLGLVPRQNSTGGKQRQGGITKTGDKYVRQLLVIAATGMIRRVRTNPALSPWFAALLARKSPRQAAVALANKMARIAWVILAKGEHYQERPRAAAA

SEQ ID NO: 370788 - protein, 316 aa, unidentified
MLDVKVENCAGIDVGKKFLAVCVLTGPADRKPVAEVRRFGTSVRELERLRAWLIETKCTEAVMESTGSYWKPVFNILEGALKMILANPEQVKALRGKKTDPNDSRWLASLLRHGLVQGSFIPPRDIRELRDLTRRRRTLVGEGASERNRIQKVLEDANVKLGNVLSDVFGTSGQAMLEALLENKQNAAEIAKIGHWSLAPKIPQIMEALEGHRMNDHHRFLVRQGLRHMQYIESMIEELDREIAAKLKPYQKEMELACTVPGIQRIAAASILAETGTDMSPEGPFPDCHHLASWAAICPGNNESAGKRRSGKTRQG

SEQ ID NO: 370789 - protein, 391 aa, unidentified
MVCVGIDVAKDKHDCCILDSDGMVRADCFTIPNNMDGFKQLLQTIRNCTKKSDKIKVGLEATGHYSYNILGFLLDNGLPTYVINPLHTNLYRKSLSLRKTKTDRVDARTIATMLLSDVDLKSYTDIAYHNEELKSLTRYRFDKVQERAKLKQSVSRLATILFPELEGLVSSIHGTSIYALLSEYPGTKQISEVHLTKLTNLLTTASKGRYGKEKAIQIREAARASIGSVIPAKSLELKHTIKLIQELASEIDEIEDSIQKIIDELNPPILSIPGMGVNSAAVILAEIGDFSNFSSPDKILAYAGCSPSTYQSGKLTNCYAHMEKRGSRYLRHALYNATKYVCYWNPVFAEYLAKKRAEGKHYNVALSHAMKKLVRLIYALQKSGKTYLTAA

SEQ ID NO: 370790 - protein, 338 aa, unidentified
MQLYCGIDLHSNNSVISMIDDTDRVISEKRLDNDLDIITQHLKPFAQDLTGIVVESTYNWYWLVDGLIENDYTVHLANTLAIKQYNGIKHTNDETDARFLAHLLRLNILPTGYIYPKVQRHVRDVLRRRLLLVQQRTAQLLSLQSMIMRHTGKRLTSHQVKRLTQEKLSLYFNDAATLFTAGHALQLMQQLKTQVEEIEDFVLSYCKQNTPFSIITSTPGIGKILGMTILLETGPIERFSQVGNYSSYARCVPTNKISNGKTKGKGNAKNGNRYLAMAFVEAAHYATIWEPTIKRYYQRKCKKVPLMVAKKTIANKLTRACYHMLKNNTVFDITRAFR

SEQ ID NO: 370791 - protein, 396 aa, unidentified
MAAVMIGVDPHKGSHTAVAIDPAEMPLGELRVRASAAQAAKLLEWAAMWPERTWAVEGAGGLGHVLAQQLLAAGERVLDVQPKLGARVRLLSSGTSNKNDPNDARSVAVAALRSPACHPVRADDHAVVLRVWSRRHRQLSRLRTQAACRLHAVLCEITPGGVPKIITANRAAAILGSHQPAGPAGAAWQELAAEHLADLRRIDAKLREARTKITAAVRASGTTMTGVFGVGPIVAATVIGDVADVTRFPTADRFASYNGTAPIEVSSGSRKIYRLSMRGNRRLNHAIHMAAVTQIAHKHSEGRAYYDRRLKEGKTPSEARRALKRKISNTIYARLQADAKARAAGPGGQPGNDSASSAASSHPENRLFGPATPEPAHHLTLGHAGRRKPKKSCQAP

SEQ ID NO: 370792 - protein, 316 aa, unidentified
MISYFVGVDVSKATLDVGFFPESVPQFQVKNDPEGFAQLAACLKELEIERVLLEATGGYERAVLKALRLEGLNVVRVNPKRARDYTSAMGRIAKTDKIDARMLARFARGFEDLPQVEPNQDRDELGELIKLRGSLVRHRDDDKRRLKQTTCTVAVATYTDHITYLDKQIKALDQAVEDASNVLDREKARRLRSVKGIGVITCGTFMAYLPELGRVTGRKIAALAGLAPYNNDSGKKSGPRTIKGGRHRVRGAAYMSAWSMIRHVPEVKARYEALRARGKLAKVAAVACMRVLLVRLNAMLRDGTEWGEQKTQVPAA

SEQ ID NO: 370793 - protein, 359 aa, unidentified
MSKCSTKTQKVYVGFDVSEKKIATFAICGEKTSKGNPEISNDPEAIKQFLKIFPDPKNVCVVMETGTHSLWMSELIRKLGFEVIVAHARDLALIYGTDKKNDQLDAEKLARLAQADKKLLHPVEHMTMERQTDLMVVKSRDMIVRQRVRTINTIRGFLRSCGCKMIEAEYTADSIKKCCSALPAEVKPAIIPLLQHICYCDRIIKDYDRQIRKLCQKYHETDILRQIPGVGELTALAFVLIIGNPKRFKNAQRLCAYLGLVPKQDQSGDTDKQLGITKQGNKLGRRLLIQASHYIMGPFGKDCKLRSFGQRIQSRGGNSAKMKSFVAVARKLVTVMFALWMNPDVPYDPNFKKHGKAAA

SEQ ID NO: 370794 - protein, 334 aa, unidentified
MQNVTLIGIDLGKNSFHIHCQEKHGNTLLRKRFSRIQLTQFLATCPPCIVAMESCAGAHFMARHISQLGHQVKLISPQFVQPFVKSNKNDFIDAEAICEAASRPSMRFVTPRTEDQQAMSALHRVRDALVRERVKATNQMHAFLLEFGISMPRGIAVIKRLATVPEEHELPPYLVRLLTRLHQHYGYLCEQIEEIERELKNHLADDETAQRLLTIPGIGTITASLLATKLGDGKTSLSSRVFAASTGLVPRQYSTGGKSTLMGISKRGDKNLRRLLVQCARVYMQRLEYQSGRLAEWVNGQLTRHHSNVVACALANKLARIAWAVTTQGTVFSK

SEQ ID NO: 370795 - protein, 417 aa, unidentified
MNAEKEIVCGADIHRDFLVATMISRSGLKLQEQFGMDQDGLLAFRSWILDHRCLRVAVESTGNYWYPIFCILEGHVEFILANAFQIRNIECKKTDRLDSERIAIYCLNNLIKPSRIYPKDYRDLRSITRSREALVNARSKLKNQIHQSLAVCCIKLSSVISDSFGKSGRYIIEQLLEGKTIEQIISKIPSKRVRKKADELRKAIRNGLDPVQILLIKTNLDAIDYLSEKIKLLDAEIAIKVKPFEEDLNIILSVPGIGLTSAATILAEMGDYRDFQNADKLAMYFGIVPAVYQSAGKLRTGKITKRGSKHMRRILVQVAKAISKTKKSSRLKRFFLRVFTRSGKKNVAAIALARKVLCIIYHLLMKREDYQEPEVKKNKPKIPSCVSPLSRMDIDEMIKTISQAGYLVKKGLKEGCG

SEQ ID NO: 370796 - protein, 411 aa, unidentified
MESQILFPQIVERGAGMDVHRDTVVVTVMGTGILTETKTFTTYTNDLRNLSSWLKSNGVTHLSIESTGIYWKPVYNILEEDFEILLVNAKHVKNIPGHKTDKKDSRWLAKLLLSGLLKASFIPPSEIRNLRDLTRYRKKLVQNATADRNRFEKILQDANFKLSNVISDIFGKSGSLVIAALRKGNNNFEELFSLCHGQIKKKKDILKESLEGKLTTHHKFMLDTIQLSLDNTKNKIELLDAQITSLCSPFLEEIQLLQTIPGISKITAAILLAEIGVDMSKFPTVQHLASWAGVCPGNNESAGKIRSGRITSGNQHLKPVLIECAWAASHVKDCYLRKKYESLIGRRGKKRALVAVGHKILNAAYYIIKYKVPYIELGYDYLDSRRKQSQVQSYIDKLKNLGIEVEITQSH

SEQ ID NO: 370797 - protein, 449 aa, unidentified
MEKEENRTVKKIKHTQGLPVVNPHAAGIDVGDTLHAIAINDGDSGFEVYEYPTFTENLREAVSMLKSKGMTTAAMESTGIYWLNLYLLLEEAGIEPYLVNAKHVKNVTGRKKDDTDAIWLQKLHSCGLLQKSFQPESEIRVLRTYVRQRKNLVLLSSDCVRRMQKALELMNIKVHTVISDILGKTGLLMIQAILNGERRPEELVKLKDSRIKASDEELKKSLTGIWDEQYLFMLKQAYDSYMFHRSQIEDCEERIKDLLLTYAAQVMEGDITGLEVKKKKPKKNEFTYEISPLLGIIAGADISKVEGISEISFLEILSEIGLDMKKWKNDNHFSAWLNVAPNTKITGGKIISSKMQKKKNYAGQAFRMAANGAKSSKSPLGDYARKMKSRLGKKGGNVATAHKIARIVYAMLSQKTDYNPHMVAVDHQKWKEKKIAYLEKQLNELKKTS

SEQ ID NO: 370798 - protein, 419 aa, unidentified
MSFKILKFKCCGLDVHKTWIYACIGITDSNNRTEYKQARFSSFTKGLNELCDWLAKYNCTDVCMESTGKYWIPVFNILEQHNLWVTLSHPKYTKPMKGNKTDRKDAKWICDLYMCGMVKPSFIPPADIRELRDLVRYRYKLTCMITGEKNRAQNCLTVSNLKLDDVFSDVFGKSSRSITEQILQHPGEKFDVAPFVHGRCKTPIEEIQAAVDGAISKEQAVKLRQCLDHIDELNKHISELEQEILRLSDKYEAALNLIRTVPGFDKNPMTAVQILSEIGGDMSVFPTAKHLVSWAGCCPRNDQSNQKIKSTRISRAGSYFKPVLVQVANALIKSKKHLEFTNRYKHIKARRGHKKAIIAICRMILTAIWHILSDLKPYTPEGFLESHPVKEGKVLSSSQALNFFKQRGYIIKDEPLSVS

SEQ ID NO: 370799 - protein, 443 aa, unidentified
MTHKQTMPVVHPHAAGIDVGATTHYVAIGQHPEDVRSFGCYTEDLHALSDWLKAQGITSIAMESTGSYWKGLFQRLQHDGFEVLLVNGKHTRNVKGRKTDVLDCQWIQRLHSLGLLSGSFLPDTFTATLRQYVRQRDYLIEQQAAYIKKIEQALRQMNIRLDAALSDIVGQSGRAILEAILAGQRNATVLATLVDRRVRKTKEEIIRSLTGEWKEEYLFEMQLSYELYGVIQSKIAACDSRIEQLLTQSMQQKEVVEDVPTVKKKKNKHAPKMNLQYISTQLSGGVNLYQIEGVNDAMVLALLSETGLDLSKFPNARHFCSWLALAPNNKVSGGKTLSSKTAHHNNRLAQAFRRAANAIGNMKKGALNQFFRRIAYRYGRMAAITATARKLAVIVYNMVSKKEAYRYEETVVYTERLRRIQLKSIQKKIKAMNIKPEELHFTT

SEQ ID NO: 370800 - protein, 375 aa, unidentified
MASMTSSTATAQPAGVLFGGIDTHKDIHVAALLDCDGGLVGSASFPTTRAGYRQLLGWMHTFGILARVGVEGTGSYGAGICRQLTAAGVEVVEVNRPDRSQRRRRGKSDVLDAAAAAEAARTGNRIAIPKSRDGQVESLRVLRLTRASAVKARTKAFQQLDQLIVTAPERLRDQLRDLPKMRLIGSCAAWRPHSTDAADPTVAARIALKSLARRYLQLDAEITELDQLLEPFVADLAAQLVAVRGVGTETAGQILVTVGDNPHRVHSEAAFAMLCGVAPLPASSGKTQRHRLNRGGDRQANRAIHVIATTRKRCDPRTQAYMEKKTAENHTRREATRSLKRLIAREIYYLLNPRPHTPPVPPSRPVSRRAGAVKV

SEQ ID NO: 370801 - protein, 348 aa, unidentified
MERPLMNIKTLGIDLAKNTFQLHGVNAQGEAILKKKLSREALLPFLANLPACMIIVEACSSAQYWCRQFERLGHQTKIISPQFVKPFVKYHKNDANDAAGIVEAGTRPSMNFVPKKSVEQQDIQCLHRIRYRLVKQRTALINQIRGLLSEYGIIMPKYITTVRKKLPEVLENAENELTDLGREIFFDLYQQLVELDKKIEEYENRLKRLYSQSEACQRIGQIEGIGVLTATAMLATIGDIRVFKNGRHLAAFLGLIPRQHSSGNKQQLLSISKRGDVYLRMLLVHGARSALRVAGKKIDEKSRWIMDLKARCGENKACVALANKNARTIWALLARDKPYQRNIKYISQ

SEQ ID NO: 370802 - protein, 340 aa, unidentified
MSDITTIGLDLAKNVFQVHAIDGAGNVVARKRLRRGQVLAFFAGIPSCLIGLEACATAHYWARELIALGHEARLMPPSYVKAYVKRNKHDLADAEAICEAVRRPSMRFVPLKTVEQQSALMMHRARDLLIRQRTMLVNALRGHLAEFGLIEAQGLHKVTRLITIVMDETDRRIPDTARQVLKVIVHQIEDVQTGIAELETQVLAWHKNNPVSQRLATIPGIGPIIATAIAATVADPNTFRSGREFAAWLGLVPRQNSTGGKTRLGGISKRGDRYLRRLLVNSSHTVLLCSKAAKTDPWLTSLLSRKPRLVAAVALANKTARVAWAIMSRQDTYRHVAAAA

SEQ ID NO: 370803 - protein, 338 aa, unidentified
MFYVGVDLHKQSISLCVVELAGRERKIIERRRFRCDEEESMADYFAELGKYQLVVEATASYEWFVQLVEPTADRVVLAHPGHLRVIAQSKRKTDKLDAQTLAEFLALDQIPEAWRPTPRVRQHRALVRHRHYVVRRSTSVKNKLRRVLSHYNADLRNLFTHAGRKYLATIELSEADRFVTDQLCEELDQHSTRLKAVDQQLKAFAKAAPVAEQEARAVLESMPCVGPVTIDVVLAEAGDVRRFGSQRKATAYAGLAPGIRESAGKGKQLGITKEGSRLLRCILVETAWRLVLRTRRWACVYEKLKARCGAKKAIVAVARRVWCVMVSMLNSGQKYQLT

SEQ ID NO: 370804 - protein, 385 aa, unidentified
MGSQTFIPRDYDVFSGLDVDKRSISVTFTDHDRFLKSLRMPYSAEHLLNHVRKHFPNKKVAFVYEAGPTGYGLYDGIVAQGYPCLIAAPSMIPKAPGQRVKTNRLDSKALSENLRGGQLKSIHVPSPTYRQLRHLTQLRDVLVSELVGMKQRIKSLLLFEGIEFPPAPPGSQWSSIVKNKLRKLPCSGMVRFKLDQLLDSLEFNEKQVLKAIREIRRYCQNDPELSQCMKYLMTLPGIGWITASQLLARIGDWRELNNIRQLGGFLGLVPTEHSTGERTDRGSITRTGDERLRSKLIQASWSAIRQDGELREFFRTVYRKHPREIASRVAIVAVARKLSVRIAVVLMKQRPYEVREKVHSAPLTQEETSPQGTTRREPEPGEKNS

SEQ ID NO: 370805 - protein, 360 aa, unidentified
MNEITRVGVDLAKRVIQVHAVNATGRVVAAKALPADKFAAWCVQLPAGCLVAMEACGGAHHWARKLRSYGLDARLIAGHFVTPYRMAGKGGKNDAADAAAICEAAGRPHMRFVPVKTPAQQALLAIHRLREGYKEDRTACINRIRGLLTEFGIVFAQSPDALRLGLADVLEDASNELPGIARLALQEARLHWIELECHIASCDERITAHVRSDAQAKAAAQLSGIGPVTASALVATVGDFKQFKNGAQFGSWLGLVPRQNSSGGKTQLGRITKRGDDYLRTLLIQGAKSAVMTAHKRSDKISQWLVQLLARVGWQKAVVALANKNARIVWALLAKGREFDPNYVSVKPGEVLPILPAMPA

SEQ ID NO: 370806 - protein, 343 aa, unidentified
MQVHSVGIDLGKTTFHLVALGAAGKVLVRKKFTRKQLLAYTVNMPASLIGLEACAGAHFLGRALRKQGHDVRLIPAQFVKPFVKSNKNDFIDAEAIAEAVERKNMRFVPIKTDDQLDLQGIHRVRDRLISRRTAVINQLRAFLLERGMVFAQRPAKLKAAMADVVENADADLTPQMRSLIDMLWDEWKIVEQQIEKLNLELERISAADAGCTRIRQIPGIGPVVATAIVAAIGNGAAFRKGRDFSAWLGIVPRQYSTGGKAKLLGISKRGNVYLRKILIHGARAAVLRIKRDRTPIGAWLDGLDARAPKNVVVVAMANKLARIAWAVLSSGEDYRPTANAIAA

SEQ ID NO: 370807 - protein, 323 aa, unidentified
MIKNNNFFGIDISKDVFDVVKNGEKHYQFSNNIIGFKKFIKLLDNKSYCIMEATGVYHYALAMYLYQNNISVSVVNPLVIKRFMQMHLRTIKTDKADAKQISLYGMQNTLVPWKPVESYISESKDIFELISLYIKQRTMLKNRLHSFDSKSTQKMIKTGLTKSIRHLNKAIQKLETKLEMIIKSYHKKMYSNLKSIPGLGPKTVLYMILITEGFEKFESAKQLICYSGLSPTQRTSGSSIRGKSRISKQGNSKLRNLLFMCSFNACKVNKPCKALYERIVAKGKSKKLALIAVENKLIKQAFSIAKSGLEYDENFVSVKPSYS

SEQ ID NO: 370808 - protein, 421 aa, unidentified
MDEITEEPTALVERVAALDIGKATLTACVRVPHETKPGRRRQEVRTCATTTRSLLGLRDWLVCQGVTRVVMEATSAYWKPPFYLLEDDIAECWVVNARDVKNVPGRPKTDKLDAVWLAKLAERGMLRPSFIPPRPQRQLRDLTRYRRTLTHERTREKQRTEKLLEDAQVKLSSVISDIFGKSGRDMLDALIAGQRNPYALAALARGTMRAKTSVLQEALTGHFTDHHGFLLAMMLSRIDALTAQIGTLTTRIEQAIAPFAHQVAQLDEIPGIGIIAAQDLIAETGADMSRFPTPAHLVSWARFAPKARQSAGRSKAATTGKGNPWLGGTLGESAAAAARTSTFLASRYKRIVKRRGKQRALVAVGNSLLTIAWHLLSDPSARFTDLGPTWHDRHTPQRRKRQLIAELERLSGMKVTLEEAA

SEQ ID NO: 370809 - protein, 347 aa, unidentified
MASIADWCCFVGFDYHDCFVQVCILDEAGEVLGNQRVANDMSSILEYVDNTRDGRIIRGAAVETCCGASHFAEQLRNHDWPVELAHAGICSKMKQSPDKSDLADAHLLADLCRVGYLPRVWLPPAEIRDLRRLGRYRQQLVEQRRDVKLRMRAMLREERIAAPREVGNVWTKAWLIWLKSTESLNGHSRWVMDQHLADLERLVAKVREVERRMEEATTDDPVVQKLRETKGVGLVTAVVMRAEIGSFDRFACGKQLARYCAVTPKNASSGKRQADGGLVRAGNLTLRTMLIEAAHRLARFQPTWKQMKEGLKQRGKPGSVAAATVANRWIRKLFWEMRQVEQQSQVA

SEQ ID NO: 370810 - protein, 346 aa, unidentified
MEYFVGLDASLDTVNMCIVDQDGSVLLEQKVDAEPQQIVALLKRFGRPLKRIGLEAGPTSSWLFSELRAAGYPALCLECRHVKAGLSAMRNKTDRNDARGIAHLVRLGWFRLVHVKSEAAQEIRMLLVNRNLLLSKLQDIENSVRGSLKVFGLRLGKVTKRSFETRALELVEPHPKLAAISLPLLRVRRVLLEEFCRLDRMALKIARSDAVCRRLMTVPGVGVIVALTYRTGVDVPERFTRSRDVGAHFGLTPRRYSSGQVDYDGHISRCGDEMVRTALYQAAHVLMHHGRWSGLRGWAMRIAKRSGAKLAKVALARKLAVVLHRMWIDGTAFRWTTHESTPAAAA

SEQ ID NO: 370811 - protein, 424 aa, unidentified
MKFKMQDKQNQLIERISDKHLVVGVDIAQQFHVARAVNFRGIVVGDPLTFENNEDGFTILLKWINELKRKNKLNTAIVGMEPTGHYWINLSKWLFDQNIDVVTVNPYHVKRNKENRDNTQSKSDIKDALVIADMVKNGYYSIVRPTSESFEELRVLMSNRDVIVKRLVSSINQLNRWVDVVFPELRQVFKDVKGKGAIATLRLFPTPMELRSMQPQNIVIGWKSLMKRQPGLRKAQLLIHLAKHSIGTRQALDAYKFHLLQLLEEYDLATTQLERVEQQVSEVLKQIPYANHLLTIKGISEISLAGILGEAGDLSGFAHGNSLLRHAGLHLAEASSGKWKGQIVISKRGRSRLRRFLYLATMSLVMNNPEFKAIHTLNVKVKKIKKMKSIMKLVGKLARIFVGIAKRNESYCPEKLQPLTSLAA

SEQ ID NO: 370812 - protein, 439 aa, unidentified
MEKINQQCAGLDVGSDKVFMSPDGVEVFRYETFTADFRDLVNQLQELCISTVAMEATGVYWVILYEMIQAVGIDVYLVDGQQTKQVPGRKTDVKDAQWIQQLHSYGLLNRCHVTTGQIQTLKVYQRLREDHISQASMHVNHMQKALIQMNIRLPEVLSQVHGKSGLAIIKAILAGERDKQTLLQLCETSIIKRKGLQVLKALEGFYKEEQLFALKQAYDGYEFYQNQVAQCDQQLDSILTEISKNKAEVEVPTKRKVIRHHKPQVQDLAKKLLKISEGKDPTILPGITDYSQLKLLGELGADLSKWPSEKQFTNWLGLAPGQNNSGKRRKNKSKRGTFTAGQIFRQSATSLLESKSIALGAFGRRLKSKKSSPIAIKATARKLAEMYWRLMVKGSNYVEKGVQHYENQLINQRIKYVHKLAKQLNMTVSYNTNNALKQS

SEQ ID NO: 370813 - protein, 343 aa, unidentified
MEHYVGLDVSLKQTSICVVNQAGSVVREGVVDSDPDAISAFVRSNAPGVVRIGLETGPTATWLWTELKRLGLPVICIDARHAKAVLKMQINKSDRNDAAGIARIMQTGWFKEVRVKDLDSHSVRALLASRALLVKIKRDLENQIRGLLKNLGLVIGRAKFNVFTVRAEELIEDRPELMAVVRPLLKARQAIEQQTDDLDRKVLKLARYDAQVRRFMTVPGVGPITALCFKATIDDPTRFKRSRSVGAYVGLTTRRHASGEVDWTGRISKCGDAMLRSYLFEAAGVLLTRVPKWSALKAWGIRLAKRSGLRKAKVAVARKLAVILHRMWIDGTEFNWSTKKAAA

SEQ ID NO: 370814 - protein, 309 aa, unidentified
MKEELVYLGVDIAKSYLDAAIGNEKRRFANERTGHRELIKWIKPMEGSVQVICESSGGYERALIEALARAQVTVSLVQANRVRQFARAAGILAKTDRIDAKVLCIFGEVMQPGTISASQLEQQHLRELESQRRHLTHLLVMEQNRAARVSDACVRRLNRSLLNQIKKQIEQLDRLIKEHIEASPALLVKAQKLTAISGVGARTAALLLAQMPELGQLNRREVAALVGVAPFNRDSGKMRGKRAIYGGRRPVRHGLYMAALVAARHNPILRAFYLRLRAAGKPAKLALTATMRKLLIVLNSSLKPDPTYA

SEQ ID NO: 370815 - protein, 405 aa, unidentified
MERRVWVGMDLGKQFHQVAVINALKRVVVPSFRVGRGLAGVKRLLGRLGEVGITGPEAVVTIEATGNYWNELVGMLRLAGCEVYLVHPKKAHDLRKFYRDHTKTDVTDAEALARMPLVDENLKPVWSGPPTVQTLLRLCRLRWKYRCRIADLKRRISMFSEMIVPGIDTVMPVRYSKSARVFLRRYLAPSKARRLGKKRLVEILSKAAWGKFSDKKSDELWACIENAPDLGWHADDLLLEIGVQLDELETLEQQVERLDARIAELYSEVDPEQRLKRVRGLGEFLAAALTAHIGDVKRFASAKHLVSYSGLVTRVSQTAGHAKAGQVITKAGSPFLRAWAYMGATCTRQYDDEQKRFYQRLRKRGKHYNLAICATAARLLERTYDILSERSAETTEEFEVKVAVG

SEQ ID NO: 370816 - protein, 429 aa, unidentified
MSYRIAGIDVHKKMLAVVVSDVEIDNEYQFERRKFSSSPEQLRSLAAWLLEQEAEEVVMESTAQYWKPVWEALERYWKPICEKREGARRKSGTLHLAQALSNRGRRGRKRDFPDAERLVKRLVARELTLSFVPDAEQRLWRTVTRKKYQLRCDRIRLQNQLESLLEEAHIKLSSLVSDLLGLSARRMLKAIAEGETSPATLAALADQRLRATPEQLCDALGACTELNAVYRRLLKMALEELRLIDEQIGRLDQEMASLLSEHQDAVQRLAEVPGLGVDSAQQIIAEVGATAATFPSEKCLSSWVGACPGDDESAGVNYSHRSPKGNRHMRRLLNQAANAAARTKGSIFEIVYRRSVPRLGHNQAIGAIAHRQCRLIWLILHQGVRYEERGPAVTKRSKQLRTWKMIRQLRSLGYQIEPPNPQSSQAHVQ

SEQ ID NO: 370817 - protein, 373 aa, unidentified
MNYSTVYVGMDVHKESFSLCCYTNEKEKGEYPQKVDAHYSKIINYIEAMRFHYGDDATFICGYEAGCLGFTLYHQLTDHGIKCVILAPTTMLKPQGKKKVKTDKRDAALIARCLAHHDYSAVHVPTEKDEQTKEYIRMRCDHKTALKKVKQQILAFCLRHNFRYEDGSNHWTEKHLKWLRSLKPDGLYSEILQEYLLTYDTLSDKLERLDKRIEELAGDDDYKEKVHKLSCFLGIKTQTALSVITETGDFKRFSTAQHYASYLGLVPGEDSSGDGQNRLGITKAGNRHLRMLLTEASQSYSRGQVGYKSKALKQRQEGNDPAVIAYADKANERLRRRYYKLVLGKSKKHNVVKTAIARELACYIWGMMTGNIA

SEQ ID NO: 370818 - protein, 422 aa, unidentified
MLAQTQDEEQIIARVAACDIGKAELVCCVRVPDEDRPRRRLQEVETYATMTRPLLGLADRLRCLGVTRVVMEATSDYWKPVFYLLEAHGFETWLVNARDVKHLPGRPKTDKLDAVWLAKVAERQMIRPSFVPPPQIRKLRDLTRYRADLVAARTAEKQRVEKLLEDAQIKLSVVVSDIFGVSGRQMLAALIGGQRDPTALAQLARGVMRRKITTLQEAFTGYFTGHHAFLLAKMLARVDGIDADIAALDASIGELAAPFAAAVKRLTEIPGISFTAAYAIVAEIGTSMDRFPTAGHLVSWAKFAPGVKESAGKKKGKGTTGHGNRYLARVLGNAAASIARTDTFLGERYRRIARRRGSQKAVVAIGRSLLVIIWHLLADPTTRFTDLGSDFYDTRINPERRKRNHIRQLEALGYKVTVEPAA

SEQ ID NO: 370819 - protein, 345 aa, unidentified
MEETKPAYQLYVGVDIAAETFTAAWLPPGGPSGAPITGEQTAAGFAALDRRLRATAAPADATLVVLEATGNYWVALAVALHELGYHVAVVNPRQAHHFAKAQLRRAKTDALDARDLAQLAAALRPVPWTPPPAVYHEVRQRLVARDGLLAMRTQARNQRHALLQWPVVIEAVRRHLDELIADLDGRIACLEGEIAAVLKHSAWAESLACLTSAPGIGLVTAAWLLVSTLNFALAAGPDTLAAYAGLAPVPRESGRSVRGRARIGHDGNGRLRTAFYMATLSAARYNPAIKAFYRRLRAAGKPKKVARCAAARKLLHQAWALGSKLQRFDPDHKQQQHDVSPDLAA

SEQ ID NO: 370820 - protein, 392 aa, unidentified
MEKTIKYAVGIDVSKDTIHTCLCEIDNKQQVKIKASHRFSNDVKDFPGFVQWIQKHQKQKEITVVTCMEATGIYYEKLAIHLHKKSYTVAVVLPSKAKKYMQSLGLKSKNDKIDAAGLARMAAEQNLDQWQPMGEFFYQLRQLTRHHEQLQESKTVFVSQLHALKHGAFEVKEVVRQQKKMIALIEKQIQETFNAIQKHINNNEEVRIKTEHICKIKGIGLLTVATVIAETNGFALFKNIRQLVSYAGYDVVENQSGYHTGKTKISKKGNRHIRRILHLPSFGVVRFNQKPFADLFNRVYDKTKIKMKGYVAVQKKLLVYIYTLWKKNEEYQPQIKTSGNDELKSLFLLGSVGAITTEDMVVKKVVPIITGTTQDELPYNESPEALFLLMQK

SEQ ID NO: 370821 - protein, 342 aa, unidentified
MKEASIIGLDLAKRSFQAHGALADGSVAFRRKLTREKVLGFLAEQPRCVVAMEACGSAHHWGRAIRDAGHEVRLIPPAYVKPFVKRQKNDAADAEAIAEAASRPTMRFVAVKTEEQQARAMLFRTRDLLVRQRTQLINALRGQLSEHGVVAPQGPANVAILAQAIDDMTPSLPLLVVELARVYLDQIDGLSEKVAGLEKAIACEAKRGAMTRRLQTMPGVGPITAMAIETFAPPMEVFRRGRDFAAWLGLVPVQHSTGGKQVLGKISKMGQRDIRRLLITGAMVIVRWACRKGAQEGTWLHRMLGRKPRMLVAIALANKMARSIWAMLTKGEDYRVPAAATI

SEQ ID NO: 370822 - protein, 477 aa, unidentified
MNEVLEKLCVEDGAEVRPLYDYGVGIDTHRDFIQVCVLVRSGAAIRKYESEHRTTWDGLVGAGEWITDTIKEKSIPTIEPGPLRYTIESTSTYHLPVIKAIKGKPCVVNPVLVGSTKKKTDVLDARLLSYQCMSGLWPESFVVPPEIEEFRLLMKQRQYHSRESAAITNRINNYILRFGHTLGSYKSVRSIENRALIEDMCKDGYVYKENCHGTEAGQFICPDGLPHEVKNILKDMFSEYDAHAEKVKHYQKLAMDSAKKINWETDSGHVKGDELIKNLLTVPGVGDLTALIWLCEIMTPLRFETASHLAAYCGCDPSLKVSAGKVTSQTRRKGNANLHFQLSEIAGSCINRHSEPFGQWGYAICKKHAKGGYKKASGAVARRIAVSLYFVHKQNAPFSYDKYNFYKIDVPNVTLSDMGFSKRLENLLYSAGLTVSTSIAESYIIGKVYAIKGLGKKSANEINTWIQSNKNYKSKER

SEQ ID NO: 370823 - protein, 361 aa, unidentified
MLGVDVHDATLVIRMAEGTKMPETLRVENTRSGRRELWQMLHKCAQRAGAKRVVMAYEASCQGFGLYDEASDEGFECHVLAPTKIARSRTHAKRKTDEEDAKRLLELVRGHVLAGNDLPAVWVPDAQTREDREVVRSRLDVSEKLTGIKAQIQTLLKRNGVKRAKPTGAGWTGLFEAWLLGLTGPKGALSRGARVALATLLRQKGALEIEMLRLDEEVKKLAQQPRYLEPAKVLDAVGGVGILTAMVVLTELGDLSRFANRKQIAAFLGVVPSSNESGETNDRKGHITRQGPWRVRRVLCQCVWARVRTVPEEKAAYERIVKKNPKHKLIAVVALMRRLAVVLWHLGRDAQQRHGCFAKAA

SEQ ID NO: 370824 - protein, 345 aa, unidentified
MKITTVGIDLAKNVFQVHAVDERGRAVLRKQLRRDQMRAFFVNLPPCLIGMEACASAHHWARTLQQFGHTVRLMAPQFVKPYVKSNKNDVADAEAICEAVGRPNMRFVPIKSVEQQAVLSLHRVRQGFVRARTAQGNQIRGLLGELGLIIPKGIVNVAKRVPTVLEAAGEELPASFRQLIERLTKHLKELDRQVDELEAQIKAWHRGSELSCKLEKIPGIGPLGASALVASIADANSFDNGRQLSAWLGLVPRQDSSGGKPKLLGISKRGDVYLRTLLIHGARSAILAAQRKSVNTNVWLAKLLDRRHPNIAAVALANKNARTVWALLAHGREFRADYAPKVSAA

SEQ ID NO: 370825 - protein, 329 aa, unidentified
MDVLYHRCAGLDVHAETIVVCALLGEEEHIQKEIETFPTFTKDLFRLLKWLEDRGVTHIAMESTGVYWKPVFNILEDYFDITLANAQRIKNVPGRKTDVSDAEWIAKLLRYGLIEKSFVPPENIRELRDLTRLRKKWIGQLTAEKNRIQKVLECSNIKLSSVISDVFGVSGRKLLERLMKQGYIEETEGDACIHRSMKRKRQQIQDSLFGTLTNHQLFMIRQSWKHIESLESLLRDIEERINQLLQVYKQEMELLVTIPGVKKETAAVIIAEIGVDMGQFPTSQHLASWAGVVPGNHESAGKRKSTRTTKGNPHIKSALCETAWALSSM

SEQ ID NO: 370826 - protein, 417 aa, unidentified
MTVNSLVQKRSAIKPDTLIVGVDVAKFRHVACAIVPGSAISRPFGFPNSREGFLALSDEIKTWKPTPTSTVLVGMESTGAYWVNLARWLAEHGCQVVQVSGLYVHRAKELLDNSRGTSDGKDALLIADLVAQGKYLGFVRLEGVLADLRQLVGLRQRLVHERAARYNLLHEAVGLLFPEFAAIFRDVTGPGARRVLRRFPTPAAARAYPPDEMHRLLSEDGRIRVSVARLARLQAAAEQSIGAREGTAGLEYALKDTLLELDSLDTRVKQVEAEISRLLAQVDETPILTSLVGPMTAAIILGETGGLRQYSCAAAALKLAGLNLYQISSGQYRGDRHISQMGRSLLRRTLYLTALQHTHPGTPLYPYYAELLRRGKPKPVALIAVSCRLVRLLYALVRDGRCYSTQPPEKSPQTQAA

SEQ ID NO: 370827 - protein, 414 aa, unidentified
MKVVYPVCCGVDVHKSFFIATIITTTSDIQPNYSRKRFSTFNNDIIRFSDWLATNNCNDVCMESTGKYWIPVFNILESKNINVTIANPKWVKAVKGNKDDKKDSKWIGDLFRLGLVPGSFIPSKPIRILREFTRYRYKLVSMKSSEKNRFQNAFTVCNIGLDSVVSDMFGKSATLVTDYLLSDDTFNPEYCVSLLQRSLKKKADSVLESIEGYQITKEQKLRMNTVRSHLTYIENSIKYLDNTIDSMVAPYDSLITLMCTIPGIERNSAITVISEIGNDVSLFGSSKRLCSWAGLTPGSNESAGKKKSVRISRAGVYLKPALVEIAHCAVKSTKSPYYKNKYEKLVKRRGKKRAIIAIARMILTAIYNMLSTGEVWNPCDLFKIDMPDELKAKQEEKAVTQAIKFLKKRGYAVS

SEQ ID NO: 370828 - protein, 359 aa, unidentified
MQTQSNKIDFNGQNIYVGFDVHLKDWKVTIMTERLSHKTFTQPPKPEVLHHYLIKNFPGGTYHSAYEAGFSGYWIHNKLLALGINSIVVNPADIPTTGKETIMKDDTRDSIKIARSLRNGDLTSIHVPSLPTLEDRGLVRTRATLVKDLTRYKNRIKSFLYFHGIEFPETFIKPQTHWSNRFNKWLDEVAMSEPSGRASLNVLLAQSSHLRSSVLQTTKQIQQLAKTGRYKTRHDLLRSIPGIGLLTAMTILIEIETIDRFDTFDQLCGFIGLVPSTHSSGDHEVIGNITPRGHNVLRSAIIESAWIASRLDPALNKSYHDYCKRMEPNKAIIRIARKLTSRIRFVLKNNQPYVCSIVK

SEQ ID NO: 370829 - protein, 355 aa, unidentified
MERYIGMDVHAASCTLAVISEKGRKLKDFPVETNGQALVEAIRMIPGHKHLVMEEGLQSAWLYETLSPHVDELVVTGVTESRGPKSDKRDAYGLAEKLRVGNLDKHVFKAPRQFTRLREFSRTHMTLVGDVVRTQARIKSVYRSRGVLVTGIDVYGSRRRNEWLEQLPSSTQIRATRLYDHLDFLLEQKKQAEADLLREGKKHPIVKTLETAPGFGPIRAARLVPIVITPHRFRTKRQFWSYCGLGIVTRSSSDWVQTTDGAWVKARVPQTRGLSLQHNRFLKDIFKGAATTVITQRKKDPIQARYERLLDGGTKPTLAKLSLARRIAATVLRMWKNEEEYDPGRAGLPAQTREG

SEQ ID NO: 370830 - protein, 423 aa, unidentified
MRKHTYKSVKINDVNREKLFEMVQGIAVTVGDDVAKKTHFAALMNAERKVLVTIRWDMPNELATFVGLVSSLPASSRVVVMEPSGSYGDPLRYQLERAGIEVRRVSPKGVHDSTEVYDGVPSSHDGKSAHLIAKLHLDGRSEPWPMGSDDERDLSSLVSTMDRYAQQVQQNVNRLEGILAGVWPEATRIAELTTVSLWKLLSATGGPEGVRKDPWEARHVLRKSGQHFLTDEKIEMLVKSAQTTTGCPMTDRECEELRDLAEDTIDAHKKLLKWRSKVEKQAEDTPSSRGMSSVVGKATAAVLVSELGDPGNFPNAKAYEKAAGLNLRERSSGTHKGEKTISKRGSSSARRWLYMAVLRLIQKDGVFRAWYARKVARDGGRFKGLAIVALMRKLIRGLWHAGRGEVFDSTKLFDVRRLGLENP

SEQ ID NO: 370831 - protein, 342 aa, unidentified
MSVSYVGVDLGSSNFHQVALNHSGTPTLNREFTTSEANLIKAFADLHGEIHVHLEAGELAPWASEIIRPLVTRVVCSHPQTNAWIARDRDKCDRIDAYKLASLLRLNEFKEVHYPREPLRRDFKTLVQHYDELTQQQARWKTKLKARLRMQGIIVRGEEVFSVRGRKAVLEQVKSNAVRTALKQLYAVLDQSIASQTEAQTLMLRAAQALPEIKILRTAPGVGPIGACRYSAYIHTPQRFSSTRKLWKYCRLSVSHRSSNGKPLRRPRLDRMGCGRLKDVSRKAFEAAMRRRDNNGFKRAYYRALETTHDATHARLTVQRKIVSTLRAMWINQTPYCDELMR

SEQ ID NO: 370832 - protein, 415 aa, unidentified
MARRELYVGIDVASRKVDVCFIDKEARTVRPRASYDNDPQGWTELRVAIVSASSLCGTRPRIVCGMEATGNMHKRLEEALRKEKRRTLEVHVLHPRAVKHFARALNTSAKTDRIDAEVIAQFLLRLQPQEKAAPLEGLEELREVTRMRRKLIEERTTCKNRLHKLLRYHFPGYKKLVGKRVSTRLLVILESMPSPDLMLAHRTDQIAQIKHGAHHVIGTTFSEHLRQLATQAPVAILRESTRLLLQSTAKRVRELTTHITELDGIIEELLDEVFPHEVLTSIPGLGKVSTAAILAEVGDISRFTTKGQFVGYCGLYPIVWQSGEATRRYRMTFKGNRMLKMTLLVASAAARQYNPIVATYYERLRKQGKSTKAAGGAIARKLAVIVYALLVSHQPWSNEKAHRGLCKGQAMAEAV

SEQ ID NO: 370833 - protein, 430 aa, unidentified
MHNKNYISVGIDVGSAFSFMTILAPDETVILKPFKITHNNKDSLERAVSEIKKAEELYSLESRTFLESTGIYHFPLFCYLVDCGFNASIINPIITHSTKNGNIRKVKNDKIDSKGIAKLGLSKDIPVSQFPAKLVLELRSLTRKYYDLTDERSAHINKLKGDLHTVFPQYLDVFCDVTGKTSTMILRQYGTPDKILRGHKKTMIEKISKASRKGLAKASERYEKLCAAANAAKTFGCQIDSIYFNIFLTLDLVEKLDSALDSILNRIRQLITFNKNEKFIQQIKLLNTIPGVGFLTAVTIMCEIGDFSAFRNPKQLFAYFGLDPEVNESGKFVGTQLHMSKRGSRIACRAIFAVALASIRTKRNGEGINPYLRKYYELKSGQKPKMVAIGAVMHKICNIVFAVLRDEKAFELRSPEEHCKQYQRPALAAA

SEQ ID NO: 370834 - protein, 374 aa, unidentified
MDTSITKIALDTHKKQHTVAWVNCQTGETDVFTVLNTNKDITKMVKKLRKKTGTKLHFCYEAGVCGFALKRLLEKQGCMCDVIAPSLVPVKPGDRIKNDRRDAKKLLEHFIVCQLTTVYAPDIKQEAVREITRCRQAAKENLNRIRHQILKLLTRHGYRFTEGKNNWTLKHMVWLRALKFDSADLTKVFDYMLTELMHCEQRLDNLNKEVEALGDRPELKEIVGVLRCFRGVDTLTAIIIVTELFDLGRFSSPRALMAYLGLIPSEYSSGDKQCKGHITKAGNSRVRRILIESAWHSRHRICLGRALKIRRKDQPQWAIDIADKAMARLHKRYKNLNDRGKMHCKITVAVARELAGFIWAMCREYSVRQSLTVS

SEQ ID NO: 370835 - protein, 343 aa, unidentified
MEHFAGLDVSVKLTSLCIVDDAGGIIREAKIESDPDALLQVLKNGAYHFKRIGLEAGPLSQWLFSALAEAGLPVICVETRHMRAALKAQINKTDRNDARGMAQMMRAGLYRPVHVKTVRSQKLRMLLTHRKLLQSKAIAIENDLRATLRNFGLKVGMVGAVKFEARIKELVENIPDLAILVEPLLIVRRTLREQFGIVHRRLLAVVRQDEVCRRLMTVPGVGPVVALTYRSTVDVPARFRNSKAVGAVFGLTPSKYQSGEIDRTGAISRCGDEMMRVMLYEAAQSMLYSRKWSWLKAWAMQIARRRGIKKAIVALARRLAVVMHRIWVDGTEFRWTKQEVAAA

SEQ ID NO: 370836 - protein, 314 aa, unidentified
MSNSRIIGVDIAKDKADIYDLRLQKHKVIEAAHYPQWVKSMASQKPDLVVMEASGGYERDLASQLAAAGIPLAIVNPRQVRDYAKAINHLAKTDSIDARVIALFAEATNVEAKPLPDSATWALSDLVERRRQLTAMRAAESNRKAQAKHPRVKTDIDDTLRFLDGQITKLEADMDREIQNSPVWREAEELLSSVPGVGPVTARVLIAEMPELGQLNREQAASLAGLAPFNDDSGKHQGMRHIQGGRHNVRNALYMATLSAIRHNPYIRRIYQHLTLTCEKPKKPKVALIACMRKLLLLLNSILKNKKTFVATNC

SEQ ID NO: 370837 - protein, 421 aa, unidentified
MPNIEIGVDSMVKENFIYVGIDLHKETHTAVMIDCYNQKLGEITFPNRPADFPKLVTKVKKCNTDAKEVVYGLENAYGYGRPLAVWLIDKGYFVKDVNTAISHRQAKHRGAMYRKSDSDDAEAIALATLNMLDKLPDACPNDAYWSLGQLVHRRDNIMKQRTRLVNQLHEQLCIAYPSYKQFFNDISRPTALYFWEHYPSRKYLKGKSVEDLRTELVPVSHNRCSTKNCEKILDAVASDKVKNNAYQDARDMVTLSIVSDLQHYDSQLAEVDKMLEQMYKMLGCTLTTIPGVNVITAVKILAEIGDIKRFSNANKLAQFAGIAPLHLSSSGKGKDLATKQGNRRLQATIYFLAIQMVQISSKGTPRNPVVRAYYEKRKAEGKTSQQALICISRRLISIIYGMLKSGTEYRMPVVENAGENR

SEQ ID NO: 370838 - protein, 357 aa, unidentified
MQSSYVKYIGLDVHKEAISIAVLDGAGKLVMESVIETKASTLLQFLNGLRGELHVTLEEGTWAAWLYDVLKPHEWDIVVCNPRRNALLKEGSKSDKVDARKLAELLRSGMLRAVYHGENGLRTLRELARSFQVISKDLRRVMNRLKALYRSWGIPCTGTQVYSQRHREQWLKKIREAGVRRRAELFYQQLDGLQVLRRTVRGELLAESRKHQAVKVLRQIPFIGPLRAAQLVALMQTPHRFRSKRQLWTYSGLAVETHDSAQYRYVDGQMQRSKKPQQVRGLNQNHNHAMKEIFKSAALTATLRAGPFQDFYTGLLAKGMKPELARLTLARKIAAITLTLWKKGERFDAEYVKSQAA

SEQ ID NO: 370839 - protein, 347 aa, unidentified
MLADQLDYVVGVDPHRDSHALAVVHVASGAVVFESTVVASSDGYAQALKLVEQHAPGRRAFAVEGTGSFGAGLTRFLTVRGERVLEVSRLRRERRSGGKTDALDAVRAARSVLAQERPATPRAGGERQGLQALVAAREGAVNAKRAGLCQLRDLLITTPEPLRSELRPLTRARLLQRLSATRPDGRRDPELRGSMLALRSIARRVLQLTAEERELAREIETLTRKLAPQLLDQPGVGPHAAAQLVLSWSHRGRISSEAAFARLAGAAPIPASSGQTVRYRLDRSGDRKLNRALHMILVTRKRSHPPTIAYIERRLQEGKTRREANRCLKRYLARSLYRLLEHPPMTA

SEQ ID NO: 370840 - protein, 355 aa, unidentified
MTSTKYIGMDVHKESISIAVRNGAGKIVMECVIETKASMILQFFDGLRGNLQVTFEEGTSAAWLYDLLKPHVTKLVVCDPRKNASMREGNQNDKIDARRLAELLPLNHLHPVYHGEHGLRSLKELVRSYLTITKDLVRVMTRVKAIYRSWAIPCSGKQVYAARHRAEWLGKITEPGVRRRAEFYYQQLDALRTVRQQVRRELLAEGKKHPAWKRLCQIPAIGPIRAAVLLGILQTPHRFRSKRQLWTYSGFGIKTESSADHRSVDGQLKRVKKQSSVRGLNRNCNHDLKNLFKGAAIVAASKPGPLQEFYSALLSKGLRPEMARLTLARKIATIVLIVWKRGVCFDAQHLKPQTA

SEQ ID NO: 370841 - protein, 317 aa, unidentified
MEVTSIFVGIDVSKARLDVAIRPTGERESVANDKAGIKGLVKRLAKIQPTLIVLEATGGFERQIMHALVSAELPVVVVNPRQVRDFAKATGQLAKTDSIDADVLARFAEAVRPALRPLPDAVTLELRALIARRRQILEMIGAENNRLAMASKPVRKRIDAHIRWLEQELERADKDLDRSIQQSPIWRENEELLRSTPSIGPVTSRTLLAELPELGALDRKQISALVGLAPFNRDSGTLKGRRSIWGGRASVRKSLYMAALVATRHNSVIRDFYKRLTAKGKVFKVALVACMRKLLTILNSMIKHKTSWSETFSLQTT

SEQ ID NO: 370842 - protein, 347 aa, unidentified
MSICMIGLDTAKTVFQIHGVDEAGKAEIRRKLRRNDLIAFFEKQAACTVVMEACGAAHHWTRMLTGLGHSVKLIAPEAVKPFVKKGKKNDAVDAAAICEAASRPDVKFVPAKSVEQQGILALHAARSLLVKQQTMLANAMRGLATEFGLTVPKGIHKLDELMAVVDADEIIPKPAKQAIAGLHDYCNNLSDGVETFETEIVAHARRDETARRLATIPGIGPITASLIAATVGDINLFKTARQFAAWLGLVPRQSSTGGKTRLGRITKTGNREIRKLLVLGAMSMVYRADGCNSAVGAWLRSVLERRPVRLVTVALANKMARIAWAVMTRKEVYRPKGGVAAVAQAAA

SEQ ID NO: 370843 - protein, 338 aa, unidentified
MKITTIGLDIAKSVFHAVGVDKAGKLIKKKMLRRKDLLPFLAQIEPCLIVMEACSGANYWAREFELLGHNVKLIAPQFVVPFRQGNKNDYNDALAIAEAAQRPNMRFVKPKSVEQQDVQLLHRMRERLTKQSTALINQVRGMLAEYGIVIAKSKSAFKVQFPDILADETNALTTKGRTIFYQLYEEFSDIEKRLKGCDVQVLTETKNNVICQRLETIPGIGPVTATAFYAAAGDGKDFTNGRHFSAWCGLVPKQHSSGGKDNLLGISKRGNAYLRTLFIHGARAVLQHSCHKQDKFSCWAIQLAERRGFNRACVAVANKLARMAWVIAARNEEYRLPV

SEQ ID NO: 370844 - protein, 462 aa, unidentified
MKLYLGGDVSKGYADWVILSEKKQAVLDNFQLDDTYVGHCKLYATLEAYFGKHKGLEVYAAVESTGGYENNWFSTLKSYQKIFNLKVARVNPAGVNFNRRAGLKRNVTDAISALSIAEYLINHPDNIKYDQDDQWKSLCRHWNFVEMQKQQRIQTINQLETILYSANPTLMRFKKDNLPNWLLELIIQCPTAETLAKARPEKLAKIPYLSLSRAKTLVAEAKQSIASATDKNAEILVSQIARQIKVFDQSIKSQMQLIERDLTCPEIELLKSFKGIDTISAIGLLLEIETIERFPTVKGFSCYYGLHPKFKQSGDKIIGVRMSKQGSKNMRKILFNIAKGAITYNPLIRAVYEKKLSHGMKKMAAIGVCMHKILRIIYGMLKNKQPYNPLIDKQNCERSKDKQQEKQQQENASIEKNRRYQEFDVKAPISRKQTKKRREHDLSQCEITSQSTGSTCSSETKL

SEQ ID NO: 370845 - protein, 376 aa, unidentified
MQAAQVKGYEVNTVLYMAMELSNSKWKLGFGNGAKLRRKSIEARDRQRLLEEVALAKSKLKLPEDARVVCCFEAGRDGHWIHRWLESEGFEVLEIDSSSIETARGRKHVKTDRIDVEKLLDLLIRYHCFGLRQAFRVVRVPSVAAEAGQRLHREDEYLLRQRTRISNRIKGLLVAQGLVEVPLRGDFAAWLDQVQLWNGAGLSAELKRELQRLHTQYAVFDSQLRELAAVYAAEFMADTALSEKRRRLESLKSVGPKSSRVLSAEVFSWREFANGKQVGAFAGLTPTPSQSGDSETEQGISKAGNRRVRRVMIELAWLWLRWQPESALSQWFKRRFAHGGKRLRRIGIVALARKLLIALWRYVEQGVIPEGAVLKA

SEQ ID NO: 370846 - protein, 333 aa, unidentified
MYYSGIDLHSDNCYVTTIDESGSVVKQQRVENNNELLLDYFRSLPGSHQAVVESTTGWYWLNDLLQDNGIELVLAHAKYLKAISYAKVKTDKVDSQTLAILLRQGLIPRAHKISRELRGLRDTMRIRLRLVQQRSDTLRRLNSIHAKFNGSVPDPYRFQLAVLEHTRDTLSNQILALEKSLHPVLIPNDDIQRLLIIPGIGKLSAFTTYLEIDGIERFDSDKHFVSYCRLVPAANNSNRTVHHRSSKDGNKYLKIAFSDAAVHAIQYYPEYKRFFLKRAKRSGDAIARTVVAKELAKIVYYVLKNKTTYKGLKGQPISRHKSQQWPRLSSPLP

SEQ ID NO: 370847 - protein, 343 aa, unidentified
MNPTTIGLDIAKNVFQAHGVDQNGKVVVRKRFSRAKVLEFFANLPPCLIGMEACPGAHYWARELMKLGHAVKLMAAQYVKAYVKGNKNDGNDAAAICEAVSRPGMRFVAINTEAQQDTQMLHRIRSRLVAERTALINQVRGLLGEYGIVFAQGPSQVRRGLAVLLAEEDPRLSGMARELLADLNGQLRALDERIANYDARVKAACATDERSAKLAELPGIGPLTATALAAAVNDGKQFDNGRQMAASLGLTPREHSSGGKQRLMGITKRGDTYLRTLLIHGARTVLRHAEGKTDRLSRWALAVQARRGANVAAVALANKLARIAWAVLARDQIYRADWAEQSV

SEQ ID NO: 370848 - protein, 346 aa, unidentified
MTIVGCDFHPSWQQVAVFNSSTGELVECRLVNGNGEAERFYRSLPVPSLIGLESCGNSQWFVELVERLGHTVWIGDAAQIRASYVRKQKTDKRDAAHILKLLIEGRFPQLWVPNARVRDLRQLLIHRHKLVEIRTRVKNGLQHLAMNRGMQRKSRLWTEAGQKAFRALPLEGWAACRREDLQRLRAVLDSQIGELDQAVEKSAYADESARLLMTQPGVGPITSLAFVLTLGDVARFKRGKQVASYLGLIPTEHSSGGKQRLGAISKQGNGFARLLLVEAAQTITRLDEGFRKQYQHRCHSKPKGVAKVAAARRLAVRLYWMLRSKTPYPEIVRIESSSRCPMDGES

SEQ ID NO: 370849 - protein, 414 aa, unidentified
MLKIVYRVCCGMDIHKSFVVACIASTNEYGVTTYKRKRFSTFTGDLRRCAVWLAENNCKDVCMESTGKYWIPIYNILERTCNIVLAHPKYVKAIRGKKTDKRDAKWIADIFKHDLVAGSFIPPADIRQLRDLVRYRWKLTNFATGEKNRAQNCLTVSNFKLDDVFSDVFGKAASAITARILKNPSEKITDVSGFRTKRMKATDEEILAAVDGVMCAEQAEKLRIIRSHMDSLELCKLNLESLILSVAEKYLPQLNLVMTAPGIQSFAAIGIISEIGVDMSVFPTSKHLCSWAGLTPQNNESAGKKKTTRISRAGAYIKPLLVQCALCAVRAKQFPEVRNRYLALKKRRGHKKAIIAIARMLLTAIYNMLKKNEPYNPELYRKGDRPPAHREVSVEEAIFILQRQGYLVTAPPAS

SEQ ID NO: 370850 - protein, 319 aa, unidentified
MSNSMIAVGIDVAKETFDVAFGVQGIVEQFANSTEGHDGLIAKLAGTPVELIVLEATGGYEFAVASALQAAGFPVAIINPRQARDFAKAMGYLAKTDRIDSRVLAQMAEVLARHPDRDKIVKPLPSAELQEIQAIVARRRQIVSMLLAERNRLAMAHSVARKSIEAIIKALKKELGNTETAIAAHITKHHADLAALLGSVKGVGDATISTPIAEVPELGKLGRREISALVGVAPINRDSGTMRGKRAIFGGRATVRRALYMATLVAVRFNPVLRVFYERLVKAGKPKKVALVAGMRKLLTILNAMVKHNKSWDDSLHFA

SEQ ID NO: 370851 - protein, 337 aa, unidentified
MNNSVIGLDIAKNIFHMYTFVENKPKKKKLKRAELLAFFANYPVSLIGIEACGGAHHWARELIKLGHEVILLNTRYVKSFVVGNKNDFNDAAGIFDAVTRPNKRTVMIKTIEQQDIQLVHKVRQGLVGKRTALVNQIRGLLSERGIIISQGINQVREQLPLILEDAENDLTVMAREVFAEQYEKFAALDKEVKAQDRRISALCNSNALSRRFLDVPGVGPMTASIVASDIGNGKGYLSSRDYAASLGVVPRQHSSGGKQVYLGISKRGNRYIRTLLIHGARAVLKNCHKKKDKLSLWLQALIERRGFNKAAVALANKNARILWAMATRDKEYDACLV

SEQ ID NO: 370852 - protein, 474 aa, unidentified
MARTRNRPASPPVPGDAGAEVTDEPVRVISRAAAIDVAKGPGMVCMRLPHESRAGRRTQKVREVTATFAAVVALVDHLVCQGAERLVLESASGYWRIWCYLAEAAGLEVWLVNARDVKRLPGRSKSDRLDCVWLCKLNERGMLRRSFVPPEPVRDLRALTRLRANLTHDRVRHQNRIEKILEDALLKVSSVISDLMGGSGRRFLQALADGERSPAALAALGDYRLHASKAELAEALTGRFRDIHGFEIGMLLELIDDLSAKITELDERIEAQLENVPGLGGVCTSCGQPGPDGPCTGCGEPVLGVIARLDEITGIGRGAAQVIVAEPGTGMTQFPTPGHAASWAKLTPRAIQSGATSKAGRTGKGNPYLRGATGVAVMTAARTETFLGARYRRHARRRGKQKAIVAGCRTIIEIAWRVIADPGFRYIELGPDYHDQLDPRRKTRDKIRQLEKLNPGMTVTLTPRPEPGGQAPAA

SEQ ID NO: 370853 - protein, 324 aa, unidentified
MQGKVQSQARSAQSQVYVGVDVCKAHLDIYLHPLGQHLRVTNDRHGIQRLKHKLARLDIVLVVIEATGKYHRLAHRSLSQTGFAVAVVNPLRSRLFAEALGTLAKTDRVDARMLAILGEALGPQAKPPAPEALEALQELVRARSAATAERTALANRLKASQTAFLKAELRRRLKSLDGHIQRLAKEIVQRIAADPALARRYEILLSIPGVGPVVAAELIADLAELGCLDRHACASLAGVAPFADDSGNSAGQRHIKGGRSHVRRALYWAALSAAKHNPDLRAFYKRLIENGKKPKVALTAVMRKIVILANTLLKEDRLWTHNHA

SEQ ID NO: 370854 - protein, 321 aa, unidentified
MSSYYKKEVQIMINNEYSIHCGIDVSKKNLDAFVGNKVKRYDNTIKGVKQLTKDVGNVHYIFESTGGYERLAAWYLLDNSYIVSVVNPKRVRDHARSKGLLAKTDCIDAKVITSYADQNELRLTQKPSEEQLKLTAWVSRRHQLSEIIKQENNRLELTFDKCCIKSIKKIVRTLEKEQERVEADILTIIKGSYEFSEKAKVIQSICGLGYTCAITLLAYFPEIGTVSRKEAAALAGLAPYNKDSGNFKGIRKISGGRSKLRAALYMGAMSAITYNPILKEVYNRLVNENHRPGKVALVAVMRKLVIAANSAVKNSDYMLAN

SEQ ID NO: 370855 - protein, 407 aa, unidentified
MRLFVGDDWAEDHHDVEVMDASGRRLAKARLPEGVAGMARLHAIVGQAAGEEADEAEVLVGIETDRGPWVAALVAAGYTVLAVNPLQSARFRDRLGVSGAKSDAADAHVLADMVRTHAHELRPVAGDTPRAEAVKVVARTHKTLIWERTRHTQRLRHALRDYFPAALEAFQDLDAADTLELLAKAPTPAQAARLTIGQISAALKRARRKDVAVKAAAMQAALRAEHLGQPEVIAAAYAASVQALIAVLNVLNIQVKTLQGQVEEHFGRHPAAEIICSQPGLGPVLGARVLAEFGDDPTRYASAKARKNYAGTSPITRASGKKKVALARFVHNDRLIDALLTQAFTALTRSPGARAYYDRQRARGCGHNPALRQLANRLVGILHGCLKTGTPYDEATAWPHHDESLTA

SEQ ID NO: 370856 - protein, 341 aa, unidentified
MKHKTITIDLAKNVFQVCGVNEHIKPQFNKKLKRSELLDFMRQQSPTTVVMEACYSSHYWGREIAKLGHDTKLIPAQHVTPFVRGNKNDHNDAFAIAEASQRANIRFVPVKSEHQQEIFCLHRIRERLIKNKTALSNQSRGLLSEFGVVFPCGHKALLGGLNSVIDNPQYSHRLQNLVIDMLIEYQTTLNRLKGIEQQLRIFVEDSESGRILLGIPGIGIINASALLASIDKGQAFNSPKEFAVWLGLTPKQHASGNISKMGGITKRGDRYLRKQLVHGARSVVSRAAKNTDPLSLWATKLRVTKPFNKVAVAMAHRLARLIWILLTRQEHYSATPTGVSA

SEQ ID NO: 370857 - protein, 593 aa, unidentified
MGAAVSITRLELTAAQLRAAAGREKDGSAARRMLAIAMVLDGADRGTAAETCGMDRQTLRDWVHRYNAEGIRGLHDLKTPGPKPKLTADQQAKLAELVEAGPDPARHGVVRWRRVDLRDELQRCFGVELHERSVGKVLAKLGYRRLSVRPRHPQTDEAAQEAFKKTSPQWSRHGCPTTPKTSPSKSGSRCYGDGLSRYFGSPNQSDGAATMQPIDTVNPTILLAIELSAATWLVAARVPGAEKPHLHRIDGGDTAALLALISSLRARVARRLDAPQIGVVCCFEAGRDGFWLHRLLTAHGVASHVLEPTSILVNRRARRAKTDRLDAEGMLRVLAAYLRGDHQACSMVRVPTPDEEDAKRTHREREKLVQERLRIENRIEALLFTQGIRKRPSLRSWERDLAVLRTGDGREIPRHLRAELDRLRRRLVMALELIREVEAERDQAAETKPQDQACRKIAALCRIRGIGENFAAVLTREVFYRSFDNRRQIASYVGITPMPYQSGGMDRDRRISRAGNPRARTTMIQLAWLWLRYQPGSELAEWFRERVGTLAGRTRRIAIVGMARKLLIALWRYAETGVVPAGAEIRAETTVAA

SEQ ID NO: 370858 - protein, 386 aa, unidentified
MKDETFVPREYDVFAGLDVDKKSIAATFSSPQGFIRSLHMPYSVDYLLNHVRKHFGDQKVAFVYEAGPTGYGLYDGLVAQGYRCLVAAPSMIPRAPGQRVKTNRLDSRGLSESLRGGQLKSIHVPSPIYRELRHLTQLRDTVVREAAAHKQRIKALLLLEGIGFPPATAGRQWTLRVKAQLRKLRCSRIVRFKLDQLLDSLEFCEKQVVSSTKEIRRFCKEDVELFQSIEYLMSIPGIGWIVASQLLARMGDWREIDNVRQLGSFLGLVPTENSTGDSVDRGSITRAGDGRLRSKMIQAAWSAIRQDGELREFYRSVCQRNPRGKGARIAIVAVARKLSTRIYAVLKKQRPYIVRKQVHSAPLTQEETSPQGTTRRCAEPGETDNS

SEQ ID NO: 370859 - protein, 334 aa, unidentified
MSPGNAPRPAAVYGVDIGKNIFHVVGLDSGGEPIQRARFRRNTLLQFFERAAPAVVGMESCAGSQWIARRLHALGHKVRLISAQFVKPYVKSNKSDIIDAEAIAEAATRPTMRFAAIKSEEQADLQALHRVRDQMIGTRTRLINQMRAFCLEYGTALRQGAGLFKLDLPLVLDDASNDLSPAMRKLLMDLFADLRQLEQRIDDVTREIAGIADREDVARRLMTIPGIGALGATALLAAVDNGRQFQKARDLAAWLGLVPREHSTGGKQKLLGISKRGNRSSASSWFMEHDRASVIWIERGIALEAGLMVFRAGCTRTRPLSHLPPRWRVLSGLC

SEQ ID NO: 370860 - protein, 409 aa, unidentified
MLHDDFQFFAGIDWGSERHRVCLMNNQGSVCDERWIDHSGSSLAQLVDWFRQQTRDSPSLLAAAIEVPHGAIVETLLEHGFAVFSINPKQLDRFRDRYSPAGAKDDRRDAFVLADSLRTDPHCFRAVRLDDPLMIRLRELSRLEDELTSEQNRVLNRFREQLHRYFPQLLQLCEAGDETWLWTLFELAPSPDRAAKLSQAKIARILVQHRIRRNAAEQVRAVLKTKPLTLAPGAAEAATEHALLLLPRLRLLYRQRTDLARRIEAILEELSAPAEDKSKHRDAAILLSLPGLGRKVAATMLSEASHAIASRDYHALRCYGGAAPITQQSGKKKIVVMRRGINQRLRNALYHWSRTSVVWDPPSKKTYAQLRARGHSHGRALRGMSDRWLKVLMAMLRNQTLYDPQRKAA

SEQ ID NO: 370861 - protein, 344 aa, unidentified
MTTIDYIGFDIHKKTISFCAKAQDGRILDEGTIAAQRGDLKAWAKERPRPWVGAMEATLFTGWIYDYLKPLAQELKVAHPPMLKAIAASKKKNDQVDARKIADLLRCDLLPECYMAPSPVRAMRRVLRYRNLVVRQATRMKNRIAGLLMETGTPYAKQRLHGKAYFGELLGSLRQMPDAVVELLKLSRGQLELFESIQRRLLRELRERPELSQRVERLQSIPSVGEILSLTWALEIGEVSRFSSIGEACSYCGLTSAERNSAGVEQRGPISKQRNKHLQTILIEAAKLAPRFNPQLATVHQRELQRGNRNRATLAVARKLVAYLMAVDKSGKPFQLRASEGGQA

SEQ ID NO: 370862 - protein, 344 aa, unidentified
MDVTTVGIDLAKQVFQVHGVNSRGKVLIRKQLKRAEVTKFFATLSPCLIGIEACASAHHWARRIQAFGHTVKLMAPQFVKPYVKSNKNDAADAEAICEAVSRPSMRFVPIKNIEQQSVLSLHRVRQGFIKARTAQANQIRGLLGEFGLIVPQGIASITRRVPALLEKATDDLPAAFRQLIGRLLEHLRLLIAQVSDLDEQVKAWHRSTEASRRLEKIPGIGPITASALVATVGDAKNFDSGRQLAAWLGLVPRQHSSGGKPTLLGMSKRGDPYLRTMLIHGARSVIYRVTQRANPQNWVFKVTERRNKNVAAVALANKNARIVWALLAHNREFHSGYSTSVVAA

SEQ ID NO: 370863 - protein, 357 aa, unidentified
MTSMTSMRIVVTGGVDTHGQTHHAAVIDQVGRQLGDREFPTTPTGYQALLSWLQGHGTLERVGMEGTGAYGAGLARHLHAEQVDVVEVDRPDRKARRAHGKSDPLDAYAAARAALSGSATGTPKTRNGVVESIRALRVARSSAVKARTQATNQLKALLLSGPAELREQLRHLSTTTLIATCARLRPTTELTDPEQATKTALRRLARRHQQLNEEIAEADGELRTLVAQAAPRLLALPGVGVEVAGQLLTSAGDNPDRLHSESAFAQMCGVAPVPASSGKVHRHRLNRGGDRDANKALYIVVLGRLRTCQRTRSYVERRTKEGLSKPEIIRCLKRYVAREVYLALRPLRASKDLASAA

SEQ ID NO: 370864 - protein, 421 aa, unidentified
MISFPKRERAQQAAAVVGVDAGKFSHTLVVRAKGQPDSKPFSFPTTRAGFEAALAFLRQQVPGTELTAILVGIEFAGNYGFTFAHFLGQLHFPVVSVLPAHTKRWKDVAHNQPLKTDAKDAGTITDLLAQGHFVTFPFLAPAYADLRYLVAARERLSLLRRGAITQLRALLQVVFPEFEAIFPLVTKKTPLALLRAFPTPEDLLGASRAKVLRVLHTASRGHLGAETYDCLVCAARATLGLPGAQGRLRQEIGLTLARLALFEQQITALESAMVEALEAVPETPYLLSIPKVAPVTAAVFLGSIGDPRAYECGAQILRVAGLSLVERSSGIHQGTRRISKRGRPLLRQAAYMFAVRSITRGGLFRGEYEALCQRNGGQKLKAVVAVMRSGLRLLYSVARDQRMFTAEPPAPRRRPMAVASA

SEQ ID NO: 370865 - protein, 405 aa, unidentified
MQILYERCCGIDVHKKMLAVCFKAGKKQQLREFGTHTQALQELADWLLQENCQQVAMESTGSYWKPIYNVLELLGLEIMVVNAQHMKAVPGRKTDMKDAEWIADLLQHGLLKSSYIPDRHQRELREVTRYRKSLVEERAREINRLEKTLEGCNIKLSSVVSHLTGLSSRNLIGVALDGDVTPERIEEVSYGKVKEKKEELLKALAGAVSPVQKKLIQAILSHIDDMTQRINEVDDIITSEMQKYEQAIKALDEIPGIGRQSAETILAEIGLDMSRFPSAAHLASWVGVCPGNYQSAGKRKKGKTNKGNPTLKTTLVQCAKTAVKKKDSFFRAQYERLSVRRGANRATMAVAHSILIAIYHMLKNGQPFVDLGVDYYHQFNPERKINRYLKKLSELGWLPPAPAVS

SEQ ID NO: 370866 - protein, 452 aa, unidentified
MSRKRKRNQKKSGVPVLSCLNLNAAGVDIGATEIYIAVPGDRDPQPVRCFPTFTEDLLAAADWLQACHIETLAMESTGVYWIPFFQILEARGFKVFLVNAHHVKNVPGRKSDVSDCQWLQYLHAVGLLRGSFRPEQAVCTVRSILRHRDSLVQMASSHVQHMQKALDQMNLQLHHVISDITGMSGVAILEAILAGERNPHTLAALRDRRIKASADTIAKSLVGDYRREHLFTLRQSLAAFRHYQELIAACDREIAQSLEEFESKLDPPPGSPSPSQDGSKAKASEPGFDLQTHLHRIFGVDLTQVPGIHVLTTQTLLAEIGPDLSSFDDGAAFASWLGLCPDNRVSGGKVLSVKTRKVKNRAATALRMAAQSLHHSQSFLGHFYRRMRAKLGAPKAITATAHKLARIIYHMVTTRHAYDETICAQNEVQNRQRMEARLRKQARELGLQVVAI

SEQ ID NO: 370867 - protein, 330 aa, unidentified
MDNHYFFVGIDVSKDELVIAVGDNQVISFKNTACGVSRLVDRINSVCGDLEPWFVMESSGAYSTRPATQLVGNHDVQVSIVNPGRVKAHGKASGIRSKTDAEDAKLIHSYAIKHQDKLHPWQPTPDSFRKLKDLVDQAEFFHNQINRIRNRMHAQDFMECDRTIAKANNSVIRQIERQISKLEIQMDKLVAGDEMLDTQIQLMRTIPGIAQNSARKILAMTRGMITERTPAALTAFAGLAPAQRQSGSSLNGHSYIDKQGCASLRKILYMCSLSGAEFNPALKPFYQRLITRKNNQLTKKQARVAVMRKLLLIIRAILVSGKPFNPDLHC

SEQ ID NO: 370868 - protein, 363 aa, unidentified
MNYVGVDVHKKYSVLCALDERGRKLREARVEGNTGCGFAQVFRSLEGPSKAVVEACWNWGLIHDELEELDQVEEVVLAHPAKTRLIADAQIKTDRLDAHALGTLLRGNLVARAHVPRRQTRSRKNLLRQRLYWARLRTMLRNRIHALLDRQRGLELPQCSDIFGQRGLFFLRQLQLPEPDGMLLREQLALHDLIAQQMKAQEKRIAAEFKSEVIHRQLLNMPGIGTTLAAVIGCEIDQIERFPTSEKLCAYAGVVPPTHASGGKVAHGRLLPFCNKWLRWALLEASWVAIGCSPYFGALYRQHRARGKKANTAITIVARRMCRIIWQLLSENRDFEKRPFSHRIGPFPGCSAVRLTARSAHGS

SEQ ID NO: 370869 - protein, 340 aa, unidentified
MEHLAIDLGGRESQICIRSSDGSVVKEERRSTRSLRAFLRRQPPSRVVLETCAEAFKVADAALEAGHQVRVVPATLVRALGVGARRTKTDRRDAQVLSEVSCRIDLPSVHIPSGPARRRKAMCAMREALVRSRTLLINTVRGWLRTEGMHLGTGGVGTFTMRVRRQQASLQGTALPAFVERQLRMIDGLSKEIDQADQELEEAATQDPICRRLMGVPGVGPVTAVRFVSAVDQVERFPSAHQLESYLGLVPGEDSSSERQRRTGITKAGSATVRWALVQAAWAARRCKRRGPLQCWADEVEKRRGKRIAVVALARKLAGVMYAMWRDGTSYDETRGAVGA

SEQ ID NO: 370870 - protein, 372 aa, unidentified
MDYRIGCDAHKHYSQFAVLDQDGRLLVQHRLDHQPGAVRAFLEDFPDQTPVALESVGNWYWIADEIEAAGCIPLLTHPAKAKLMMGNVNKTDKLDAKGLAKLLHLDSLPTVWLPPGEIRDERELHRTRMALSKLRTALKNRIHATLAKYGITSTEHSDIFAGAGRIWLEAALSRLPPETGRCVAQELEALDGLQHQISQFEKRIQERIAATPSIQLLKSLPGVGDILAIVIDREIGSIDRFDTAGQLTSYAGVVPTVHASGGKTRFGHMRKPSNQYLKWAFRAAPLSAAKGLRSRQRRRPPPAPPRLEDKVRLPGLQQGLPAQGPCRCRRRCGSSSSRGCFLDSQETRNLPAACRPAGLSQAGARACLTCIH

SEQ ID NO: 370871 - protein, 381 aa, unidentified
MAATREDEYSALAPVLYLAFELGNDFWKLGFTVGMGQQPRERNIAARDLDGLQREIRLAKKRFGLPETAPVLSCYEAGRDGFWLHRYLVEHGVQNLVVDSSSIEVNRRQRRAKTDRMDVGKLLGQLIRYRSGERKVWSVVRVPSAKDEDDRQLHRELSTLKKERTRQINRIKGLLASQGVRLPVKADFAQRLESVRAWDGSPLLPRLQARLVREYERLEFVGKQIKQLERQRVQEIRQSADPKVEQVRALMRLNGIGVNSSWQFIMEFFGWREFRSGKEVGGLSGLAPTPYQSGSSYREQGMSKAGNRHVRAMAVEIAWGWLGYQPESELTKWYEKRFGQGSKRIRKIGIVALARRLLVELWRYLETGAIPEGAVLKTRLI

SEQ ID NO: 370872 - protein, 343 aa, unidentified
MPHYVGLDVSQKTTAICVVDAQGKRLWRGVCATDPGPISARISQHAGVDAKVGIETGSMTPWLVHGLRAAGLDVACLDARRVKAALQMQLNKTDENDAEGLAQIMRTGWYRAVHVKSLDAHRARALLGARAQLVGMTTRLSNMIRGVLKTFGLLPGAGRGLRFDRKVEALLEGAPEIALVVRPLLATWRQLREQIAVFDKAVLQQVRADPICRLLMTVPGIGALSSLMYVSTVENPSRFSRSRAVGAHLGLTPRRYQSGETDRSGHISRCGDGLARTLMYEAAVVILHRVKRPLHLKDWAAAIERRSGSGKARVALARKLSVILHSVWRSGEPFRWATPAMAA

SEQ ID NO: 370873 - protein, 345 aa, unidentified
MLHAGIDVHKRCTQICIENEDGTLEERRILTERQRLLEEFGRRPKTRILVEAATESEWVARCLESLGHEVIVGDPNFAPMYAQRSRRVKTDRRDARALYEACKLGAYKVAHRCSDEQRSVRARMAVREVLVRTRMRGISLIRSLLRQEGIKPERGSTSTFAKRMRELGLHQPLSNDIAPLLDCLDAVSVQIRRADKEIAALAAEEVPQRLMSVPGVGPVTAVAFVSAIDKPSRFRTAKQVRAYLGLVPREHSSGERSSRGRITKQGATRMRYLLVQCAWSVLRSRPTPKAEHLLRWTTTLSARRGKYVAVVALARRLAGILFALWRDGTSFVAPPQLGRGEAAAM

SEQ ID NO: 370874 - protein, 408 aa, unidentified
MEVIVERAAALDVHKAQVTACVRVPAGRKRVQEVVQFQTTVRGLLTLRDWLRAYRVRQVAMEATGVYWKPVWAVLEDDFELLLVNARHVKQVPGRKTDISDAAWLCQLLEAGLLKASFVPPKPIRQLRQLTRYRKALIKERQREANRLHKALEDTGIKLDCVATDILGVSGRAMLDALCQGTTDPEVLADLARGKLRKKLPALKEALEGRFDSLHALLVGSILAHLDFLDEQIERLSEAIEEQLRPFRPAVELLRSLDGIETRTAQNILAEIGVDMSVFPSAAHLASWAGQCPGNDQSAGKRRSGHTRKGSKWLNDALKDAAMAAIRTNDSYLQAQYQRLRPRVGHGRALGAVKHSIICTCWHMLTTGELYRDLGGDYFRRRDPERQTRRLVAQLEALGHTVTLKEAA

SEQ ID NO: 370875 - protein, 343 aa, unidentified
MDHFAGLDVSVKETSVCIVDDSGRIVREVRVASEPEALLPVLTNPAYHFKRIGLEAGPLSQWLYSALAEAGLPAICVETRHMRAVLKAQINKTDRNDARGIAQMMRVGLYRPVHVKTLRSQKLRMLLTHRKLLQSKAIAVDNDLRASLRNFGLKVGVVGTVKFEARIKELVENLPDLAMLVEPLLIVRRVLREQIGILHRRLLAVVRDDDVCRRLMTVPGVGPVVALTFRVTVDVPARFRNSKAVGAVFGLTPSRHQSGESDRPGAISRCGDEMMRMMLYEAAQVMLVRSAKWSWLKAWAMQIARRRGMKKAIVALARRLAVIMHRIWVDGTEFRWTRDVAAA

SEQ ID NO: 370876 - protein, 348 aa, unidentified
MATVTLIGLDIGKNNFHLIGHDQHGHPILKKQFNRTLLLDFLANHSACRIVMEACCGAHWLARKLQSFGHTVQLIAPQYIRPFVSGNKNDFIDAQAICEAAVRPTMRYVAAKSAEQQALSALHRLREARIAERIQSSNQIHALLLEFGIALPVGARGISQLPTLLMDEHNGLPIKVRKILQRQLDHYRLLKTEIEALDCEISAEAKQDDVAQRLMTIPGIGPITASQLSADAGNAKGYGNARDFAASLGLVPRQYSTGGKSKLLGISKRGDKSLRRLLVQCARVIMQNAQRWKSAIAEWTVALMQRRHSNIVACALANKLARVVWALLANGGEYRPQPRALIEMQTTG

SEQ ID NO: 370877 - protein, 399 aa, unidentified
MTSMRANGDRIKRFRELKATLRTQRDRLLVGIDVAKAADVAQIRLAHTRILEQAVTIPNTTAGFTAFWQRVHRHQRASGVTEIVVALEPTGTYHQALAQFLDAQGADVVLVDNHVAALHRRLLDRTWDKNDPKDAHNLCDLLEQGRVLFCAFPDEPGATLRRLVRLLRRARVDLGACKARWQNTLRPALGPAAEPLSPTVLTALPAPLRAFLPTAERRGAPGRPRALSPGLAAELTDLAARVTAVRGRIATLDAALVAATAPLPATAWLRSIPGLGPTLTAIVLAELGDITWFTQFSQLRKLAGLDIIRVQSGQWAGTARISRCGRPLLRWALYQAALGACRTPAWRAKRATLLAKRQGDPHAFFKTIVELAAKLLRVIWGVWRSGRPYTGGRAGAPAA

SEQ ID NO: 370878 - protein, 338 aa, unidentified
MDRQYVGIDFHRRRSVIVRLDSNGERLGVHRIVNDPFELSRVIALCGEAPQVVIEATYGWYWAVDLLQDLGATVHLANPNALNWGDRRVKNDEIDAHDLGDMLRLGRMPRAWIAPPAIRELRERVRYRAKLVKLRTGLKAQVHAVMAKEGVLPRVSDMFGPAGTRQLDALELGAPFAHRVASLRELIGVYDREIATLERDIHAHLKAHRGYQAVQAINGIGKVSAAVLVAEIGDITRFATPAHLCSWCGLTPKHRESDTKTRRGRISKQGSALIRATLIEGISRYHGGSALDAQYQRIAKRRGRNKARVALARKVLTLVYYGLRDGEIRCLAPVEAAA

SEQ ID NO: 370879 - protein, 379 aa, unidentified
MTCKERGRVAKLTRAMQYVNNTELSSAEETRCQFNGSKADIKLGIDVHQHFYTVVMQVGGCNPKPAQRFAKEAFLHWAAKLKQSCGGQVHAVYEACGFGFGLQRELSALGIECEVVCPQKLDEQNRRVKTDGLDAKALCLKLDRFVQGNRSAVALVRVPSEEEEQLRAIHRQREQLVKTRKQLEAQGRSLMVNHGIEPVQQWWKRRAFAALNVPKWMKELLKNSQPILLALEEKIHALTVQLQAAAQDRQPRGFGALTSVVIDREIANWHRFSNRRQVGSYTGLCPGEYSSGNTRLQSCVTKHGNPRLRAALVEAAWRLVRFQPNYKPIVKWNATLRKGALATGAARKKAIVAVARQLAVDLWRIRTGRVSAQELGLIN

SEQ ID NO: 370880 - protein, 400 aa, unidentified
MLSIGIDVSKGKSTVCGMKPGGEIVYTPFEVQHTREGMSELVSLLRSSGEEVRAVLESTGSYHCPVVATLLENGIFVSVVNSLRMKRFCSQSIRKVKTDRIDAMQIALYGLAYWQELQPTKLPEDTYRELQLLARQYYQMTSLLIKAKVDFNALCDQVLPGMQELMSDHAGRHKLSDFVLRYHHTTHILEMGETRFRKDYCKWAEKKGYRNCERMAVLIFATAQNGIPVLPNAPSTQIVITEAIRVLHTVEASRDAILTQMQALAKTLPEYSLVREMPCIGDTLAPRLIAEIGDVRRFHSKRALIAYAGIDAPPYQSGKFCANNRHISKRGNRYLRKTGYEVMQSYVMHKPANDPIFTFIEKKRSEGKSGKLAMVAGLNKFLRVYYGKVTELYRSLPAIE

SEQ ID NO: 370881 - protein, 345 aa, unidentified
MPIVGGLDIHRKQITFDYLDTGTGQVRRGQISPADREHLRAWLARFAGREDVAFAAEGCTGWRYVAEELAAAGIAAHLAEPADTAFARGRKRHAKTGKTDCRHLRMLLAEGRLPECWIPPGHILECRALLETYHDLRAEHTAWVQRIHAVLFHQGAPALGEGTLRTGPGLAALRDVSAACLSPAGQLQIATALDMTDALDTRLHELRHQLLHEARHLAGAKVLAARLYGVGPFAALAMTCWLAGEGRFSSSRQAVRFAGLDVTVWSSDRKGPPGRLSRQGPPVLRWALYEAGKAHARASAPDHRYYAQVKDRCNGKRAALSGARKLLRQACHILAELGDDALAAV

SEQ ID NO: 370882 - protein, 332 aa, unidentified
MDNFYFIGVDVSKKKLDFCVLFEGKVLREEQVSNHQQAVARLIGELKNDLEMDNEQFLICAEHTGQYTFPLVCACKSVECKLWLENPSQIKYSSGMQRGKNDKVDAKRIAIYASRFGDKVKYYDRPTEEIERLKQLERERALYVTDLAKYKGQMYDQKDFMPAALYRKKTKRMKGLIQELQAAIDAITAEMEKIIGSTEVLARQMELLMSIDGVGKVVALNVIIETEAFSRFDNPRKFCCPAGVAPFSSTSGSSQHSKNKVSHRANKNIKKRLHRAAVSVTHRKEGELKAYYMRKVEEGKNKMSVINALRAKIVARMFAVIKRNEFYTPIYS

SEQ ID NO: 370883 - protein, 391 aa, unidentified
MTKPKTKTVNDFSRCLDPLDMDATLIAVIEMSQSSWLVAGIVPGVEREPLKKLAIDEHALLSLLNRWRAEAEKQGHRITRIAVAFEAGHDGFWLARWLAAQGVEAHVIHASSVAVTREHRRAKTDRLDTELLKRAFLGWLRGERGHCKMVAVPTLAQEDAKRPSRERETLVGEASRIITRVKAAFVRLGIRGFNPKLKAAATRLETLRTPEDEPIPPNTLAALKRDLERHQIVKKQIREIEQTRLDVLKQAPEKGPHAMVLLLARVIGVGVETADMLVQEVLSRTMRDRRAVGRYAGLTGSPDESGAKRRDKGLARSGNARVRHGMIQLAWRFLLFQKDSALAQWYRQRTADAPSTRKTLIVALARKLLIALWRLARDGVVPEGVRMRPAA

SEQ ID NO: 370884 - protein, 415 aa, unidentified
MAQNRLPSPLDPSPFSYVVGIDIGSQKYSACVLKPDKRQVHKPRLFANTAAGFHRLQDQLASLDVPAAQVLIGMEATSRYGDALFHFLQEQGYQLCLLHPGQTHQFAQRRGLRAKTDQLDAITIGHVLLSGEARVGYVPDELISSYRELVRLHTQLTDDIARYKNEIHALLQVQFPEFTQVFADPCRPTALAVLQRYPSAACLSTVSVEELTTLLRGLAPRHYGRKTAQSLIALARASVSPGVAQRARSKSMQILAAQLAHTRENLAQVAAELAQVQEKDSGWQRLSGVPEFGDKTVAVLRAELGDVARFQRIDQAVASAGLDLQIRTSGKWQGQAKLSKRGSGLLRRMLYLAAARSTHMRDSAFGAYYHRLVARGLRKSAALIAVMRKMLIVAVHLLKTEQEYDPSKVASACGG

SEQ ID NO: 370885 - protein, 430 aa, unidentified
MSERPVNALSLKYYFGDEAMLKIVYPICCGIDVHKTFVVACIAATNEKGVTTYQSKRFSTYTRNLRELSDWLTANNCKDVCMESTGKYWHPVWNVLELTCRPVLAHPKYLKAIRGKKTDKKDAKWIADVFKHDLVSGSFIPPAIIRQLRDLLRYRSKLTNYTTGEKNRAQNCLTTSNIQLDHAFSDVFGKSATAILNHILEHPGENFDVKPFVDRRCKTPIEEIQLAIDGDISHEQAEKLRIIRSHMDSLKLCKANLESAILTLAEPLLPQINLVSSVPGIKDFSAIAVIAEIGVDMSVFPTAKHLCSWAGLAPQCNESGGKKKSSRVRKAGAYIKPLLIQCSNAVVTSNKHPEIRNRYLSIKKRRGHKKAIIAIARMLLTAIFHILEKNEPYNPELYRQSDASPFDPVEQAVKMLEKRGFVVALSTDVA

SEQ ID NO: 370886 - protein, 337 aa, unidentified
MNYSGIDLHSNNSVVSVIDETDRVLAEKRLPNDLARILEFLAPWRAGLAGIVVESTFNWYWLVDGLQAAGCVVHLANTTAIKKYDGLKHSGDETDARYLAHLLRLGILPTGTILPAEHRQLRDLARKRMQLVRTCTSHILAVENITARQYGTRITSNQVKRLDEHAVDQMGLPENVALAVRANVAVIMTLREQIAILERRLQKEVAPRPDYLLLTTVPGIGQTLATVIMLETGTIDRFASAGNFASYARCVDSQRMSNGKKKGEGNTRNGNPYLCWAFIEAANFAMHFSTEARRFYERKKARTNSVLARKALAHKLARACFHMLKEQKPFDVTRCFA

SEQ ID NO: 370887 - protein, 355 aa, unidentified
MNSVKDIGLDVHLTTISVAVLDAEGKLVMHSVVATHAAAILDFIHGLRGALHLTFEEGTHSAWLYDLLVRQVARVVVSNPRKNALLKAGNKSDTIDARKLAELLRAGLLAPVYHGETSTITVKQLGASYTALTEDTTRVMSRLKALYRGQAIASTGKRPYGRRHREAWLAQLRGAGLHRRAERLYQELDALQALRREARRELILECRKHGAAKLLRTIPFLGPIRAALLIGRVQTPHRFRTKRQFWAYCGLALETRSSADYRFVNGQLERAKKPVWIRGLNRNHNHDLKNVFKSAATTASAREGPFRAFYQGLLAKGMLPAMARLTLARKIAVITLSVWKKGEAFDAEQLKPQAA

SEQ ID NO: 370888 - protein, 385 aa, unidentified
MGIETFIPRDYDVFAGLDVDKKSISVTFTDHQGLLKSMRMPYSVDHLVNHVRKHYGDKKVAFAYEAGPTGYGLYDGLVAQQYPCLIASPSMIPKAPGQRVKTNRLDSRGIAENLRGGQLKSIHIPTTLYRELRHLTQLRDALVSEMVAMKQRIKSLLLMEGLEFPPAPPGSQWSFLVKAKLRKLPCSSVVRFKLDQLLDNLEFGEKQILKTTREIRRFCHNDPELSQCIDYLKSLPGIGWIVASQMMARIGDWRQIKNIRELAAFLGLVPTESSTGERTTRGSITHSGDPRLRSKLIQASWSAIRQDGELLKFFRTVAKKHPRHLGPRVAIVAVAHKLCVRAAVVLMKQRPYEMREKVQSAPLTQEETVPQGTTRRRRVPGEKIS

SEQ ID NO: 370889 - protein, 408 aa, unidentified
MNTTLYVGIDVSSKSNVVYLMLPNGDKHSNFSVANSHEGSTQLVKRILSALTSNSLDTVLIGLEATSVYGDNLVYFLREDATLAPFNRKIHVLNPRQVKQFHDAYNDLPKNDYVDSFVIADCLRFGRINKEVYIGDYHYKALQNLTRARYFAVQNLTKEKQRFINVLFKKYSTMTQEKVFSDTFSTTALAVYDEFESAEALANMDLQELTDFIIEKGKNRFPDPDAVAKAIQKAARSSYRLPKTVNDSVNQVLSISIASMKALESQIKEFDKAIKAQMELLPNVLISVPGIGPVFSAGIMAEIGDINRFENQAKLAKYAGLAWKQYQSGGFEAEITRLIPSGNRFLKYYLCEAAFSLVRCDKEYSDFYHLKYKEVNRYQHKRALALTARKLVRLVFRLLKDNRLYRSA

SEQ ID NO: 370890 - protein, 352 aa, unidentified
MAKIEFDELMSVGIDIGKDTFHLVGFDPAGQRVLRKQIKRLALVATFEQLPRCIVGMEACLSAHFVSRTLRKMGFEPRIIPAIYVKPFNKGQKNDYNDAEAIAEAALRPNLKAVSEKTQDQLDLQALHRVRSRLVSRRTATINQIRAFLIEQGITVRKGLRALKNSFETILEERKDEISPRMRSILIGLYGDWMWMDDRIDRVSKEIEEISRTEENCLNVMTIPGIGPMISTAMVAAIGEGEAFERGRDFAAWVGLVPRQYSTGGRTILGRISKRGSRYLRMLFVQAAKVIMMRPHRWPDFSFGEWLARASERMHRNKAAIALANKLARMAWSILRHKTAFDAPRDEVAIGV

SEQ ID NO: 370891 - protein, 321 aa, unidentified
MQPVTVTVYAGVDVAKATLQLHLQGRQTEFPNQPAGLAKLRQQLQTIPHVHVVCEATGGYERPLVQALHQAQIPVSVTNPAQVRAAAQAQGQRAKTDRIDAALLTDYGQRYQPKPTPPTSASQDQLVALTQWLTQLVQAQALAKTQAEHHEAAFVCKQHTKLMAHFQSQIEAVEKQIRALLAEDALLQQRVECLDQIKGVGPRTAWLVLAHMPELGQINRQAVAALAGLAPWTRDSGTMKGMRCIGGGRPEVRLALYMAALTAARFNPVLQPFYQRLRAKEKPAKVALTAVMRRLLVYMNHQLKALAATQAATKTENAKIP

SEQ ID NO: 370892 - protein, 312 aa, unidentified
MTSAQIFVGIDVSKAQLDMALRPEGRFSASNDEAGYTQILKRLRGVSPTLVVLEATGGLELPITGILAAAGVPVVVVNPRQVRDFAKATGRLAKTDALDAQTLAHFAEVLRPEPRPLPDEQTQALAALLARRRQLVEMLTAEKHRLSSAHTPVRKSLRTHIAWLERELSHTDRDLAHAIRESPVWREHDDRLQSVPGIGPVVTSTLLANLPELGTLTGKQIAALVGVAPLNRDSGTWRGKRTVWGGRAQVRAVLYMAALVAARFNPVIRAFYQRLCAAGKAKKVALPACMRKLLIILNAMMKHRTRWAHTTG

SEQ ID NO: 370893 - protein, 346 aa, unidentified
MNKITVVGLDLAKNVFQVHGADARGQAVVRKPLKRKDVLAFFAKLPPCLIGMEACGGAHHWVRRFQAQGHTVKLMAPQYVKPFVQRHKTDARDAQAICEAANRASIPTVAVKTTEQQAVLALHRVRQSLMKARVAQINQIRGLLTEFGIVLPVGVRKLKAELPGVLEDGENALPDMLRALLQSLREHLHVLEQHIAQIEQRLTHWHRSNDASRRLEALPGVGMLTATALVAEVGDAKHFARGRQFAAWVGLTPREHSSGGQSIRLGISKRGNRYLRTLLIHGARAVLKARMNKPEHVQDWAVRVSDRRGHNVAAVAQANKTARRAWALLTKGEEFNPEYVRERAAA

SEQ ID NO: 370894 - protein, 343 aa, unidentified
MDHFAGLDVSVKETSICIVDDTGKIVREVKVPSEPEALLQVLMNPAYHFKRIGLEAGPLSQWLFSALAEAGLPVICVETRHMRAVLMAQINKTDRNDARGIAQMMRAGLYRPVHVKALRSQKLRMLLTNRKLLQAKAIAVENDLRATLRNFGLKVGMVGTAKFDARIKELVENLPDLAMLVEPLLIVRRVLREQIDILHRRLLAVVRNDDVCRRLMTIPGVGPVVALTYRVTVDVPARFKNSKAVGAVFGLTPTRYQSGESDRTGRISRCGDEMMRVMLYEAAQSMLVVSTKWSWLKAWAMKIAKNRGMKKAIVALARRLAVIMHRIWVDGTEFRWTKEVVAA

SEQ ID NO: 370895 - protein, 355 aa, unidentified
MSSRQQVYADVSAIGIDIGKNTFHLIGQDRRGKIVMRARVSRSQLMERLVNVPRCLIGMEAGAGAHHIARRLIELGHDVRLIPAQYVKPFLKGHKNDYRDAEAIIEAVQRPTMSFVAVKTAEQCDLQALHRVRSRLVRLRTGVINQIRGLLLERGVVMAQRTAPLRKALAVILADPPAHVSPRIMRLIGSLIEELNKLEERIEALTQEIQALAVEDEACQRLMTVPGIGIIISSAVVSAIGTGGTFKQGRDFAAWLGLVPRQVSTGGRTKLAGLSKRGNCYLRTLFVQAAHVILIKKPAAAQAAIWPWVERAAKRMAHRNLLATALANKLARIAWAVLARGQAYRPIANTEHACQ

SEQ ID NO: 370896 - protein, 440 aa, unidentified
MIDTNQNKEIEFAAFVGIDWADLKHAWALQIPGHLEVERGDLDHTPQAVEDWAAELGRRFGGRPIAVALEQSRGSLLFMLTKYAHLVLFPVHPTTLYDYRKGFRPSGAKSDPSDAGLLVDLLVRHREKLRRLNPDTEQTRTLQFLVEARRKFVSDKTRYSNRLTAYLKMYFPQVLGWFSEVTSPIAGDFLERWPSLQKVQKARPETLRKFFLQRHSCTLDNVDRRLEEIRSALPATHDVAVACSCSAAVLALVRIVRTVRDAILSYDQQIETLARQHPDFAIIDSLPGAGPALVPRLIAALGTQRDRYQSASELQSYSGIAPVLASSGKQHWVHWRWACPKFVRQTFHEWAAHSIGSSAWAKAYYEQQRAHGKPRNTVVRALAFKWIRILFRCWKEHKPYREDFYREALARHQQRASKRTPVQLQWKTCAGFSKITAITS

SEQ ID NO: 370897 - protein, 342 aa, unidentified
MQITTIGLDIAKNVFQVHGIDATEKVVVRKQLRRSKVIAFFEALPPCLVGMEACASAHYWARELRKLGHEVRLMPAKDVKAYVKRNKNDAADAEAICEAVRRPTMRFVGVKSAEQQGRLMQHRTRDLLLRQRTQVINALRAHLAELGVVAAQGREGLKELLAIIADENDDRLPVDARASLIVLAAQLQALQTLIGSIEKRLVVQHRANEASKRLETIPGIGVLGASAIAATVSDPNVFRSGRDFAAWIGLVPRQDSTGGKQKLGPISKQGDRYLRRILVVGAIAVLRYAKQNPEKYPWLTQLLARRPFKVVAVALANKMARMAWALLAKGGTYRAPALAAAA

SEQ ID NO: 370898 - protein, 329 aa, unidentified
MYYVGIDISKRFIDVCLLVDGIKGKRKTKVLPNGTNSTESLAQWLALQKCEPVQAHIIIESTGIYHEHLTYGLHQAGILVSVINPHRIREFAKGMGILTKTDKVDAYVLACYGCLKQPDGWSPPSEEVRKLKALLQHRDNLLNDKQRIENRLNTLKSTRPPEEILGSLESIEKNLKDELARIERLIADHIDKYPGLKNDLKLLKSISGIGEQIGWNMLAIIRSNNFRSAEQVASYLGVIPVERRSGSSVRGRARLSKIGPPGIRAKLYMGAIAAISHNHHVKAQYERLLLKGKSKMLAIGAAMRKLVHLCYGVLHTQQPYDKNYGMMPH

SEQ ID NO: 370899 - protein, 353 aa, unidentified
MSNKVIFNLDDLFISVGIDVGADFSWMSIALPNQQFVGKPYKILHNSIDSLTTAVSKIKEAEELYSLESRIFLESTGIYHYPIFCYLRDKGFNCSVINPIITKNSTNINIRKVHNDRFDSKKAALVGLKPDLKVSLMPSDLALNCRNLCREYYDLMDNRSAYVNKLQGELRMAFPQYLGIFSKVTTNTSLTLLDKYTSPNAFLEADMQEIIDTIKSTARFGLTYAHNKYTAIIQAAHDANEFGHIIDSNIKRIRLYISFIRKYDEEIESILDAMHELVDANEDTDFVKQIHLIESFKGAGFLSAISLMGEIGDFSAFSKPKQLFAYFGLDPAVKQSGKFEGTKIQMSKSGARI

SEQ ID NO: 370900 - protein, 343 aa, unidentified
MKKDTMIGVDLAKNVFQLHAASMTGQPKFCRKLSRQSFSNFMAKQPPAVVVMEACGSAHYWAREMIRLGHEVKLIAAQYVKPFVKRQKNDAADAEAIVIAAQRPEMRFVEPKSAEQQSRAILFRARERLVHQRTELVNALRAGLYEYGHVVPQGIHQMTRIAEILDAPSSNLPDLMREECEDLLEQIAEKTVRINDRTLKIKALAAEAETARRLQTIPGVGPMTALAVEAFAPPMENFRCGRDFAAWLGLVPRQFSSGGKERLGRISKAGQSDIRKLLIIGAMSRLNWLGRKSIPEGSWLARMVERKPRMLVAIALANKMARTIWAMLTRHEDYRVPTQAAAA

SEQ ID NO: 370901 - protein, 463 aa, unidentified
MQTRPLEAVAGFASVSGSSAHLWVERRDEVPTRPAMPQGSGMQGATLAHVTTSTIDPTLTAAAATEVFAGIDWGGSFHQICLIDEDGKVLRQQRVPHDAAGFDELDRLLTCHRARLRVAIERAEGLLVEHLHLLGVEIFCVSPKISARARERYRMAAAKSDAFDAFVLADTLRHEHRHWRALTPPSPVLAELRAISRDRDRIVIAQQATENRLRAVLEAYHPAPLHLFSTLDRDITLDFITDYPTPEQAGRVGTARMDGFCRRHGYSGRTQPEVLVERLRPHLLSAGEGTVAGKAFSASLFTEQLRMLNTHLRAYDKRLDELLERHPDTPIFTSFPGVGPVVAATLISEMGDDRHRFPAPGALLAEAGLSPVTRASGRTRQVRFRYASNRRMRHMIDWWMFTAIREDDWTRQAYDHARARGQGKYRALRGLGSRWTRILWRCWTDHTRYDPAIHHRNPEPTTA

SEQ ID NO: 370902 - protein, 374 aa, unidentified
MQQSSTLYVGLDVHKESIAVAYVAQEHGAEVVSLGTIGTRQCDIDKLLRHLQSKGQQLVFVYEAGPCGYWLYRYLMKKGYVCWVVAPSLIPKKPGDRVKTDRRDARQLARLMRSGDLTPVYVPAVDDEAIRDLSRAREDTLRDLKAAKLRLKAFLLRHDIRYTGRANWSPAHLRWLSEVVCPTPAQQIVFQEYVQTVTEQTARLQRLEHELREQVNTWRFQPVVEALQALRGVQFTVAVTTVAELGDLTRFNNPRQLMNYLGLTPSEYSSGPRRQQGSITKTGNTHARRALVEGAWAYRYPAKVSRHLQLRLEKLPAAIQAISWKAQVRLCKRYRQLMAKGKNANQVVVAIARELSAFMWAIAKQVVVPPNASR

SEQ ID NO: 370903 - protein, 412 aa, unidentified
MDILYPVCCGVDVHKTFLIATIITTKDGSLLPQYTQKRFSTFNSSLKKFAAWLIEHDCFHVCMESTGKYWTPVFNILEQQSIHTIIANPKWVRSVQGNKDDKKDSKRIAELFRLGMVPASFIPDKDTRILREYTRYISKLIAARSSEKNRLQNAFTVCNVALDSVVSDMFGKSATAITDYLVSDDTFSPEHCISLLQGSLKKKADLVLESILGYDIEDVQKTRITLIRRHIDFINTLIDTLESNIDSMVVQYEEHIRRLCTVPGIKRTSAIKIISEIGVDMSQFASSRRLCSWAGLSPRRDESAGKKHSVHISRAGVYLKPALVQVALAAVKDKENPYYAKKYERISKRRGKKRAIIAIARMILTAVYAILSTGQVWHPTDLDRIKSLEQHQLEKQTQQAIRFLESQGFSVG

SEQ ID NO: 370904 - protein, 325 aa, unidentified
MVGGADTHADTVHVAVISVHGADLADREFPTTAAGYRAAICFLASHGSIEGVGIEGTSSYGAGLARAVKAAGLKVIEVNRPDRAERRRLGKSDPIDAYQAAHAFLSGRAATPPKDEAIEGIRALHNARHSAVKARTAAINQIHQMLITAPQDIRTKYVALQGVSLIEALGRIRNVNSDDPVTNAVLTSLKALAKRCQLLTEQHTDLGALLDALVTEANPGLRAAYGLGPDTTAQLLITAGGNPERLRNEASFAALCGVSPVPASSGKITRHRLSRGGDRAANNALYRIALVRMSSHAPTRTYVARQLAAHKTKASEDEYGITRWA

SEQ ID NO: 370905 - protein, 357 aa, unidentified
MKIQSKKLDFSNQDFYLGLDVHKRSWSVTIRSNNIVLKTFSMNPEPKELNNYMEKKYPNGNYYSVYEAGFSGYGIHRELEKLGFNNIIVSPTQIPTSSSERLRKTDEVDSRKLARELENNSLTGIYIPTLLQQEMRSLCRLRYQTTKKQTRIKNQIKSYLDFYGHKIPANYEIQHWSIRFIEHLKDLIFEYEIGKEQLEIYIEELLELRVILLKIVKDLRKYTLEYKIEKDIKLLVGIPGIGFITAITLYTEIMDIERFSNSDKIDSYIGLVPSTRSSGEKEKVLGLSVQFNRYLCSLLIESAWVTIRKDPVLTLAYNKYTQRMSKQEAIIRIAKKLLNRIYYVLKNKKEYVYSVIS

SEQ ID NO: 370906 - protein, 456 aa, unidentified
MPASRGTRARSSGQLATINPNAAGLDVGSTFHVVAVPADRDEQPVRTFRTFSGDLHRLADWLEATGITTVAMESTSVYWIPVFEILEARGFEVLLVNARDVKHVPGRKTDVQDAQWLQQLHQHGLLRGSFRPRDGVVRLRVYLRHRERLVEYAASHIQHMQKALMQMNVQLHHVVSDITGTTGMRIIRAIVGGNHAPDRLAEFRDVRCAASEATIRAALTGNYRAEHIFALRHALELYDFHQAKIAECDVEIERVLRTLNEARATPTEPLPAVRHAKAKNEPEFDARPGLYTLLGADLTQIHGFGAYTVLRLVAECGDDMRKWPTAKHFTSWLSLAPRNKISGGRLLSSKTRRSSNRAATLLRIAAVNVGRTQTALGAFYRRLAARTGKAKAVTATARKLAILFYKALRFGMTYVDPGASSYEERYRQRVIQHLQRRARHFGFALVADPAAIGGVS

SEQ ID NO: 370907 - protein, 334 aa, unidentified
MEQITTVGIDLAKNVFSLHGVDAAGKTVLRRTVRRDRLVEVVAALSPCLIGMEACSGAHEWGRRFQQQGHTVKLMAPKFVAPYRKSDKNDGNDAEAVCEAVGRPSMRFVPVKSAEQQALLTMHRVRQGFVVERTALINRLRGLLAEFGVVLPLRSVTVRRQAADAAEVLPELARRAIADLLEQLRLLDGRIDAYDTEIEAQARLSEPARRLMKIRGIGPTTALAIVATVGNAREFKNGRQFAAWIGLVPGQYSTGGKARLGHISKLGDAYLRNLLVQGARSVLQTAAAHQDRLSRWALELQERRGYYRTLVAIANKNARIAWALLAKNEQLHKN

SEQ ID NO: 370908 - protein, 419 aa, unidentified
MRIIKTKKHEIVNGRTLLVAVDLGKSKHMGYYRCPDGTDIKPFEFSNNRLGHQKFYDRICQAKATHHLEEVVVGFESTGVYGEPLIHFLNDKGIKLVQVNPMHTKRIKELEGNSPGKTDRKDPKVIADIMALGHFLTVVIPEGVSAELRRLTQARERSVGRRTGFYNQLQDLVFIIFPEFLEVMKDIKTRSAQYLLRHYPTPQAILQCGVDGLSLVLRRVSRGKLGRQRAEALYEATVRSVGIKEGQRSIVLEIEEILLGIEGCDCFIAKLEREMRCLLEQIPYSQLILSVKGIKTVTAAGLIGEVGDFRKFRTISEILKLAGLDLYEISSGNQRGNCHITKRGRSLLRKLLFFASLNMIRKGGVMHEPYQRYIGRGMPTHKALVAISRKLLGILFALVRDHTEYVVNYSERENLKLAA

SEQ ID NO: 370909 - protein, 426 aa, unidentified
MKEHIDYLSTLFVGIDIASRIHVISALDFNQDFFIKMKPFQNTKEGAGIVEKMIADVLADNHQFKYVVIGMESTGFYGVHLANYLSTSELLAPFSVRVYCLNPKEVKNYKKSFNDIGKNDGIDSFVIADFARVGRIAVKPWRGSQYLALQRLTRHRMHITECITREKTYMLNNIYLKFSEYALLRNGEHPFSNKYGATAEAILTEYTTNDDVVNSSIEELVRFINAKSKGRIADPEETAKIVQAAARNSYRLDKCLYEPLTISIASSFNCISSFEKELKAIDKAILQTVQGLNPEEYTVLNSIPGIGKVYSASILAELGSIKAFQNANALAKYCGIVWNDNDSGDFEAEDKRMSKAGNRYLRYYIIEAAGSVINHCPEYKAFYDKKYAETRTHQHKRALALTSRKFIRLLFGLLDKGQLYSPEKSR

SEQ ID NO: 370910 - protein, 365 aa, unidentified
MTNYKIGCDAHRRYSQFAILDHEGHFLRQVRVNHLPGAIRDFLEDYPSGTPVALESVGNWYWIVDEIEAAGCLPLMAHAAKAKVMMGNVNKTDKLDARGLATLLHLGSLPTVWLPPHEIRDERELHRTRMALSKQRTTLKNRVHSTLAKYALSLDTDSDIFAPKWRPELTKASSALPPETQRCMQQHLIALDHVQGQIKELEERIKHRVEITPNIQLLKTLPGVANILAIVIEREMGSADRFASSAHFASYAGTVPTVKSSGGKTRYGRLRKQSNQYLKWAFIEAANVVVRQRRHANWRAKHVTILYERIRWRKGHSIAVGAVSRHLSEAAYWMLRKQEPYKDPARKAVTQGKGQREANMVRQKP

SEQ ID NO: 370911 - protein, 312 aa, unidentified
MIEQCFGGIDVSQDRLDVLLLPQGTGFSVANNEAGWSTLIGRLRGLLLTAIGLEPSGGYERGVLRALLAAGLSVRRINPNRLRQFARARGALAKNDRIDARLIAEYVATMPTHVVRHDPAAARIAEIVTMRRQLCDEHVAIENQAAQLEDAMLRRLAKRRLARIETDIRLLEKRLTETIAAEADLARRYERLTSMPGVGPVLAFTLIALLPELGRMSRKQIAALVGLAPYDFDSGKLRGHRSIYGGRMPVRNVLYMAALSACRYNPALRTFHKRLAAAGKKPKVILVAVMRKMITTLNAMLRDGASWQPQAA

SEQ ID NO: 370912 - protein, 362 aa, unidentified
MAQVRSWVGLDVHAAKVLAATMDRESGELRVRWLAGKTSEVVEFCAGLPGVTRAAYEAGPTGFGLARALRAAGVECVVAAPGKIERPSADRVKTDQRDAERLLRLLMIDGLHAVRVPSTQEEALRDLVRAREDVRGDLMRARHRMSKLLLRHDVRFEGTAGAWTTHHRAWLSNVDLGDRGAQVTLLDYLGAIDALVIRRETLEATIGELVPGSPWAQSIARLRCLRGIDTLTAVGLCAEIGDWQRFPRAGQLMSYLGLVPSEHSSGQARRQGAITKTGSGHGRRLLVEAAWHYRRAPRKGDVLKRRQAGQPAHVLAISWNAQQRLHRTWQRLDAERGKRRTIVAVAVARELAGFCWAIANTD

SEQ ID NO: 370913 - protein, 315 aa, unidentified
MAMRVSQEKMIIGVDVAKNELVIYHEQYDQLEAIPNTKVAITKWLKTLAGTSAIAIEATNVYHVLFADMAYEAGCEVYVLDGYQLSSYRKSVNIRAKTDAQDARLLARYLKNEFDELRPWTPPSPLYRQLLSLFRRRAALVQARTGLVQSWANEPLLKTAFANQINSMKRLEALVEKKIRDVLQEAGLMVQVNRCMKVEGIGFLTAARLVTSYQRGEFSGANAFIAFLGLDLRVSKSGQRDGPRRLTKRGDPEARRLLHNAAMSGSRTPAWKPFYEEQRRRGFSTTQALVMLARKMARVVFALLKNQSEYQTKAA

SEQ ID NO: 370914 - protein, 362 aa, unidentified
MLVVGADMAKDSFSVNAMVKNAAGGGTCKGTRTFKCDAAGFDGFIQWVGSRLKNGMQAMFVMEATGVYHEELAFFLHEKGYKVCIVLPSQSKQYRKSLNLKTKTDAVDAEALALMGIERSLRPWKPMSPQYIALRRCCRERAAYTKARTAAKNQLHAMEYSHEADLELMKLKQGLIGSLEESIKSIEKRIKSIVDADSVLKAKLRLLTGITGVGLATASSIAAETNGFELFTSISQLTSFAGLDVSRSQSGKQEGKGRISKKGSSRIRHPLYMAALSACQHNPSLKALNTRIKDKNPKAKRKGHVAVMRKLLALCYTLWKKNEEYDPCYQWGTEKLPGGGEASSPSLGSSDKKREACAPLGR

SEQ ID NO: 370915 - protein, 461 aa, unidentified
MKKQKRRAAAKVDQSSKLSVIQPDVAGIDIGSREMFVCGPADPQGRREMRVFATTTQQIQECVRWLKQQKVRSVAMESTGVYWIPVLEIMESSGLEVLLVDTRPLSRVPGRKTDVEDCRWLQTLHSHGLLRGAYRPSEQISELRTIVRQKAVLVRQQADWIRRMHKCLDQMNVRVHHAVKDTKGVTGMAMLRAIVAGERDPRNIAKLRDPGCQKSEAEMVELLTGNWRSDHLFNLKQHMAMYDSAARQIAVYEEEIQRRMQEVTPAGRKDAEAPPLANVEKRKTMKKRDQEKKRQAQYRVMGVDLTTIDGIGVETVEVIMSEYGTEMSKFPTEGEFVKHVGLAPHRPVSGGKVLKNKRKKQKGTRTAEVLRNAATSLKHSRSALGAYYRRMARRKDSGVAVFATARKLGGLVYRMLRYGQQYVDLGQAEYEKRYEETRIRALQSTANQMGYNLVKQEAISA

SEQ ID NO: 370916 - protein, 397 aa, unidentified
MIAVGIDISKAKSTVAVIDSDGTVLASPFTMAHTQPEMEAFVSYLKGLGEPTTILMEYTGHYHYPVLKKLQDEGFPVCIVNPYQMKKYGDVEIHKAKTDKKDALRIAAYALEKSYKLVPYSSMEQKYEDLKFLSRQYSQRITYVAKLKVQLIALLDQTMPGITRILPLNSRNPEKCALLLFIKRFKSFDEIHRIGKARFLASYDVLAKKASERSASSKGLSIYELAVDSITTRGEDPYIWLSQNQCVDLLSATQNAADEIISQMRNIAETIPEYKVLRAMRGVGDRLGPIILAEIGDIRRFHSGKALNSYAGNDAPPYQSGQFESRNRHISKRGSSALRKACYEVMQALKLTKPQDDPVYLFMLKKEQEGKPFNVAKMAGVNKFLRIYYARAMELYK

SEQ ID NO: 370917 - protein, 345 aa, unidentified
MSNINVIGIDLAKNVVQVCKLNIASGEVVYNKAINSNKLAELLAKEKPAIVAMEGCGGAHFWARKAQSFGHDARIIPPKTVKAFLQGQKTDANDAMAIAIAAIQIGTTFSRIKSETQHTLQSIESSRRFLIRSITALSNHIRAFMYEYGINTPQGYKGLTTKVLNTLDADNDQLPSCLKGTLSIMWHQLQTTKQQLKQLENEKAALVQHIEPCKRLMKLEGVGVVAASMLYASLGDGSNFKNGRAAAVYLGLTPKQHSSGGKTYLTGISKTACDRPLRSVLYQGALAVIQWLPSTPRTQKEAWLIALVARVGIKRACIALANKTVRTAWAMLSRDESYRASPLIN

SEQ ID NO: 370918 - protein, 403 aa, unidentified
MEVCYERCCGIDVHKKVIVCCLRIGNKRETRSFGTSTEDIRNMAEGLLENRCEKTAMESTGSYWKPVYNVLEVLGVEAIVVNAAHMRNVPGRKTDVKDAEWIADLLQHGLLKASYIPDRAQRELREVARYRKSLVEERAREINRLEKTLQGANIKLSSVVSDITGRSSRNLLSALTGEGLNDKNIDELLCGSLKEKRAELLKVCDGYLTVLQKKLVRAILDHIDDMTRRIADMDDIVKGEMKAYEEAMERLEEIPGIAKRSAQVILSEIGLDMTRFPTAAHLCAWAGLAPGNNESAGKRYSGKTRKGNATLKTTLIQSAKTAKNKKGSFFKAQFERIAVRRGKNRAVVAVAHSMLIAIYNMLKYNCPYNDLGDTYYLQFNTERKIGYYLKQLDKLGWQVPITA

SEQ ID NO: 370919 - protein, 375 aa, unidentified
MAEVNAFIGLDVHKDTISVAVAEAGRGGEVRHLGTIENTPAAIIKLARRLKQKHGSVEFVYEAGPCGYVIYRQLTAAGFICHVCAPSHTPIKPGERIKNDTRDAVALARLFRADELTLVWVPNEIDEAMRDLVRARQSATNDVRRLRTRIQLFLLRHDLRYATKPWSYRHRVWLTDRRFPHPAQQIAFQSYLNALEQAESRKADLERQIAEVTSQWSLRPLVQALQGLRGVGLVIAATIVAEVGDFNRFASPRQLMAYLGLVPGERSSGRKIRPGAITKAGNTAARSLLFEAAWSYRSTPKVGQWMARYRPDEVSQAVKDVAWKAQLRLHGRYKKLLGRGKRPTVAITAVSRELVGFMWAIAKLITPPREGAPAA

SEQ ID NO: 370920 - protein, 334 aa, unidentified
MQNITLIGIDLGKHSFHIHCQDKSGKALLRKKFTRTKLMQFLATCPPSVVVMEACAGAHFMARCISDFGHETKLISPQFVRPFVKSNKNDFVDAEAICEAASRPSMRFVQPRTETQQAMRALHRVRESLIRDKVKTTNQIHGFLLEFGISLPIGDAVIKRLSLVLAEHEIPEYLSRLLVRLHTHYFYLVEQIAELESELSQSINADDTAQRIMTIPGVGPITASLLSSQLGDGKQFSCSRDFAASTGLVPRQYNTGGKSTLLGISKRGDKNLRRLLVQCARSFIMRLERKHGKLAEWVREQLNKKHSNVVTCALANKLARIARAITTQKKEYQA

SEQ ID NO: 370921 - protein, 417 aa, unidentified
MIVGCDIGSVKHFIRAIDAQGRALTNKPFPFENDEEGFKAAHDWMVKVAAQNDKTQIVLALEPTGHYWFCFAAWCTSHGITVVQVNPYAVKATKEIQDNSQLKSDRKDPGVIAELAKNGNYSIPYIAEGTYASLRELELFRERVSEDRIRDINRLCQEMDKYFPEYRRIYKEVDKVFSLAVLAKAPLPEDIVRIGEDGVRALWHSEKLRGGGYSKAAELLQKAKHSVGLREGQAQARMSIQYLAGSIRDKDARLDEIDAEITKLAKSIQYVEKLTAIPGLGERIISGILSEIGDLIRFDSVKEIQKYSGLGLVSESSGKHNGETHISHRGRKRLRYWLYMGARSVVAHSSEFAKLHTYYTTREENPLKKMQSLMAIACKLLRVIYVILTKGVDYDPQKLLGDIVRPENAKNKTKAFL

SEQ ID NO: 370922 - protein, 340 aa, unidentified
MGEYIGLDVSLKETAVSVRRGGKRVWRGKCQSDPALIAALVRKHAPSAERVVFETGPLSVWFFHALTAEGLPAICIDARHAKAALDMAANKTDANDADGLAHLAEVGFFREVRVKGFDSMLSRTLVAARTKLMRMTLDVANQIRGLMKTFGLIVPRSMGGKFEAHVRSLVADDAGLARIILPLVEAWRSLRVQATELGRQLLAEARRSQQCQVLMSIPGVGAITATAYLTAVEDPANFARSRSVGAWLGLTTRRYQSGEVDYDGHISRRGDAHVRSLLYEAAVVILTRSHADSDLRSWGLKLREKIGFKRAAVAVARKLAVIMHAMLRSGELFTRRTAAA

SEQ ID NO: 370923 - protein, 354 aa, unidentified
MSQKLNAAMTVIGIDIGKNSFHIVGHDQRGAIVLRQKWSRGQVEIRLANLPPCLIGMEACVGAHHLSRKLQMLGHDARLMPAKYVRPYSKGQKNDFRDAEAIAEAVQRPTMKFVATKTADQLDLQALHRVRERLVGQRTGIINQIRAFLLERGIAVRQGLRFLRTELPGILAMRTDVLSPRMLSIIEDLAGDWRRLDERIEGLSGEIEALARQDLACARLMTVPGIGPIISSAMVAAIGTGDAFSKGRDFGAWLGLVPKQTSTGDRTILGKISRRGNRYLRVLFVQAAWVVLVRLKRWERYGLKSWIEAAKKRLHHNVLAIALANKLARIAWAVLHKGRAFECSKTAETASRPA

SEQ ID NO: 370924 - protein, 367 aa, unidentified
MSSISRSELSWVGLDAHKDSIQAGILRPGSDTVELRGVLNEEYAIRKFFERGLGPRPAVRVCYEAGPTGYVLARQLQGMGISCQVIAPSLIPRALGDKVKTDRRDARRLVRLFRAGELVAIRVPSPGEEAVRDLCRARADMVEDLTRARNRLTKFLLRHGEIWRGGSNWSLKHIQWLAGRHFEDKALALTYSHYRATLQAREVALEAANADLAGFFDQPPFAAAVGRLSAYRGVDRLGALTIASEVCDFRRFSRAEQFAGFVGLVPSEYSSGTSTRRGRLTKAGNAHLRTQLIESAWSYHHHPVVGATLRRRQEGLPADTVARAWAAQLRLSRRFRQLDARKHIRPVVAAAVARELAGFLWAEMVAA

SEQ ID NO: 370925 - protein, 343 aa, unidentified
MTNITTIGLDLAKMVFQVHGADENGRPVVRKKLRRGQMLGFFASLSPCLIGMEACGSAHYWARELQALGHEVRLIPPQYVKPFVKTNKNDACDAEAICEALARPTMRFAPIKSAEQQSVLMLHRARELLVRQKTMLINALRGHCSEFGIVVAQGASRVEELITIIEDCQDDRLPTLACEALGALVSQLRMVQAQIAELEKKLKVWHRASEASRRLETIPGVGVITATALVATIGDASQFHSGRQLAAWLGLVPRQHSSGGKEKLGRISKRGDGYLRKLLVHGARTVLLWSRRKKENRSAWQEALLARRPTNVVLVAMANKTARVVWVLLNRGETFRTEPCAAT

SEQ ID NO: 370926 - protein, 408 aa, unidentified
MSVNGLPREILDGGLVVAIDPGKAEHRVWVTDRGGVVGEPLSLPSSRAGLDRLQVLVGTAPATFAIEATGALHRAWAAELQRRWPGSLRVFAPSQTQAARTQLGTRRFKTDDRDCAALVWLARQGAGRPASESAVDALRAAVSHRRQLVLALKPLRQRLHDQLNALAPGLSAPTGHGRSLALETSTGRAVLACAVDFAGRPPSVRSLKARADGRLRDATAVFWSARWRDCLPPPPDAPLRAARMGRDLARLAAMRDDIAFVDGQIEQLLANSAGQILTTLPGVWTTRAAAFAAHTLPVERFSTPEHLYSATGLAPASYQSSTVRRRGGISRTGLPEHRDALIGIAWGLGQFAPAFQQRLVELRARGKTPLEARVALARHACRLCWRMLLTQEPYDDRRYDRARRDRGR

SEQ ID NO: 370927 - protein, 367 aa, unidentified
MKKVSTAGTKQGRNISRQTLTIGLDLGDRNSWYCVLDEAGTIQLEQRVRTTAKALQEVFGAMPRSRIALEIGTHSPWISRLLSELGHEVIVANARKVRLIGESRKKDDRLDAQTLARLARIDPELLYPVKHRSAQAQADLMMIRARAGLVRVRTSLVNTARGLAKSYGERLRGCNVRDMDPEKAENLSPELQRALEPLLATIEELSERIVEYNDRIEALAQASYPQVELLKQIKGVGTLIALTFVLTLEDPNRFGKSRDVGGYLGLQPGRRNSGESEPQLHISKEGDPYLRTMLVQGAQHILGPFGIDCDLRRWGLKLAERGGRNGKKRAIVATARKLAVLLHHLWVSGEVYEPLHNSSRVTVAAAA

SEQ ID NO: 370928 - protein, 471 aa, unidentified
MFIHHDRWDAAVVLRMGIDIAVRAPHQASLANEKGELLWSAHRFRTTTGDLEKLWARLPTGHTPSDVTIVMEPTRNAWVPLAAWFRRRGAHVVLVSAERSSDLRAYYAKHTKSDRLDSVLLARLPLLHPEGLHRERGLGPGDPLRRATKMHSTLVKRRTTSLARLDALLEILGPDWHGAFSADLSNKTPLQFLAAGYADPHTVRRLGRARLTRFLYRHSRGAFGEAHADQILAAARASLELWGDDLAFPDLAEDIAIEARLALALTAEVKELDERIAVLVADRDPHGIITSAPGVGAITGAVILGRLGNADRFQSLAAVRSFSGLVPSLDSSGVSGRHGGPTKRGDHLLREALFISANQARRLDPTLAAKYHRLMIDSGKHHNSALCHIATTLLTRVVACWRAQTPYQIRDIDGRTLTADEARAIIRERYTIPDTVRRSRITTGTGRRSKESLRAPSTGPSNQHAKQPGAA

SEQ ID NO: 370929 - protein, 344 aa, unidentified
MTSMHFIGLDIHKKTISYCVKDVSGTVLSEGTVAATRAQLNEWMKSLPTPWTVAMEATMFTGWIYDHLLPHAAAVKVAHPLMLRAIAAAKKKNDRIDASKICDCLRCDFLPECYMVSSQVRERRRTLRYRKLLVRQNVQLRNKVSQMLMESGVVYNKQKLHKVGYFKELVATNPDISSELKPLLTICRETIVRIGKTEGALVRSLRRDPLLHARVERLMTIPAVGPITALTWVLEVDDVTRFHSVKQAVSYCGLCGAERSSAETFKRMPISKQRNKHLQSVLIEAAKLAPRLSPDLALVYDTEKQKGHANRASIAVARKLVAYLLAVDRSGREFVVAGERRAAA

SEQ ID NO: 370930 - protein, 354 aa, unidentified
MAISKQCIGIDISKATFTACLCQCSDDGELVFSKTVDFSNDSKGFNQFLRWAKGVIAKDAALVFLMEATGVYYENLAHHLHKIKKRVHVVLPNTSKHYFSSLNIKTKTDAVDARILSQFGVERIHKAWSPPPPVLLQLRNLTRYHVQLQEQKTALGNIKHSKDCSHALQIFILKSNKKLISEIDKEIGRCIGEINRLVKSDLGLHKKIEKLATIKGIGMITMVTILAETMGFEQFGSAKQLVSYAGYDVVQRESGTSVKGKTRISKKGNRYIRNALYFPAMVACRHNSVLKEAYTRIIQKKPSKMVGQVAVQRKLLILMYTLWKNDTVFIENYKVSSPDPKTETTLDSSEAELL

SEQ ID NO: 370931 - protein, 328 aa, unidentified
MSKPTFYVGVDVGQEELMVAVEGSKARSFKHTVAGIGKMVVWVKGLGLEGTPHFCLESTGVYGYFLASHLTVKFGMTVSIINAAQISAFARAQLRRTKTDQIDAQVILNFAQTQHPPLWQPETKVLRHLYHLVVTADKLQETSRQWSNRDHCHKYVEDLPPIIKKTHQNLQRTLERQITRIEKEIEKLIHDDPQLKQQIQLLCSIPGVAVKSASRIMAYGRRALVERNRKAIVAHAGLAPAQKQSGISIHGKSRIAKQGDRRLRKALFMSALVAAHHNPSLKIFYQRLLQKGKPKMLAITAVMKKLLLMIQAILKNKIPFNPNYAVDN

SEQ ID NO: 370932 - protein, 348 aa, unidentified
MNYIGVDCHISSLDFAVVNERGTTTKRAKVNTGVKEFIGFVKSVPKPRKIFIEEGELAGWLLETSLKFGERLIITDPKINKWIGKAGQKDDAIDAAKLAQLARGRYIKAIYHSVDKRRRFKELVFAYHDTVRNQTRIKNKIKASFRKNGIRCSGVTVYSDKHRATWREKLSENKITRLIVEELWVQLDQLRASKERFKKNISIQSKRYPEIKRFMEIPGIGLIHAATISAIIETPHRFANKKKLWMYAGVGLMERSSGEKVYSRKLTREYNRPLKNAIKQAVQASIHAQDNQFRRQYLRLTIEKGLASHKAKLTVARSMLAVLYGMWKKGEAYDSEIDIKRNSERIIL

SEQ ID NO: 370933 - protein, 443 aa, unidentified
MGPGARLLEFKKRTAKPTARAMEGKMDVLYERCAGLDVHKKTVVACIRRLHDGQVERKVRTFETTTRELLALAEWLDGHGVRHVVMEATGIYWKPVWHMLSDGEFELVLANAAHVKNVPGRKSDVSDAAWLADLEAHGLIRGSFVPDGPTQELRGLLRTRKQLVRERTSHTLRIQKTLEDANIKLDSVISNVVGLSGRRMIEAMVAGESDPVTLSSLADRRLKATPEELAEALRGRVTRHHRFLLGLHLGHIDAIEAAIDKIDQEVEAGLQPFRAAVDLLNTIPGVSELAAEGIVSEIGLDMGRFPTCGHLISWAGLCPRSDESAGKRRSTRMRKGAPWLKTLLVQCAWAASKTKATYLHAQFLRIRARRGDKKAIGAVAASILTAAYHMLKTGIPYRDLGPKHFQRRHNDVQAKRLIARLRNLGYRAVIRPLDLASATPVSC

SEQ ID NO: 370934 - protein, 350 aa, unidentified
MIIIGCDFHSRFQQIAMLDPQTGEVIEHRLEHENGEARKFYAGLATPARVGMEASGYAQWFERMLAEQGHQLWVGDAAEIRAAMVRKQKTDSRDAGHILDLLLKDKFPRIWIPSTEERDVRQLLRHRYKLVCWRTSLKNQLHAMAMGHGICRKKKLWTAVGRKELQGLSLGPWASRRRQHLLGMLDQLEPVLEELDRAVIQEVERRPAAMRLMTQPGVGPVTALAYVLTIGPVSRFQRSKQVVSYLGFNPSEESSGGRQRLGSISKQGNSMLRFLLVEAAQTASIYDPELRRDYRRLKFRRGSGVAKVAIARKLAVRLYWKLREQPSPVPPAPMQGSPAVSVVGESLSSS

SEQ ID NO: 370935 - protein, 387 aa, unidentified
MPAEAGIQSGGLNNLLLLGWTAPDGIECARLRVVITTAKGSRPMTIIRVGLDTSKSVFQVHGADEQERPVLRRQLRRGQIEKFFAKLPPTRVGLEACGASHHWGRVLRDLGHEVMLIPPQYIKPYVKRGKNDVIDAEAICEAMSRPGMRFVPIKSREEQAALMLLKVRDLLTKQSTMLSNAIRGHAAEFGVIGAKGPQKIKELLERIAGEANMPEPARELLNDLASQLAAVEVRLAALEAKLMAHHKADPRSQLLATIPGVGPVTAVNITLKVPDATVFRSGRHFAAWLGITPREHSTAGRQRLGKISRQGDEGLRRLLVLGATAVIQQVERRRKAKKTSGNDSPWLLQLLARKPRKLAAIALANKMARTIRAMLVSGELYRRPQAA

SEQ ID NO: 370936 - protein, 404 aa, unidentified
MWYVGLDWADTHHDMVVLDEAGHRVGSQRFAHSPEGLNELKQLMLRIAGSPDQLACIVETNHGLLIAFLLEAGFPVYAVNPKTTNQLRKAAGAKTDQIDAYLLAKTGRFDLAELRRLEPDSATVQELKTLTRDQDALIQTQTRLVNQMTACLKEYYPAALHLFAKLQQRSTLVFLQTYPTPQAAQAASLEELIATLHTGKHTNPMQVAPKIFEELHRPQLVANAVMVRAKSRLMLSLVKQLLVVIEDISSYDKQIRTLFLTHNDQEIWRSLPGAGKRLAPRLLAEWGEDRRRYSDATSVQALAGTAPVPFQSGNYAKAHKRFACLKPMRNALHQFAWQSTRQEAWALAYYRRKRAEGKTHSMAVRALANVWVRIIYRMWVNKTNYQTATFEAAQLAHAPRPHAA

SEQ ID NO: 370937 - protein, 408 aa, unidentified
MEVVYRCCCGIDVHKKIIVACLNQGGEQSLREFGTTTSEIKSLATWLTESGCEIIAMESTGVFWKPLYNLFELMDLDAIVVNAAHMKALPGRKTDVKDAEWIADLLRHGLLKASYIPSREQRELREITRYRKSLTEERCRETNRLQKILEGANIKLDSVVKDINGKSARKLLEKIIEDDVPTSEEEISKMIHGRMRSKLGQLVTAIEGITTPLQRKLLAQVIDHIDDLNRRIADLDKLVQDYMDEYEAAITALCDIPGIARRSAEVILAEIGLDMSRFPSAAHLCSWAGVCPGNCQSAGRRKHGKTTKGNKPLKTILTQCTKSARSVKGSYFSAQYQRIAARRGKNRATLAVAHSMLIAIYHMLRNNVPFRDLGSDYYDSFNRDRKIHGYLKRLKALGWEPDALPGSA

SEQ ID NO: 370938 - protein, 395 aa, unidentified
MSAEGEAIRSNDYRKDTTVKAPSTRPAAVLGLDVGKSSHWACLVDRDGEVLASAPVRNREAELDALFASAPAGTLVVVDQFRNIGSLAVRRARVAGLGVAYLPGLAASRAAGLFAGEAKTDERDAAVIARTALGVPDSLSGVPGRGEALEAARALSSQRDHVVACATRDKNRLRAVLLESCPALEAAVDLSDRRWLELLAGFGGAWGIARSGAEGPQAAAAGEAAAASTAPPPALVEAENRQVRFLAARISEALDEAGALEAETAALLEGDETYACLLTVPGIGPRTAAQLAVSVDIGRFPDHDHLASYCGIAPRVRSSGTSVRSVRASRRGDARLKSLLIFSCNSLVRSSGRYGEYYRACRARGMGHGRALKAVARKRLRAIYAVMRDRVPYRE

SEQ ID NO: 370939 - protein, 339 aa, unidentified
MRLYVGIDLHSNNSVLAILDENDKAMYEQRHPNDLKVILKQLAPHRKNIQAIAVESTYNWYWLVDGLMEAGYTVKLVNTVAVKTYDGLKYSSDEHDARHLAHLLRLGILPTGYIYPKQERAVRDLLRKRAQLVRNHTVHILSIQNLVIRNSGKGIAGAAIVKLDDAAIGRICGGDDTLALAIKSSLVVLRCLNEQIAELERVILGKARLKPEFRKLLTVHGIGEMLGMTIMYEAGSMERFARVGQFASYARCVASSRWSNGKKKGEGNRKNGNKYLAWAFIEAAHYAVRYNERIRKFYQRKQAKTNKFVAAKAVAHKLARACYHVIKDQTPFDEARAFA

SEQ ID NO: 370940 - protein, 411 aa, unidentified
MERVYERCCALDVHKQQVTACVHVPDQQGERSELRAEFGTMTGDLLGLRDWLKGLGVTHVAMEATGVYWKPVYYLLEDDFELLLVNAQHVKNVPGRKTDASDAQWLCQLLEHGLLRGSFVPPKPIRELRDLTRYRKTLIRERQREANRLHKVLEDAGIKLACVASDVLGVSGRAMIEALVAGEGDPSVLAELARGRLRAKLPALQRALEGRFSAHHALLCSHILAHLDYLDEAVESLSEEIDSRTRPFARELEQLDTITGVGKRAAESILAELGPDMSRFPSHRHCARWARLSPGNDESAGKRRSGKTGQGNPWLREILIECARAAARSKDTYLKAQYLHLRRRRGDSKAIVAVAHSILVSAYHILKNGEPYRDLGFDHFQRRERPDHIVRRLTRQLEQLGHHVTLEPLAG

SEQ ID NO: 370941 - protein, 321 aa, unidentified
MQIQNTVVYAGVDVAKATLQLHLQGQQSEFSNTPKGRHQLCAQLQKVPSVHVVCEATGGYERALVKALQQEQIPVSVTNPARVRAAAQAQGQRAKSDPIDARGLTDYGQRYQPEPTPPTSATQDQLVALTQWLKQLIHGRALAKTQAEHHQDPFVRRQHAKLMTHLQSQIEAVEKQIEALLEQDAALQQRVTCLDEIEGVGPRTAWMVLAHMPELGRLNRHEAAALAGLAPWTRDSGTMKGRRCIGGGRPEVRLALYMAALSAARCNPVLRALYKRLRAKGKLAKVALTAVMRRLLTYMNHRIKALLSETATAKAQELKIA

SEQ ID NO: 370942 - protein, 436 aa, unidentified
MPFDAAPQSFPVAIELSASSWVVAARVPGRDKCRLFRCEAGDTGELARILDEVARLAGPAASPAVCFEAGRDGFWRHRWLTDRGVAAHVVEPTSILVRRQARRAKTDRLDAEGLVRVLAGWLAGGSGICRMVGVPTVGQEDAKRPHREREQLVQERTRIENRLLALLATRGIRRRPSLRNRTAAAAARRTGDGRPLPPHLHAEIERLRRRLGLILELPREVEADMAEAAAVTADPTADPTAGKVAMPRRIRGVGANFAAVLAREVFYRRFAGRRQLAGYAGLTPMPFQSGSVDRDRRIRRAGNPRARTTMIQPAWPWLRYQPGSALAGWFRDRVGALAGRIRRIAIVALARKLLVALWSFVETGAVPDGIVVSPRPAHQAARRSRRTRPRPTRRGARPSSSMVTPKLPRGRLVAPTEEHASCTRHDGPGPRRPRRL

SEQ ID NO: 370943 - protein, 390 aa, unidentified
MEARVANNLAPAAAHDGAVRCLLAIELSKKSWVAAVNTPLSDKISLHKLKPCDWKELLQLIERIRKRIAQELKKPVEVISCYEAGYDGFWLHRLLEAQGVRNHVIDPASLQVDRRARRTKTDGIDVGKLLRSLMAYLRGEPKVWSVVRVPTVIEEDDRRLHRERSRLINERIQHVNRIKGLLAIHGIYDYEPMHPERIQRLERLRTADRHSLPLRLKAEILRELQRLELVLGMIQTIETERDAIVSAKSKSQQTSAKKIKHLVKLKSIGPEFATVLVGEVFYRTFDNRKQVGSYVGLTPSPFQSGSTSRDQGISRAGNAKARTTMIELAWLWLRNQPDSPLSVWFRERVGNRKGRIKRIAIVAMARKLLIALWRYLETGVVPEGAVLKSK

SEQ ID NO: 370944 - protein, 372 aa, unidentified
MRKSSILFVGMDVHKESIEIAIADDGANGEVRRYGRIGGTFDAVKKALRKLVSRGTTLHFCYEAGPCGYELYRYLTGEGHVCVVVAPSLIPKKPGDKVKTDKRDAVQLARLFRAGELTPVYVPDREDEAIRDLSRAREDAMLIQKAARQRLKSFLLRHNIRYQGRANWKEKHLRWLADEVRLPDPAQQVVFQEYVNTVTEAAHRMERLVVEIHHYVEHWRLYPVVQALMAMRGVQMIVAVTVVAELGDITRFENPKQLMNYLGLTPCEYSSGERQRRGAITKTGNRHARRILIEAAWSYRYLPKVSPDIQKRQENLPLLIRDIAWKAQLRLTKRYRVMSRHGKPPNVVVVAIARELAGFMWAIAQAVPLSKT

SEQ ID NO: 370945 - protein, 343 aa, unidentified
MDYYAGIDVSLEQSSVCVVDSSGKIVRETKVASEPEALLQHFAGLGLPVVRIGLEAGPLSQWLREGLVDAGLEVVLLETRHVKAALSAMPVKTDRKDARGIAQLLRMGWYRPVHAKSADAQAVRALLVGRKLLQAKLLDVELSIRGILRGYGLKVGEVSRGRFEARIRELIEGHDMLGTVIGAMLQARAVLWNEFTRLHRTMLKIARADRVCQRLMSVPGVGALVALTYRSAVDDPGRFAKSRTVGAYFGLTPKKYQSGETDIDGGITRVGDAMVRTALYEAAHIMLTRASRFSALKRWAMDVAKRRGMKRAKVALARKLATVLHRMWVDASAFRWSKESVTA

SEQ ID NO: 370946 - protein, 417 aa, unidentified
MKCAPSFLPDQPANGLTAGIDWARDDHALAIVDARGKQIYRDTVEHSDAGLRALLKLLANHGVGEVAIERPDGPVIDALLDGGLTVVVLSPNQVKNLRGRYGSAGNKDDRFDAFVLADTLRTDRARLRPLTPDSPATVALRRACRARKDRVAHRVALANQLREHLRRVFPGAVGLFADIDSPISLSFLSRFDCQDRADWLSPKRLAAWLASVGYCGRTDPAVLHARLTDAPRGATGDHGTAESRVTQAYLAVLASLTDQIKALSIQIDEQLALHTDAHIFTSLPRAGRIRAARLLAEIGDCRARFPTPDSLACLAGVAPSTRQSGKIRSVGFRWSCDKQLRDAVTDFAGDSRRANPWAADLYDRAIARGHDHPHAVRILARAWIYVIWHCWQDNTAYNPDQHGALQRLIQSRNHAAA

SEQ ID NO: 370947 - protein, 414 aa, unidentified
MVVGWAHWIGTTTEVPVSHDVWAGIDAGKIAHHCVVINDAGEKLLSRKVSNDEADLLRLIKDVAAIANSGRVQWALDLNAGGAALLITLLVEHQLDFVYIPGRTVHHASAAYRGDGKSDAKDAAVIADQARMRRDLHPFRQRDEITMDLRLLCARRTDLAMDRNRAIARLRATLLEYFPALERAFDYAHRRGALTLLTRFQTPAAIRQAGPVKISAWLRRHGAYSPDTIAQTAVSAAASQRTVVPGQQTAAKIAAQLAQQVITLDAEMDTIEAEITERFRDHAYAPAIESMPGFGPLLGAELLVGINGDTANYENVDRLASIAGLAPVPHDSGRITGNLKRPRRYDRRLLRACYMAAHNSLRTNPESRAFYDRKRAAGKRHNQAVLALARRRLNVLWALIRDETTYQPVTLKAA

SEQ ID NO: 370948 - protein, 306 aa, unidentified
MKRILRIGMGVHSTNYTLCAMEPVIGEDDRIFANIQVTPDYKNILLFIENLKMKLGLDDEYDIQCGYEAGCLGYSLYTQLTAAGVKCVILAPITMLTPQGQRVKTDARDALMIAQCLSYGGYHAVYIPTEEDDSVKEYLRMRDDHKSALKKIKQQINALCLRHGHHYDGTKWTVKHVSWLRKLQLSPLYRETLDEYMASYDEQTAKIERFDKRIEELASQKSYAEKTKELGCFLGIKTHTALSLLVETGDFSRFAKGNIYAAFLGLAPGENSSGEKINRTGISKAGNSHLRLLLTETARGGYARAP

SEQ ID NO: 370949 - protein, 392 aa, unidentified
MYIVGIDIGKNHHEASIVSPEWKQIGHSLRFATTHKGADSLMSFIFNNIGNSSCIFGMEATGHYWYPIYSFLKARGYTIYVINPIQSDSLRKMYIRQTKNDSIDSFLIAEVIRFGQFTTTSMADENILAMRQLCRYRDSVISSRTEIKLRISTIMEQIFPEYEKQFSSLWLSTSMGILEKYLTPENIENAPIDELFEIIKDKSHNKLTMKKAISIREAAADTFGIKIAQDAFSFQLKQLIDRMNFLDKQIEALDCQILEYYEKFDCYLHTIPGIGMIAAATILAEIGDINRFKSSSALVAFAGIDPTVRQSGEFSSTHNHMSKRGSPYLRHAIFLAATTCSFHNSPLNAYYKKKREQGKHHLTATGAVARKLTTVIYAVLRDGKPYEPKSFC

SEQ ID NO: 370950 - protein, 362 aa, unidentified
MLKRSLAVIWVVKPMRQETKVYVGLDVHKEFCQACVMNGSGQVISNERFLSTQEALDKYLDRFEDAEFVLESTGIWEFIYEGIEKRGFEVVMAHPLKVRAIAEAKVKTDKVDAEMLAHLLRADLIPRSHVPPRDIRNLRQLVRHRAYLVRQCTSIKNRIHAELLRRGIRRPDDLKKTFTFKHVGWMRSLGILTITSSLNCLEGIQEQIREVESFLLAEYNSRKDAQLIATIPGIGFYGALLILAEIDDVRRFPGPEKLCAYAGLVPTVHQSGSRGHNGSITKNGSPHLRWILIEAVHVHTNYCPGSKLSKFHAKVAQRRGKQRATVATARKLLHTIYWMLLTKEKFHCQGFNLVEKAATLIA

SEQ ID NO: 370951 - protein, 408 aa, unidentified
MDVIVERVGALDVHKAQVTACVRVPQKRGRASEVAEFKTTVRGLLVLRDWLVSHGVTQVAMEATGDYWRAVWHVLEDDFELLLVNARHVKQVPGRKTDVKDAEWLCQLAEAGLLRASFVPPKPIRDLRQLTRYRKAQIQERQRAANRLHKTLEDTGIKLDCVATDILGVSGRLMLDALVSGTTDPEVLAELAKGKLRKKLPALREALEGRFDSLHALLVGSILAHLDFLDEQIERLSDAIEQQLGPFAPAVELLRTIPGVERRTAEVIVAEIGTDMLVFPTAGHLASWAGQCPGNHQSAGKRTSGRTRKGSKWLNQALKDAAMAALRTNDSYLQALYRRKKSQLGHGRALGAVKHSIICACWQMLSTGELYTDLGGDYYSRRDPERQTRRLVAQLERLGHTVTLREAA

SEQ ID NO: 370952 - protein, 373 aa, unidentified
MGCQAWGEAASLTTMITDDKTETNKSYDTIKLGIDAHAKWYYVARQLDGATPQPVQKMTFEALLRFVAKQQALAGEVHTCYEAGAFGYHLHRKLEALGVNLVVQPQDWDKRGKGVKTDRIDALALCQRLDRYVRGNRKAFSVVRVPSEEEERERAFSRQRQQLVRERQRLQAMGRSLLAMQGIHVRGKWWKGQTWAAICREAPAWVVERLEVFMKLIEPVEVEERKLTEGIQKVGRKSRIPKGVGPLSFEVLRREVGDWSRFNNRREVSSYTGLCPREHSSGGKRRGGSVNKSGNPRVRAMLVEMVWRMMRWQPGYHALRKWMAVLGDASRSAAVRKKAIVAVARQLAVDLWRLFTGQTTAEKLGLIYLPEAS

SEQ ID NO: 370953 - protein, 371 aa, unidentified
MGHHSEAFIGIDTAKLRNAVAIAEAGRRGEVRYLGEVDSSEAATRKLVAKLAAKYERLSFCYEAGPTGYGLYRLITSLGHECQVAAPSLIPKKPGERVKTNRRDAEGLARLLRAGELTAVWVPDDRHEAMRELTRARDAARQDLTRKRQQVSSMLLRLGRHYPGLKTWNARHRSWLANLKLDHREQRFVLEELLQAERQAGERVERLEQAIREALADWSLGPIVPALMAMRGIDLVGAVTILAEIGDLSRFKNPRQLMAYLGLVPSERSTGESVKRGSITKAGNGRARRALVEAAWAYRHPPRVGYEKQPQVAAAPRRAREIAWKAQVRLCKRFRMLSRGGKKSTVVATAIARELAAFVWAIARESHPSRA

SEQ ID NO: 370954 - protein, 360 aa, unidentified
MGFAKIIALDLGKFKTVCCVMNALDRTHAFETIEMSPANVHDLVLRHVTDVATDTLVAFEACDCAGWVHDVATALGTSVIVVNANDERWRWRRVKRKTDRDDALKIARLAALDQLSAVHMPDPPARQRRRLMIHRRSVVSRRTQSRNAVRSIFSQQGIALARGGKQWTIAGVAQLREHARSIAACADVNDLWRGRLQVELDLIAATDAQLKLLDARLDELSAGDPRVTLLRTFKGVGPRLAEAVVLYLDDPNRFASAAAVASYAGLVPRQIESGTMRRFGHITGRGPGLLRSLLVEAAWTVYRCHDWARAFVDHVSAGGRARRKLAIVALARRVLIICWGMLKTNTPFRPPRTRTTVAFE

SEQ ID NO: 370955 - protein, 343 aa, unidentified
MHYLGCDVSKQKLDFCLLIESKNDKDQGTLRLRSKCKTVANTAAGIKEFVNWLKRNDVTDVSCAHVAMEGTGVYHEIAAYELTKYDVTVSVCNPTQTKNFGKGIGIQNKNDTIDSYVLAYYCQKANPRPWIPPSPEAYTLKALIARTDAITCDLVREQNRAEKAAATQTPDVVMCSIQNGIAFLKTQLASIQETIDEHISSHENLKQDMRLLTSIPAIGKRVGAAMLAVLHRYSFDSAEQLAAYLGLVPITRLSGTSLAARPRTSHQGPKRLRSLLYMAAVCAIRKNGNPLVHPLYERLLAKGKAKKLALGAVMRKLVHICFGVFRNKTPFSAPTALRASLQS

SEQ ID NO: 370956 - protein, 390 aa, unidentified
MQNVADRPGASTAICTNLGAIFVSLELSRSTWLVTSLSPGGGERMSRHSVTGGDVAALLARLTDLQGKAQVRTGRCFPIVVIQEAGLDGFWIHRALRKEGVESHVVDPASIAVQRRRRRAKTDRIDGEALVRALLAYKRGEPRVCAMVNVPTPEEEDRRRLCRELKSLIGERIRHANRLKGLFFAQGITGYEPRRQDRRERLEDLCTGDGRPLPPHLKALALREIEVLELLTRQIDTVKAERNALLAAERAADPTSGRVEMMLRLKCIGPGIAGALWSEGLFRHFDNRRQLAAYAGLAPTPWQSGSIDHEQGVSKAGNPRLRAMMVELAWLWLRHQPDSALSRWFHERVRHNGGRLKKTTIVALARKLLVALWKYVTAGIVIEGAVMKPV

SEQ ID NO: 370957 - protein, 435 aa, unidentified
MNCIDDIRLEQFRQLKNEIRSSDQYLIIGIDVAKEKHHAFFGTAQGKTLAKNLIFDNTIEGFEKLDAYVERIKVQYSLPKVVFGIEPTANYHKPLAEHLIKCGWMVVLVGGTAVKDNRRLLNGRWDKNDDKDSANVADLIAQGKCMFCEYPLMTLRNVRVLNALKRRLKKREHGISSYIRNHLLAQYFPELDKYYGPLETLAVVRDCLDPSVIAGMEYDDFCRTVAPGKMTLAQERRVGAMWRAAVNSVGCTMGEAASYEAQLAVDSLKQVRQAIKGVEDKLEDACLEFPEYTYLLSIPGFGPDVSAKVLGAIGDPHRFTSGKQVLRLAGYDLCANRSGKTSTRATPVISKQGKADLRYALYQAALVASFKHKDFISYFTEKLTGRAKEKGIGTKMRVKLAAKLLIIAWTLMKKKEFFDPKYLTLRNRGVQKTAA

SEQ ID NO: 370958 - protein, 395 aa, unidentified
MKMNGKITGIGLDSHRMFSSVTARDAEGKIVWRKRLEHADRGPLREELRTWPEGTPVVLEGTFGWGWLSDELSAAGLEPHLASSKKVAAWRDARGLAKSNRTDADLLSELWSQQPRWWEVWLAPAEVRSQREWLRYRMTLVRLQTGLKNRIHAILHRHGMVHGETDLFGTAGRRFLNLLVAPKDATLPDSGRAMLKGYLQLLDQLRGQIANVTREVRGQITRTPAGERLRTLPGIDYILGYTILAEVGRIERFRSAKHLASYSLMAPRAYDSGDDDGEAPKGRHVGHAGRRTLKWAWIEAAHGAVRSGGRFREIFDRRTHGGTRDRNRGYIAVGHELCRTAYILWKKEIDYTDTPPPRPGRGKHPRGLRRAAKGIAGRSRPGTGQLEHPMVAVLT

SEQ ID NO: 370959 - protein, 388 aa, unidentified
MNKIIYIGMDVHSTNFTLCSFEPGYGFEADKIFGQTQIKEDIFNSTVKYINKLKSMRPDVDVVCGYEAGCLGYNQHRKLKAKEIESVILAPTTMAVSRNSSKKKNDYRDAITIAKCLASSAYKAVYIPDEKDEDVRDFIRMRDDHKTALKQIKQQLNAFCLRHGHHYDKTKWTGLHLNWLRKLELSKVQRETVEEYLATYEALTGKIAALDVRIEDIASEERYAEKVNKLKCIKGIKTHTALSFVCEIGDFNRFKSADKFAGFIGLVPGECSSGNTERMLGITKAGNRHLRRLVVEISNTYRRGAVGRKSAALKERQKDMPKDVVAYADKATNRCQRKYQRMVFKGKNSNQAVAAVARELCCFIWGMMTGHYSRTAQAEASVYRSELD

SEQ ID NO: 370960 - protein, 370 aa, unidentified
MAKRSMFVGMDVHKESIDISLAEEGRDGEVRHYGGIPGDLEALAKLLKTLRSPTRRLRFVYEAGPCGFGIYRYLTSQGEECVVVNPSSMPKRSGDRIKTDRRDGDALARLHRAGELTAIYIPTDADEAMRDLVRAREDAVGLSTQAKHRLKAFLLRQGRRYPGRAGWTQPYRRWLADLSFPLAPQHIALQEYRDTIDETERRVERLTEQLRQHTPAWRWAPVVEALQALRGVSFVTAVGLVAEIGDIRRFDHPRQLMAFLGLVPSEYSSGPSVRRGGITKAGNPHARRLLAEAAWAYQGIPRIGRQMLYRQEALPKPVCDIAWKAQLRLTSRFRKLVARGKAKPKVATAVARELTGFIWAIAREVSPPAA

SEQ ID NO: 370961 - protein, 325 aa, unidentified
MKFSKLRPCGYSRALQTGEVLPFLNDAQGYRHVLDRLQQLGGPANVLIGMEATGHYWYALHDFLTRQGYRVEVLNPIQTAQQAAMGIRKTKTDRLDAHHVAVLLKNGGQRPAPVPGELAMTCRQLTRLRYSLVRQGSRIKQILWSRLQPVWPEYETLFANPFSPTGRKLLAAAPTPTDVLALGHQELADLIRRASRGKFADAKAQQVLQAALTTIGMQRGLPGVRIGIQTLLTTLDALRPVRRQLEADILALAVQIPPYVLTLPGANAIRAVSLYGETDPIGNFPSSDQLVAFAGFDMVVFQTGQYQAPRRRISKRGSPFLRRTL

SEQ ID NO: 370962 - protein, 386 aa, unidentified
MQVISNRRETSGAIRNDLGAIFVSMELSRSTWLITSLSPGGGEKMSRHTLPAGDIGALLTRFSELGQKALMRTERSFPIIVIQEAGLDGFWIHRVLESEGIESHVVDPASIATSRRRRRAKTDRIDGEALLRALLAYKRGEPRVCTMVKTPAPEEEDRRLCRERRVLTNERVLHVNRIKGLLFSQGAAGYEPLRRGRRQRLEELRTGDGRPLPPHLKAQISRELDRLELLLEQIKSVESERDALLAAQQTTPKPAAMLLAIKGVGPESAAILWSEGLCRHFDNRRQVASYAGLAPTPWQSGAIHREQGVSKAGNPRLRTTLFQLAWLWLRHQPQSALAIWFKERVNRNGGRLKKTTIVALARKLLVALWRYVTAGVIIEGATMVSA

SEQ ID NO: 370963 - protein, 352 aa, unidentified
MKIVALDLGKFNSVACIYQAEDGVHEFRTIKSDPAAIHDVLLASEAKRVVIEVGATSGWVKDLAEAMGLEVEVANVNAESWQWKKRKRKTDRDDALKLAVLSARGELPKVYLPCRRVRQWRSLIGYRQDLVVRRTAIKNRIRALLTQEARVQPGGKKGWTDQAVEKLKGEARGIAQCSTDELWRGILQMELVQFDAVEGLIGEVEKKLEALSKERAEVKLLETIPGVGPRLAEVVVAVIDDPRRFNNRKQVGCYAGLTPRQFESGTMIRQGRISCQGNRLLRALLVEVSWLMRRWNDQFWKIFQTVSKGSKQRRKAAIVAVARRLLVTCWAMLRDNKPWRPAAGLTGEALAA

SEQ ID NO: 370964 - protein, 318 aa, unidentified
MPNAGPLFVGIDVAKADLAVAVRPGTEAWTVSNDDAGIQALLARLRSRAPTLLVLEATGGYERALVAALATAGLPVVVANPRQVRDFARATGQLAKTDALDANILALFAERVRPEPRPLSDDATHALDALLTRRRQLLEMLIAERNRLTHAPTAIRRDIAQHVRWLERRLRDVDTDLDQMIQASPVWRATENLLRTAPGVGPVLSRTLIGDLPELGSLNRKQIAALVGVAPLARDSGTLKGKRLVWGGRAPVRATLYMAALVATRRNPTIRAFYQRLLATGKPKKLALTACMRKLLIILNAMARTQTAWRPPLNPELA

SEQ ID NO: 370965 - protein, 361 aa, unidentified
MKKVSSELPKIEAGIAKPEMTVGLDLGDRYSHYCLLNSDGEVVEEGRVKSTEASLRRHFEGEDCLRIALECGTHSPWVSRLLSALGHQVIVANARQIPAITGSESKNDRNDAEKLARFAAFDPKLLSPLEHRSEERQVDLNLIHARSTLVRARTMIVNALRGLVKSAGGRLPACSTEFLPARVLAAIPPVLSAVATPLVEQIGLLNAQVDGMDKQIEKLSAKYPEIVLLRTAPGVGPIVAAAYVLTLGQPDAASNRSAGAFLGLRPAQSQSGAADPQRRISKAGDSFLRSLLVQSAQYVLGRFGPDSELRRWGLKLAATGGKRGKKRAIVAVARKLAVVLHALWRSGQRFQPFPQQAAVAA

SEQ ID NO: 370966 - protein, 351 aa, unidentified
MLIVGCDYHPSFQQIAWVDTESGECGERPLMHSTGEAERFYRNLKEQGVKVRVGIEATGHSRWFERLLMELEYELWVGDAAEIKAKRVRKQKNDREDARLLRTLLVENRFPRVWLADQLNRDLRQLLWHRHRLVQMRTRVMNQLQALALNEGVQRKKGLWSQAGRAQLESFQLLPWATRRREDLLKLLDGLTPRIQALTAEVNKQAEQYPEARRLMTHPGVGPLTALAYVLIIGSPDRFRCGKQIGCYLGLIPSEESSANRQRLGHITKQGNSLLRFLLLEAAQAAVRSDVDWRCEFLHLTMRRGRQIAVVALARKLAVGLYWMWRNGRDYEKSLEFSSHVGQPGTGYGVK

SEQ ID NO: 370967 - protein, 480 aa, unidentified
MAKRANQHLQAVPLLQHDPVFLGIDVGKTRHVAGFVSKTLLERHQRFEACPALAFENSREGFQALVERMRALAPLEHYTVLLEKTGHYHKALQQFLQELDIPVYVMHVQQRPSGMLKTDKRDALGLANTLYNQLALGVQVADKAQLVRRAVPPSAAAAQLKGLVRHRYELVREATQRKNKLIAICDEIFPEFTQVLKDPNLPTALAIRERFPTPAALSTASLSALQEVRGKTRQLSDAKLLDLQHLAAQSIGTKDVQRQRGLLIEQTQLIRELRLLQEHVCQLEKEITAIVEQAREGQIVQSLGIGPIQTATILAAIGSIENFPNAGSLKSYCGWSPTVMQSSTTLDYVGQTRGGTRIMKQMMYLIVCGLISRDTEWAKLYERLVQAKCPVDPRTGERSGKLRIIGRIAGQLIETMYALLKTDAEVLSKVPAGKEPPPPLLYDPERHRRHREGHYEPLKVSARRSVLTLLPNGSDKINSR

SEQ ID NO: 370968 - protein, 337 aa, unidentified
MINNFLGIDISKDRFDVFLSFISKKGKRETKKRNFKNDDSGFQGLLDFLQKHNVEQVTICMEATGCYSEALAEFLHNAGYFVSVVNPYCIKSYARSKLVRQKNDQSDAEIIADYCQRQEPTRWTPPSSEKKKLKHLYRCSAALKNELTLVNNHLEKKERLPEKVVNVWENLSVNIEQSIETIKNSIHELLKQHKELLEDFQLLLTVPGIGKESAVAILAEISDIKVFINARQLASYAGTIPRNITSGSSVYAKPRLSKSGSQTLRKAMYFPAIVSKKHNPIIMTFCKRLKEKGKHNMAIVGAAMRKLLHIVFGVLSSRKAFDPDHIKNYKARRLAEV

SEQ ID NO: 370969 - protein, 317 aa, unidentified
MTHTSRFVGIDISKSSFDICILPEGQMASFANTAEGIAGFIALMAGLVGIERLVLEPTGGYERGVVDALLAARLPVAKVNAGQVRQFARACGQLSKTDRIDAFVLADYGRRMESKVLAPSSPGQTTLADLVSRYRQLSHMIVQEKNRREKRTRNADGRTRAWIEESLRFLLEQRQSVVDAMTACLKADAALKSKADVLMSLKGIGLRTACFLMAGLPELGLMDKGQVAKLVGVAPLNRDSGLMRGKRMIAGGRRPVRDALYVAALPAIRFDPDMKALFQRLKAKGKPGKVALVAVMRKMIVILNARMRDHKATALDA

SEQ ID NO: 370970 - protein, 316 aa, unidentified
MTDNSMICAGIDVGKSHLDIAIHPDDARLRVTYDTAGLKALDAFLQEHDVSRIGFEASGGYEWRLMVHLRAGKRPAARLQPAQLRFFAKSRLRRAKNDQLDAALIALFTASIEQLPALPDARFDRLAAELTYVEQIEQQIALVKTFAETALSEAVKRRHAREIARLETCRKARLLRLEKTVRDDCDLARRLDLLISIKGIGLRSALCLIIRLPELGHAGRAEIAALAGVAPYDDDSGKHHGRRRIQGGRERLRKSLFMCAFTATRHNPDLASFYARLRSNGKEHLCAVIAVARKLIILANAILIRNTEWTPQYQQN

SEQ ID NO: 370971 - protein, 354 aa, unidentified
MVHVGIDLHQKTCFLHALDDQTGEICLDQEVPSERQALLDCLAPLRERGPLRLIIEACGFAGYWWDQLDPLGEVVAVHPKHVKDYRGNKRKNDRRDAAFLVALSQLNRLPRAYLGTTAERDLKDLLRYRVGLVRVQTRLRVRLRNVAQRYGSVLAASDVDSAKARRLWEEWPLRETHRLIVEQLLAILEEVGRKLAVVDARILAAARPDRRVELLDTLPGLDYFGALLAAVEIGDWQRFHSGDAVACFAGLVPRESASGGHIQRGRITKEGSPYLRWIMVQAALHADKSPRLKRLQERVAKRRGPMQARVAVAREMLVIAWHMLRDDKPYEERAPRESGGRPTSSGKPESPLTR

SEQ ID NO: 370972 - protein, 396 aa, unidentified
MLYLAIDQHRKQLTVNLRNEAGDVILKRQVSTEWKRVREFLEDVRNRSVPEGGFVTIVEVCGFNDWFLKLLAEYGCREVVLVQPEKRTKNKTDRRDANALGELLWTNRQRLLAGKKVQNVRRIVPPSPREAEDRQLTALRQRLGRLRTRTINRVQHLLLKHNLQQECPTKGLQSQRAKKWLAELSLGTMDRLELDQLLAQWELWDRQLAELEPKIHQRQAENPTAAIIATIPGAGAYGSLALACRIGAIERFPHARSLAHYWGLTPGCRNSGDATRRLGSITKQGSALARFILAQMVLHVLRRDPRMKEWYQRIKKRRGAKIARVAVMRRLATIIWHMLKHQQPYRPGGKDRGVSDPGCGCQPPNVKAFLEAVQGRSRGGKQTGCPDSGARAAARP

SEQ ID NO: 370973 - protein, 355 aa, unidentified
MKIMRIGIDLAKHVFQIHGVDAAEKVVCQRQLRRHQMAGFFHKIEPCLIGLEACASAHYWARLLQNMGHTVKLIAPQFVKPYVKTNKNDANDAAAICEALSRAHMRFVPVKTVEQQDLQALHRIRTELVHQRTAKVNQTRGLLAEYGVIVPPSVQQLRKALPELLEDSCNSLTVRFRQLLAGLQQDLRYLDERISQLDYAIQREATENPAARKLQQLRGIGPITATALVAAIGDASVFKKGRDLAAWLGLVPRQHSSGGKERLLGISKRGDSYLRMLLIHGARAVIKTASDKKDRLSQWIQLLCQRRNKNIAAVALANKTARLVWALLVRDNNYDPEYRVHTQPPTDLVGSDMSA

SEQ ID NO: 370974 - protein, 387 aa, unidentified
MAGVVIGVDPAKRSNTIEVLDSAETVLLTARFENTREDYRRMLALVKRWPARKWAVEGATGVGLGLAQRLVADGERVLDVPSKLSTRVRAIDTGHGRKNDPTDAHAVAVVGLRTTGLREVVVDDEAVVMRLLSQRRRDLVRSRTQAVNRLHQALMQLIPAGARKKLTVDKAKTLLATVRARDAAGKARRQLAVDLIDDVAVLDRKLDAVDKRIAEAVKSSTTTLTDIVGVGPITAAAIIGEVGDVARFTTSDQFASYTGTAPLEVSSGDVVRHRLSRAGNRRLNNALHVIALSNKRHDPRGKAYYQRKLAAGKGKKGSLRCLKRRLSDVVFRTLVEDRARANPGGQMGATLTASAVDQIPKANTSDKPQPGFTAEASPVTRPAKAAS

SEQ ID NO: 370975 - protein, 417 aa, unidentified
MAEEIEWFVGIDWASQSHQVCLVDARGECLGERAVAHGGPGIEELCDWLIARTGATPEVIGVAIEMTQGPVVEALLERGFCVYGINPKQLDRFRDRFTVAGAKDDRRDAHVLADSLRTDRHAFRRLSNDEPVIVKLREWSRMADDLQQERTRLASRMREQLWRYYPQMLELADDLAADWFLDLWNQAPSPAKAARLRQTTIERFVKAHRLRRWQAPEVLRILKQKPLSVAPGVVEAASDHIRTLTVRIRLVNQQLKAAHRKLDELCAQLTPSEENEPGQQCEQRDVVILRSMPGLGRTILAVLLAEVWQPLRRRDYHALRSLSGVAPVTRRSGKTCVVVRRYACNKRLANALYHWARLATQHDALSRRRYAVLRQRGHSHGRALRTVADRLLSVACTLLEQQTLFDPTYEVGDAAGA

SEQ ID NO: 370976 - protein, 361 aa, unidentified
MLKPIQKFSHIFFKLLKIQIMRFTLALGADMSKDWFNVCLMNKQFEVLFEKQVINRSDEINVFISEILERQDISSIGSLLLCVEHTGLYIQNLVRGWISKGGQLSVVGANQISQSMTGPGGWVDKTDTLDAHRIAEYAVRFSDKLKCYQMKDHSIEMLQRLQRQRTRLLNVLYQLQVPVKESTDFDRTTIVEQIVQNQAGTIAAIKADLKTIEKQIQTQIDRDPYLNRIFKLTKSVAGVGPVTATEIIIATEGFTKFDADQAKKFARYSGVIPLPHSSGTSIRKKRKTTMRANGRLKRLLTMGALSVIQIPGEMQQYYQRKKKEGKHHMCVLNALRNKIILRVFAVVRNDTMYTKEFKYLQ

SEQ ID NO: 370977 - protein, 438 aa, unidentified
MSNKVFFNLDDLFISVGIDIGADFSWMSIALPNQQFVGKPYKILHNSIDSLTTAVSKIKEAEELYSLESRIFLESTGIYHYPLFCYLRDKGFNCSVINPIITKNSTNINIRKVHNDRFDSKKAALVGLKPDLKVSLMPSDLALNCRNLCREYYDLMDNRSAYVNKLQGELRMVFPQYLDIFSKVTINTSLTLLETYTSPSAFLKADKQEIIDIIKSTARFGLTYAQNKYNAIIQAATDANQFGYIIDSNIKRIRLYISFIRKYDEEINNILESLHELVDANEDADFVKQIHLIETFKGAGFLSAVSIMGEIGDFSAFSKPKQLFAYFGLDPAVKQSGKFEGTKVQMSKRGSAIARRVIHTLTLQSISISRNGEAKNPVLCEYYLKKCDSKPKLVAMGAVSHKVCNMIFAILRDNKPFKIIAPQEHIKQYNAAKCDIAA

SEQ ID NO: 370978 - protein, 440 aa, unidentified
MPVLNPEAAGIDIGATEIYVAVPADRDPEPVRMFATFTQDLNELADWLQQCHVRTVAMESTGVYWIPLMQILEMRGLEVYLVNAKHVKNVPGRRTDVSDCQWLQYLHSVGLLRASFRPEQDICAVRSLLRHRASLVDMATCHVQHMQKALDQMNLQLHHVISDITGTTGLAIMDAILSGNRDVQALAALRDPRIRASHETIAKSLVGDYRREHLFTLRQSIELYREYQRRIAACEEEMQRLMKSLETRADPTVNLPAAKDSVRKCKVMPPARAMALREEAYRILGVDLTTIPGISVLHVQCILAELGGDITKFRSAGAFSSWMGLCPDNDISGGKVLWSGTRKINNRIAATLRMAAQSLQKSESALGVFYRRMRVKLGAPKAITAAAHKLARIIFHMLTTRQAYDESVFAKAERTHIQRMENRLRIQAQALGYTLLPAQS

SEQ ID NO: 370979 - protein, 466 aa, unidentified
MEPFYLGIDVSKGYADFMIINSKKQSVAQAFQLDDTFEGHQTLYNTLGAFMAKHDNATLFAGMESTGGYENNWYNALIQFQGALNIQTARLNPLGVMHNSKAKLKKNTTDKISAQNIAEYLVAHPEKVNYQQEDNLAGLRKQWGFIRMLTKQCTQFLNQLNSLLYLTYPELLSYCQDGVPNWVLKLLVKYPSAANLKRAHAKTVAKIPYISIEKAQVLIAKAKLSVASATDLTTQQLVVATVQQILHQRKTIAGQTSLMIQECSIPEIELIKTFPGISDASAVGLMIEIQTAKRFASAKNLASFFGVHPVYKTSGDGAGGYKMSKQGRSEPRRILYMVALSAIRCNPLIREIYEKHKRQGKHSRAAMGICMHKILRILYGMLKHNQPFNPHVDLANRLRSVPMQNDSAIDKTSRRLQDYDQAAPVSRRQRKKRLERERSHNVNDTKSGITAPAPLADIIAEMLPQL

SEQ ID NO: 370980 - protein, 366 aa, unidentified
MDVHAETIAVAVAEPDGSVRSLGTIANRAESIRKMVKKLGPVEQLMACYEARPTGYVLYWQLAELGVACEVIAPTLVPMKAGDRVKTDRRDAERLARSYRSGDLTPVWVPNERFEALRNLVRAREAAKQDQLWARHRLSKFLLRLGQRPAAWMKAWTLQYMARVRQLRFAQVAQESARLDYLHEVEHMAERVKRLEQAIMEAVKLASPAVQEVVKGLQALRGIAQISAVTIAAKLGNITRFAGARQLMGYSGMVPSESSSGGRTQRGRITKTGNAHLRRIAGEAAWSYRLKPGMGPALRKRQEGVPEEIKEIVWKAQHRLHTRYMRMAAAGKDQRKIITAVGRELLGFVWSIGVKAETAARLRMAA

SEQ ID NO: 370981 - protein, 357 aa, unidentified
MRPLQRNLMKIDEVILGVDTHLNVHVGVLISDSGKCLGTLSVTTDAAGYLKLITWARSFGPLHRAGVEGTGTYGAGLARVLRAHEIQVLEVNRPDRATRRFRGKSDPTDAENAARAVLSGMATAVPKEQSGAAEAMRSVSITRRSAVKAKTQAINQLRALLISAPQDVRQKLWKENTSDCVTGCSRLRSLGSTPLLQTLTATLVLLAKRWLALEDEIKALDAMLDSLTTQYAPRLRRRFGVGPQTAAVLVAVAGDNPERLKSESSLAALCGVSPLQASSGKTVRHRLNRGGDRSANNALWTIAMVRMRSDPRTRAYVDRRTKEGMSKKEIHRCLKRYLVREVYPLILEDLAASAQHS

SEQ ID NO: 370982 - protein, 315 aa, unidentified
MTQARVLVGIDVSKARLDVHLHPRGEAFVLANDRAGWRALVVRLRKLGSIAVGIEASGGYEKGPAHHLVRAAIVVYVFDPAQVRSFARGLRRHAKTDPIDAAMIARCLEATIEDAIPYQPDPLAQRLAALVGYRAKLVAEGTALKGYQDTLEEPLVRRMVEARRVGLKLVIARLDKAIADLIASTAVLARRFRLLVSVPGAGPVLASTLLALLPELGRIGAKAIAALVGVAPFSRQSGNTDRGGRCRGGRGAVRAVLYMAALSAIRCGNPALARFYDRLRRAGKPAKPAIVATMRKLITILNAIARDQRPWAPQP

SEQ ID NO: 370983 - protein, 455 aa, unidentified
MADTSAGIDGVEEEIEQAAEMVERVAAIDIAKASGMVCVRLPHEDKPGKRVQRVFNTLATSGAILDLGDHLICQGVTRVVMEATSTYWKPFFFLLEARGLECWLVNARDVKNVPGRPKTDKLDAVWLAKLTERGMLRPSFVPPKPVRELRDLTRSRAVLTHERTRHKQRGEKLLEDAQIKLSTVISDIYGVSGRAMLEALIAGERSPKALAELAHGTIKASPSTLAEALTGQFEEHHAFMLRILLDTIDYLSVQIDKLTARITGKFAELSDLSADTEDHHSDDEPGQGLLMPLSDTERLDEIPGVGPATAQVILAEIGLDMSVFPTAGHLVSWAKLSPRTIQSGGKNTSGPTGKGNPWLRGALGEAAISAARTDTFLGARYRRIVKRRGHLKALVAVARSILVSVWHLLNNPHTRYRELGADFHTRNLDPQRKTRDLVRQLKALGHDVALTPAAA

SEQ ID NO: 370984 - protein, 315 aa, unidentified
MTEREKEVFVGIDVSKDKLDVAIRPSGELMSFSNDEDGIAMMADFIKPFLPILVVFEATGGLETAAVGMLTAGGLPVVVINPRQARDFAKATGKLAKTDAIDAHVIARFGEAVRPEVRPLKDEETKKLNALLTRRRQIVEMITAEKNRLNRPTPWTHKDIQKHIAWLEKCLKKADKNLNDLLKKSPVWREKDKILRSTPGVGPVLSMTLLSNLPELGTLNRKQVAALVGVAPLNRDSGSFRGKRMIWGGRASIRSVLYMSVTCAIRYNPALKEFYKRLRDAGKFHKVAMTACMRKLLVILNTMIKNRTCWGAVTA

SEQ ID NO: 370985 - protein, 369 aa, unidentified
MWFLGIDWAEKHLDFCLENPLGNVVIRSRVENSDYGFNSMLNLISQQNVSLTDVVVAIESPHQRVVDFLLVYPVNPKAVYDYRKSRFPSGSKSDTADAQLLSDYLREHHAHLRVWRLAEGELRQLSLLVEDRDKLVTEKVRLQNQIRSTLLGYFPQAIEAFSDLTTQTAIEFLSLFPTFESTQGRTEADWKTRKDEQRCFHPQARQRFLSAMKLKPIKNDEPVVKAKSLFVTTIVRQLKIVVRSLTEYNQQIETLLNKFDDGNRFRSLPGVDIILAAKLLVAFFPARERFASACELQTFFGTAPYTKGSGQYRSVHFRLACHKGMRAACKQMAIASLRSSTWAKSYFTRKRKEGKRAYHALRCLANCRL

SEQ ID NO: 370986 - protein, 358 aa, unidentified
MVDKVTKAAVVGGVDTHKDLHVAAVVDQNNKVLGTQYFSTTRQGYRQMLAWMTSFGTLKRIGVECTGTYGSGLLRYFQNAGLEVLEVTAPDRMEQRKRGKSDTIDAECAAHAAFSGIRTVTPKTRDGMIESLRVLKTCRKTAISARRVALQIIHSNIISAPDELREQLRNMTRMQLIRTLGSWRPDASEYRNVTNVYRISLKSLARRYLELHDEIADLDVMIAAIVDELAPELIKRNAIGYESASQLLITAGDNPQRLRSESGFAALCGVSPVPVSSGKTNRYRLNRGGDRAANSALHIIAIGRLRTDAKTKEYVARRVAEGHTKMEAIRCLKRYISREVYTLLRNQNRRINSIPITA

SEQ ID NO: 370987 - protein, 363 aa, unidentified
MPDVICSAPADVRLWVALDVHKFSIVAAVLPPTGGRPQVTRIETTEKAIRRFIKTLGGPNGLTVCYEAGPGGFALWRLLTSIGVACDVIAPSLVAVRAGDRVKTDRRDAQKLVSLFRGGLLRFVQPPTPETEGLRDLLRCRDDIRCARTAARHRVAKQLLRHGRIYREGKKAWTLTHRTSVARQRLDDTLAHEALSQMLTHLDSLDRQLGALDAQLEQIAEREPWGWQVHKLRAFRGIATLTALGLIAEIGDFARFSHPRELASWLGITPSEYSSGDQQHRGHITKSGNRHARRLLTEAAWHYRRHRTGRQTPATTTMTNQQHKSRSALDSGVHLRTGSADPSARSVLRAARSPRPGLTRCGP

SEQ ID NO: 370988 - protein, 342 aa, unidentified
MERKLGNIKYFVGIDIAKATFNYCVRYGGGQVINGKTANQLESIHEFLSMLKQIPGCQVSNVIFGMEVTGVYGNVLIEALSKLKAKFVVEPALRIKNSLGIIRGKNDKLDATRIARYLIKNLHELKLWVPKRKIIQEMNSLSTLRQRIIKIQGMMTVPLKEDKEFINEPILKVNNELCNPTLTELKKLITNIDTHLKQLWTQDEQCKRLMQIMLSVTGIGPVTALQILIHTNEFKSITNPRAFASYCGVAPFEYGSGTSVKKATRVSHYANKKIKSLLHTGVIVLITHDPDTKAYYKRRVEVDKKNKMSTINAIKFKLICRIFACVRGDRLYDRNYISAQME

SEQ ID NO: 370989 - protein, 397 aa, unidentified
MYIVGIDIAKRKHEAAVIDGEGAVIIKPFSFTNNCSGYNRLLAMLAKAKLPLDEVSFAMEATGHYWLALFTRLQKEGFRVQVINPVQTNSIRSFYIRQAKTDPRDALLIAEVIRFGHFSESTLHPENIYELRELCRGRHAIVSMQADVKRKVVALLDQVFPEYETAFTNMFSDTSMAILQTCPTPKELSEMPLEELCHLIEVSSHKRFRMVKAQELQELARNSFGFAMAGDVFSTMIRLYAKHLDFLKQQVKEMDRKITEIMDTLDTPITTITGIGPTLGAYILSEIGDISRFSSAAKLAAYAGIDPTMRQSGEYNGVRNRMSKRGSPYLRHAIWLAASSAVLHDPALKLYFQKKRDEGKPYMASVGHACRKMVSIIYAVMRDNKAYTPYIPNEISA

SEQ ID NO: 370990 - protein, 339 aa, unidentified
MELYSGMDLHSSNTVIGIIDEKRKHLIDRKLPNDPELIRSFLKPYKPELKGIVVESTYNWYWLADLLQEEGYRVHLSHPVANEQYNGLKHSDDKHEAFWLAELLSLGILKEGYIYPRQVRSLRDVLRKRAHLVRVRTALIVSLQHMISRNCAVKVKTGDIKRLTADLISPCLKKEEALLLAGNTSKEVIDCLTRQVDKIERWALKRLCREGVFIRLVTLPGVGDILGMTILLETGPVSRFRAVGNYASYCRKVSSQWTSNDKVKGRGNIKNGNKYLAWSFSEAAEHARRSNEACRRFYDRKLRQTNTKVAHNALAHKLARAAYYIMKDQVSYEEEKMFS

SEQ ID NO: 370991 - protein, 411 aa, unidentified
MHNRQNYLYVGVDLHKEHHTAVIINCWQEKLGEIQFENKPSAFSKFLLKVETYVSAGVSVVFGLEDVGGYGRALAKYLVDHEQVVKEVNPALSFLERKSHVTTQKSDSWDAECVARILINKLNQLPDAKPNDLFWSIQQLVSRRNALVKAQSALKNQLHIQLNHHYPSYKKFFSELDGKTTLAFWQQYPSPSCLEGANIKQLTAFLLDVSNNTCSVKKASDILKLVKEDGQTMKEYQEMRKFLVRSIVREIEFKKKEMKYIERELKQLVNLLDYQLETMPGIELVTASALIAEIGDVRRFPNPNKLARFAGVAPVYFGSGGKGKTHKSKQGNRALHALFYNLAVQQVQVAKGSKMPRNPVFHAYYQKKLKEGKTKGQALVCIMRRLVNIVYGMMKYKTAYELPIVEEKEVV

SEQ ID NO: 370992 - protein, 355 aa, unidentified
MDNRKYIGMDVHQASISVAVRDAAGKLLMECIIETKAATILEFIQGLHGSLWVAFEEGTSAAWLYDLLKPHVAKVIVCDPRKNALLKAGNKNDRVDARKLSDLLRAGLLTPVYHGESGVRTLRELGRSYLTVTQDLTRVMNRLKGLYRSWAIPCAGQQVYSPRQRSAWLEKLSEAGVRRRAERLYQQLDTLVQLRREARQELLAESQKHPASQLLRQIPRLGPIRVALLIALLQTPHRFRTKRQLWAYCGLALQTRSSGEYRFTGGQLQHSKRAQALRGLNANHNHDLKNLFKSAATQAGACQDPLGDFYQNLLATGMKPAMARLTLARKIAAIVLKIWKKGERFDPAQLKRQAA

SEQ ID NO: 370993 - protein, 317 aa, unidentified
MKKHSILCAGIDIGKRKLDVALDGKEERLQVANTDDGHRELTTWLRRHRIKRVGMEASGGYEQAVVSRLRRDGFVVVVFQPMQVRAYARFHLQRAKNDKIDAALIAACTVEAKKIHAPPDPRLVALAGQQTLIDQIVDQIARFKNYREACRDPRSAQFWNDEIKRFRGLFKKELQQLVAAIRRHPDLAERLKLIASVDGIALRTATTILVRLPEIGRLSREQVAALAGLAPFDDESGERIGERHIAGGRERLRNNLYSAALAASFHWNAELIALYKRLTAAGKEHKVALVACARKLLIFANAVVARGTPWMSRAAAC

SEQ ID NO: 370994 - protein, 363 aa, unidentified
MRFYREQRRFYCGIDLHASKMYVCVLDDQGTVVLHRNMRTEPDALKRALAPYRESVVVGAECMFSWYWVADWCREEGVEFVLGHALYMKAIHGGKAKNDRIDSEKIARLLRGGTFPLAHVYPKEMRGTRDLLRRRNLFVRRRAELLAHVQNTFTQYNVPTASGKGRDRVREGDVGSSFEDPSVQVMLDADVEVIEQLDETIVDLETHVLKHAKVHDAARLHLLQTIPGVGKVLSLVMLYEIQDVNRFENIGQFASYARLVACAKESAGKKQGSGGRKIGNAHLKWAFSEAAALMIRSSPEAKAFMEKMTRQRGKARAVALVAAKIGRVAYWIMKRKQPFDARQFWKNSLPKGMPTVEGAAMTP

SEQ ID NO: 370995 - protein, 410 aa, unidentified
MLFIGDDWAEAQHDIEIENDQGQVLARRRLPEGLAGITGLHELVAEYLDPAGEPDQVLVGIETERGPWVQALLAAGYVVFAINPMKVARYRERHSTSGAKSDAADAHLLAEMVRLDRAHHRPIAGDSEIAEHVKVAARAHQTMIWSRVRQVNALRSLLREYYPAALTAFGTDLAGRDALAVLSAAPSPDRGRRLSQARIESLLRKAGRQRNIAATAAKIRTALTSEQLSARPGVVPAYAASASALIAVLTTMVAQTEVLAGQVEQGFGRHPDVEIYRSQPGLGVILGARVLAEFGDDPDRYADARRRKNYSGMSPITKASGTRRVVLARYARNRRLGDALFLQAYAALRVSPGARAYYDEHRARGATHYQALRAVANRLVGILHGCLASHTCYDEHRAWHTENRQEPAAA

SEQ ID NO: 370996 - protein, 421 aa, unidentified
MTPPNEVVWAGIDTHTDTHTIALLDERGRPLGAETFTADPDGYDRLIGMLPGPGRVAAVGVEGTNSFGAALARRLTAAGYEVREVLRPRRSVRRRDGKSDPLDAVAAARSVMAGDGTSLPKSSDGWVEALRHLNARRSQLVSAMTAIPDSTNGLLAAAPEPIRERYRGLRGETRMNRLAECRPAGGLVERSVLAALKSAAKAWKALKRQAGLLEERMRLILEEHARPLLDMYRAGTVIAATLAIVAGDNPERIRSEAAFAKLCGVCPIPASSGRTNRHRLNKGGNRQGNMALHRIAIVRLRYHKPTRDYMAKKTREGKGKLEIIRCVKRFIAREAYRALISIRNGEVGRGTPAERGAKLRELRVSRNITQQQIGEALCVPSSRISEIERGARDLPELEQRAIQWIHSTTNPKQHTQTLDNV

SEQ ID NO: 370997 - protein, 408 aa, unidentified
MEVVFRCCCGIDVHKKMIAACLNKGGKQEVRGFGTNTSDIRLLANWLTEEGCEMIAMESTGVFWKPLYNLFELLGLNSIVVNAAHMKALPGRKTDVKDAEWIADLLRHGLLKASYIPDREQRELREIVRYRKSLIEERAREINRLQKVLEGANIKLSSVVRDINGKSSRALLDKIIADNMPDAEELTQILHHKLRPKLDQIMLSSEGVTTPLQRRLIAQIVDHIDDMTRRIEDLDKIIEEYMEKFEAAVAIVDEIPGIARRSAEVIIAEIGIDMGRFPSAAHLCSWAGVCPGNHESAGKRQSGRTTSGNKAVKTTLTQCAKAAKNVKDSYFSAQYQRISARRGKNRATIAVAHSMLIAIYYILKNNGHFKDLGAEYYDNFNREHKINSYLKRLNALGWFPPVPAVVIG

SEQ ID NO: 370998 - protein, 429 aa, unidentified
MEAVENEPLFAERVAGIDIGKAEVVAAVRVPGPGGRRMQEVRTVPATRRGLEELADWLEGHGVTRAGMESTGHYWKPVFFTLERRGFECLLYNSRQVKAQPGRPKTDKADAVWLAKITENGWVRAGFVPPEQIRILREYTRYRRKKIQVMAAEKNRVQGLLEEGHLKLSSVISDIHGVSGRDMLNALAAGITDPAVLAAKARGTMKVKIPRIAEALDCTFWTIGHARLLRRMLDTLDYLAAQIAGLDAEIADLCAPFEAEIARIDEADGIARRTAEDIIAEIGVNMGAFPTAPHLVSWARYCPQIRESAGRRKGRNATGDGNAYLSAAISEAVIGSLRTGSFTAARYQRLIRRMPKKKALVATGNTMLTIIWHLLASPDATYRDLGGDYYELRNPARQARNHIRSLERLGYHVTINAINPDTGELTPAA

SEQ ID NO: 370999 - protein, 369 aa, unidentified
MIFVGIDVAKDKHDCFILNSEGTVLADVFTIANNRIGFETLLSRIQSCSQGESKIKVGLEATGHYSYNLLGFLLDSGLATYVINPLHTNLYRKSLSLRRTKTDRIDARTIAMMLMSDVDLKSYSNTAYHNEELKSLTRYRFDKVKERAKLKSSVARLVNILFPELEKLVSSLHIAVVYALLSNYPGASYIANANTEELAETLCTASKGRYTKSKTAEIQVAAGVSIGSKMPAKSMELKHTIALIRELDKEISEVESAIDKITSQMDSPIFTIPGIGRHMGAMILAEVGDFSNFASADKLLAYAGLSPSTYQSGQLQNCYAHMEKRGSRYLRYALFNAAKYVCLWCPTFSAYLEKKGYCWLRYCSFKILL

SEQ ID NO: 371000 - protein, 456 aa, unidentified
MGKGSSGMTRGDRRRNARRERLRGLVPRDGVVIGIDLAEDKQAIAVVDHDARVLARKTVRVKAFRLGEALDWAVAAARVKAFTRVTVACEPTGARWLQVQRLCAERRLPLVCIQPLMSHIAREQQDCTTHKTDESDCVMIARLAIELHCYIPEELDETWAHLRHLGRRRAQLITAATASAHRVRDFLSVAWPTVIETCAQPLLSRTWLTAVQVVTSRCGGDPARLAALGEQEFTALVRAAVPDWGGKKAWGTISRRIFAALTDTEGVVISCRRGLLRRCADELADLQRARAQLRAVEAGMAAVLDELGLSRLGGIPALTAVGAAAILAETGDPRRYDSSSSLVKHAGLAPSDNASGAFTGQAHISRRGRPGLRLTAWRAVWPMLQFNPVMAAKYQAMTSAGDADTATARARRAKARVACAASLLRWIYSMVVHDTRWDAAIASGGQHNPAGQVEAA

SEQ ID NO: 371001 - protein, 363 aa, unidentified
MTIVEARVITGGVDTHADMHVAAALDPIGGLLGVEEFPVNAAGYTRLLGWLGGFGTVALVGVEGTGSYGAGLARHITAAGIRVVEVDRSDRQDRRRQGKSDPLDAVSAARAAQSGRARGAPKGRDGAVEAIRAPMVAKRSARSERTQTINQARALILTGPDDLRARFTGHTAAALVSGLAALRPRPGDAVGYATRIALRELGRRAEFLDGQLERLDELIVPLVTDRAPGLLALHGVGPDTAALLLIAAGDHPARLRSEAAWAHLCAVAPVPASSGKITRHRLNPGGNREANHALWRIVITRMSSHAPTRAYVEGRSEQGLSKKEIIRCLKRYVAREVYRHLRAAADPLPDDLRQALDAINGTG

SEQ ID NO: 371002 - protein, 344 aa, unidentified
MTYYAGLDVSLRSTHICIIDDDGELLAEGKTDSEVVDIIAFLDDLHVEITEAGLEAGTLTQCLTYGLQSAGFEVVCMEARQVKAALSAMRNKTDKNDARGIAQLLRSGWYSRVHVKSIESHQVRALLSSRRAVLAKCIDLEQEIRGLFKVFGIKLPKRLGHGAFDPKVRPLIEADEALSHALLPMLDARLVLYHSFRELDNRTRHMPNDDPTCQRLMTAPGVGFVTALTFKAGVDDPTRFKRSRTVAAHFGLTPRRFQSGEIDFDGHISRAGDANVRSTLYVAANSMLTRSSKWSPLKAWGMKLAKSRGHKRAVIAVARKLAVILHRMWIDDTQFQWSTEAARS

SEQ ID NO: 371003 - protein, 343 aa, unidentified
MGQYIGLDVSLKDTAISIREDGKRIWRGKCPSDPGIIAQAVRKHADDPLSVVFETGPLATWFFHALTAEGLRAICIEARHAQKILGETLNKTDANDAEGLAKLAETGFYKAVRVKSFEAMLIRSLVAARTQLLAITTQLTNQIRGLMKTFGLVVPKSKGRVFIEKVNDLLDGHVELKGIIYPLLEAWQAVRERASTLSRQLLLAARQCQSTRLLMTIPGVGAITAVSYVAAIEDPKNFPKSRSVGAWLGLTTRRYQSGEMDFNGHISRRGDQRLRGLLYEAATSLLTRTRAETVSDLKTWGLQLRERLGFKRAAVAVARKLAVIMHSMLKTGQTFIPTREELA

SEQ ID NO: 371004 - protein, 428 aa, unidentified
MSENSTTHPEPEFVAFVGIDWADQKHAWCSQRAGATQREHGEVEHTPEMVDVWVSQLAQRFGPGPIAVAVEQRKGALVYMLSKYECLHLFPVPSTMSASMRKSLYPSGSKDDPRDAELLLDLLLQHRNKLRRLMPDDEVTRRIQNLVEERRNLVDEKTTQLNRLTGYLKVYFPQMLEWFEKLDTKLVCDLLERWPSLEELQKVPPAELRKFFGQHRGRHQELTERRLEGIGQAMPAIRDRAVLEAKRAMVQVSAQLLRILLEGIANLDSKIEEAASAHPDFFIFESLPGAGSALAPRLLAAFGSQRDRYGSAEEVQTHSGIAPVMEKSGKKKWVHFRWACPKFLRQSFHEWAGHSISQSMWARAYYQQQRGRGKDHDAAVRALAFKWIRILFRCWQDRVAYDENKYLAALARRGSPLSSVLTVTAATL

SEQ ID NO: 371005 - protein, 347 aa, unidentified
MEHIAIDLGSRESQVCVRRADGEILEERRVGTRSLGKYLKGRPKSRVVLEACAEAFSVADAALETGHETVVVPASLAPSMGVGDRGIKSDVRDARNLSEASCRMSKLPRVHVPTKASRDRKAMCGMREGMVQARTKLINTVRGWTRPQGLGVVRSGAPTTFPARVVEHVAERGGTIPPYVEQVLRAIQALSVEIDKADQAMEEAAASDATCELLMTAPGVGPTTAVRFAAAIDSVGRFANAHKVEGYLGLTPGEHSSSQRKRRTGVTKAGSSKLRWVLVQAAWAARRYYKDHPMVLWSHEVEERRGKQVAVMALARKLAGVLYAMWRDGRPYNKEHNQSPRAASVAV

SEQ ID NO: 371006 - protein, 341 aa, unidentified
MGQVSTIGLDLAKSIFQVHGADASGAVVVRNRLRRSQVRPFLAAQPPCTVAMEACGSAHYWAREIAMLGHAVRLIPPAYVKPFVKRQKNNATDAEAICEAAQRPTMRFVAPKSEQTQAAALVFRARDLLVRQRTQVINALRGHLAEFGIVVAKGPAHVPQLVQAVENPDEPLPEIARPVLQILIDTLHRLDEQIALLDREIAQRAKADETAHRLMTIPGIGPVTAVALTALAPPAQTFRRGRDFAAWVGLTPLQHSTGGKQKLGATSKMGERTLRRLLIIGASAVLRWAARHGAPAGSWIARMLACKPPMLVRVALANKMARMVWALMAKGGTYQAPAARA

SEQ ID NO: 371007 - protein, 345 aa, unidentified
MKNFFIGIDVSKEKLDATLIRYESQSDSEQQLAYTTVANNPKGFRSLVSWSKKNAGRGVKTDTMLFCCETTGGYDRALCDWLYGNGLDIWRESALQIKRSMGLHKGKDDKADSEMIAHYALRFRSQAALYEPMDKNMRSLRNLFLYRQSLVAERQSKLVSAKEKQHISSKSKSDNFIYRDAQKAIDLLTKSIKECERRMLEIIKADEEMYRNYLHLISCKGVGLVTSVMLIVYTDNFKGWNAKKMASYCGIAPFYESSGSSVFHKANTSGYSNRRLKGILTQAARSAITHNPTLRQYYLRMKAQGKPYGVILNNVNNKLLHILFSLVLHDCDFELDHEAKRVLRA

SEQ ID NO: 371008 - protein, 324 aa, unidentified
MLPTLGIDISKDSFHVELSVNDKLRHRRFSNRPAGFAELSVWLTKHKIARVHACLEATGPYSEALALYLHEQGHTVSVVNPARIKAFGQSELLRNKDDRPDAALIRRFCETQRPSAWTPPTPQLRELQSLTRHLDNLLETRQQQVNRLEASNAKSVVKSLRKLIAHLDAEIQRAEQQIAEHIDRHPDLKQQCQLLLSIPGIGQRTAAKLLAEIEGLNKYESARQVAAYAGLTPKNNRSGTLRGRTRLSKTGNARVRKALFLPAIVAQQYNPIVRAFCQRLAQRGKTKMQIVGAAMRKLIHIAYGVLKTNQRFDPNHELLLIPVS

SEQ ID NO: 371009 - protein, 442 aa, unidentified
MRPPQEIDVDEREEVVERVAAIDVAKASGKVCTRVPHPTVPARRVTKVWDVAATTAAVMELADALARDRIERVVVESTSDYWRPFVYLLEARGLVVWLVNARDVKQVPGRPKTDRLDAVWLAKLNERGMLRPSFVPPAEIRELRDYTRLRVDLVEDRTRYKQRIEKLLEDALIKVSSVASDIFGKSGRAMLDALIAGERDPEVLAEMALGKLRSKRPALVAALTGRFDDHHGELISMLLEQVDALNAKIETLTARVEQLLSTIPAACALAGESGPAASTPLGAVERLDEITGIGVTAAQSIIAEVGLDMAQFPTAAHLVSWARLSPRTIQSGAKSRSGKTGKGNPYLKRALAEAAASIARTDTFLGERYRRLMKRRGRLKAIVAISRSILVIVWHLLADPRARFKDLGADFYARTATSQRRVRNLVHQLEVLGHRVTISPAA

SEQ ID NO: 371010 - protein, 334 aa, unidentified
MHYIGIDFHKESTHVVVLNEAGKLLEHTRIPTRREELVRFFANRPEPAKAALEATRNWYWAYDTIEPLVEELKLASPPKIRIIAESTVKTDHIDAKVIADLLRSNFLPTCYVPDAETRQKRELLRHRAFLVQIRTKVKNRIYIILDKLGIEHPFENLFSKRGLEFLRGLELPWAYQKELQDSLEMLEFLNGKEKEQNKIIEKLCQESEEAALLMTIPGIAYHNALLIMSEIGDVNRFATGTKFCGYCGLVPTVHISDKTVRYGQMMAGGNKWLRWVFIEAAHVGRRKSLRFSRLYERVKVKRGPQVAIGAVAREMAVVSFYILKYRKPFRDAKW

SEQ ID NO: 371011 - protein, 387 aa, unidentified
MDRDGVVLGKRRVADSLSGIGELHGLVGAHAEDDEEVVVGIEIDRGLIVTALVAAGYEVFAINPLASSRYRDRHAVSGAKSDPGDAKVLGDIVRTDRHNHRSIAGDSSLVEGVKILARAHQSAIWARQRQLNALRSSLREYYPAALAAFGTDLSTNDAVAVLSIAPTPELGRQLSRSKIAAALRRGGRSRNIDHRTEEIQTALRGEYLEAPPIIAEAYGATAHSTIRLIASFTTEIAALEEALAEHFDKHPDAKIVRSLAGLGTVLGARVLGEFGDDRARFDNPKCRKNYAGTSPITKASGRSHVVLARYARNRRLANALDQWAFCSLNTSPGARRYYDELRARGKTHRQALRQLANRWVGILHGCLEFDELYNEAIAWPTRNAAAA

SEQ ID NO: 371012 - protein, 388 aa, unidentified
MIYVGIDIAKLNHFAAAISSDGEILIEPFKFTNDYDGFYLLLSKLAPLDQNSIIIGLESTAHYGDNLVRFLISKDFKVCVLNPIQTSFMRKNNVRKTKTDKVDTFVIAKTLMMQDSLRFMTIDDLDYIELKELGRFRQKLVKQRTRLKIQLTSYVDQVFPELQYFFKSGLHQNSVYALLKEAPTPTAIASMHMTHLAHILEVASHGHFGKDKARDLRVLAQKSVGVNDSSLSIQITHTIEQIELLDSQLFHTELEMANLVTCLHSVIMTIPGIGFINGGMILGEIGDIHHFSEPKKLLAFAGLDPSVHQSGNFQAQRTRMSKRGSRVLRYALINAAHNVVKNNATFKAYYDAKRAEGRTHYNALGHCAGKLVRVIWKMLTDEVEFNLE

SEQ ID NO: 371013 - protein, 443 aa, unidentified
MKSLIQTLTATAAIDLGATFHMAALNPELSEAPIQEFGVDTGSLRQMAAWLLRHKVGHVAIEATGVYWMPVYEVLESFGLRVMLVDGRKSMSLPGRTKTDVLDAAWLEKLLRHGMLSPAFVPEADLIALRTYRRLRGQYVEKASSEIQRMQKALQQMNVRLDRAVTDVTGVTGMAIIRAIVSGERNPRKLASFRKHGVKKNEQEIALALDGHFQEHYIFTLGIALSEYDHLMERLRQIDEKIETELARLSAQSAPKEDYVATKAKARRKNQPFFDLRSYLTSLVGSAVLNIPGVDASTVLTVIGECGLDMSCWPTENHFVSWLGLCPMHRITGGKVKRSKSKRVRNDAATAFRLAAQSLSRSSSALGCMLGRISRRRGMPKAITALARMLAILYYRAVRYQKPYEDIGKDAYEERYRQQTLRRISKTSEKLGFQLVPVNLNAA

SEQ ID NO: 371014 - protein, 386 aa, unidentified
METAYDGRQVVGMDLHRRRSVLVRMTEDGRWLGTARITNSPQELRREIARAGKSPRVVLEATFGWYWAADTLTAAGAEVHLAHPLGVKAFTYRRVKNDERDAADLADLLRMGRLPEAWIAPAEVRELREITRYRHKLVHLRTSCKDQVHGVLAKLGVPVTCTDIFGTAGSAWLDALGLPQPYAGKVTSLRQLTGELTTEITMLSEVIADLLRGDRGYQVIQQLPGIGPVLAAVITAEIGDVTRFQNAGQLCSWAGLTPRHRESDIKVTRGHVTKQGSRLLRWALIEAIQRVPRDSVAGAAKNAIIARRGREAKNIAKVAAARKLLTLVFYGLRDGQIRCLSTTPQDSPPVTPGPAGRMNSLPWPAARREAAELSAPPLTLAARAPS

SEQ ID NO: 371015 - protein, 377 aa, unidentified
MEEKKKVVKQENAKTGVRWVGIDMGKSSYVLRLIDENGKITGWDGKTNKEGRKELYRRLRSTDKIAIESCSLAFTMNKEFKELTGTDFYILNPNKLFQIYMTDKKTDKEDALKLAKEIRDKQEEDLPRVNAPTEKMKEMRNVMSEYREIVKFRTMKINRLHSVYEHAGITDLKRSDLKTKTNREKNLKLLNGYEKEEAQRLMQLIDLLESQKMELENKIKEEENTNEQMQIVEQIPGIGKTTAFCFVGVIGDPNRFTNMTRVSSYLGFIPKIDCSSKTNHYGHITKKGNAYLRGLLVQAAWVIVRSNNGGSLKEKYNDLIIHGMSKKKAVVAIARKLAELMYTLLKNHSSYEPRPYTPRTTYVENLADQALSYAAAS

SEQ ID NO: 371016 - protein, 350 aa, unidentified
MSEISIIGLDLAKLVFQVHGADERGQCMLRKQLKRCDVLRFFAKLKPCIVAMEACGTAHYWAREIAKLGHEVRLIPPAYVKAFVKRGKSDRIDAEAICEAASRPSMRFVPAKSMEQQTVATLHRARDLLIKNRTMQVNALRAHLAEFGFVAGKGIGKLPDLIKIVSEAPAEALPDMVRATLSGFLDAITLINAQVAAIEKRLVAWHKTSAKSKDLKTAPGIGLMIATACSGMVSDPHAFKNGRHFAAWIGITPKLDGTGGKMRLGRISKAGNRYLRRLFVLGATSLLRSLANKTTPLALWVQGLLARLSRRAVTVALANKLARIAWAIMARGEAYKPHAAAGLASVGASA

SEQ ID NO: 371017 - protein, 421 aa, unidentified
MQVIYERCAAVDVGKDVIAVAVRMPGDGPGGRVTVKRVYKTFYGVLREAARWLVSEGVTHVAMEATGIYSMPVYHALVEHGDFEKVLVCNAGHVKNVPGRKTDMADAEWLCQLLECGLLAGSFIPPADVKAARDVIRYRAKIAQQRVSEIARLANVLQDAGIKLDSVAWSVSTKSGRLMIEALIDGERRGQVLADLAIGRMRKKIPELSMALEGRFEEHHAMLCRLHLDHLDHLDGMLKKLDAQIEAMMQPFRAARDLLITIPGIGPLSAASVISEIGADVRGYFPDAAHLASWAGLCPGNHESAGRHRTGKRRKGNQHLQPVLVECAWAAVRHEGYLKALYHRHVMKWGGYRSSTAKSKAIIVVAHAILVIIWHVLATGKPYDELGSDYFTRRLDPEREAQRLIARLQALGKRVTLEDAA

SEQ ID NO: 371018 - protein, 386 aa, unidentified
MRQANDLSRSLAAFDQATTLIAVIEMSQSSWLVAGIVPGLERHPLKKLAVDEGSLLRLLQRWRDQAIRAGCRIERITVAFEAGRDGFWLARWLRAHDIEGYVIHPTSVAVSREHRRAKTDRLDTELLKRAFLGWLRGEADHCNMAAIPTIEEEDGRRPHRERESLVAERTRIVNRMKGCLARLGIRGFKPTLQRAPKLLSTLRTPEGTPLPPNALAEMGRDLARLHFVEGQISEIETARLERLEQAPTEKSHAMVRLLARVIGVGIETADMLVREILSRNLRDRRALARYAGLTGAPDESGSKRREKGLARAGNARVRRGMIQLAWRFLMFQKESALAQWYRSRTVDARQGTRKSLIVAMARKLLIELWRLVTTGETLLGVKMRPA

SEQ ID NO: 371019 - protein, 341 aa, unidentified
MGEISTVGIDLAKSVFQVHGADASGAVVIRKKLRRDEVLAFFSTLPRCVVAMEACASAHYWAREIAALGHDTKLIPPAYVKPFVKRQKNDMADAEAICEAAQRPTMRFVQGKSAEAQASAVVFRTRDLLVRQRTQLINALRGHLTEFGYIVRQGVGHVGRLIEMVGNPTSDIPPQARPVLAVIAQGLETLQTQIALLDREIASRAKADPVAKRLMTIPGIGPVIATALVALAPAASTFRRGRDFAAWLGLVPRQHSSGGKERLGRTTKMGERSLRRLLIIGASSVTKVAARNPDKAGAWLAGMLARKPRMLITVALANKMARTVWALMAHGGSYRAPAAAA

SEQ ID NO: 371020 - protein, 355 aa, unidentified
MNQEKYIGMDVHDATISAAVKNAAGKLLMECVLETKAATILEFVQGLRGTLALTFEEGILAAWLHDLLKPHVSRLVVCDPRKNALMRDGNQNDRADARNLAELLRTNQVKPVYHGKHGIRTLRELGRSYLALTKDSTRVMNRIKSVYRSWAIPCAGTSVYSRRHRAEWLAKLVEPGVRIRAEHLYEQLDSLEPVRQAARRELLRESRKHAAVNLLRQIPAIGPIRSALLVALLQTPHRFRTKRQLWAYGGFAVQTYDSGEYRMVRGKRQRNRERITVRGLNRNHNHDLKNLLKGAAISAIERPGPLQDFYAALVEKGMRTSMARLTLARKIAAITLTMWKKGVSFDPKQLQRQAA

SEQ ID NO: 371021 - protein, 345 aa, unidentified
MYYIGVDYHRRFSYFTVMDKEGKILKEVKLPNTKESLRAFLENTLDGSSKQTKAVLEAGRNWQVMYDLLEEELGEVKLAHSYKIKAIASAKIKTDKIDSRILCNLLRANLIPEVYVPPKSTREAKNILRQRMFFIRLRTMLKNRIIMIIERHPEIKNKPKLTDLFGKRGLLWLKNLKLSNPDDKLLKESLELLDNLNRSISKTEHLVDKLSQKHPYVRRLLTVPGIGKFFSVLIAYEVDNIKRFPNEKKFASYIGIIPSTYASGNFIRHGRITRQGNRYLRWALIEAIWPAINKSNYLRTYYEKIRRQKGTNKAKVATARRLATIIYRVLLEDRDYIEKYPAASY

SEQ ID NO: 371022 - protein, 355 aa, unidentified
MQKYKISFKGQNIYVGIDVHLKTWHVTTLTESGCKYSFAQHADAKELFDRLNRKFPEAHFKSAYEAGFCGFSVHYALTDLGFENIVVHAADIPTTGKEKAIKTDAVDSEKIAWALKRGELKGIYVKDKRYMDDANLMRLRQRFIADLSRQKSRTKHLLYTQGVTFPERFRTSRTHWSRNFMKWLREEVELLSEQKLSLLLLCDQVENTRNAILKVTREIRRLSTTERYKENYDLLTSVPGFGMIVSMSMLTELDNDIMRFPNERRFVSMLGLIPTCHDSGEKKVSGEKINRGNKHLGPLIVEASWVAIQRDLELGAYYSNCCQSMKPHKAIIKVTRKLACRAYAVLKTKTRYELP

SEQ ID NO: 371023 - protein, 364 aa, unidentified
MTTVANRKRDGKRNSGPWTALAGERVHVGLDVHKKAIHVAVWSVRQEQIVRQWVTPANDARLVEQLEPLRAAIVRIVYEAGPTGYRVARSLAEATLPVEVIAASKTPQVADRLAKSDGLDCRQLAEYSAKGLLHRVAIPTEQQEADRQVTRLRDSWTSKRRRVQQQIKSFLLQHGLGEPDGLANWSAKGLEGLGQIELGPELRFALDLMVEELGQLNGQLLRINQQIRQLSKTDRHGPAVAVLTSHPGVGLTVAMAFRTELHQAGQFTDAAQVGQYVGLAPRVSQSGQTRRDGPISRSGRGPLRALLTQAAWVWIRFDEAAKKVFNRLVSNTGSAQKAIVGMARRLAIRLWRMMVTGEVYRVAA

SEQ ID NO: 371024 - protein, 332 aa, unidentified
MPKRTRIVIGGVDTHGRSHHVAVIDEHGRLLGDREFPANTSGYRQLLGWLRRHGQLRAVGVEGTSSYGAGLAQVLVDQQVTVLEVSRPDRRARRQRGKSDPIDAEAAARAVLAGTATAIPKRRDGIVAAIQTLRTTRGGAIKARTAAINQLKGLLVTAPAPIREALEGHSTAALVTACARLRPDAARLAEPSQATKAALQALAKRIQALEAELASADERLSKLVATAAPRTMALFAIGIDHAGQLLVTAGEHPERLRGEAAFAHLCGSAPIPASSGKTRRHRLHRGGDRAANRALHLAVVVRLRWCERTRTYAARRTAEGLSTPEIMRCFIG

SEQ ID NO: 371025 - protein, 383 aa, unidentified
MQPIDTVNPTILLAIELSASTWLVAARVPGLEKPHLHRIDGGDTAALLALISSLRARVARRLDAPEIGVVCCFEAGRDGFWLHRLLTAHGVASHVLEPTSILVNRRARRAKTDRLDAEGMLRVLAAYLRGDHQACSMVRVPTLDEEDAKRTHRERENLVHERLRIENRIEALLFTQGIRKRPSLRSWERDLAVLRTGDGREIPRHLRAELDRLRRRLVMALELIREVEAERDQAAETKPQDQACRKIAALCRIRGIGENFAAVLTREVFYRSFDNRRQIASYVGITPMPYQSGGMDRDRRISRAGNPRARTTMIQLAWLWLRYQPGSELAEWFRERVGTLAGRTRRIAIVAMARKLLIALWRYAETGVIPAGAEIRAETTVAA

SEQ ID NO: 371026 - protein, 312 aa, unidentified
MILSTIGIDIAKDSLEVCRLPGGESARFDNNGSGHQQLIRWLAQTPIARIVFEPTGAYHRTLEQTLTAAGLPLAKVNPRQARRFAEAAGKLAKTDRADAAMLARMGMALALQARQPPNQRLSELKELHLARQALIKDRTAAKNREKILTLPLLKRQNQNRQRQIEAQIAAIEAEIEARIAADPALAERLAILESIPGIAKVTACALLIDMPELGTLDGKQAASLAGLAPLARQSGRWTGRAFIRGGRASLRQALYMPALVATRFNPQLKAKYHQLITAGKPTKVALTAIMRKLIVLANALLRQRRNWAENPA

SEQ ID NO: 371027 - protein, 344 aa, unidentified
MDVTTVGIDLAKQVFQVHGVSNRGAVLIRKQLKRAEVAKFFATLPPCLVGMEACASAHHWARTIQAHGHTVKLMAPQFVKPYVKSHKNDAADAAAIGEAVSRPSMRFVPIKNIEQQSVLALHRVRQGFIKARTAQANQIRGLLGEFGLVVPQGIGYITQRVPALLERAAGDLPGAFRQLIGRLLEHLRLLSLQVTDIDEQVKAWHRSTEASRRLEKIPGIGPITASALVATVGDAKNFDSGRQLAAWLGLVPRQHSSGGKPMLLGMSKRGDPYLRTMLIHGARSVIYRATQKANPQNWAFRVTARRNKNVAAVALANKNARIVWALLAHDREFQGGYSSAAAAM

SEQ ID NO: 371028 - protein, 344 aa, unidentified
MKYNTLKDTVTVLGIDLAKNSFHLYGINENGSTVLSKKLTRAKLAAFIAQMPVCLIGIEACGGANYWKRVFERYGHTVKMMSPQFVKPYVKSNKNDVIDAEAICEAVQRPNMRFVPSKTVVQQDIQSLHRIRSQLVARRTAQANQIRGLLLEYGIVIPKGISNVRKEIPSILENAENELTLLFRTLLNDLYDEMVHLDERVESLEDELKKVSKENINCQRLLTIPGVGLLSATALVAAIGDINVFKSGRELAAWLGLVPRQHSTGGKPTLLGISKRGDTYIRTLLIHGGRSITRLAEKHQDKRSQWISQLAQRRGNNIAAVSVANKNARIAWALLTREINFKPV

SEQ ID NO: 371029 - protein, 414 aa, unidentified
MISRDARADGGEAVRCHAGLRRVGRTGTRGDEMKSITTQHDVPTTTVTSDAGKPALPAACHRFALGLDVDLNYCVTALQCDHGAIKPAQKLTRPQLLKWVREQVAAGHQVHTVYEACGFGYTLHEALVTAGAQSLITTPVKLSPERRRKNDRLDARELCVRLARHLDGHAHELRPIRIPTVAERERRELGRQRDFWVREVRRLENHGRALRLEFEHATLPGNWAGPRVWPKLAGDCSAFVREQLAPVVAQIRAAKATIVQLTARVEATVKAEEVPTGLGVLTVGLVEGEVCSWQRFRGRKAVGSYTGCCPSEHSSGGVQRFGHIDRHGNAHVRTLLVEAVWRLLRWQPNWHAGVKYRAKLLHGQSLKKKLAVALARQLAIDLWRWRTGRCSAADLGWTTERGTRSAACGMKPAA

SEQ ID NO: 371030 - protein, 323 aa, unidentified
MTVYIGIDIASKKFDAAELRDGAYRCKTFENPPTGFTALYNWLKTDSIPDIHVCLDATGSYGTALATFLYEKNLKVSVVNPARIKGFAASELTRTKTDKADSRLIARFCKAAQPAPWRPVPAPVRKLQVLVRRIGALNGMLRMECNRRENADIDAQESVERMITHLKMELKSVRQAIKEHISNVPELKKQNDLLLSIPGIGAVSASLILSFMASKDFTKAKEVTAFLGLNPRHHQSGTSVRGKTRMSKMGDAKLLCALYMPALVALKHNPDIRAFGLRLLAAGKPRMLVVGAIMRKLIHIIFGVLKSGTGFSSRVTVNAGFNQ

SEQ ID NO: 371031 - protein, 467 aa, unidentified
MKNYDYNLFVGIDVSKGKADAAVLAVPELRSVKPRFLRKKLSFKFIKSDVVEFLNTVRRYSSDQHCIHTYFALEVTGIYSTNVYSFIKKNCNGDEEIHQLNTDFVNKWRESHNISKSDPLDAQTISTIIGTDDDVRYVSDSVFENKNGYQDLKALVHRHYQIKKLHSQETNRLIALCDCYFPELQYVFEPKSAAFLAVLSQYPTSHDIINASKNEVFSLVYEATKHRCSLDKIDKLFNYAQDTLVPHVSDHIRCVISNTVESIVNIRTQLKLIEKDIRKLAATFNVYSLLMTITGCGPLTAAVIIAETGDIFRFKNADHYVSYSGSSPRNKRSGKSVEIMGKISKKGSKYLRHALYMIAEFARRHNPVLKHLFERVKNGNKKRHKLAVIAVANRIARYIYSIMKSESSFIIMHENIMRLPEETRNTFFNSISLDFPKNTRKQIYQYSDVNGEIHRFVYKNETTESIA

SEQ ID NO: 371032 - protein, 382 aa, unidentified
MAHKTTTQEELYRRNTLYMAFELSKKNWRVLSSAGGVKNYSAMMTPGNTKELTEIVIRARKKFGLAEDSRVLSCIEAGRDGFWPHRFLLQNGIESLVIDAASMKVSRHRRRAKTDRIDAQQLLADLVRFDQGDKDVWRVVHAPTAEDEDHRHFHRELEQLKKERTQHRNRLRCILATEGVKIPGSLMKALSNLDSLRNWNGDALSKTMLWRLERKVQRLIFVEKQIREIQQHQVQCVKNPATPKLEKITKLNTLRGIGVTSSWILVMESLGWKKFRNRKEVGGSVGLGGTPYNSGQMDREQGISKAGNARVRATLVELAWMWMRYQPNSDITKWFEKRYAGQSKRMRRIGLVAVARRLMIELWHFLEHDVDPPGAIINNKPA

SEQ ID NO: 371033 - protein, 314 aa, unidentified
MTELSNFVGIDVSKNSLDVATLPQGKPATFSHDTKGRSQLIKTLPKPGDCLIVVEATGGYERLLVADLVSAGHSVAVVNPRQVRDFAKALGILAKTDRIDAAVIAKFGQQVRPRPLAETHEKQGEIDQLVTRRRQLIDFRTAEKNRQKMAHSKTVKLSLQQVLNVLDNETKRLEKEILELVESDDEWKRKSDICIGVPGVGQVTTTTLIAELPELGDVNRQQVSALAGLAPFNRDSGAFKGKRAIFGGRRSVRSVLYMAALSARRYNPVIRNFADRLEKEGKPPKVILTACMRKLLVILNTMIKNNTPWDPKIA

SEQ ID NO: 371034 - protein, 407 aa, unidentified
MIFAGVDWAEGHHDVHFQDEQGRKLAGGRLLEGVEGIARFHDLAGGHAAGPGEVVIGIETDRGLFVNALVAAGYQVFAVNPMSASRYRDRHGSSGAKSDPGDAKVLADLVRTDRHNHRPVAGDSDLAQGIRALARAHQAMIWARRRQANQLRSALREFYPAALAAFDDLTSGDAVAVLKAAPQPALGAALSRAQITAALRRGGRTRRLAERAAAVQAALRAPQLRPAPGLAAAMGAAIAAQAAVIAEMNTQIAALEQQLTADFEQHPDAEVVRSLPGLGTILGARVLGEFGDAPGRYATAKSRKNYAGTSPITRASGTRQAVLARHARNKRLADAIYLWAFSALNASPGARAFYDHHRATGDTHHQALRALGNRLVGILHGCLASHTPFSEHTAWNHRTRQPTTRAA

SEQ ID NO: 371035 - protein, 384 aa, unidentified
MTCNQLSHHTAATRADHAAVYASLELARSRWLVTVLLPGSEKMSKYDLKGGDGPALLELLQRQRTKAERRIGAAVQLVTIQEAGLDGFWLHRLLQLHGVTSHVVDAGSIAAPRRQRRAKSDRIDGETLLRTLLAWLRGEPRVCSMVRPPSPQDEDRRRLVRERAALIGERDRATNRIDGLLAVQGITGYKPLRRDRHARLVELKTGDGRPLPPRLAAEIARILERIELLLRQIAALEHARADELQAAAAAEPAALLIRLKAIGIEGATTLGYECFNRHFANRRQVGALAGLAATPWRSGRLVHEQGISKAGNPQLRKIMIELAWCWLRYQPGSALARWWRQRVGTARGLVRRIAIVALARKLLVALWRYVNEGVVPEGAELKTA

SEQ ID NO: 371036 - protein, 385 aa, unidentified
MTIRTVSRAATHGETVRCLFAIELSKQSWVIGFITPLSSRISRRILSGGDWKGLLELIEEVRARVSREMGRTVEVMSCYEAGYDGFWLHRQLEAHGVRNYVIDPASLQVDRRVRRVKTDRIDTERLLRSLMAYLRGEPKVWSVVRVPSVAEEDARRLHRERDRLICERVQHVNRIKGLCALQGIYDYHPLRPQAVARLEQLRTAQGGALPPRLKSEIKRELHRLEVVVEMITTLEAERDAIVEDEASTHVNAEKIQALHKLKAIGPEFATVLVGEIFHRDFNNRRQLASYVGYAPSPFQSGNVAHDQGISKAGNRKGRTTGIELAWLWLRYQPDSDLSVWFRARVGTVKGRIRRIAIVALARKLLVALWRYLETGLVPRGAVLKG

SEQ ID NO: 371037 - protein, 391 aa, unidentified
MTEPYLIKWLSKYPKDGGWMYAACKANLKKEMKNMNHLGIDVGKRKCRAALKDDKGMMLDEFFFGNDMSGIHNMLSRIQSHGKGATIRAVLESTGNMWIRIHDTLEENGIDTKLANPYKTRIIAEAKIKSDKLDARILSDLLRTDLIYESYVPNSEDRDKRSLVRHRITLSRTKTKLANKVHSILDKYDYQTDLTDIFSKSGIEWLKSLSSIVTPVDRIILNTSIESIEAINQQVDTVSKEISKYARDNKDVKILLSITGIDIFSAMLISAEIVDVRRFSTPWKLVSYAGLAPSIRESSGKIQTGKITKQGSSPCLRWILVQCALTAIRFDAHLRIFYDRIRNRRGHATAIVATTAKELLVIIWYMLTRNELYRYMNKQRYEQKLHKLEHR

SEQ ID NO: 371038 - protein, 412 aa, unidentified
MKDLLEISCGLDVHKEKIVACILTGPLGKPTRSEIREFSTLIPDMIALRNWIVSKNCHHVAMESTGIYWMPIYEILEDAFSGDITLLVVNARHMKNVPGKKTDMRDSEWISTLLRAGLLNGSFIPEKRIREFRDLNRYRKSVIRDITSQKNRIEKFLQSSGFRLSSFISDIFGASGRNIILHLIEHGQIDKTALDSCLKTKTRNRIDEILMSVNGTLSEHQKAFLKILMTHYDSLKKHLAEIETSLEEDMAPFALQVEQLNSIYGISTTASCAIIAEIGIDMKPFKTAEHICSWAGLCPGNNESAGKRKSTSVTKGNPYIKSMLCEIAWVIAGKRNTYLSAWYWRIKQKKGAKKAIVALARKLLVIIYTMLKQGTVFDESCFETRRKHCEQKQLSRYIRELEKHGYHVEAQS

SEQ ID NO: 371039 - protein, 350 aa, unidentified
MTNITTIGIDIAKRIFQFHGVDKNGKTVLKKKLMRDQVLTFIANLPKCLVGMEACGGANYWAREISKLGHEVKLMAPQFVKPYVKTNKNDQADAEAICEAVSRPNMRFVPIKSIEQQDILSIHRVRARLVKNRTALANEIRGLLHEFGMIIPQGINKITSKLTEVLDSGKLSPISQQTFSDLKEEFIENDKKIKCLESRLKIMASELDKYQQIIAIPGIGLITSTALIASIGNGNCFENGRQLSAWLGLVPRQASSGGKEKLLGIRKRGDIYLRTLLIQGARAVLNTKLRFTTESQKAKKDYSKFTQWMFNLHDRSGHNKTIVAVANKLARVVFAVLSSGNDYIENKVCS

SEQ ID NO: 371040 - protein, 312 aa, unidentified
METKFVGIDVSKLTLDFDCLPVSAAQPFANDAVGIAALVALLQGSGVERIVIEATGGYETAVASALAVAGLPVVVVNPKQVRDFAKAMGHFAKTDRLDAKVLALFGERIKPALRAIPDEAQRALADVLGRRTQLVVMRAQEKARLATVAAVARKNVEQHIAWLDKCIAKLDADLGDRLRNSPVWCNKATLLDSVPGVGEVTTFSLLAKLPELGTLNRQKISALVGLAPFSDDSGKRQGARYIRGGRAEVRCVLYMATLSAIKHNPPIKAMYERLTKAGKPFKLAMTACMRKLLTILNAMLKKNQTWKLQPTS

SEQ ID NO: 371041 - protein, 327 aa, unidentified
MDAITIGVDLAKTVFQIHGVDATGETVVRKQLRRRQVLPFFKKLAPCLVGMEACATAHHWARQLEALGHQVRLMPPRYVKAYVRRNKNDGADAAAICEAVTRPTMRFVAVKSAEQQSVLMLHRSRAHLAELGIVARVGLPQVNALLAVIADEADDRLPPLARSCLQGLAAQLMSLEGEIAAAGQRIHAWHRSNEASRRLETIPGIGPITASALAATITDPSLFRSGRELAAWIGLVPRQTSTGGKARLGRISKQGDPYLRWLLVVGAMTVIRHAKRRGTANPWLAELIAHKPTKVAAVALANKLARIAWALLRDGGTYQTPAAAAVA

SEQ ID NO: 371042 - protein, 332 aa, unidentified
MKFIGIDIAKSTFVTAYPLPTGGYRTKTYPNDPKGVALFMKSFSQEGHHCVLEATGNYGMLLLYMLCKAGIAVSQVNPKQIKHFARMMMTVTKTDDVDAKLISLYGEKMCPPVYRFPAESLLILKQKKVIARQLRKQLVALSNLKESLQALPIKDKASLKSLDKTLRFLKARIEEIDADIADVASSAFEQQIASLTSVKGIGISLATSLVISTGGFSQFETSKQLARFVGIYPSYQQSGSSINIRGKISRNGDSNLRSLLYIASWSAIRYNETCKEAYERLKARGKPSKVALVAVANKLLRQAFAICKSNSRYVDGYKSTLNKNANSSCFLT

SEQ ID NO: 371043 - protein, 338 aa, unidentified
MAIVTVGIDLAKNVFAVHGVDESGKPALVRPEVPRAKLLELIASLPPCSIGMEACSGAHHWAREFGKFGHTVRMMAPKFVAPYRMIGKRGKNDAADAAAICEAVTRPNMRFVPAKSLDQQSRLFVHRARQGYVEQRTALINRIRGLLSELGIVLPLKAATVRREAHEHLEDLPGWCNTVVGDMLSELTHLDERIGQYDKHIAQAAQEDAQAKQLMRLTGVGPTTASAIVATVGKGHDFTCGRQFCAWLGLVPGQYSSGGKQRLGRITKAGDPYLRTLLIMGGRAVLSAAKNKTDPLSRWAVSVQERRGYWKAVVAIAAKNARMCWAMLARGEAFRMPA

SEQ ID NO: 371044 - protein, 574 aa, unidentified
MAVATGYANTTEVAESAVKDTRKKREHGGARPGAGRKPKPRPTFYKDKAESDVSSNASSAMPDRIVVSDSLAPIAERIVASDPSSALAKSLSANSTSPVAERKSKKKRSRSRRSPIGLPVIRPNAAGIDIGSRGIFVAVPEDRADSNVRSFPTFTEDLIAIADWLASCGIEHVAMEATGVYWIPLFQILEKRGFNVTLVNARNVKNVPGRKSDVIDSRWIQFLHTVGLLQASFRPPDEVAALRSYMRHRDKLVAVSASHVLRMQKALTQMNIQLHNVISDITGVSGLAILDSVLEGERDPAVLADMCHASIKADPLMIRKSLVGDWRAEHLFTLDHELKLYRFTQQLIKECDTAMEELLGQSVAAQQLPDVPTDTDGALVEDACPSQTNTPVKVRKNASLKTAREKELTASLLKLFGTDLTLVPGIGVESAYKLYTELGTDWKASFAGSAHFCSYLGLCPDNRISGGKVLSAKTRHVPSRGATIFRLAANSLQRNDGPLGNYLRRMKGKLGKQEGITATAHKLARIIYHLVTTGETFNESMLQPTEQQIKRRKDYILREAVKLGIPLAVNSVPQ

SEQ ID NO: 371045 - protein, 351 aa, unidentified
MRTSQKTLEIISTIGIDVGKNTFHLVGVDKRGAIVLQQKVTRHQLGRRLSNIPRCLIGMEACCGTHFIARQVTALGHDVRLIPAQYVKPFLKGHKNDYRDAEAIAEAVQRPTMQFVSIKTPEQMDLLALHRVRSRLVRQRTGTANQIRGFLLERGITVRKGLMPLRKALPEILSSKSDVLSPRMINLIGDLVQDWRRLDERIAHVSTEIEALAKRDENCQRLMSVPGVGPIVSSAVVAAIGNGTGFKQGRDFAAWLGLIPKQESTGDRTILGKISKRGNKYVRTLFVQAAHVVLERRPRTAKQGLWPWIEQASKRLHRNMLAIALANKLARIAWAVLARGRAYQPRITAHA

SEQ ID NO: 371046 - protein, 397 aa, unidentified
MIAVGIDISKAKSTVAVIDSDGTVLASPFTMAHTQPEMEAFVSYLKGLGEPTTILMEYTGHYHYPVLKKLQDEGFPVCIVNPYQMKKYGDVEIHKAKTDKKDALRIAAYALEKSYKLVPYSSMEQKYEDLKFLSRQYSQRITYVAKLKVQLIALLDQTMPGITRILPLNSRNPEKCALLLFIKRFKSFDEIQRIGKARFLASYDVLAKKTSERSASSKGLSIYELAVDSITTRGEDPYIWISQNQCVDLLSATQNAADEIISQMRNIAETIPEYKVLRAMHGVGDRLGPIILAEIGDVHRFHSGKALNSYAGNDAPPYQSGQFESRNRHISKRGSSTLRKACYEVMQALKLIKPQDDPVYLFMLKKEQEGKPFNVAKMAGVNKFLRIYYARAMELYK

SEQ ID NO: 371047 - protein, 424 aa, unidentified
MNCTQNERINQVSEQTLVIGVDIASELNYARAFNWRGIEKGKVFKFFNNLEGFQAFNKWAHQVMSANKLTNIMVAAEPTGHYWFGLADYLKDEKLKLVLVNPFHVNRAKELDDNHPSKTDAKDPKTIAKLVIEGRYMEPYIPEGVYADLRIMYNCRQKVTKAMISLENQLKRWFKIYFPEYLSVFGNISGQGSMAVLEKAVLPEDIISLGVDGINKLWRERKLRAVGMKRAESLYEAAVKSIGRREGSVGGRAEFRMLWEDYCHKMEQMEKLNIELESLLHKVPQAEEVLKMKGIGVVSVAGFFAEVGDLRRFESPKQIQKLAGLAIRENSSGKHKGQTTISKRGRARLRAVLFNAAIALVGRNGAFKSIHEYYIGRKANPLKKKQSIVAVSCKLIRIIYAICRHKEAYDEAKMLRDIRREQLA

SEQ ID NO: 371048 - protein, 290 aa, unidentified
MPETEVDTFAGIDVSARELSVALCRGKGEDKPAMAKFSNHPSGHKALIAHLLRGGRRVRVCLEASGNYSLDLALTLQAHRQVEISVINPRRARRFAEALGQRSKTDPVDARVLCEYAARMPWVAWQPPSSVALHLRAVARAIADLGVIHTQQNNRAHASAASQALPVLVVKEMQRHQKYLEQRMTRLRREALRLIAGDSELDRRFRLMLTTTGIAETSALQILGELAVLPNMLDARQWVAFSGLDPRLFKSGKSVEKRPRISRGGSRHLRRALYMPALVALRRDPYLRRF

SEQ ID NO: 371049 - protein, 403 aa, unidentified
MSNCFAGLDWASQAHAACVIDERGSVHVQFEVAHDAAGLAALARRLRDAGATAVAIERPSGLIVDALLEAGFAVVPIHPNIVKATRPRYRSHGGKSDATDAYLLADLLRTDGHRFKPLAPQSDHIRALRALVRGRDDLVATRVQLANQLRSLLQSFWPGAAEIFADVDSPIALAFIQRYPTPEAASRLGPKRMAAFCGQHAYSGRRSPEELLQRLHQAPAVALGELEMDAKGELALSLVRILSRLVEQLRVLTSRIEHDVGSFDDGRLLMSFPRAGRICAAQIVCEIGNVRERFDSDEHLAGEAGVAPVTYASGKSKAVAFRWACNHRLRAALTCLADNSRHASTWAAAVYANARARGCDHPHATRILARAWLRVIWRAWQDHKPYDPALHGGLQTMLKTAGG

SEQ ID NO: 371050 - protein, 293 aa, unidentified
MTITTIGIDLAKNVFAVHGVDQNGKTVLVKSRVTRAALPGLIASLPPCVIGMEACSGAYYWARLFLQYGHEPRLMAAKFVSPYRMAGKSGKNDAADAQAICEAVRRPHMRFVPVKDESQQAMQCLHRNRQGFIEEKTATYNRLRGLISEFGVIAPQSTDALRHMVSAQKSSLPLQVQQCVDDLLEHVDRIEANITEYDRILSRIAKTDHRSQRLMKLKGVGPTTACALVACIGNAHDFKNGRQLAAWLGLTPSQYSSGGKSKLGRITKAGDSYLRTLLVQGARSVLIGALLQS

SEQ ID NO: 371051 - protein, 386 aa, unidentified
MKKHTKNETRKCQRETKKVAELETAGWSEREANTLVIGIDLGDRSSSYCVRTLGQQIVREATVATTATAILKEFQGLRRQRIVIETGTHSRWVAHLLEMMGHEVIVANARKLKLISENNQKSDKVDARLLSQLGCMNVEWLHPVYVRSQEAHCELLLARSREALVETRTGLINHVRGVVKSFGSRLAKCGSESFVEVARVGLPDGLKPALSGVLAALEEMDEQIYDYDCRIEHLCNTKYKEAAQCLLQVNGVGPVTTVTYLLTIENKDRFEQSRDVGPYLGLVPKSRQSGQRDPQLGITKAGDEMLRKLLVNCAHHMLGAKGQDSDLRRWGLELVRAVERKGKQGARKLAAAAVARKLAVLLHALWVSGAVYEPLRNRGAQQTPAA

SEQ ID NO: 371052 - protein, 343 aa, unidentified
MQVVRIGLDLAKYVFEVHGVDKHGKVIVRKRLRRDAVARFFANLPACLVGMEASNGAHYWARMFTELGHQVRLISPQFVTPYVKSNKNDRNDAEAICEAVGRPSMRFVPQKSTDQLAVQAVHRIRRRLVADRVRLVNQIRGLLSEHGIVIARDIAQLRRGLAVIVGNINDGLSEMVRALMRELQAELAEVDARITAYDRRIKEIFHASEQCQRLGKIEGIGPVTATALIAAVGDRSCFKNGRQFAAWLGLVPKQRSSGGRTRLFGISKRGDRYLRTLMIHGARAALSRAGDKQDPRSLWLGKMRQRRHPNVAAVALANKNARIVWAMLTGDTAYEPALSVKAA

SEQ ID NO: 371053 - protein, 370 aa, unidentified
MKPHHKYIGLDVHKERNEVAIADGITGEVRLYGSISNDLHALEKLVYKLRGQNVVLHFVYEAGPCGFVIARRLAQLGEDCTVIAPSLIPKKAGDHVKTDRRDAVTLARLHRAGELTAVRVPDERDEAIRDLVRARTDAVTDLRDNRHRLQAFLLRHGYKYTGKSHWTEAHLRYLRELVMAHAAHKVVLEEYLMAITQATERIQRLEQHITTQVVPWRMRPVVEALMGLRGIQLLTATALLAELGDLSRFGHPRQLMAYLGLVSREYSSPESFRGQGSITKAGNSHARWFVIESAQHYRLAPKVSKELSPRLEKLPQRLKEMSWNAQVRLHKKYWALMLRGKTVQKVQVAVARELVGFIWAMAREVKPLSD

SEQ ID NO: 371054 - protein, 462 aa, unidentified
MRTIGIDLAIVGDHKAVILDDQGNAAGKVFCLRTDPASLDELLRRAQGGADEDEALRAVVEPTGLAWLSASSYLIQRGVTVYLVNTQQVSDLRKFYKKHAKSDRIDARVLARLPWVNPEAMHPLQLSPADYLSGQRWCKQQEELTDLMTAIKNRVQAWERGFWPGLEKVVGDLWAPWARCWREEWYDPWRLQAVETRQLAAFLAEAGADPEEVDSLSTGLQTVARRVVALFGTPDGEASPYVDYGTLQDQVLRELRLLAFYEAEHRALRHKVHQLYRQIQPERHLESIKGVGEDGAAVYVFFLGDVSRFATQRKFRGWHGMVPASKQSSNAETKGLRITSAGPDPVKKYAYINAEVARQWDPQIAAIYHEQMVHKGNHHCQAVCACATHLLDRVRAVLRDGRPYELRNVDGTPVTWQEARAIIAERYHVPAEVRKRNSKRARKAQRDRRAERKRKRRSPPGR

SEQ ID NO: 371055 - protein, 404 aa, unidentified
MTSAVVEDPAGQDVFGGVDSHADTLHVAVISDNGGHLADAEFTTTAAGYAAALAFLGAHGHVLAIGVEGTSSYGAGFTRAARSHGHRVVEVNRPDRAERRRIGKSDPIDAYAAARAALSGRASSAPKDGTVAGIRALHNAARSAVKARTAALNQIGHLLITAPETIRAKYGRLKAAERTDALARLRPAGDAVHVAVLTALKSLARRAKELTAEHEALTRALDAEVSVHNPGLRAAYGVGPDTAAQLLITAGGNPERMRTEAAFAALCGAAPVPASSGRTNRHRLSRGGDRAANAALYRIALVRMSSDSRTREYVARQTDAGRTKKEIIRLLKRAIAREMFRCLTTTVTVPGIADLRPLRQSKNITLTAVAHHFGVWPTTISALERGIRRDDDLAIAYRDWLTAA

SEQ ID NO: 371056 - protein, 429 aa, unidentified
MNTLPIAGIDVGKEFSEMVILSPANKVYARMKIFHDSFEKVDKAISLLKKAEKDFANRPIIAMEATGHYHKILFRALTQGGFEVVIINPIQTDCIKNLGIRKVKSDKVDAKKIAILCRFQEFKTNSIPNETIDCLKNLCRQYYKMVDQLTVYKNKLISVVDQVMLNFTDVFKDISSKTALALLEKYPTPVNLLEADENEIISLISKNSRKSVKWATEKYNLLMQKAKEFKPLSISNQANVALIHININMIRVLENSIADIKNTILELIDDDKKQDIPILALTLELLCSIPGIGLITAATILAEVGDFSAFQKPQKLVAYFGIDPSVNQSGKFEGNQNKMAKRGSRFLRRVIYTSALSNIRKKRNGELCNSVLYEYYQNKCISKPRMVALGAIMHKLVKIIFAVLRDKKPFEIRNPEEHAQRLKAQSIAA

SEQ ID NO: 371057 - protein, 353 aa, unidentified
MKKISYLGMDVHAKNCVLGEMDYNGKFIGNQTFSTSEQNIIAAIKTIKAKEKYLTLEESNLAYWAARVARPYVTEVIPCDPKENALIFKSSIKKDKVDTKKLCRLLRLGELKKVYHPESDNRAIFKASALHYIDLRGQQTVLKQKIKAMYRHWGVIDVSGESVYSVTGRHDYLKQVKHLHIRNQINRLYTLMDETESMEKKALKTMTVLGRKYPEIKQFKKIPGIGDISAHIFDAFIQTPDRFANRSKLWRYCRMGVTDRSSDNKPLGYKKLDRSGISEIKGLLYQAWMAALKGNNEVRQFYLNSLNRTRNRVHARLNTQRKIIGVMYCLWKKGGSYNPNLFLGSDKIVALYN

SEQ ID NO: 371058 - protein, 344 aa, unidentified
MDHFGGLDVSVKETSICIVDDTGRIVREVKVGSEPEALLKVLGNPAYRFKRIGLEAGPLSQWLFSALAEAGLPVVCVETRHMRAVLKAQINKTDRNDARGIAQMMRVGLYRPVHVKTLRSQKLRMLLTHRKLLQSKAIAIDNDLRGTLRNFGLKVGMVGTVKFEARIRELVEDLPDLVAVIEPLLIVRRTLREQVVILHRRLLAIVRDDEVCRRLMTIPGVGPVVSLTYRATVDVPARFRKSKSVGAVFGLTSSRYQSGEVDWSGKISRCGDEMMRVMLYEAAQSMLHSKKWSWLKAWAMQIARRRGMKKAIVALARRLAVIMHRIWVDGTEFRWTREQAAAAA

SEQ ID NO: 371059 - protein, 400 aa, unidentified
MISVGIDVSKGKSTVCLLKPYGEIICKPFEVQHTEKDLEELANLLQKLDGEIKIVMEATGIYHLPILTFLLEEGFFISVINPFMMKRFARDNSLRGAKNDRLDSVMIASYGIEKWHKLKKYEVNDGIYPELRFLGRQYHRFMQTHVKHVQELTHLLDHTAPGLKAMFNSWNEHSNRDKLSDFVERFWHFDLITSLSREEFVEQYLLWAKEKKYHQSRSKAEKIYDLASNGIPTLSSRTPSTQMIIQEAINVLRIVNNSLYRILSRMKELAKSLPEYATVRSMGGVGDALAPQLIAEIGDARRLHNGHALVALAGIDPPPYESGKFVGTHRRISKRGSPILRKIGFEVMRVLKSHKEPEDNAVYNYILKKEAEGKNKKLSKIAGLNKFLRIYYARVMEVYR

SEQ ID NO: 371060 - protein, 511 aa, unidentified
MRYGKDGREAEAGRYLTEPSELAEESDPSRTEVPETVAPASAGSTRRRISSLVLTPAGLVRKWSISMIRKVMEVIYQCVAGLDVHKETVVACRRRLIGNWQVELEIETFRTTSAGLRALAGWLLEWGVTHVAMESTGVYWVPVWNVLEGQFTKLLLVNAQHLKKVPGKKDDQIDAEWIAQCLQVGLLRGSFVPRSEIRQWRQLTRQRTKLTDHRTSVINRIHSVLEQGNIKLSSVATDIMGVSGRAMIRALSQGESDPVRLAALARGRLKTKYEQLVESLDGQLTANQRWMLKQLLEQLEELENKDAIYSERIRGQMLAYERQLELLDTISGIGRRSAENLLAEIGPEMDPFPTDNDLVSWGGLCPGKNESAGKKRSSKTPDGNKWLKRVLVEAAWAATNEKNSYLAALYRRLASRRGKNRAIVAVARTILQAAWHILKEDVNYKELGGDYFERLNEEKSTKYLVKRLEKFGYEVVLKPKKAKKAALELKPKKTKKAKVELKPKKASEATA

SEQ ID NO: 371061 - protein, 335 aa, unidentified
MKVQCVGVDIAKNDFKVAFATKGEDNKLSCTTAKKFDNAKTGFNQLVRWATSEMDKNAPLVFLMEATGVYHEKLAHHLHRAGKQVHVVLPNKFKHFAASLNSKSKTDAIDAKLLARFGVEREHRPWNPAELVIKRMRDFSRYRVQLQEQKTAITNILHSKDYAHGVPADIKKSSKKVIAVLEKEIAILSKEMEKVVKSDPEIEAKVNKLRTIPGCGITTVAAIVAETNGFKEFKSAKQLTSYAGYDIVHNESGTSVLSKTRISKKGNRYMRHHMHMPALSASKHIPEFKALKERIKAKTGIPMKAQVAVQRKLLILMYTLWKNDLVYEKDYHQKR

SEQ ID NO: 371062 - protein, 454 aa, unidentified
MQKQDSYDYYVGIDCAQNKHDFAMKNNQDKFLIKKGHFSNTLQGYEKFLNTVLSKCLNKDKILFGMEVTGIYGTNLYERLKSDGYHVVMISPDSVKNYRDYKRLNKTDKIDSACIAELLLNGDAQIVHVEKNGYTDLKAYIRRRNALKVTCTQETNRFLAKVCLYFPDLLKVFPSGRATLKAIFSIYPTPYSIIEADFDELVSVLQKASKNKFGVDKANELIHAARNSIVVRKSISDGELYNIHSLIDSIDSLESEIRNLEKIIDSKAEEFPAYHVLLTLTGCGKITAATIVAEIGDISRFHKASQIVSLAGLYGDNSKSGSSVNKRGKISKKGSRYLRHAIYMVAEFARRNNPIFKAYFTKKKNGDRTKHILAVNAVANKLCKVIYSLMKNQSTYIIQYRDLAKLSESTQNEFFQNAETDFSAKTRRKKYLYEDEYGELHEFVFKSLKTALIE

SEQ ID NO: 371063 - protein, 342 aa, unidentified
MEISTIGIDLSKTSFHVIGLNAGGEIVLRRKLSRKQLLQFTSNKQKMLIGMEACGGAHFLGRALRTQGHDARLMPAQFVKAFRKSNKNDYLDAEAIAEAVQRPTMRFVPIKTDDQLDLQALHRVRDRWVARRTAVMNQIRGFLMERGITVRKGPSHLTTRLQEMLEDADLPLSGRLRLLILELKHEWDELEARIEAANSELQRIAKQDDACRRLMEIPGFGPLVSTALVAAIGNGITFRKGRDLSAWLGLVPRQHSTGGKTRLLGISKRGNEYLRRMFLHGARSVVAQADRNRSALALWMVELSARTHRNVVVVALANKMARTAWALLSKGTSYCAPALTAA

SEQ ID NO: 371064 - protein, 359 aa, unidentified
MHANTVAVDLAKSVFQIAVANDQWQVIERQRLTRAQFERYFVNKSVGLVVMEACGSAHYWARRIAALGIDVRLLPARYIRAYVKRNKTDAADAEALLQAVRCADIVPVKIKSVEQQALQSLHRVRSLWMTTRTSRINALRGFCREFGISIAVGARLGLEQISRVLADSHTEIPLLLRPTLSLLVEEIRLLEARITQLERELAIMAKQSATCESLLSIPGIGLLTATAMVAATSGEVSHFKDARHFAAWFGLTPKEHSSGNTRRLGRISKRGDRYLRMLLTHGARAVLRAAAVAKRMGRPLDHLRTWALAVQQRSCHNKATCALANKLARICYAVLRDHEPYGATRLDHKLHRVAFEMPM

SEQ ID NO: 371065 - protein, 429 aa, unidentified
MSGKETMQPQLEFVAFVGIDWADQKHVWCLQEAGSRHREYGELEHKPETVEAWVGELCRRFGPGPIAVAVEQVKGALVCMLRKYECLHLFPVPSTMSAAMRKALYPSGAKDDPRDADLLLDLLVQHRDRLRHLQPDNEGTRRVQNLVEERRKLVEEKAAQVNRLIGYLKIYFPQMLQWFQRLDTKLVCEFLERWPSLEELKKVPPAELRKFFRQRQGRHHELTEDRIQGIVQAMPAIQDQAVIEAKQVVVQVIAQLLRSLLEGIANLDRKIEEAAGAHPDFFIFQSLPGAGAALAPRLLAAFGSQRDRYDSADEVLKHSGIAPVTETSGKKKWVHFRWACAKFLRQSFHEWAGHSIAQSVWARAYYQQQRERGHGHHAAVRALAFKWIRIVFRCWKDRVAYDENKYLAALARRGSPLNSTLIAATATTV

SEQ ID NO: 371066 - protein, 412 aa, unidentified
MQRMTDVPGTVHAGSPAWTVGIDLGRRAAHEAVLRAPDGTDRRLRFTHSREGIDGFLGELAGLEGRVLVIIEPTATRWQALAEELSGQGVEVRQVHAATVAKLRGARDITGAKSDRVDARTLAGAVDYSHLVRPDAPAVACAHALCLERLRLRRERRRLRGAVKTCLDTIWPEFLQTFRGGERGVTARAVIAVTGGDPARATRLGAQELERRVRAAAPGRHIGHNKIKQLIEKTSRPVGYRAARAAYAARLQRLMRRRALVEHQLEALEEELLHLYPRLPGAQRLDSLPGLRELDRALLLAAAGDVRRLRSPRALGKLGGCAPIARDSGQSTPKRKISERCRYQLRDAAFHAARHIIKACPAFRALYRALRQRLTARQAVIACANRLLRVIWRMVNSNVDYNPAKVAPALNR

SEQ ID NO: 371067 - protein, 352 aa, unidentified
MIVLGADTHKRSHTIAAVSAATGELIGEQTVQVGAKGFAALVVWARELGSERVWALEDCRHVSGSFERFLIARGERVVRVTTKLMADSRRRARARGKSDRIDATAVARAALREGLDALPAAQLEGPELDLRLLVDHRERLVRQRVALNNTLQWHLHDIWPELRLPGSALFYGNWGPRVARRLARAEQTMRVRIARDELRRIRELSQTIKALEAEIAQLVAQIAPQLLSEPGLGPLTAAKLVGEIAGADRFASDAKLARAAGVAPIPVSSGKINRHRLDRGGNRQINATIHRIAVTRLRSHSESQDYIARKRAEGKSTKEAIRCLKRHLTRRLWHLLQSTRPAPSQTITPSIS

SEQ ID NO: 371068 - protein, 383 aa, unidentified
MRSIGLDLGARHIAYCEIRNGEVIDRTSVKRLDQLKSRIGPDCPPARIAFDASREGWHVHDTLTSWGHDAKMIDTTRVRAMGVAHHKRKNDALDAEAAARAVDQGRIPEAHILSPARRALRAQLSVRGALVETRAQYVTTIRGLGRAAGVLLPTCTTENFVNKVRESSLDDATSTLIAPLLAVLVGVEEELTKVERTLSEMAMREPITKLLATAPGVGLIVASTFVSVIDEAKRFRNAQAVGAYLGLVPSELTTGGPEKRRLGSITKQGNTYARKMLVQAAWLILRSRDMDDPIRQWGDRIAKTRGKRIAAIAIARKLAGVLWAMWRDGTAYDPVGQAKASAKGTRREARSKNANAEALERAAKKLQRRAPRRNKTSEDAAMT

SEQ ID NO: 371069 - protein, 445 aa, unidentified
MSDATLSTKIAEPEWAALVAIDWADQKHFWRLALTDSGQQEQGELENTPEAVDTWAAELNIRFGGRPIAVCLEQSRGSLVYMLAKYPHLVVFPVHPKTAAQYRETFCPSGAKSDPSDTASLLDLLQRHRERLRQLQPDTSETRLLQLLVETRRGTVDEKTRQKNRLTACLKRYFPQVLQWFDKVDSALVEALLQRWPNLTELQRAHPGTLKKFFHEHNCRAEERIRERIAGIQAATPATVDAAILEGEAFNACGLVEVIATLRGQIDKLDQRIAQLVAEHPEGSLFGSLPGAGAALVPRLIVAFGTRRERYDSAYQIQCYSGIAPVTEASGKSQWVHFRRACPRFLRQTFHEFASHSIRSSEWARAFYDSQIDKKKSHHAAVRALAYRWIRIIFRCWKDGKPYDEQTYQRSLQRRGSPLIGSFAPATGAGWKTVAGFQKLSQENS

SEQ ID NO: 371070 - protein, 354 aa, unidentified
MSQTLKTAIAVVGIDIGKNSFHVGGLDQRGAIVLRQKWSRGQMEARFANMPPCLVGMEACVGAHHLSRKLKEFGHDARLMPAKYVRPYSKGQKNDFRDAEAIAEAVQRPTMKFVATKTADQLDLQALHRVRERLVSQRTGIINQIRAFLLERGVAVRQGQRFLRAELPRILATPPNVLSPRMVRIIENLAGDWRRLDERVQNLSDEIEAVARQDAGCERLMSVPGIGPIISSAMVAAIGTGGGFSKGRDFAAWLGLVPRQMSTGDRTILGKISKRGNRYLRVLFVQAAWVVLIKPKSWERHGLKSWIEAAKKRLHPNVLAIALANKLARIAWGVLARGRNFEARTNTNATVQAA

SEQ ID NO: 371071 - protein, 360 aa, unidentified
MKKRLSKKASWFKKGSFTAADEIYVGIDVHKCRYHIAIWHNGHIGCVYSMSSDNDKLARDLLQIRSSLKSIVYEAGPTGYGLVRLLRCVGLPAEVVATTKTPRMTDSAAKTDRLDCQQLAEYAAKGLLSFVAVPTKQQEADRQVVRLRDQLICKRKRIMQQIKSFLLQHGISWPGGNWSKSLLERLRQLDMAVELRFTLDQYLDEYTFLCMKMTEIEAELRQIFSSERHSAAIEIFKSHPGVGNIVAWEFRAEMFDITRFSEPKQVSKYIGLCPKISQSGNTCRQGPITKTGRGQLRAILIQAAWAWHRRDPYARQIYNRLLRNSGNGKKAIVGLAKRIAIHLWRMLCDGCLYDANAIRV

SEQ ID NO: 371072 - protein, 346 aa, unidentified
MDYYGGLDVSEEATSVCVLDGRGQVVSEAKVRTEPAALTAHLAGFEGLSLVGLEAGALTPWLAREMAALGLPVVVIETRRMKAYAKASAVKTDRRDAKMIAQALRAGLYQAVHVKEEAAHKQRLLLSARAMLLAQARQLQVKIRGDLKPFGIRLGKVGAGGFAGRVKQRLGERCDLMALVAPMLAMRAALLDAVRGYDRAIKRYAAADPVCRRLMTTPGVGPIVAFAYRATVDRPERFARSADVAAAFGLVPRIEQSGEREHIGAISRTGDAMMRSLLFEAANALLTRTRKSFALKRWGLKVAKRRGMNRARVAVARRLAAILHRMWVDGTDFRLLPQEEPTPAAA

SEQ ID NO: 371073 - protein, 317 aa, unidentified
MAQDDAFVGIDVAKHELVVHLYPDGDGWRVANSSKGLRDLAVRLARVARNRVLRIGFEASGGYERNLAILLESKGFKAYLLDPARVRSFAKAEGKRAKTDPLDAAVIARALATLHTGLKPWRHDPAAQRLAERIRLRDQFMAQMIQSQNLLETTIDAVAQRTTRAHVASLKAKIQRLDKIIADLIAENPVLCQRAKLLRSAPGVGPVVAATMLAHMPELGTITGKQAAALAGIAPFDRQSGTSNKPGRCQGGRPAVRRALYLAALSILRTKKSYLAALGLRLKTQGRPFKVAVIATARKLLVALNAMLKDSQPFLSA

SEQ ID NO: 371074 - protein, 373 aa, unidentified
MSKKKSSVAGLGALYARVCGLDVHKKVVVACVRILDAKDGTVQSTLRQFGTMTADLVELRQWLAEARVTHVAMESTGVYWQPVFNLLEGHFKTWVVNAQHIKKVPGRKTDMKDAEWIAQLMQCGLLRPSFIPDRQQRELRDLTRQQTKLVQQRNAVDNRIQKVLETANIKLGSVASDVLGVSGRKMIEALIAGEKDVTVLAELAQRKLRDKIPQLQRALEGELNDHHRFLLRQLLGQYDFLEKEIASVSERLGAIAPPSFRAAVEQLDAIAGVGERGARALLAETGTDMSRFPTHKHFTSWAGQCPGNHESAGKRRSGKTPAANRHLDAVLTEMAHAAVRTKNSYFKSQYHRLAGRREPHLQPNFRRRVILLF

SEQ ID NO: 371075 - protein, 375 aa, unidentified
MANATLIGIDLGKHCFFVHAQDARGAQLWRKKMTRKQLYVYLATSAVSLIAMEACAGAHWLARKCQSYGHQVRLIAPQFVRPFVKGNKTDFADAQAICEAASRPSMRLVGVKTAEQQTLLALHRVRESLVGERTATSNQIHAFLLEFGVALPIGALAITRLPVLLDDPRHALPPAMVALLLRLHQRYAQLSREIIEFETQIKTHTVADEAGQRLLTIPGIGPITAGSLLAMAGDARAFKCGRDFAASLGLVPRQHSTGGRATLLGISKRGNKQLRCLLVQGARAVMRFAERRTDALGRWLQSLLRRRHSNVVACALANKMARIVWAILAKGGEYRAHRPSLELLSCLLLRPLTCDEDKPHKARLKTWPKIQSSRD

SEQ ID NO: 371076 - protein, 446 aa, unidentified
MVWLGSRTNRVQEVIPVKRKTPYSLVDVKRISVESIIAARAGQPCIVGVDVAKKELVACLYWPDQSFDRPWRIESPGQIRLLIEMLKQLSLSCPLVVAMESSGTYGDVLRQALSDNGLEVKRVSSKAVKDHAETFDGVPSQHDGKDSAVIAELCWMGKGTIWPWKQRPEEDQAMRFWIRRLDTAQRIKQVYCGKLESLLARHWPEVFGLLSQSGPTLTRSLARWGNPRELANDPRAHEILKGFGGHYLGDEKIRRVIAAAGSTLGVRMNPWEERELKAVAEAIVQRQERIKACKRHLRKLAKRHATIQAQAPAIGLVTACVMWMCLGDVRNYASAAAYRKAMGLNLKERSSGTYKGTLSITKRGQRLVRKWLYFSALRWLREPAVKQWVQRKKMRDGGKGGKAVVGVMRRLALAAYHVGKNGVAFDPARLFPGARPPRRGSQIATQ

SEQ ID NO: 371077 - protein, 346 aa, unidentified
MLYAGLDLSRKRLDFHLLDADGGTVEVGAAPPDADGLRGLTERIDRHGAPIRAAIESMNGARFVHDRLELAGWQVEIADAQKVKGLAPLACKTDRIDAWVLAELARRELVPAIWLPDPTVRGERERARWRLHLVRHRSSLKQRVHAVLLAHGKPCPVSDLFGVRGRQLLARLDLPEPWQGTLEASLRLIDELDREIGDCERELRRLGADHRYVPLLLTVPGIGWVLAYTIAAELGDINRFPTPRKLTGYTGLCPRVYQSGERDLRGPLAKQGPRYLRWALVEAATHACTAPIYRDRYQQTKTRIGKQRGAKVAQIDLARRLTEAIWHMLTREQPFAPKGATDPLAA

SEQ ID NO: 371078 - protein, 472 aa, unidentified
MSKKDKSRSPQTKRRVSNKRLPVQLMERINANAAGIDCGATHHYVAVPEDRDDEPVRHFKTFTDDLHALADWLLHCDVDSVAIESTGTYWIALYEILQARGLDVTLVNARHVKNVPGRKSDVSDCQWLQWLHTVGLLRASFRPDAEIVSLRVYLRHRQTLVEGASDHIRRMQKAMVQMNLHLHNVLSDITGVSGLRIIRDIVAGIHDPVQLAQHRDRRCRATIEEVQASLTGHYREEYLFALRQSLELYDIHQRQMQTCDEHIESLLQDLAASVPEPEPPTAPARRGRRKVSANAPTFDLRERLYQLTGGVDLTRIDAIGPYAALRLISEIGTDMSRWPSEKHFTSWLTLAPQNKITGGRVLSSRTPRSANRAAAVLRMCVMSLIRSNTALGAFYRRVAYRTGKAKALTATARKLAILVYRALSGTLVYEDPGAEAYEQQHKARVLATLRKRAQRLGFALVLDDAPQSASVS

SEQ ID NO: 371079 - protein, 396 aa, unidentified
MTATHTMHATAPTVQLHLAFELGWSQWVLAFTVGHGQAPRLRTIRARDEEALKAEIAKAKLRFGLPADAPVVSCYEAGRDGFWLHRYLTAQGISNLIVDSSSIEVNRRKRRAKTDRIDAGKLLCLLVRYHNGEKKVWSVVRVPTVAEEDQRQLGRELLALKDEQTQHVNRIKALLASQGLDVKVDEKFPERLAAFRLWDQTTLGEDRQQQLQREFARWQFVHRQILDLEAQRRQCIRRAETPAVKQVRSLLELRGIGLNGAWLLVRELFGWRTIRNRRELAALVGLTPMPYQSGDSACEQGISKAGNRRLRRLLVELAWGWLRWQPSSALSRWYAARFGSGRRARKVGIVAVARKLLVALWRYLDRGEVPEGALLCDWRDKVDPSRKKVAAVAAEA

SEQ ID NO: 371080 - protein, 341 aa, unidentified
MEKYVGLDVSMEETSVCVLDGGGNIVFEGKTSSQPDALSKLLRAKASDAARIVLETGSLASWLWHELRGRNFPVICLDARHARAALSMRVNKTDRNDARGLAELARMGWYREANVKSMESRYTHSLLAARAKLVDLRRDVENQMRGLLKGFGLPPGKGGIKALLEKIVVIMREAPHLHMLFKPMMLAHSALVTQVEFYDVQILKLAKGDETTRRLMTVPGVGPATALAFRSTIDDPNRFKSSNDVGAYLGLTPRRYQSGELDRTGRISKRGDRLTRFYLFEAASVLLTVVKRWSVLKAWGVRLAKRVGIKKAKTAVARKLAVILHCIWVDGTEFQWGKEKA

SEQ ID NO: 371081 - protein, 388 aa, unidentified
MLFVGIDIGKNNHVASMLDENGKVVFKAFSFPNTTNGGNALLSKLFAYSSNPSDFDIGMEATGHYWLSVYSFLFEKGFPLHVMNPIQTDGWRKGTEIRKRKNDIIDSILIADLIRYGQFVETRLADEDLFSLRTLTRFRTYLVESISDLKRKVVCVLDQVFPEYQSIFSNIFGKTSKEILLQFSSPIDFENISSETLAELLAQLSRQKIGASKAEQLKAAASSSFGITFAKNSFTFQLKALIGQISFIENQVKETESEISHIMEKLDSPITTITGIGSVTGAAIISEIGDISKFDNPRKLVAFAGIDASVTQSGEFEATHNVMSKRGSPYLRKALFQAALIASFNAERTNFYVLLIQVLHKSIHHHFITTYCMCQHLITIYGALLFII

SEQ ID NO: 371082 - protein, 339 aa, unidentified
MNSTVVGVDIAKMVFQVHFVDQDSGEIVNKQIKRSKFLEFFGNRAPCLIGMEACGGAHHWARLLTKIGQQVKLMPAEFVKAFNIRSKNDAADARAIWLAVQQPSKPVAIKTEMQQAVLALHRMREQLVKFRTMQINALRGLLTEYGEVMGKGRTALDKAMPEVLSRVAERLPAVLVDTMREQWNGLIALDEQIAGIERRMREWKKDDPAVKAISEIPGVGLLTATAAVAMMGDPKAFRSGREFAAWAGLVPRQTGSGGKVHLHGISKMGDAYLRKLLIHGARSVLTHAKDPGPWIDQISKRRPPNVVTVALANKMARTIWALLAHNRPYQKDYLSAKPA

SEQ ID NO: 371083 - protein, 443 aa, unidentified
MKPLSVLDPKAAAIDVGSEKLHTSIAGDTPKVFGTFTVDLEALRDWFKEQGVRTVALEATGVYWLYLYEVLEAAGLEVVVVNGRHVQNVPGRKTDMADCQWLATLHAHGLLRGGFVPPADIRRLQDYQRLRADHLIGAASQVQKMQQALERMNVKFHDVISDLVGKSGLKVVRAILEGEREPGCLLALCDVQIQQKKARAVRESLRGCWKDEQLFALRQGLELWETFQQKIADCDRQLEAQLRELAGPPPKDGQGGGAELKLAPAKRPGKNAPAIERFQELLARLCGGRDATQIPGLSAYLVLQLISEVGQDMSCWPSEKHFTSWLGLAGGRKQSGKRKGSIKAHRNRAGRMFCAAARALAQSVDKALGGFYRRLRGRVGGLAANVALARKLAEMFYRLLRYGMEYVEKGLKDYEDKVLATETRLLRKLAQRQGFELIPATAK

SEQ ID NO: 371084 - protein, 416 aa, unidentified
MTEQIHVSAGLDLHKKFIIATLLTDTGFREQRRFERTESGLFNLKEWTIEHKCEVVACESTSDFWVPIYTMMEGHATVIVGNARDIKMFSHKKTDKVDSELIAQLALKGMIRPSRIFDRKHREFRSLSRLRHKLVQKKTDIKNEIHHILDSELFRLSSVLSDLFGKSGLRILQGITNGSPMDEIIKKLPLNIRKKTVQLNEILQTTISLEAILRLKHYLNILKCLDDEISNLTDCVFQYANEWFKLEMKVLKSVPGIGNIAAVTLLAEIGNFSDFPSGDKLASWLGLVPNVYQSADKMRTGSITKRGSDHARWILVQIAHAASRKRNTVFHKFYDRKKPMIGAGKTIVALARKIVTIVWHLITHSEFFNDENCDGIPSSKTVKIRIPVIVTLDEILKILNRAAVVLKDPNPDLRGC

SEQ ID NO: 371085 - protein, 372 aa, unidentified
MAKSIRYVGLDVHADTIAVAISEGRGEVRSLGTIPNRPEPIRKLVKRLEPVSTLRVCYEAGPTGYALYWQLVGLGVRCEVVAPTLVPVKAGDRVKTDRRDAEKLARSYRSGDLTPVWVPDAAHEALRDVVRAREAAKKDELRAKHRLSKFLLRHGRRPPEGARAWTDKYWRWLNAVDFEYAAQEATLLDYRTEVERAADRIERLEKAIDEAVEGAPAQMKAVIEALQALRGVAKITATTLVTEVGNFSRFVRPRLLMGYGGLVPSEHSSGQSKKQGAITKTGNAHLRRVLVEAAWNYRHRPRLCGAHKQRQQGVSEEIKAISWKAQQRLNSRYWRLTSKGKIPGKAVTAVARELVGFIWAIGVQAEREAATA

SEQ ID NO: 371086 - protein, 360 aa, unidentified
MGEITRVGVDLAKRVIQVHAVDESGRVIVAKQLQRDGFTAWCAQLPPGCLVAMEACSGSHHWGRRLRAMGMEVKLIAPHFVSPYRLSGKTGKNDAADAAAICEAASRPSMRFVPVKSVEQQSMMALHRLREGYKEERTACINRIRGLLAEFGLVFAQRPEVLRAALAEVIEDAGNELGAVARMALQRAHLHWIELECHIAWCDERIAMHVRNDEQAKAAAQLCGIGPVTASALVATVDDFKQFKNGRQFSAWMGLVPRQNSSGGKAVLGEITKRGDEYLRTLLIQGAKSAVFTAHRRSDRLSRWIVQLRERVGWQKAAVALANKHARILWSMLVNGQSFDPEHVPTKHLMRPTAALPAAG

SEQ ID NO: 371087 - protein, 350 aa, unidentified
MGMTMRMRISVLGVDLGKNVCSLVGFDASGAVVLRRRAKREPLIALAAKLPPCVVAMEACCGAHHLGRVFAAHGHDVRLMSPEYVRPYVKAQKNDDRDAEGVAEAATRPTMRFVELKSQEQLDMQTLHRSRERLVGERTALINQLRAILLERGIVAPQGKRKLEQFLVNLMDEQGGAGLSPRMIMLVTDTRVQWAELDRRIAAFDAEFVRWTKENEDARRLATIPGVGATIASALIAAVGKAETFERGRDLAAWLGLVPRQFTTGGKTKLLGISKRGNKYLRKLLIHGARAALPYVAERDTPLGRWAKALLSRAHPNVVVVAFANKLARIAWAVLRRGEPFAAKGTPLAA

SEQ ID NO: 371088 - protein, 360 aa, unidentified
MVVTPYPIGARTVVRASQARIMQGRAKKEAKMDPAPLYTGIDVSKDRLDIALRPVSDAFSFSNDDPGIAQTVTLLADLSRLVGTLVVLEATGGLELPLVGALAASDLPVVVVNPRQVRDFARAIGKLAKPVLSAAEGTDAIDAKILAQFAEAVRPQVRPLPDVATQELRGLLMRRQQMVEMVVAEKNRLRSAPRRVRPQIQEHITWLEGHLDGLDRELSDLLRSSPLWREKEDLLRSVPGVGPILTVTLLATLPELGSLNRHQIAALAGVAPFNRDSGTLRGRRTVWGGRPHVRSALYMATLVATRFNPVIHSFYQRLCAAGKPKKVALIACMRKLLTILNAMLKHGALWQQPCNLMSLT

SEQ ID NO: 371089 - protein, 323 aa, unidentified
MDKYKETFGVDISKDVFDVYGNGCGHSQFSNDSSGFKLFVKSLGSDVLVVMEATGYYHYRLAQFLYKNGIAVSVVNPLSVKRFIQMKLSKVKTDKSDAKAICHYALSNEVPLYNALSNVQAECLQLFRLMDNYLKKRTATKNKLHGEEVLGIPSKYVYRSLKRDLKHLDKEIKGIEDRLLELVKQDQQQQLTLLTSIPGIGIKTALFLVVTTDGFTKFEKASQLCSYVGITPTIRESGSSVRCRSRISKVGNKKLRNLLFLCAFNACKYNKGCREIYERIVAKGKSKKLALIAVANKLLKQAFAIAKSGLPYDENYVSVLAKG

SEQ ID NO: 371090 - protein, 344 aa, unidentified
MGVAIGVDSHKSSLAAAALDQLGRVVGVREFPNDARGHDALLQWSKAHGHERAIGIEGAGSYGAGLARHLLDADESVYEVPAFLTHRERKRDPSKGKSDPSDAVALARVVARGEGLSSPQRTDVFIDLKLLSDHRDQLVRARTRVINRTHIDLVISHPGYEKRIPKLTSKKNQSAALTLLRGDRSVRADLIRDRIGEIRRLSKKIADVEKQLAGKVKESGTTLTALQGISFILAAKILGEVGHPARIRSKGAFAMLSGTAPLEASSGATKRHRLNRGGNRQLNYALHMMARARLRHDGDTKAYVAGRQLEGKSDKEATRCLKRHLSNVVFRQLVVDLIDLPEAA

SEQ ID NO: 371091 - protein, 409 aa, unidentified
MDILLPLCAGLDVHKDTVVACLRRVVKGKVEREVRTFGTTTRDLLELSDWLASQGCRHVAMEATGVYWKPVWHILSDGDVELVLANARHVKNVPGRKSDVSDAAWQSDLLAHGLIRASFVPDGATQELRGLLGTRKQLVQERTRHIQRLQKTLEDANIKLDSTISDLLGRSGRAMIEALIAGETDPDKLAALADGRIKASQARLREALRGRVTKQHCFLLRLHLRQIDGLSEGIADIDREVETRIEPFRKAVELLSSIPGVSTLSAQVIIAEIGLDMSRFPTVGHLLSWAGLCPKSDESAGKRRSTRMRKGAPWLKTNLIQCAWAAKNAKRTYLQAQFYRVRARRGDKKAAGAVAASILTAAYHMLQRGVFYQDLGPEHFERSKAAQAKRLVKRLKNLGYAAALTPIAA

SEQ ID NO: 371092 - protein, 337 aa, unidentified
MKITSVGIDLAKSVFSMHGIDEHGKTVLRRTVSRGKVMEAMAGIGPCLVGVEACSGAHHWARALGKLGHTVRIIAPRFVAPYRKSGKNDGNDAEAICEALGRPSMRFVAVKSAEQQALLVVHRARKGLVDERTALINQLRGLLSEFGLVMAKGRYPARHQLPVILEDTGNGIPELARQCFLDVNERIRELDARLLAYERRIEALAREAEAARRLLAIPGVGPVTATAIVATVGHATEFKNGRQFAAWLGLVPRQYSTGGKVRLGRITKRGDVYLRTLLIHGTRAVLAQLNKRTDRASAWVRGLIERRGLKRAAVALAAKNARTIWAMLAKGEAYRAP

SEQ ID NO: 371093 - protein, 408 aa, unidentified
MEIIYPKCCGLDVHKRSVAACVRLLEADGRLDQETRTFGTMTRDLLEMADWLAAAGVTHVAMEATGVYWKPIYNLLEERFTLLLVNARHVKHVPGRKTDVKDCQWLAQLLQAGLLQPSFIPARPQREFRELTRHRSQLVAEKARVANRLQQVLEDANIKLASVATDILGASGRDMLRALISGETDATKMADLARRQLRSKIPQMRPALEGKVTEHHRFLLGQLLAHVEHLEGQIEVLSRRIEELSGPFAPAREAMVSLPGIEQRAAENVLAEIGSDMSVFPSEHHLSSWAGVCPGNNESAGKRKSGKTTKGNRWLRAALVQAAWAASRKKDSYFQAQYRRLAARRGKKRAILAVAHSLLTVIYHMLKNGSTYQELGGDYFDKLNKNRLLPYFVRRIKDLGFQVTLEAA

SEQ ID NO: 371094 - protein, 349 aa, unidentified
MREYIAFDSHKRYTLAEREPVRGGRAVQQRIEHRRGAIRAYLATCSPGGAVAVEASGTWYWIVDEIEQSGRTALLVHPRKAKLMMGMINKTDKLDVHGLNRLQRNETLPTVWIPPGGLRDQRELTRTRMVFSAARTRLKNRLLATLGKYGLQVEGASDAFGVGARRQWPRLLAQLPAHTRFCVEALLAELDGVCATIGRFEARLGAVLAETEPMRLLVSLPGIGAILSAVIALEVGDVARFPDAEHLASYSGTTPRVHSSGDKTRFGRLRPDVNRYLKWAFVEAANSVALQSGRAPRRHVSQLYQRLTHRRGHAKAIGAVARHLSEATWHVWTKGEPYRDPNVGQTRKA

SEQ ID NO: 371095 - protein, 343 aa, unidentified
MKQISVIGLDLAKNVFQVHGVDASGVVVLIRQIKRKDLLKFFARIKPCLIGMEACGGSHYWCRQLSQLGHEVKMMAPAFVKPYVKANKNDRNDAEAICEAVQRPSMRFVSPKSPEQQAVLHLHHGRSLLLEQRVALTNHMRGILAEYGFVIPQGNKVLAQHLVELLEDAENELPMLTRHLLAELKAEFDQLQSRIERLEWHLKQWHVQDDRSQRLETIPGIGLQTATALAAVIDQGQDFKNGRQLAAYLGLVPRQASSGGKDRLLGISKRGDGYVRKLLIHGARSVIRHVRRRLQLGQAGGNPWVEQLLQRCHPNEVAVALANKMARMAWVLLTRHETYRVNA

SEQ ID NO: 371096 - protein, 351 aa, unidentified
MRNVTIGMDLGDKNHVITILDEAGVIVKSCSLDNVRASIVKFFRKYKGSTVAIEAGTHSPWISRELKALGCNVLVGNPRKLRSIWNSDDKTDVHDSEMLARIARFDSGLLYPITHRNEQAQADLELLKARDMLVKTRTSLINHVRGAVKSFGERLPKCSAESFHKQCRDFLPEDLKTVLQKVVETIEHITDRIKEFGRRIEEISREVYPETELLKAIGGVGPLTALAYVLILEEPGRFGKGRQVGKFLGLTPRLDQSGETDKQLRITKAGNRFLRRLLVGAAQYILGPFGPDCNLRRFGLRLAERGGKAAKKRAVVAVARKLAVLMHHLWRNGEVYDPFYKSHRVEMKNAA

SEQ ID NO: 371097 - protein, 345 aa, unidentified
MECYVGLDVSLKQTSICVVNEKGLVVREGVVDSVPEAIAGFVRSKAPGAVRVGLETGPTATWLWTELARLDLPVICIDARHAKAVLKMQVNKNDRNDAAGIARIMQTGWFKEVHVKDLDSHAVKALLASRALLVKIKRDLENQVRGLLKNLGLVVGHGTFNVFAVRAKELIADRPELTSAVSPLLTARTAIEQQIGELDRRVLKLSRQDAQARRFMTVPGIGPITALCFKATIDDPARFRRSRSVGAYIGLTTRRHASGELDWSGRISKCGDAMLRMYLFEAAGVLLTRVPKWSALKAWGTRLTKRNGLRKAKVAVARKLAVILHRMWVDGTEFNWSNNNKEVAA

SEQ ID NO: 371098 - protein, 338 aa, unidentified
MRKFIGIDLHSNNSVVVVTDDDDRVVYQKRLPNSLEAIEAALAPHREETVGVVIESTYNWYWLVDGLMDSGYRVHLANPTAIKKYEGLKYSGDFADAAYLAQLLRLGLLPEGYIYPREQRAARDLARKRMQLVRQCTAQILSIEGILMRQTGARKSCAAIKRLNAEQVEAFAFAPDVALAVQANRAVSAVLQQQIAVLEARLKERVSLRAEYRLLRTVPGIGEILATTIMLEAGPVSRFAAVGNFASYCRCVDTVRESNGKKKGEGNGKNGNKYLAWAFVEAANFALRYCPQAKSFYERKKRKTNVVVALKALAHKLARACFHILREQKPFDVNRCFA

SEQ ID NO: 371099 - protein, 338 aa, unidentified
MCARAAPTPHTTRKGGTAHLIIIGLDPHPATNTAAALQAPTGRVLATSKFPNTEVGNEQLRRWALAFPERYWAVEGAGNPFVAALVAGLLADEERLTNVPPNLTSQYRKRRSYKKNDEVDAINAAKALLANLGELPAYAPHPDQRRLQALTRTRSRLAEELKANRMAQKDLPPEGSEEESLILAELVSCLAEQIKRLEGLLSKLLERIMPEILLVRGVGVVLGATIVAEVGAIERFEKESGFASYCGAAPVERSSGKSSGRVGVNPGGNRRMNRVLHMIAQVRLRTDGGRSKALVERKQREGKTKRAALRVLKTYIARELYRTLKAIEKSRELGPVAA

SEQ ID NO: 371100 - protein, 349 aa, unidentified
MTPFEGASVAEASTIGLDIAKHVFQAHGADSSGRVVFRKKITRAKLMQFFASQPRCLVALEACGGAHYWGREIGKLGHTVRLIPPAYVKPFVKRQKNDAADAEAICEAAQRPSMRFVPVKDEAQQANSVVFRARDLLVRQRTQSINALRGHLTEYGHVVPQGTAHVDTLVALVEDATSSVPESARTILTVLIGTFRALQTQITQLDAEIARRAKADPVARRLMTIPGIGPIAATAITALVPAPEGFRTGRDFAAWLGLTPLQKSTGGKQKLGAISKMGERTIRRLLILGASAVVRWATQRGAAEGSWLARMLGRKPRMLVTVALANKMARIVWALLVKGGTYRVPAAAA

SEQ ID NO: 371101 - protein, 359 aa, unidentified
MQRKELSFSGQKIFIGIDVHKDSWRVAVAPEVGVIKGHSQKPSAKELLDFLKKHYPDGEYHAVYESGFSGFSTYYALQETGINCMVIHAADVPTTQYEETMKTDKVDAVKLVKSLKVGLLTGIYIHKRDDIDARAVVRLRKTIQKQLGGYKSRVKHLLHSNGVAFPERFSKPSSHWSKAFINWLKKEVNLLSSTRTSLDLLIAQVEGIRQTLLLATRKVRELSHSERYRHDYELLTSIPGIGISVAMALLTEIGDFNRFRNEREFASYLGLVPTSHSSGNKTAHGEKTFRGNKKLGPQIVESAWISIYRDRGLGCVYINYKKRMESQEAIVRVARKLSNIIFSVLKNGKKYELYQWNDK

SEQ ID NO: 371102 - protein, 348 aa, unidentified
MIVAHHYDHVVGVDTHARTHTYAIVATKTGEILGTKAFPVTATAIDRAIAWVRGVAGGLVLFAMEGTGSYGVSLGRALQRDGMVFCEVRPPKKSSRARGKTDEIDAIAAATSAMGIELDAMTRPKADGLRNALRVAIDARRDMETRRTSARNQLNALVRTADFGLDTRRALTDRGVQELADLDPRHADVAVRIIRAEAVRLASTVMDLGQQMRENRDASAELVELLAPGMQQIYGVGPVTAAAAVAAYSHPGRIRSEAAFAALAGVSPIPASSGNTTRHRLNRGGDRQLNRALDVIARVRMVSDTRTRAYVDRRTMEGRTTREIRRCVKRYIARELFKALEARMVQRL

SEQ ID NO: 371103 - protein, 317 aa, unidentified
MNDTNNMPVIGCDVGKNSIVTFDSRSGRIREIANRPDAIATFVAELPDDCLVVCEATGGWEAALLAASVEAGIAAHRADARKVKAFIRSLGRIAKTDRIDAEGLARYGQERGDRLVRWQPADPALLDLQSMVRLRRDLVAQRAAHKQRLTAPAGAAIHVHLDPLLRQFDCSIAELDDAIAALVARIDSLRLRVDTITAIKGCGPVVAACLVALMPELGTLDRKACAALAATAPHPHQSGMRDGYRRVRGGRYEVRPILFIAALSACRYDPQLRDFYKRLVDNGKKKIVAVNAVMRKLIVIINARIRDALFAQNQQLS

SEQ ID NO: 371104 - protein, 360 aa, unidentified
MSVTATHPSPDHSYYAGLDAHHAYVVVAVVDKQGTVVHQASVRTTEPARLVDTLAPYHSATHPLAVVVETCPFWPWLYDLLVPCGIAFQLAHAQELEAIAKAARKSDQRDARLLARMLAGGLIPAAYAKPPAQREQACLVRHRAALVRHRTMLANRIHSQLHAVGLTLPRERLLRLATHSWLRDTAGPLLRPEQRRLIESHWRLVRRLTRMLQRLEPAIVAAAQADPAARLLATIPGIGPYRALLLATELMPLTRYAAEGKFVGYAGLAPITRRSADTMHHGPLPNGANRWVRGALISTVPTHLRYAPDSRLSQYYARQKARLGWQIARVATARQLARVIYHMLRTGEGWRATPAPVGRS

SEQ ID NO: 371105 - protein, 310 aa, unidentified
METKVFVGVDVSKDSLDVAIGGQKDIITFANDQKGVDSLVKKISRIDAQLTVFESTGGYELLAASCLAEAGLPVVIVNPRQVRNFAKATGILAKTDAIDARVIAHFAEAVKPEVRQLKDRQTSELTALVTRRRQIIEMVVAEGNRLRLANKRNKKDIKDHIRWLKKRLDKIETDIGKMIQSSPIWRCKDDILQSVPGIGPITSATLICDLPELGVLSRKKIAMLAGLAPLNYDSGKFKGRRRIWGGRASVRSGLYMATLAAIRCNPAIKGFYQRLIAAGKCHKVAATACMRKLLIIVNAMLRDQTLWQQN

SEQ ID NO: 371106 - protein, 414 aa, unidentified
MHKKKLAVVVADVEVGEEYQFERRWFGGNPEQLQRLAEWLIEQRVEEVVMESTAQYWKPLWSALERSWKPRCQNREGAEKMSGTLHLAQALSNSGRRGRKKDFRDAERLVKRLVSQELTLSFVPDTEQRLWRALTRTRYQRTPDKPHLQNQLEAPLEEAHIKLSSLVSDLLGVSARRMLHALADGGTDPAAVAALAHQRLRATPAELRDALGACAELNPVYRRLVRLARDDLQLIEQQIGQLDQEIASLLREHEDAVQRLAEVPGLGVDSAQMIIAEVGVTAATFASAKNLVSWAGACPGEEESAGVNKSGRSPKGNRQMRRILNQAANAAVKHKGSIFDIVYRRFVPRLGHNQTIGVIAHRLCHLIWIILHNGVRYEERGPSVCEKAKRIRTARMIRTLRTLGYRIEPAVIPA

SEQ ID NO: 371107 - protein, 343 aa, unidentified
MNITTTGLDLAKSVFHVVCFNNQFKEVKKRMLRRSQVLHFFTQLPSCRVAMEACASSHYWGRELRALGHDVKLIPPQHVKPYLRGNKNDYNDARAIAEASTRPGMPFVAIKSTEEQDMQAIHRMRSQCIRDRTALSNSTRGLLGEFGIALPKGLATLRKSIHGILEDADNGLSDRFRKLLARRYDQFVALDDHIAFYRNELEILSQQDDACQRLQTMPGFGPVISSAFRSVIGDGRAYDRGRDASASLGLVPRQHSSGGKNVLLGISKRGDRYLRSQLVHGARAVVIQAARKDDPLSKWINRIREERGWNKAVVATANKMARIGWAILRHNTIYQPDSEQSIH

SEQ ID NO: 371108 - protein, 370 aa, unidentified
MLDTTTFVGLDVHARSIKAVSLDVMTGEVRCATFGYDAGAVAGWVRSVDPRARCVYESGVTGFDLQKRLSGLGVDCVVGAVSKMIKPSADRRRKNDRNDAEFLARMLSVGNVVEVWVPDDECEAARDLTRALEDARDDLSRSKQRLSKFLLRHGLAFDERTPTGRRKGNWTRAHWSWIESIGFAERADNDVLAYYVDAVRRAAEEKARLEGLVEAEARKPRWRKRVDSLRCLKGVDTASAADLVFEAGEFSRFGNARSFAAWVGLTPSEHSSGESDRRGAITKAGNKHLRKTLVEAAWHYLTCSGRPKDLAKGQAPDRGARRHAAKGVRRLVERREALLARGVHGNKANVATARELACWVWAVGLMAEEA

SEQ ID NO: 371109 - protein, 336 aa, unidentified
MFQLGIDVSKKTLDLCLLREGVKGRVKTRKLQNDINAVSAVIAWLSKQHCKPEDVHIIMEATGVYHKSLAYGLHKAGGRISLANPHRASEFARGMGMLTKNDRVDAYMLACYGALKAPEPWLPPPEEVRHLSALLRRRDALVADSTREKNRLEKYLATDTPSVIAESVEAMIGQLNAEIKRLDRLIRSHLNQHPELKKDFDLLTSIKSVGYQLGLNMLVILRSHDFATAEQAATFLGVVPVEKYSGTSVRGCPKLSKIGPPEIRAKLYLVSLCGLRFNPLMKAMYERLCLRGKAKMCAIGALMRKLVHWCYGVLKTQKPFDVGYLSSYARSACKAA

SEQ ID NO: 371110 - protein, 368 aa, unidentified
MKENTLYVGLDTDKKHIDVGLAEPLPRGEVRYWGQLGNEPSSVDRLVKRLRKDGRQLLVCYEAGPCGYGIYRQLNGKPGVTCQVVAPSMIPRRPGNRVKTNRRDCLTLAKLLRSEELTAIWVPDAAHEAMRDLVRARGMVRGDLNRCRQRIGGFLLRQGIPYIGKPWTKKYRLWLGRLEFAEAAHRLMFGELLEALDQAQARRDRLTDHIAELVGQWSLAWLVDAIQGLRGYRLINAVTVVAEIGDPRRFSTPRQLMAFLGMVPSEHSTGDSIWRGGITKTGNGRARKTLIEAAWTYTRPMRSTSPTRHSAAVRAIAEKARHRLSGRYRRLRARGKIAPTAVTAIARESLGFIWAIAHAAAPEATPTH

SEQ ID NO: 371111 - protein, 469 aa, unidentified
MTPRKQKTLCQPPSAEPRQAIHSHAAGIDIHLKEHWVAVPPESVPTSSAGPAAKSPTWVRKFGTCTADLEALADWLAACGVDTIAMESTGIYWVPLFELLERRGFKVYLVNARQTRHAPGRPKTDVLDCQWIQRLHSYGFLTASFRPADEVVVLRAYLRQRQMLIEYSTHHVQHMLKALEQMNVKLREVVNDVTGLTGMAIIKAILGGQRDPIELAKLRNDRCKRTQAEIARALYGNWREEHLFALQQAVALYEFYRQQWSECDQRLMKYLGTMTDHGQGKQLPKPRRQAEKARANEPRFPARTLLFRMSGVDLTVIEGISASSALTVLSEIGRDMSKWPTVKHFISWLGLCPQTHASAGKIKKRRVRRIAGRVGRALRMAAQGCHHAKNALGAFYRRVQARVGSPKAIVATARKIGERIYRLLKYGAEYVQQGVEAYEEAYRQRLLKGLAKRATELGYELTALTPATP

SEQ ID NO: 371112 - protein, 410 aa, unidentified
MELLHRRCCGLDVHKETVVACVRIASDGKAITEVRTFQTTTAGLLELSAWLAAHECTHVAMEATGVYWKPVWHILDDGEFELVLANAAHVKNVPGRKTDVNDAMWLAELLAHGLIRASFVPDTQTQEMRGLLRTRKQLVREQSRHLQRLQKILEDANIKLDSVLSSLLTKSARAMMEAMIGGETNPVKLASLADPRVKASPQELREALRGRVTKHHRFLMRLHLNQIDALAAAVATVDVQVEANLGPFRTAVDLIKSIPGFDDLSAHVVVSEIGIDMSRFPSHAHLISWAGLCPRNDESAGKRRSNRLRKGAPWLKTTVVQCACAAVKKKNSYVQAFYHRIKARRGPTKAIMAVAASLLIAIYHMLKDGTMYQDLGPQHFDRHSADRQKTRLLKRLADLGYAVEIKPLAA

SEQ ID NO: 371113 - protein, 475 aa, unidentified
MTIRRIVGIDLGIASAHTVRILDETGTTLAKRKAYPTVESLIGVEQAALGGCDDDVRLEVIVEPTGPAWLPIAVFFGRRGHLVFRVSSAKASDLRKFFSRHTKTNGIDADTLARLPLVDPDGLQPLRLPGVEHAALDRRVRACDRLTRQAAEHKVRIKDLVRQLLPMTPLTGDLGVADLAVLERWADPNALLKAGPKRLTAVIVKASHNHQGAERAEQWFNAARASIELYGDHPAIAFTDLAAEVATEVRLLRAVQAELATHADERETAYRWADPTGLARSLPGLAKVGGPALVAVMGDPTRFAKGKQFRSFTGLTPKASETGDTDRKGQAMTKSGSSLLRTTLIRAADNARKQDPQLARIYYVQMVERGKDHLGALCVVAANLAERAWAIMNRGMPYVICDTHGRPVEPTEAKAIIAEHWTVPAEVRARRRSKKRGKAPQTTRAGQHARGDLPRPSIVDQHPRQGQQQIHRKTA

SEQ ID NO: 371114 - protein, 341 aa, unidentified
MSEVSIIGIDLAKRVFQLHGTCANGAVIFRKKLTRVQLLAFMSKQPECTVAMEACATAHCWGREIEKLGHTVRLIAPNYVKPFVKRQKNDVADAEAIVEAASRPTMRFVELKSEAQQARAMLFRTRQMFIGQRTQTINALRGHLAEHGVVAPKEAIHVKRLADAVEDETIGLLEDVRELAQVYLAQIEGLNVQVAALDQRMKGAAKEAEAARRAQTMPGVGPITALAIETFAPGLNCFRRGRDFAAWLGLVPKQNSTGGKPRLGKTSKMGQRDIRRLLISGAMAVLQAVERFGTPHNTWLIAMLERKPRMLVAVALANKMARSLWAMVTKQEDYRTPAAMA

SEQ ID NO: 371115 - protein, 427 aa, unidentified
MYVAVPPDRDPEPVRIFPTFTADLEALADWLVERGITTVAMESTGVYWIPLYQILEDHGIRPCLVNARHMKNVPGRRTDWYECQWLQYLHSCGLLRAAFRPEQEVCAIRALLRHRHELVQMASQHVQHMQKALTQMNLQIQHVISDITGVTGTAIVDAILAGERNPAVLAKLRHERVAADKETIRKSLEGDWRQEHLFTLRQSRKLYDSYVKMIEDCDKEIAPRLSQMEAKLDVSQNPLPQLSGPSRKRRKKRTGDFRFDVRKEAYSLYGVDVTRIPGLDGLVIPLFSEVGRDLKSRFGTSDRFSSWLGLCTDNDKSGGKVLWQGVRKVKNRAGDIFRMAAAALHHSRSPVGDFLRRMKAKLGPAAGITATAHKIAIIFFTLVTKQIEYDGSVWAARDKERHQRFEQKVKRQARQLGYELVPIQVPA

SEQ ID NO: 371116 - protein, 318 aa, unidentified
MPQKTRFVGLDVAKSKVDACIRSEGLRLSAPSTPEGRAGLVAWVRANRVGRAVMEASGGYERGWAEALRAAGVEVRIVDPKRVRHFAKAAGRLAKNDPIDADTIAWFAEAFPDREAQPHDPARDEIDRLVAARTALKDAEDRIKQQGEHRPPAVVAKALAAIAKTIRAELRKVEGAIAAKIKANPGFARRAEIIASVPGLAGQTAAGVIAWLPELGHVTNEAAAALIGAAPYDNDSGGRKGQRHIKGGRRKLRNLLYMPVMGAATRHNPMLKAHYQRLRARGKQAKVALIACMRKLIVILNTMLARDQTWNPPVRAAR

SEQ ID NO: 371117 - protein, 345 aa, unidentified
MQFFVGVDVSLESSSICVIDERGVVIKEGTAASEPEAIGRFIRHQGRKVEHVGLETGSLSQWLHAGLVRQGFKVSVMEARHVHAAFGAMRVKTDRNDARGLAQLIRLGWFKSVHVKAPSAQETRALLNARQFLVDKVTGIENSMRANLRNFGLKMGVVSRKTWPTRARDLASGIPALEMLVEALLKVRDVLLQELRTLDRKLLETARADPIVQTLMTAPGVGAIVALTYRNAIDDPNRFKRSKDVGPWLGLTPTRYQSGQIDRRGHVTKAGDGSVRTALYEAATTLLGRVVRWSALKNWGLRVARRSGMKKARVAVARKLAVILHSMWRTQSPFAWAADKEEVFA

SEQ ID NO: 371118 - protein, 440 aa, unidentified
MSQEDRSRLEEFRQFRKEVRGSTEYLLVGIDVAKDKHHAFFGTATGKTLFRRLVFENNLEGFRRLLVQAEAMKVQHGLKRVVFGMEPTGNYHKPLGEHLIRSGHWVVLVSGVAAHENRKTLDGRWDTNDTRDAANVADLMSQGKCLFYEFPGGVFQDLRNLLSLKRRLKRMEQGHRVRIRNHLVAKYFPELDRYYEQSESTVLAIVRWCLDPSEIAGLEYQKFVQMVGSIRGRCSQEKRLQAIWKMAVDSVGCEAGATVEFEARVMVEGLRQIRESIREIDERIQEVCSQFSEYECLRSIPGFGPDVSSKVLGAIGDPFRFQKGSQVLKMAGLDLSAERSGKTSESAIPVISKKGKADLRYALYQAAFIASTRNQDFIVYYTDQLRGREREPGIKIKMRVKLSAKLLIVAWTLMKKKEPFHPGYLRVEGQSFSAEAGRER

SEQ ID NO: 371119 - protein, 389 aa, unidentified
MSRRSAGSGPVVIAVDPHKRSWTAVAVDGSLQLRTSIRVEANRAGYRELRRFAALWSQSRWAIEGAGGLGAPLATRLLADGLAVLDVPAKLAARVRALSTGHGRKTDEADAVSVGVAAWTATSLVSVQFDETALALRALTEHRDDLVKTRTQTVNRLHVLVAHLIPGGAQTGLRADAAADMLRRVRPRDVLGATRRRLAVDLVEEVRRLDQRIAGIGEQITAAVGESKTTLTGLFGIGEMLAGKILARVGSVRRFASAAAFASYTGTAPIAVSSGDVIRHRLSRAGDRQLNYALHVMAITQIRHDTAGRDYYRRKRAAGKSHKEALRCLKRRLSDVVYRQLLRDAQAAGPGGHPGATLQSSAAGSTPTADSSDKSLPGPAATQPTTAGK

SEQ ID NO: 371120 - protein, 426 aa, unidentified
MPYQIAGIDVHKKMLAVVVADVEVDGEYHFERRKVGTSPTQLRALAEWFLDRGVEEVVMESTAQYWRPVWETLEQYWRPQRRARDGASPVSGILHLAQAQSNRGAGGRKKDFPDAERLVKRLVAQELTLSFVPDPEQRLWRTVMRRKYQLTRNRVQLHNRLESLLEEAHIKLSSLVSDLLGVSARRMLQALADGETNPTTLAALADQRLRATPEQLSDALGACTALHRVYRRLLTMMLTELRIIDEQIAELDREMASLLAEHHDAVHRLAEVPGLGVDSAQQIIAEVGAAAATFPSPRHLASWMGACPGNEESAGVNYSHRCPKGNRQMRRVLNQAANAAVKAKGTIFAMVYRRLVPRLGHAQAIGAIAHRLCRLIWKILHQGIRYEERGSAVNESLKQARARKMIRELRSLGYHVERMVQSTGPA

SEQ ID NO: 371121 - protein, 391 aa, unidentified
MYSDGSKHSSFSVPNNRNGAKIIVDRVTSVLLLQDIPQVVIGMEATSVYGDNLMRFLRESGSLGRFERNLHMLNPKQVKKFRDAYSDLPKNDHVDSYVIADHLRFGRINKEVYMDDYKYQALKMYTRARHQLVQELTREKQRLLNTVFISFSGLTQEKIFSDKFGATSMALIEEFSSLDELAYMSTDELVDFIRKKGKNHFDDPEEIAEAVQRAAKNSYRPPQVIADAAKQMLAISMNTIRLLQKQIKEYDKAIEKMLEAFPQTLTSIKGIGNIYAAGIIAEIGDINRFPSQAGLAKYAGLVWTQHQSSDCEAEDKRMIQGGNHHLKYYLCEAANALRRCDPEFKRFYALKYKEANKHNHKRALALTARKLVRLVYTLLKTNRLYIPPEEY

SEQ ID NO: 371122 - protein, 332 aa, unidentified
MKFSETIGIDISKSWIDARMHLARLERRFDNTIGGYKKLIKWVEKNLLLPKESILFAFEHTGLYSYGLSSFLSSGGYSFILIPGLALHRSMGIVRGKEDHIDATKIALFAYRRREEIIPYQMPALIIDHLRHLLSLRDRLVMQRAGYQASLKESAHFLQKNQDPDFFQIHDRMIHYLSKQIEQIDLKLNSAIQQDQGLNDIFKLITSIKGVGPQTAYYMIVRTHGFLLFGEWRKFASYAGTAPFPYQSGSSILGKTKVNQMANKKIKSLLHSCAMIAIIHNPEMKAYYHRRVDQGKSKMSTLNIIRNKLLSRIFAVVNRGTPYVNTYRFAAP

SEQ ID NO: 371123 - protein, 362 aa, unidentified
MNRNTGMSAGQIIGTLNGLQVMGLDIAKHVFQLHTVDMGTGEIANVQIKRAKVLEYFVNKPKSLVAMEACGGAHHWARELTALGHSVRLLHAKIVRPFVSGNKTDATDARAIWLAVQQPGVKFVGIKTAAQQATLTLHRQRELLMKMRTMQTNALRGLLYEFGATFAQGRKALFKDIERALEELSTQLPQMVRDSLREQVGRIKEMGDAMLEIEKRLALQLKADPHMQRIAQIPGVGLLTATAAIATMGEASAFKSGREFCAWLGLVPSQTGTGGKVRLGGISKRGDTYVRTLLIHGARSVLSHAKEPSPWLQQIKERRPANVVIVAQAAKMARTIWAVTAKEQSYQRGFQSLRPSAAMHAA

SEQ ID NO: 371124 - protein, 316 aa, unidentified
MNETKVERFAGIDVSKSTLDVCLMPEGTKLHVSYDEAGIHRTTGFLKEGSPALIVLEATGGLEVRIATALAAAGLPVVVINPRQARDFARATGQLAKTDRVDALVLAAFAKAVRPQVRPFKDEDTIALNDLVSRRRQLIDMRVQETLRLGTAASAALKKNLNKHIAWLDKQIAENDRDLTGRLRESEVWRAKDDLLRGIPGVGAVTTLTLLAKCPELGTLNRREIAALTGVAPLANDSGKHRGKRFIWGGRADVRAVLYMAAVTAMRCNEPIKAFADRLKQAGKPAKVVIVACMRKLLTIMNAMVKNNVPWNPKSV

SEQ ID NO: 371125 - protein, 466 aa, unidentified
MKKSTIYSNQSQELLRVFEEAGNNSKMMCVPIDFAKKDHIVMFCNGYGDIVRKPFSVNNSAQGVNIHHVFFGGEDVGSYAENFVDTLRTKGWLVAGVNAHDAKKQRANIQASTDRLDLMGIASMLLNRRANCAPAQSGIYRNLRTLVRHRRKLVVMSTEIRNQIHTVVDRLFPGFLDERKTGIVPFTTSSLYLMENRFSARQIRLRKRERLVEILRRYGTSKPRDTAAKLQNYAREVLITPKEYMSTLQLSLTQHVKHFRCLHENIDQAERQIALWLSQTQGAFLTTILGVGIVLAAGVTAEIGDPFVQKPLNNLVSYAGIIPRVKQSGGVEGKTFTGKVAKRSNRILKDYVVKSGLHLGLHGPEDLMADYKRRDAAGQHADFGIGRRYLRMAMCLMRTSQIYLPSRLRKKGVDVHQRSSYYLMRWPYIREKWYKLGAVEAAFKKDRPLGRWRSMVQELYKINLKL

SEQ ID NO: 371126 - protein, 455 aa, unidentified
MQQPVEVSVEEGAEIVQRVCGIDVAKASGMICTRAPHDRLAARRVTKVWEVKATTKAISELADHLAAERVERVVLESTSDYWRPFYYLLEAAGLTVWLVNARQVKNVPGRPKSDKIDAVWLAKLAERSMVSPSFVPAEAMRHVRDLARARFDLVEDRARVKQRVEKLLEDSLVKISSVLTDIHGLSGRAMMEALIAGERDPKRLAGLAKGKARARLGALEEAADGHFTDHHARLARLLLDQIDDLSRRITTLTSLLDEAITTLPQPAPDDRTSVEKATVDAATGEITTAAARFSTAVERISAIPGGGPDSARAVIGEIGLDMTVFGTAGRLCSWAKVSPRTVQSGRKTGRGATGKGNPYLKAALGQMATGAAKTDTFLGQRYRRLIRRMPKAKALAAIERSVLVIIFHLLADPTTTFNDLGPDYYTKRLDMQRRTRNLVNQLEALGHHVTLTPAA

SEQ ID NO: 371127 - protein, 455 aa, unidentified
MAKQKIHKTPAIETVNVGAAAVDIGSREHMVAVNPEVTDAPVRAFGTFTHDLHDLANWFKSHGVTSIAMESTGVYWIPAYEILEQQGFEVILVNARYAKNVPGRKTDVSDASWLRQLHSYGLLRGSFRPTAEIATLRAYLRQRERLVEYAAAHIQHMQKALMEMNLQLHHVVSDITGVTGMKIIRAIVAGERDLDVLASHRDVRCRVSTETIKAALNGNDRAEHIFALTQSLELYDFYQSKMLECDRRLEATLAALGADTAHDPSELPRPRTKTKQVSTPSFDVRAALYGVLGVDLTQIHGMGPSLSLKLVGECGTDLRAWPSAKHFTSWLCLAPGNKISGGKVLSSRTRRSSSRAAALLRLAAVTIGRSDTALGAFYRRLAARAGKAKAVTATARKIAVLFYNALRHGMTYQDPGASHYEERYRDRVLGNLKRRAKSFGYDLRELPPEEEMTVS

SEQ ID NO: 371128 - protein, 365 aa, unidentified
MCIRDSNNMDGFKSLLQTIQDCSQKSDKIKVGLEATGHYSYNILGFLLDNDLPVYVMNPLHTNLYRKSLSLRKTKTDRVDAKTIATMLLSDVDLKSYTDTAYHNEELKSLTRYRFDKVQERAKLKQSVSRLVTILFPELEQLVSSIHGTSIYALLSEYPGAKQISEAHLTRLANILVKTSRGHYRKDKATHIRDAARTSIGSVMPAKSLELKHAIKLIQELTSEINEIEDAIRKIMDELKPPILSIPGMGFHSAAMILAEVGDFSNFNSPDKVLAYAGCSPSTYQSGKLTNCYAHMEKRGSRYLRYALYTATKYVCYWNPVFTEYLTKKQAEGKHYNVALSHATKKLVRLIYALQKSGKAYLAVT

SEQ ID NO: 371129 - protein, 365 aa, unidentified
MAMAASESPATVSEVVLGVDTHLEMHVAVALDGLGRRLGELAVSTTTKGYERLICWAQSFGTVGCAGVEGTGSYGAGLARYLRAAGISVVEVERPKRRHVRRNGKSDPIDAEAAARAVLADDTVGEPKSGDGQVEMIRSLRSARQSALKARTQAANQLQALLVTAPEDLRHRLRELPTKDLVDTCARFRPGSDLDEVHTATRFALRSVARRHQQLSEEIAELDEQLDRLVAKAAPELTALTGVGTDHAATLLTVAGDNPQRLKSEASFASLCGVSPIEASSGKVVRHRLNRGGDRDANRALHLICVVRMRHDQRTKEYVARRTAEGKSKREIIRCLKRYIAREIYRLLAPIAAASLPTAPGSQAA

SEQ ID NO: 371130 - protein, 317 aa, unidentified
MDVLGIDVGKNELHALLLQGERTARKSVSNTPTGHEQLLRWLSNRKAAQVHICLEATGSYGIGVAEFLHDQGHMVSVVNPTQIKAFGRSELVRTKTDAVDAALIARFCRATQPPRWNPPPAHIRTLRALVRGRETLTELMSAERNRLEAATMRPVQRSIRAVIANLRAELKRLEAEIDQHVDQHPDLRAHIDRLDEIPGFGALTAVKVIAETHAFAVCATSKEIVAFAGLNPRLYQSGTIARRGHISRIGNASLRKALYFAALSAKRHAAYFRTFVDRLKAAGKPPKVIITAIMRKLLVLAFQLTKTQTRFDPDYAS

SEQ ID NO: 371131 - protein, 405 aa, unidentified
MEIVVERACGMDIHKDNITACILTSNGKEIQTFPTKTVFLLQLIDWIKQHECTHVAMESTGVFWKPIVNLLEAESIEFLVVNAQHMKALPGRKTDVKDSEWIAKLLRHGLLKASFIPDRNQRELRELVRYRRSIIEERARQHNRIQKVLEGANIKLSSVVSDIMGVSSRDMLHAIADGEDDPEKLANFARRTMKRKKDELELALHGYVNPHQRLMIKTILTHIDFLSEQITVLDQEVATRVVPFSDDVERLDSVPGIATRMAEQILAEIGTNIKKQFPSAAHLCSWAGLVPGHNESAGKRKSAKSKNGNKYLKSALVEAAHSVAASKNYLGAMYRRTAARKGRKGAAISVAHAMLRIAYYLLTREEMYVDLGEDYFDKQKQQSIVKYAVRRLENLGYSVTIAEVS

SEQ ID NO: 371132 - protein, 409 aa, unidentified
MDQLIERCCGLDVHRDTVVACVRGPGPNGRRQHEVRTFGTTAVELLALRDWLEAHAVTDVAMESTGVYWKPVFYVLEEAFTCLLVNAAHIKQVPGRKTDVKDCMWIAQCLEHGLLRGSFVPPAPIRELRDLTRHRKVLIQERTRAANRLHKLLEDAGIKLASVATNFQELVQRAMLEALVHGTTDPAVLADLARGKLRKKLPALRQALAGRFRPHHAFLVGQLLAHVDYLDEAITTMSEEVEGRLAPFAAQLTQLDTIPGINTRTAEVIIAELGVDMSCFPSDRHLASWAGICPGNNESAGKHQSGKTRKGNRWLRMTLIEAAGAAIRTKDSALGARYRRVMRHRGHKKAVVAVAHAMLRAVYHLLAEGTTYREPGADYYDRHHTHRVTRRAIQLLERQGYRVVLEPAA

SEQ ID NO: 371133 - protein, 482 aa, unidentified
MKKKNIYINQSQELLSLFEAAGNNEKIMCVPIDYAKKDHIVMFCNGYGHILRKPFPVKNSPEGIAYLTEQVTRSCSHRRIDPKHVFFGGEDVGSYAENFANTLRSGGWIVAGVNAHDAKEQRANIQASTDRLDLMGIASMLLNRRANCSPAQSGIYRNLRTLVRHRRKLVSMSTEEKNRIHTVVDRLFPGFLDEKKTGILPFSKSSLYLMENRFSPLQIRRRKRHKLIEVLQRYGTTKPENTAAKLHQYTARVLNTPDEYIFTLQLSLVQHVKHFRCLQDSINQLENEIAIWLAQTQGAFLTTVRGIGIVLAAGVSAEIGNPYKQRPLNNLVSYSGIIPRVKQTGGSEGKTRTGKVAKRCNRILKDYVVQSALHMGLHGPEDLMADYKRREAAGQHADFGIGRRYLRMAMCLMRTSQIYMPQQLRNTKVKPEERAGYYLMTWPSLRDKWNKAGALEAAFEKDRPLGQWRNMVQELYEIKLKL

SEQ ID NO: 371134 - protein, 409 aa, unidentified
MRYYLGVDWADQTHAVWVVDEGGTKVAMRTVPHTAEGLTEWGRELDEWRAQGIELWAAIERPEGRVVDFLLDHGVVVYAVNPKTLDRARDRFRQSAAKSDPFDARVLADFLRTDHAHLRAVQPSSEAAQELKLLTDDYQRQIRQQTRLVNQLTTTLKAYYPRGLEVAELTTGLAREFLQAYPTPATITALTERQWQRWAHAHRLSETRTQQLWVVLQRPQLPVPPHVVRAKARLMQSLVAQLMVVMEGVGAYREAIEDFFARIPAAQWIRTLPIGDHGITAPTLWARLGDAPGRWESFRHLQAQAGTVPVTIRSGKQQVVRFRFACDKSLRYIIDHVAFLSLRWSEWAHAYYAGQRARGHSYRQALRALSAKWLKIIFVMWERQIPYDEQYHLAMMTRQQLRQRQEKVA

SEQ ID NO: 371135 - protein, 348 aa, unidentified
MDHIGIDVHKRESQIYILAEGGEVIEHRIRTEGERFAAVLGARPRARLLIEASTDSEWVARCLEALGHEVIVADPNFAPMYATRSRKVKTDRRDARALAEACLLGAYRPAHRLSDPQRHVRGRLGVRDALVHTRTRYISVIRALLRQQGYRVPSGSAGSFVDRVQGLPLPGRLRSVVAPLLAVMRPLNQQLAYSDATIEHLAVQDPRVPRLRSVPGVGPVTAAAFLAAVDDAQRFHHAHQLEAYLGLVPREYSSGETQRRGPITKAGHSRVRWLLVQAARSILRCRPPAAEALWTWASRIAARRGTHVAVVALARRLAGILYALLRDGTVYAPRRPAALPDSLVALPA

SEQ ID NO: 371136 - protein, 422 aa, unidentified
MEPPTTVIAGVDTHADTHTLALLDTNGRVISTETFETSPDGYGRLIDALGKPSRCAGIGVEGTNSFGAALARRLSAGGFPVYEVLRPNRGVRRKDGKSDPIDAIAAARGVLAGEATSLPKSSDGWVEALRHLNAERSQLVAAMTMLANSTGGLLVTAPEPVRERYRGLRTETRMNHLASCRPSGGLVAHSVLTALKSAAKAWKTLKEQADLLEERMRRILEANARPLLDIYCAGTITAATIAIVAGDNPERIRDEAAFAKLCGACPIPASSGKTNRHRLNRGGNRQGNMALHRIAIVRLRYHQPTRDYVSKKTREGKSKLEIIRCLKRYIAREAYKALLAIRNGNAGQRETPRERGARLRRLRTSHGITQQQVGEALAVPSSRISEIERGTRNLPELEQRATQWIHSITTPTTQHSQPFDNK

SEQ ID NO: 371137 - protein, 307 aa, unidentified
MSEKIYFGVDVCKESLAFCAVGIAGQVPNNAPGQRRLLARLPKGAHLIIEASGGYERELVRVAQQSAVQLSVVNPRQVRDFARGVGRLAKTDPIDAEMLARFGAEVNPSPDAVPTAAELALQELVSARQQLVEQRTVLLQQQAQHLSSIVRRLDRARLKLLQRQIAQLELAIGSILEEQSALNQKVERLQQVKGIGFITAVTCVALCPELGSLSKRQTAALVGVAPYDDDSGTRKGWRHIAGGRPKLRRALYMAALSAIRSNPILRRFYQQLRQRNKPPKVALVATIRKLAILLNHLLRNPSFLPAV

SEQ ID NO: 371138 - protein, 342 aa, unidentified
MKELKQVVGIDVAQKELVVTIGRLLEDLSVDLFSYKVFKNNDKGFLSLVEWVTKLVENPQEVHYIMEATGVYHQKIAYFLDTNQLKVSIVLPNKISNYFRTLEIKTITDKTCSQVIARFGLERKLDLWKRPKTVYKNLQQLTRERDQIVAERVIVKNQLHAEKIEAEPNLMTLKRINERIKLLNKQENEIKNDISKILKNSAELRKEIDRMMTIPGVGELTAVIILAETNGFELIRNKKQLTSYAGLDVKEKQSGTSIKGKPKISKKGNRSIRKAMHFPSLVAVKWDENFKELYARLVSKHGIKMKALVSIQRKLLEMSYVLYKNQTVYDKEYKNSVQTQMA

SEQ ID NO: 371139 - protein, 342 aa, unidentified
MKQIKIVGLDIAKSVSQVHGVDADGEVVVRRRLKRSRVVPFFSSIAPCRIGIEACATSHFWARELGALGHDVRLMPPAYVKPYVKRQKNDAADAEAICEAVSRPTMRFVPVKTVEQQSVMVMHRTRELLTRQRVRLSNAIRAHMAEYGLVAPIGRNGLQALIEVIGDETDGRVPPEARLCLKMLVAQLQLVNVQVLENDRRIRASARSTEVGRRLMEIPGIGPVIASALVATVPDPHVFRCGRNLSAWIGLVPKQSSTGGKDRLGSITKQGNRYLRQLLVIGALAVIRYAQRNGTRRPWLVQLMTRRTTKVAAIALANKTARMVWAIMVSGERYREPVVQTA

SEQ ID NO: 371140 - protein, 313 aa, unidentified
MAAEVFVGIDVARDSLEIATRPAGEGWQVSSDVTGITALVARLRAIKPVLIVLEATGGLELPLLAACGSVGLPIVAVNPRQVRDFAKAVGKLAKTDALDAQVLAHFAEAVRPAVRPLPDAATRELSALVARRRQLVDMLTAEENRRKTAPSAIRADIQEHIAWLRKRLKGVDRELGQAIRGSSLWREQENVLRSVPGIGPVVSAVLLADLPELGTLDRKPIAALVGLAPLNRDSGTLRGKRTIWGGRGTVRAALYMGALVGSRCNPVLRAVYARLVAAGKTKKLALTACMHKLLTILNAMLKHRTMWAPATPA

SEQ ID NO: 371141 - protein, 471 aa, unidentified
MIRSVGIDLHQGRHRARCLDDRAQPCDSFSFQTTPEGLATLEERVFRDGANPIVVLEPAGLPWLMVAVYLRSRHPHCRLVKAKTQKVAALRRYLRGPVKTDRLDALTLAKMPFIDPEKLDDIYLPPAEIHALQRLTRQRKRIEQDITGRKVRISAIVDGYLPGVRRAFNDVWSSPVRAFLRSRLNPFAAVRDGEDALHAYLSKASNRSKWSRAQTQEVFLTCRSVATVCELSVAAGTVNEEFFKDLQDEIARELRMLEADEAEAESLARRIAELYQKLHPSDNLCSIPGVGEHTAPIFLAAVGDPARFQNQSAFANWEGVVPGARQSSNVQAKGLRMTKAGPSIMRMALYQAGDIGRRWDPQLAAVYHREMVYHGKNHKQAMGAVMSHLGARVLRVLKEDSPYELRDIEGNPISKDEARRLVLSKYHVSEDIRRERRRRNRKVGKDRETATYGTNEAGKAPQPVQVQAVSR

SEQ ID NO: 371142 - protein, 464 aa, unidentified
MAKRTQSRKERLAKKMSRLEVQNPDAAGIDVGSREHWVAVRPDLNAQAVRCFQSFTKDLNELADWLIDCNVTTIAMESTGVYWIPLFQLLEARGFKVLLVNAYKIKNVSGRKDDESDSEWIRKLHSYGLLEGSFQPDAKLRKLRTYLRDRETLVNCASSHIQRMQKSLTQMNLQLHHVISDITGVTGMKIIRAIVAGEHNPEVLALHRDRRIKVKIETIVKSLEGNYLKEHLDSLTRFLQLYDLYQNQIENCDCQIENILKEFPSMKDFPHNENNKKGLKLCRKKKSSNAPNFDVEKYILQITGVNLFAVDGFNTNNLLGVISETGIDMSKWKTEKHFTSWLRLSPNNKISGGKILSRHTQKTKSRANKLFRLAAQSLANNKSALGAFYRRLRYRIGPSKAIVATARKLAIIFYRMIKEKMEYCDIGAEKYEIKYKNRQIKYLEKNANLLGYKLIKYEPEIQVS

SEQ ID NO: 371143 - protein, 315 aa, unidentified
MAQPFFAGIDVSKPRLDVAVSQGDEILEFFSIPQTEDKISELIEKFKNVLPRLIVIEASGGLERNLVVSLVEAGLPVVVNNPRQIRDFARAIGLLAKTDKIDARTMARFAAVIKPPQRLIKDAQQQQLTDHVARRRQLVHMLAQEKNRLSRAAAPIRKDIEHHIDYLQGRLDISNKEIEQIINSTPIYQETVELLRSVPGIGPVTSASLVADCPELGSLNRRQIAALIGTAPFNRDSGTRSGTRCVWGGRKTVRVQLYMATISAIKCNYKIKAFYTRLITAGKKPKIAITACMRKLITILNAMVKQQKPWEASAV

SEQ ID NO: 371144 - protein, 343 aa, unidentified
MQTVTTIGFDIAKSVFQVHGVDAAGQVLIRRQLKRRYVLPFFQKLPPCLVGIEACATSHYWSRELQALGHSVRLMPPAYVKPYVKRQKNDMADSEAICEAVSRANMRFVPTKTPEQQSGLVLHRTRHLLIRQQTSLINAIRAHLAEFGIVAPVGRKGVEDLLRVIADANDKRLPEVVRGCLAALGTQLLGLKKQILDFDRMIIAWHRSNQTSKRLNCIPGVGPLLATALVASVGDPKTFRSGRNFSAWIGLVPKQHSSGGRDRLGSISKQGDRYLRGLFVAGALAVIRYAKIHGTKHRPWLTALLARRPTKIAAIALANKIARMAWAMMARGERYKQPVALAA

SEQ ID NO: 371145 - protein, 342 aa, unidentified
MQITTIGLDIAKNVFQVHGIDAGEKVVVRKQLRRSQMLAFFEALPPCLVGMEACASSHCWARELTKLGHQVRLMPAKDVKAYVKRNKNDAADAEAICEAVRRPTMRFVQIKSVEQQARLMLHRARDLLMRQRTQVINALRAHMAELGIVAAQGREGVKELLKIIASEQDARMPVDAHTSLVVLAAGLQALQTMIKSIERRIIVQHRSDEASKRLRSIPGIGIVGATAIAATVPDPKVFRSGRDFAAWIGIVPRQDSTGGKQKLGPISKQGDQYLRRILVVGAHAVLKRARHQPEKYPWVTMLLARKPFRVVAVALANKMARVAWALLAKGGTYRAPALAAAA

SEQ ID NO: 371146 - protein, 357 aa, unidentified
MDVSSEQPRMTAGMDLGDKYSHLCLIDTQSGEIMEEGRLRTTPEAFRRRFSSERPLRIAIEAGTHSPWASRVLEECGHEVLVANARKLRLIYSNKRKTDEIDAENLARLARVDPKLLYPLKHRDEESQAHIALIRSREALVSARTQLVNHVRGTVKSFGARLPKGPARSFHNKAPEHIPEALMPALGPILETIGSLTQRIRDYDRKLETISKERYPETDLLRQVEGIGPLTALTFVLTIEDPYRFEKSRSVGAYLGLVPGKDQSGESDPQKRISKEGDEMLRKLLVSCAHYILGPFGSDSDLRRHGEKIASRGGKNAKKRAAVAVARKLSVLLHSLWMSAEIYEPLRNAHRSSGQAA

SEQ ID NO: 371147 - protein, 341 aa, unidentified
MKEFIRIGVDLAKNAFQVHALEREDGSAVTRKLSRAKMFEFFSRAAPCRVGMEACGSAHYWARELRAMGHAVVLIPPVYVKPYVKRGKNDAADAAAICEAMSRPEMRFVPIKSADQQAVLMLHKTRELLIKQRTMSVNALRGHLLEFGLVAVKGRSGVEGLIALALEDGELPQEARDAVRLLASHLEGLDAKIDAVEATIAKASAQNPICRLLDAVPGVGPLIASAIAASVPDPGVFRSGRDFAAFLGLTPSQDSTGGKTKLGPITKKGDRYLRKSLVIDCTATLRVAHKRKGSLAEWIARLRTKKSERDLSVALANKLARICWAIMSTGEAFRTEIYAKA

SEQ ID NO: 371148 - protein, 344 aa, unidentified
MEPMYYIGLDVHKQKISYCVKDSGGRVHAEGSLPATRADLDHWMRALPQPWSAAMEATMFSGWIYDHLKPHAAALKVAHPLMLRAIAAAKKKNDRIDASKICDCLRCDFLPECYMAPTAIRERRRTLRYRNLLVRQMVQMKIKISSLLMEAGVSYNKQRLHKAGYFRELLATNPDIDEGLCSLLRQCREMVVRLGKSESALIRSLEHDQLLVERVQRLMSIPAVGPITALTWALEVGDVQRFSSIKKAISYCGLCGAEKSSGNTVQRTPLSKQRNKHLQTTLIETAKMAPRYSPTLALLYDREKQRGNANRATLAVARKLVAYLVAVDRGQTHFLVVDREACAA

SEQ ID NO: 371149 - protein, 345 aa, unidentified
MQYTAFDAHKHYTWARVEGADGTLVREKKILHERGAFQQFLAGCEPGSPVAVETVGNWYWIVDEVEAAGCLPQLVHARKAKLMLGTVNKTDRLDARGLVRLQRTGTLPVVWIPPRELRDARELPRTRMVLVQQRTRLKNRIHASLNKYGILLDVSDLFGQRGRQELRARLSELPPHTGFVVSRLLEQVEGLDREIKGLEQRMEALFAVDDATRVLMTLPGVGFILGTVIGTEIGDVGRFGRHEQLAASAGTVPRVHESGGRRHYGPVRSDVNRYLKWAFVEAANGVCRTRRTHSQRHTSRLYERIARRRGHQKAIGAVARHLAEATYWMLTKGEPYREPGMSRGA

SEQ ID NO: 371150 - protein, 415 aa, unidentified
MALKIVYKICCGIDVHKTFVVACIASTNDKGVTSYESHRFSTYTSGLKTLLQWLLDRNCKDVCMESTGKYWIPVYNILEKDCSIVLAHPKYVKAIRGKKTDKKDDKWIADLFKHDLVAGSFMPPAGIRQLRDLMRYRFKLTCFKSSEKNRLQNCLTVSNIQLGNVVSDTFGKSAQAILDKILENPADTSFDLEPLVFKSLKKKLPELRDAIDGYITPEQAGKLKVIKSHYENLEARKAELEELILALATPYQQELAILQTAPGISSDFTAIGIISEIGTNMEAFPSAKHLCSWAGLTPTNNESAGKKKSVRVSKAGCYIKPLLVQCANAVVKSNKHPEIRNRYLRIKKRRGHKKAIIAIARMLLTALYYMLKNGENYNAELYRKSDLPPVDREITVEQALMIARNQGYKIKSATA

SEQ ID NO: 371151 - protein, 341 aa, unidentified
MSLSQTIVGIDIAKSVFQIHEVDKETGEVTSRQIKRARLLQHFINREPCFIGMEACGGAQHWARQFVAMGHTVKLLPAQSVRPFVGGNKNDAADARAIWTAVQQPGIKAVAIKTEAQQAVLALHRMRQQLVKFRTAQINALRGLLAEYGEVMPLGRDAVAKALPSVFARLVDRLPGVLIESLREQYTRIAQLDKEGSNIDRRLQEWHHDDESCRRITAIPGVGLLTATATVAAMGDPGAFSSGREFAAWLGLVPRQTGTGGRVKLLGISKRGDRYLRTLLIHGARSVLMTSKTPPAWAANLAKRRPLNVVVLALANKMARTLWALLAHQRAFQSGYVSRPA

SEQ ID NO: 371152 - protein, 341 aa, unidentified
MDISMLGIDLGKNSCSIVGLDLAGKVSIRRRMRRDTVIAFCSKLPACIVAMEACCGAHHMGRALAAQGHNVRLISPEYVRPYVKAQKNDNRDAEAIAEAATRPTMRFVELKSEEQLDMQTLHRVRDQLVGERTSLMNQIRSLLLERGHIVPQGRAKLAARLAELLNDKAPVLSPRIHALLLDMRNRWMALDQRIAEFDKEFAAHAQSDAHARRLLTIPGIGALNATALIAAIGDACSFARGRDLAAWLGLVPRQATTGGKPRLLGITKRGSKYLRKMLIQGARAAMPTLRKADTRLGAWLRGLLARAHSNIAVVALAAKMARIVWALLHHECTYEAAAMPA

SEQ ID NO: 371153 - protein, 386 aa, unidentified
MTIQTQVTSFIPRNYDVFAGLDVDKKSMAVVFADHDGAMRSLRMANSATPLLNYVRKRFPGQRVAFAYEAGPTGFGLHDELTSEAYTCVVVAPSKVPRAPGERVKTNRLDGRRLAESLRGGQLRTIHVPGRAYRDLRHLVQLRDTHVRQLTSSKLRIKSLLLYEGIPFPEPSEKWTARAMRELQTLACSETVRFKLDDLLNTLHFHFQAAALATKQIRRYCLNDPELRQSVDLLLSLPGIGWIVSSHLVARLGDPQQIKNGRQIAGFLGIVSSEHSTGDKENRGEITRSGDSRLRNKLIQSAWTAIKKDPELRAFYRRIYQRHPKKVAARKAIVAVARKLTTRVYVVLHEQRPYVMRPDSSIAPLTAEETVGPRDRLDAAQNDQSR

SEQ ID NO: 371154 - protein, 341 aa, unidentified
MDVSVLGIDLGKNSCSLVGLDATGKVVVRRRMRRETVITYAATLPACVVAMEACCGAHHMGRALARQGHAVRLMSPEYVRPYVKAQKNDDRDAEAIAEAATRPTMRFVELKTEEQLDMQTLHRIRDQLVGDRTSLMNQIRSLLLERGYIVPQGRAKLALRLGEMLDGDEPVLGSRIHRLVSDMRLRWSALDERIADLDAEFTDAARADERTRRLLTIPGIGALNATALVAAIGDARTFGRGRDLAAWLGLVPRQATTGGKPRLLGITKRGSRYLRKNLIQGARASLPVMSKSDTRLGAWLRGLLSRSHHNTVVVALAAKMARIVWALLRHERTYDPVAQAA

SEQ ID NO: 371155 - protein, 346 aa, unidentified
MKILALDLGKYKTVGCDYESESGAHQFQRGFTTPAGLARMVQAVKPDRVVIEVCSIAGWVCDLLWGMGIEVQVANTSDDAWRWRKVKQKDDRRDALKAARLSAVNQLRTVYIPQIEVRQWRALITYRQQLVRRRTKIKNHLRDLLLREGQILARGSKCWNKSGLELLTSMARPLSEVGLAELWRGELHEELQQLQLTRARIVTVEEKLNAIGAADARVQLLRTIPGVGPRLAEAIVALLDKPQRFRKASQVSGYIGMVPKALDSGETERRGRITRQGSRLVRSLLVEVAWAGLRHNAWVRQTYQRLSGGKKARKKIAIVAVGRKLLVKCWAMLRDNRAWDWQPQIT

SEQ ID NO: 371156 - protein, 410 aa, unidentified
MQVVHERCCGLDVHKKVVAACVLTPAAEGRSHKELRVFGTMTDDLERLADWLAERGVRHVAMESTGSYWKPIWNVLEERFALVLANAAHVKAVPGRKTDVKDAEWLAELLRHGLLKGSFVPDRAQRELRELTRYRTSLVEERTAAVNRLQKVLEGANVKLASVASNVAGLSARRMLDELVAGSTDAAALAELAVGRLREKIPALERALSGRMGDHQRFLLAQQLAHIDFLDEQITRLDAEVAERTRPFEAQITRLDTIPGVSTRIAEILVAEIGTALDRFPTPGHLASWAGMCPGNHESAGKRHSGKTRKGNPALRRALVQAAHAAGRTKTTYLGAQYRRLAARRGAKRAAVAVGHSITTIAHYLMTRGTVYQDLGPLYFDLHDRDAVRRRLVGRLEKLGYKVTTETAAA

SEQ ID NO: 371157 - protein, 369 aa, unidentified
MGEYSEAFVAFDLAKKKHAVAIAEGGRTGEVRFVGEVENSPAAIERTIKRLGRKYDRLHVCFEAGPTGYGLCRQVRDLGYDCMVVAPALIPKRPGEHVKTNRRDAVTLARLHRAGELIGVWVPDVVQEAVRDLVRAREAAADDLRRKRQQLLSFLLRHGRIYASGGHWTLAHRRWLARQSFEHTAQQIVFQEKIDAIEDAAQRLRRLDEQLKVIVPTWSMARVVEAYQAMRGASFLVAVIFAAEIGDVRRFDTPPQLMAFLGLVPGECSTGDTVRRSSLTLAGNRRARRALVEAAWTYRYPARVSEALRVRLEGLPKAVRDIAWKGQVRLCARYRRLSAAGKKPPVVAAAIAREMAAFLWGIGREVAPS

SEQ ID NO: 371158 - protein, 369 aa, unidentified
MTELTLFVGLDVHKKTISVAMVEGAAGAAVRFYGTIANTPDSVRTICRKLSRDGQQLYFCYEAGPCGYGVQRQLTRLGHRCDVVAPALIPRKVGDRVKTDRRDAMMLAQTLRAGQLTAVWVPDEAHEAMRDLVRLRAQAMRDLRKTRQHLLSFLLRHGLISPYGHWTKMHRRWLGELTFAHPAQHLAHEEMLQRIERAEALCDRLKGTILELVPQWTLAPVVQAIQALRGVSLIVASVIVAEVGCFSRFDSPRQLMAYLGLNPSEHSSGATVRRGAITKTGNVLARTCLVEAAWTYRFAPRVSQIIRDRLKELPEPIRAVAWKAQVRLSARYRKLIAAGKPAPKVVVAIARELVGFIWAIARMVEPKFA

SEQ ID NO: 371159 - protein, 320 aa, unidentified
MAQQGRIVGIDVAKLKADACIRSLQLRLSQPSTAQGQQDMITWLRRNEVGLAVMEASGGYERVWAEALRAAAIAVRIVDPKRVRYFAKSAGRLAKNDPIDAEMIAWFAETFAVAAEPAHDADRDALNRLVTARSLLVRLATPIRQLGEHGQPRVVENAQRAILKTIKAQLAKLEAAIEAKIAANAQFLARRAIIASVPGFGDHFVAGALAWLPELGRIGNKAAAGLVGVAPYDDDSGQHRGERHIKGGRRDIRTLLYMAALGAATRHNPAVMAYYKRLRAKGKKTKVALVACMRKLVVILNTMLARGEMWNPTPRTTAVA

SEQ ID NO: 371160 - protein, 361 aa, unidentified
MRIIGCDLHARQQTLAMLDTTTGEVVTMTLKHEGNNVREFYSKLPRPVRVGIEATGSMQWFVSLMEELGIECQVGHPAQIRAAEPRKQKHDRRDADLILKLLAENRFPRIWLPSKELQDLRALLRHRHQWVRIRTRIQNALQAIALANGLRRGPSLWSQDGQSKIAALPLAPHTAYRRSELQAMYAKFAAEIEKLNQRVEEQACERPGARLLMTHPGVGPITALATEVFLGDAARFADSKALASYVGMIPSEYSSGGRQRLGGVSKQGNPLLRFLWGEAAAHAVRRDPELQRFYRRKLVQKGLGKSRVAVARKLGIRLWIMLRDEIDYNEFCRRGQKQQKSSEACVGMPDTGHGAKQSPAD

SEQ ID NO: 371161 - protein, 324 aa, unidentified
MSSPSPAINIGIDVSKEKLDIAVHETGTHWTSDYQFTEFAKLVKALRSLTPTRIIVEASGGLESLLVSYLAVADLPVIIINPRQVRDFARATGQLAKTDRLDAFVLARLGATLQPDVRPLKSAETQELEALVNRRAQLVEMLTAERLRLQQAQQQRRPAIIKDLKAHISWLKKRLDQCEDDLSQLLRSAPLWGETDQRLQSVPGVGPITSLVLIAELPELGHLTNKQLVALCGLAPHARDSGKWHGKRTTRGGRARVRTALYMAALVATKHNLVIKTFYQRLLRAGKQKKVALTACMRKLLVILNAMFRNQTSWQQPSGPIPGA

SEQ ID NO: 371162 - protein, 338 aa, unidentified
MTQLIVGVDVSQATLNLAVRTPDGVLEDLPVWANDPTQFPALAQRLQQELARWAATTLQVVVEPTGGYEQPWAQFAHQQGWTVSLPNPRQVRDWARGKGYRAKTDPVDARILAEYGAACAPPAWQPLPPAVVQLEALLLRREDLRTMLRQEQNRQHALQAQGISTGPVVDSLTQSSTALEQALRALDTAQQQHLQQYPHLQQQADLLQQVPGIGTRNVWFILVLLYRWSTLTQNQGHYKGLTAYVGLDPTPYSSGRSVHRHATISRQGNPLLRQMLYLGALGGVRGHSPLRTFYQRLVGRGKPKKLALVAAARKILVWAWAVFREQTPFDAQRAVAIA

SEQ ID NO: 371163 - protein, 435 aa, unidentified
MSELRKINEKVAGIDIGSTQFFVSTDGETVRVYETFTESINKMICDLKVEGTTSVAIEATGILWVTLHDMLETSGIEVYLVNSYHSRNVPAQKTDSKDCRWLQTLHSYGLLKKSFIPPEEIRELRTYVRQREELIENAAKEIQHMQRAFELMNIKLHNVISDIKGKSGMLIIESIISGERDPEKLSQLCDLHIKKEKHPTIVKSLIGNYKKEYLFLLKQGYQCYMFFQSQITACDKEIETLLKKVTFGLPDPPSSDPSPSRHNHPKIEGLHEMLVKLSGGENASVLPGICDKTILKLIAELGTDLSKWVNVKHFTSWLGLCPWKKQSGKMRRHKRNPAKTKAGQIFRECALSISNSKNLALKGFYQRIKSKKGYKVAIKATARKLAELFYRFMTQGFEYIEKGLIEYERIYKQRMTKSISKKALALGYALVPIVS

SEQ ID NO: 371164 - protein, 423 aa, unidentified
MEAMHERVAGLDVHKAMIVACVRIMAGGKVSRECRTFDTTTAGLEGLLGWLTASGCSDVAMEATGVYWKPVWNILSDGEFELIVANAAHIKNVPGRKTDVNDAMWIADLVACGLVKASFVPAEAIQELRSLLRARKQLTREQTSHIQRIQKTLEEANIKLDSVISDILGVSGRRMIEAMIAGVRNPFKLAELADRRIKASPKALYDALHGRLTDHHRFMLRLYLGQYDTLDAAIVAIDQQVDASVTRMDEEVEAGQATFRSLIILLCTIPGVSILSATTILAEIGRDMSRFPTAGHLVAWAGLCPGQNESAGKRKASRLRKGAPWLKTMLVQCAWAASRKKDSYYKAQFNRIRSKRGPKKAICAVAASMLTAIYHMLKDGTEHQDLGADHFDRRSTEVKANRLVAQLVKLGFQVELHPLAEAA

SEQ ID NO: 371165 - protein, 365 aa, unidentified
MASVTSAPGPIHLGMDTSKKTIVVAVLMPGEEIPVLDRIWNEEGSVRHLIGRLGGAGALRACYEAGPCGFELHRLLSSVGVACDVVAPSLIPRRAGERVKTDRRDASRLARLHRAGELTAIRVPTEAEEAVRDLVRARAALMADRRRAQQRITAMLLRHGRVWRGTSWTEAHERWIAGQRFGEPALALALAHYRAALDTRRAELDAVEAELAAWAGKPPLGEAVARLGCYRGIAALNGLTLAAEVVDWRRFPAARAFMGFTGLVPAEYSSGERTRRGSITKAGSAPVRTALIEAAWAYRFRPAIGVTLRRRQHGAAPDTLARSWQAQRRLHARYKTMTARGKPAGVAVTAMARELAGFVWAEMTS

SEQ ID NO: 371166 - protein, 348 aa, unidentified
MRIIGCDFHPSWQQVAWLDAATGETGEAKLVNGSGEAERFYRALAEPALVGVEACGNSQWFVELLQRLGHEVWVGDAAQIRASYVRKQKTDKRDAAHILKLLVEGRFPKLWVPRAEQRDVRQLLIHRHKLVEIRTRVKNGLQHLAMNRGMQKKRKLWSAAGQKALRELPLEGWAARRRADLLGLLKSLDEQVGQLDQAVEEEAQRDKMAQLLRTQPGVGPITALAFVVTIGDVTRFRRGKQVASYLGLIPREHSSGGRQRLGAISKQGNKFVRTLLVEAAHGANQRDEGFRKTYQQRCHRMGKGVAQVAAARKLAVRLYWMLRTNTPYPEIVSIENSPRVPLVGRPGD

SEQ ID NO: 371167 - protein, 345 aa, unidentified
MKKGITIGMDLGDKKHQVCVLDKAGKIIAAEGIDNNRATVIKFFKRYRGAVVAMETGTHSRWVSQIAETEGLEVLVGNARKLRMIWESRQKSDARDAVMLARIARFDRELLCPIRHRGEQVQIDLEIIRARDLLVGERTRMVNHVRGVVKSMGERLAASSTASFGHKAKIPEALNAALQPMLEMIRELTKKIHTYNLMIKKTAANKYPETERLRQVGGVGPLTALAYVLTLEEPERFAKSRMVGSYLGLVPRLDQSGQIDKQLRITKHGDGYLRRLLVGSAHYILGPFGPDCDLRTFGLKLMQRGGKNAKKRAVVAVARKLAVLLHALWRSGQQYEPKRMQPLAA

SEQ ID NO: 371168 - protein, 404 aa, unidentified
MYNAVGIDVSKGKSTVAVLQPGGTVIRKPFDVSHTSQNLNELADYLSSLDGTTKIVMECTGRYHEPMVKALSEAGLFVSIVNPHLIKNFGNNSLRKVKSDPADARKIARYTLDNWTELRQYSGMDNTRTQLKTLNSQFSFFMKQKIAAKANLIALLDNTYPGVNKLFDSPTREDGSEKWVDYAYSFWHADCVRKIGLKAFTERYKSFCKKHHYIFQQDKPEKLFNASKELVAVFPKEKTYKLLIQQSIQQLNLASEHVERLRREMNELASTLPEYSTVMGIYGVGKTYGPQLIAEIGDVSRFTHREALTAFAGVDPGVDESGQHKSKSNRASKVGSARLRKTLFQIMTTLLQNAPEADPVYRFLDKKRSQGKPYYVYMTAGANKFLRIYYGKVKECLRNLEQTE

SEQ ID NO: 371169 - protein, 314 aa, unidentified
MQSPDIAVGIDVSKSELVIAVHPSGDTWISATTLDAIDDVVRRLAAVTPTIIVVEATGGYEHTLVAACAAATLPVAVVNPRQVRAFAQAIGRTAKTDAIDATVLALFGARVQPAPRTIPDTATQALAALVARRRQLLEMLGAEQQRLHQATTNPVTRDLRNHIRWLERRVKDVDDEIGGAIQGSPIWRVQEDLLRSVPGIGPTVARTLLAELPELGQLDRRRIAALVGVAPFNRDSGQWRGRRMIWGGRASVRSALYMAALVATRHNPVLAAFYQRLRTEGKPPKVALVAVMRKLLTIVNAMVKHQSFWQSQAA

SEQ ID NO: 371170 - protein, 426 aa, unidentified
MSYRIAGIDVHKKMLAVVIADVATEGAYTFERQKFRTTPEQLRKLAEWLIEQEVEEVVMESTAQYWQPIWGMLEETWQPVRREREGAGAKAGKLHLAQAQSNRGRRGRKNDCLDAERLVKRLVADELDLSFVPDSEQRLWRAVTRGKNQLTEERSRVQSQLESLLEQAHIKLSSVISDLLGRSAQRMLWAIAKGESDPAVLAAMAEKNVKATPAELADALSAVRKCKARYRRLIRAMLDRVALLDQQIEQSRLDAAELMEAHQGAVQRLAEVPGLGADSALQIIAEVGPRAEVFASASNLASWVGVIPGEQVSAEQNASSTSPKGNRQMRRVLCEAAHAAIKQKGNIFEVKFRRFVSRMEYPEAVWAVAHFMCRLVWKILHDGVRYEERGPDVNAKAAHRRNLRMIRHLKALGFSVLPTRGTALPA

SEQ ID NO: 371171 - protein, 322 aa, unidentified
MEAVWVGIDVSQEWLDVGLWPGPESFRVGNDATAVASLVARLRELAPRAVVLEASGGPEVLAASELHAAGLTVAVVNPRQAREFARSLGTLGKTDRLDAIVLAQFAQSSHSHGRLTPLRLADAAEAELKALVVRRRQLLGMLVAETNRRARAPKLVRKSIVQHIKGLKRALAEVQQQLKQVLASSPAQQAKATLLSAVPGVGPQLSCTLLAELPELGRLGRRQIAALVGVAPYPYESGKFKGRRTIWGGRARVRTMLYMAVLSAVRHNPPLRAHYRLLLERGKAKKLALVACMRKLLITLNAILRDSSHWNPNHQLDLQHSR

SEQ ID NO: 371172 - protein, 478 aa, unidentified
MASKQKQRPDLVPAPMLLHESLYVGIDVGKARHVAGFVSTTLLERHQRFEACPALVVENSREGFRSLIDRMCSYVPLEQVFVLLEHTGHYHRALVEYLQEHDISVYVMPVQKRPAGMLKTDKRDALSLANHLFNQLEKGIQLSDKTHLVRRMLPPTEAARQLKGWMRHRYELIRESTQRKNKLISICDELFPEMTQVLKDPTLPTALAIREKFPTPAAIATATLSALAELRIKHSYPSNAQLLQLQQLAAQSIGTKDLVRQRGLVLEQAQLIRELRLLQEHIQQLDREISQLVERSREGQILTSIPGIGIIQAAAIMAAIGTILNFERASELKSYCGWAPVSEISGTTLDRVQLTHGGTRTMKQMLFLCVAHAIQLDCEWAKLYERLVPKKCMYDERKRAYRGKLKVIGRIAGQLIEMVYALLKQDAEILSQIPQGQEPPPPILYDPEIHKRHRNGEYRPIKHVPRHRKVIRLPERLS

SEQ ID NO: 371173 - protein, 369 aa, unidentified
MTRGTLALKPIMMDIILKQCLGIDVSKSSLSLTLGYLNHGLGKRFESHLDVSNDLAGYKMIVKWLEKSLDANVDFIIVMEATGVYHQHVAHYLYEHGYGISIMQSGRVKRYAQSLDQRSKTDALDSRMLSMLGLERTPLLWHPPSPALRELKVLSRERSSLLKDRTVETNRQEALLSSVHQNAKASKRHTARLKLLNIQIASIEQEMRDLISEDQALKRKLCFLESIPGISFISAATVVGETLGFESITSGKQLASYAGYDVVLRESGSFRGKTRISKKGNSYIRAALHMPSMTCVRCNPTLKTFYNRLKPNKAKPLVALVAVQRKLLLLMFTLWQNEENYDAEFENKKQQKHEALAAQDNNLINQFAS

SEQ ID NO: 371174 - protein, 361 aa, unidentified
MIKKQVTIGKILIKQAVGIDVSHKKLDVSLGRMDSQTLTEVYAFKRFDNTILGHMALVLWVKKYTVSDVNLCFIMEATGVYHEILAHFLYEKEYEVIVEMPNKISNFFKTLAVKTVTDKSMSEAIALYGLEKNPSVWTKPNKEYRSLRQITRERDQLVGERTVIKNQMHAEEVEAYPCDQTIDRMNIRIAMLNRQIKEIEAEIAQKIEQNAEIKENVTLATSIPGIGLLSAAIILAETDGFALITNKRQLTSYAGLDVKLKDSGTSIHFKPRISKRGNKYLRKAMYFPALTAIQHNEKFKNTYIRIVSKTGIKMKGGVAIQRQLLELVYTICKTKKPYDKEYEQKQARVKQEAKLAIAQVV

SEQ ID NO: 371175 - protein, 386 aa, unidentified
MPQLNDLSRSLVVLEQDATLIAVIEMGQSNWLVAGIVPGVERSPLKKLAVDESAMLKLLNRWREEAEKAGHRIERIAIAFEAGRDGFWLARWLRARGIEAHVIHASSVAVSREHRRAKTDRLDTELLKRAFLGWLRGERDHCKMVAIPTLAQEDAKRPNRERESLVGEQSRIVNRMKAALAPLGIRGFNPKLKKAVERLDGLRTPEGEPIPPNTLAELKHDMERRRLVRSQIRDIEGTRLERLKQTPGDGPHVTVRLLARVIGVGVETADMLVQEVLSRNLRDRRAVARYGGLTGSPDESGKKRREKGLARSGNARVRRGMIQLAWRFLMFQKDSALAHWFYARTKNAPQTRKTMIVALARKLLIALWRLVREGTIPEGIVLRPAS

SEQ ID NO: 371176 - protein, 337 aa, unidentified
MTDVHILAIDLAKRSFQICATAPGGAVLFNRTVSRTKLEAHLRDQAPCIVAMEACATSHFWGRFAQALGHDVRLIPPIYVKPFVKRQKNDAADAAAIAEAAVRPNLHYVAVKSAEHQARAVAFRTHQSFVGQRTQLINALRGHLAEFGLVVAQGPANLKSVVCMIDDSAIDLPDAVRDVARLYLDQIALLTNKIEELHSKLVHSTKVDDAMRRLCTVPGVGPVTAGAIMAFAPDLRTFASGRNFAAWLGLVPRQRSTGGKTRLGSVSKMGQADIRKLLIVGAMSRIRWIVRKGVLPDNWLGHVLGRKPRMVAAVALANKMARMIWAMMTREENYRMA

SEQ ID NO: 371177 - protein, 380 aa, unidentified
MPDVSSIAPAEVRTWAVIDQHKLSLVVGVLPATGGAPEVTRLENTERAIRRLIDRLGGAEGLAVAYEAGPGGYQLHRLLSSMGVACDVIAPSLIPVRAGDRVKTDRRDAKKLVRLYRAGELSFVQPPSPMQEGLRDLVRCRDDLRCARTAARHRVAKALLRYGHIYREGKAWTKRHRAWVESQRLDDPLAHAALEHMLTHLGSLDAQIAALDHQLEQLASREPWADPVAWLCSFRGISTHTALGLLAEIGDFRRFAHPRELMSYLGLTPSEYSSGEQQHRGHITKTGNRHARRLLVEAAWHYHHRPRQSTRALRLSEHVPPQVATRAWQAQIRLNHRHRVLSEHGKRSTVANVAVARELTGFIWAAMTNAPLREAEAAAA

SEQ ID NO: 371178 - protein, 409 aa, unidentified
MDVLHPRCAGLDVHKDTVVACVRIHQDSAPPGVTVQTFGTTTKELLALSDFLAGHGVTVAAMEATGVYWKPVWHVLEESFELVLANAQHIKNVPGRKTDVSDATWIADLLAHGLIRSSFVPPTPIQDMRTLMRTRKQLVRERAQHVQRIQKTLEDANLKLTSVISDVVGPSGRAILEALIAGETEPQKLVAVTTGRLKAERSTLEEALRGRVRPPHRFLLKLHLEQILALEKSISALDTEVGALLLPFREQAARLRTIPGIGEVAAQVIISEIGVDMSRFPTVGHLISWAGLCPRNDESAGKRRSTRLRQGAPWLKALVVQCAWAAARSKTGYLRAQFLRLKSRRGPKKAIMAVAASMLTAAYYMLRNKMDYRDLGRDYFDRCDKRKATSRLVRRLSELGYQVELKAAA

SEQ ID NO: 371179 - protein, 320 aa, unidentified
MSKKKSKAFIGIDVSKKLLEVAAHESDYQFRCANKAKAFGELIVELLALRPALIVLEATGGLEIPVVAALHAAGLPVVVVNPRQVRDFAKALGQLAKTDRLDARVLAHFAAAIKPPLRPIKSADELELDALVGRRSQLVEMLTAEKNRRGSAATDTVREEIKEHIDWLEERIAELDQQLKGQLKNSMVWQGKDDILQSVPGIGPVVSFSLIADLPELGRLNRQQISKLVGVAPLNNDSGQQRGTRHIYGGRTRVRSMLYMAALTATRFNPVIKEFYQRLLANKKLFKVAITACMRKLISIINVMVRDSTLWKTKLDPVSA

SEQ ID NO: 371180 - protein, 349 aa, unidentified
MNSTTVAVDLAKNVFEIAIAGADWRITDRHRLKRTKFARFFVQRTPCHVVMEACGSAHYWGRRIAALGHEVRLLPAQYVKKYVKRNKTDRADAAALMEAARCPDMKAVPIKTVEQQQVQSLHRLRTQWMCTRHRYINMLRGTLREFGVFIPLGINSAKAQIGLALAEPGNGVPDGLRPLLTAMLGEIRALEEKILAVERELALLARADERVQRLCAIPGIGLLTSTALRATVGDIHRFPSGRHFSSWLGITASERSSAERRRLGKISKQGDTYLRTLRVHGARSALLAAHRVQRYGHSLTRLQQWALDCEQRCGHNKATLALANRLARIVWATWKYDRTFDPNWSRQRA

SEQ ID NO: 371181 - protein, 386 aa, unidentified
MKKSIRERESEWKQRPDRTVGIDLGDRCSHYCVLNGDGEVMEEGRVRTSEEAFRRHWEAEPRQRIVMETGTHSPWISRLLRGFGHQVIVANARKVRAISENESKNDRQDAEMLARLGYCNPRLLKPIRHRSAERQRDLNLIRARDTLVRARTMLINSVRGLVKSGGGRLPPASSESFAARGSAAVPAELGAATQPLLHQIAGLTVEIRGLDQAIEKLAERYPEIRILRTVPGVGPVIAAAYVLTLDGVDAVEHSRSVGAFLGLRPKQSQSGDSDPEHNISKTGNIYLRRLLVQAAQYILGRYGPDSALRRWIKASYCSSLITISSTSADSSAIRAPPAPCMNDLKSPRRRGVSACGGTSNENLSYLSSFEMPCATRCGGSRGPCET

SEQ ID NO: 371182 - protein, 391 aa, unidentified
MSMYFIGIDISKYKHDCCIISAADQKVVSKVTIKNNKAGFNELLTIIHSLANPADIRIGFESTAHYALNLELFLENSLLTFMEVNPVLISEYKKSKTLRRTKTDSVDCESIARWLMTVEYKPHSKGFYHAYSLKSLTRLRDKLIRQRSFYLVKITNVLDHTFPEFKPFFNERLSKTALYLLENYGSAGKMARMNSASYEKLRSLSRGKFSPQQFLRLKELAANTVGVNNSIFDVELNSLLSLYKSLVKEINTIEKEINKLIEEVHPHYMSVPGIGPLSAAVIYSEYGDISNFTNPGQMLAFAGIEPGINESGTESHGGKMVKRGSSQLRYTLINCCLPLIRFDMTFATYYAKKRGEGKPHRVAITHVAKKLIRVIYALERQDIDFNAQKLR

SEQ ID NO: 371183 - protein, 371 aa, unidentified
MSKRSSQTPNTAHQEEDAPIVGVDLGKTVFQLCVADRAWHVTNTQRLSRTQFERYFVNRKVSLVVMEACPTSHHWARWLANLGIEVMLMPAQYVRAYVRRNKTDAADAAALLEAARCSDIRPVRVKSIEQQALQSLHRARSIWVATRTARINALRGFCREFGIAFARGSKRGIDQIAQVVADTQSMLPNLLRGTMSLLVEEVRQLEVRIAQLERELAELARHSPACKTLLSIPGVGLITATALVAATAGDVTHFSSARHFGSWLGLTPREHSSANSRHLSGISKRGDSYLRVLLTHGARSVLRTAAMAQTAGKPLDRMRAWAMELQARANHNKAACALANKMARICYATLRDHSPYAAPGSVAIASMPVAA

SEQ ID NO: 371184 - protein, 394 aa, unidentified
MKKVGMFMTYLGIDIAKFTHVATGVGADGEILIPTFSFANDAAGFALLDAALAPFDRDQLLIGLESTAHYAENVIAHLLHLGFQVAYINPLVTASLRNAGIRKTKTDKVDSFLIVKALILGNFIPLRQRDVDTVALRSLCKTRQNLIKLRTRSKIQLGSFVDQLFPELNAFFRSGLHIKTSYQLLKEHARPRRIEKLHLTHLTNLLLKASRGKYTRADAIRLREIARTSVGIDSPILEVQIRHTIAQIELFDAQLGEVEQAIRDAMDALHSPIMSIPGIGAVNGAMILSSIGDISRFPHPSKLLAFAGLDPTVRQSGTFSAKSARMSKRGDPMLRYALMNAAHNVVRNNRTFADYYSAKLAQGKPHYNALGHTAHKLVRVVFTLLTRNTSFDLP

SEQ ID NO: 371185 - protein, 353 aa, unidentified
MLTVGIDAHDRMYVMCVLDEQGKTIREHTVRDGPGEVAAWIAGLGRPARACYEASLGYGMLHDALTAAGVQVQVAHPAHLRSIWQSKKKNDRIDAHKLATMLYLDRVPRVHVPPMPVREWRVLIEHRRRLVDKRTATKNGLRALLRSHAIAAPRGRRLWSGPGKKWLGGVVFASPLAALRRDHLLAELEHFDRTIKAAEKVLDQLGDRHPGVALLRTMPGVGPRTSEAVVAYVDDPQRFGSTRRAASYFGLVPSLDQSAGVKRLGHITRQGPATVRKLLVEAAWQGIRHSPSLRRMFDRIKGGRKEQTGRALVATARHMVEAMVAMLKSGQEWHEQEESPPADTPAGPVQAVA

SEQ ID NO: 371186 - protein, 335 aa, unidentified
MEGSPQPTSAAPHKPLAFVGIDLAKDTFQAAAHCDDRAHDHLRFNASLAHNPAGIAELIARLKAFDVALIVMEATGGLERKLAAELVEAGHAVAVINPRQARDFAKALGTLAKTDRVDADLLAQLARMLKPRVRTLPSAQQLKLKDMVARRRQLLHMRTAELNRSQQTALKEVSQSIQHLITTLNKEVTKIEKKIAKLIESDADWKNKAQVLDSAPGIGIDTAHALLAELPEIGTLTRRQVTSLAGLAPHAFESGQFKGQSRIWGGRASVRSALFMGTLAATIHNPAIKVFYDRLVAQGKKKIVALTASMRKLLTMLNAMVRKNVKWNAAEIAAE

SEQ ID NO: 371187 - protein, 425 aa, unidentified
MDVGYRRHSVAIGLPSGEVLEEFEIAHRPEGFAEFFSRIEKQQKIRGCEVAVAMEGFNGCARPLDAMVRRRGYRLYNINNLKLARFKEIFPGAAKSDRIDARKGLELFQLSDHLPLAKEVLQEVKGTPRENEVLKRLTRRRRRLVDERVRVISNLQTDLQAVCPGLLEITKNAGNQWFLNFLVSAPTLPQLARLRPATLLKVCAVGRKYARLIEDWQKQAHFSEEVEWVSEMIQEDAKRCLELDEKIKALRAKIKEVAKDSKIAKTLLSIPGFGTICTAELAGEIGTIERFSKEGSLALYLGMSTLDNSSGKYQGSKQPKHVNTRAKAAMMIALDRHRKYVPESQRYYEKKRSEGKKHNQAIRALGRHLCRIIYKLLTEEREYEMRPKKGNTKTKVKRRSLIKTQIRKPKISVKGKNTKIYQQST

SEQ ID NO: 371188 - protein, 307 aa, unidentified
MTAAGIDVCKASLDLAVDGQPGVVGFANNRAGITKLVKRLRALGTTRIVVEATGGYEEPLIEACCDAGLWVARVNPRQARAFASATGELAKTDHIDARMLALMARLFADRLRPYVAPPPWQRELRDWLRRRGQVVVALQAHKQQAAMAPPPVRKLVTRTLAALARELAAIEKTMRALIAEHATPALRSSKGLGPVFQATVLALLPELGHLDRRQIAKLIGVAPMNRDSGQGQGKRRIRGGRAPVRVALYMATLSAVRWDPTMKAHYQQLRSRGKLGKMALVACMRKLLGIINARRRDELRAEGMAMA

SEQ ID NO: 371189 - protein, 408 aa, unidentified
MNTLYVGIDVSSKSNVVYLMLPNGDKHSNFSVANSHEGSTLLVKKIYSALTSHSLDTVLIGLEATSVYGDNLVYFLREDATLAPFNRKIHVLNPKQVKKFHDTYNDLPKNDYVDSFVIADCLRFGRINKEVYMGDYRYKALQNLTRARFFAVQNLVKEKQRFMNVLFKKYSTMTQEKVFSDAFSTTALAVYDEFESAEALANMDLHELTDFIIEKGKNRFPDPDAVAKAIQKAARSSYRLPKTVNDSVNQVLSISITSMKALESQIKEFDKAIIALMELLPNVLISIPSIGPVYSAGIMAEIGDINRFDNQASLAKYAGLAWKQHQSGGFEAEVTRLIPSGNRFLKYYLCEAAFSLVRCDKKYSDFYHLKYKEVNRCQHKRALALTARKFVRLVFRLLKDNRLYCPAK

SEQ ID NO: 371190 - protein, 320 aa, unidentified
METEKVYVGIDVSKDTLDVAVHASEQRWRFANSDKGITEALSCLEELCPTLVVLEATGGMEYPLAAALAVAGRPVVVVNPRQVRDFARATGRLAKTDAIDARVLAHFAAAMHPQTRPLPDTQGQELKAILARRRQLIEMLTAERNRLQSARSKAVKANIQAHIAWLEKEMTHIDHDLGQSIRQSPVWQEKDDLLKSVPGVGPVLSTTLLADLPELGLLNRREIAALVGVAPFNRDSGHIRGQRAVWGGRAVVRSALYMSTLVATRYNPIIRDFYRHLLSAGKPKKLALTACMRKLLTILNAMLKHKKPWHYPISEILKTS

SEQ ID NO: 371191 - protein, 346 aa, unidentified
MLHVGLDLSRRRLDYYALADDGRPLDVGASPPDADGLGGLAERLADYGEPIRAAIESMTGARFVHDTLERCGWEVDVADAQKVKGLAPLACKTDKIDAWVLAELSRIGLVPAIWLPDPEVRAERERARWRLYLVRQRVRLKQRVHSTLMAWGTPCPVSDLFGARGRELLERLEVPDPWRSHVATAISMIDDLDREIDEQGRELRRLGACHPYVSLMTTVPGISWVLGYTIAAEIGDISRFASPTKLAGYTGLCPRVYQSGESDRRGPISKHGPRYLRWALIEAAVGASRHPLYRERYERTKRRLGRQRGPRVAQVELARRLAHSIWQMLTRSEPFAPKGASDALAA

SEQ ID NO: 371192 - protein, 341 aa, unidentified
MNFIGLDIHKKTISYCVKDAAGEVLAEGTISSTRQSLDDWMRTLRGPWTVAMEATMFTGWIYDYLLPHAAAVKVAHPLMLRAIAAAKKKNDRIDASKIADCLRCNFLPECYMASTEIRERRRTLRYRKLLVRQNVQLRNKVSQMLMESGVVYNKQKLHKVGYFKELMTTNPDIREGLRPLLTICRETIVRIGKTEGALVRSLARDPLLSDRVQRLMTIPAVGPITALTWVLEVDDVARFGSVKQAISYCGLCGAERSSADMVKRMPISKQRNKHLQSVLVEAAKLGPRLSPDLALVYDTEKQKGHANRATLAVARKLVAYLLAVDRSGREFVVAGERREAA

SEQ ID NO: 371193 - protein, 364 aa, unidentified
MKEHSMSSNGRPAAAGSPEWTIGLDLGDRWSQYCVLDGRGEVVEEGRVATTGKGLSGLGGGRGRCRVALETGTHSPWVSRLVEGLGHEVVVAHARQVRLIAESNRKDDRMDARTLARLARVDPALLNPVRHRSAEAQRDLMLVRGRAALVEARTELINSARGLAKSYGERLPKCASGRVGPELAGKLSVELQGVLGPVLAAVRGLTEQIRDCDRRIERVARERYPELQRLTQVPGVGVLTALAYVLTMEDAGRCRKSREAGCVFGLRPKRRDSGQSRPQLGITKEGDAYVRQLLVECAQHILGPFGRDCQLRRWGLELAGRGGRGAKRKALVAVARKLAVLLHRLWARGEKWEPWPQAQTVEAA

SEQ ID NO: 371194 - protein, 359 aa, unidentified
MQRNKISFKGQKIYIGIDVHAKTWEICVLTESGYKERHPQQASAKTLFDFLKKHFPDGEYHAVYESGFSGFSTYYALKEYGINCVVTHAADVPTTQYEEVMKTDKVDAAKLARSLRAGDIRPIYIREKENIDDRSVIRIRKTIQKQLSGYKARVKHLLHCNGVEIPERFARPGTHWSRAFIKWLKEDVVLLSSSRLSLDLLVKQVETIRQTLLDATKSIRKLAQTDRYRNNYELLISIPGIGVSVAMCILTEIYDVKRFRNENQFASYLGLIPTCHSSGEKTASGEKIFRGNKHLGPMIIEAAWIAIYRDYGLGMAYARYKQSMKPQEAIVKIARKMSNIIFSVLKNSRKYEPYRWDKE

SEQ ID NO: 371195 - protein, 417 aa, unidentified
MTQYAAYLGIDWADKKHDLCLVDATTGKKTKLVLAHTPQALAECFHKLSAQYPGQLIAVGLEQSRGPLLFALLQYDFLVLYPLNPTTLAKYREAFTPSRAKDDPTDADYATELIMKHNDRLKAWHPDDDQTRTLRYLVEQRRRLIGDRTRTSNRMTSLLKCYFPHVLSWFPDLATVLVCDFLLRWPALELLPGVKRSTLLNFFRAHHSMRADTLEKRLAAIKASVPLTTDRAIIDSSVLMITALAAQMKTTIGAIKQFDEAITKLCVVHPDFPLFQSLPGAGQVYAARLLAMMGTQRDRWTTANELACLSGIAPVLERSGQSVWIRWRYFCPKFMRQSFHEYAGESVKHSFWARAYYEQQIAKGKSRQAAVRALAYKWIRIIWKCWQTRTPYSEVKYLEALRRKGSTLLSYVATHAA

SEQ ID NO: 371196 - protein, 341 aa, unidentified
MMKLYCGIDLHSNNSVVVILDEADKVVYQKKLNNDLASILGQLSIYKDKITAIAIESTFNWYWLVDGLMEAGYTVKLVNTAEVQTYSGLKHTDDKDDARWLAHLLRLKILPTGYIYPKEERAVRDLLRKRSQLVRQSTTNILSLQNILARNTAQSLSSYKIKKLDDVQAEKLLDDPNTTLALKCNLNVIRCLQSTIAEIETTVLQQARIRAEFKQLLTVSGIGEILGLTIMLESGDMSRFPKVGNFSSYCRCVKSERLSNGKKKGEGNRKSGNKYLAWAFIEAANFAIRYNDKIKAFYQKKKVKTNGIIATKAVANKLARACYHVLKDQVHFDVNKSFSRW

SEQ ID NO: 371197 - protein, 310 aa, unidentified
MKVVGIDIAKRHFDLHLLPEGTTARYANDSQGIEQCRLFLAQVQPERIVLEATGGYELALTIQLQAVGMPVIVINPKRIRDYAKAMGQLAKTDKIDARIIADFATHPRLTVRELPDAKARQLKALLARREQLLDIHVAERNRLEHTTEPLLVKTIRQLLRILDKQIAVLDRTIAEHVAADEQLQRRAEILDSVPGLGQTTAAMLVTQLPELGRLNRRQIVALVGLAPINRDSGQFRGKRMTGGGRVRVRSALYMPILAAIRHNPKIRKFYQHLLERGKSKMVALVAAMRKLLTILNTMIQNNQSWNPDFA

SEQ ID NO: 371198 - protein, 412 aa, unidentified
MLYSTSIGLDVHARSISAAAFVFETGEVAQRTFGYDPDAVAAWAATLPQPAGCLYESGPTGFDLQRRLVALGLPCHVGAVSKMVRPSGDRVKTDRRDAHFLSRLLAVGEFVECAPPTPAMEAARDLSRAREDAREALMRARHQLSKFLPGKGHVWPRGRSTWTRAHREWLRSIELDDPCERLVLEEYVAQVRECEERRDRLDSAIAERSGADDLAGVTSRLRALRGVSTVTAFGIAVEIGDFSRFASPRALMSYVGLVPSESSSGETTSRGGITKTGNSHVRRLLVEAAWHHARPLSPASETDVASSAGLPAEAAGIAARANRRPRRRYLDLRARGKGANVANVAVARELVGFCWALALCGRAAEPRNHPPARAARPRRVGHPAIRLCAARPGLATRDPRPAELPSRSVGMR

SEQ ID NO: 371199 - protein, 385 aa, unidentified
MSAHPTPIQAAAQLQANTLFASLELSKARWLVTVSAPGSDKLSRHQVPGGDGQALLELLWRLQAAAARRTGAPVMIIVIQEAGLDGFWIHRLLVQNGITSHVVDPASIAVNRRHRRAKTDKIDGVKLLRTLMAWMRGERQVCTMVQPPSPEDEDRRRLARERARLLKERIQHTNRIKGLLSGQGIPDYDPLHRDRRRCLAALTTGDGRPLPERLKAEIGRELDRLEMVVSQLTVVERERDALVARTAEADACAAPAALARLRGGGPELAALLWLEALFRRFDNRRQIAAYAGLTPSPWQSGGIDREQGIAKSGNPRLRRAMIELAWFWVRHQPGSALSRWFVERVGTARGRVRRIAIVALARKLLVALWRYVTQGVVPQGAVLKA

SEQ ID NO: 371200 - protein, 320 aa, unidentified
MNKLVVQNLNVGVDVGKDFLDIHIRPLGEYLKVSNDKKGIGEAIKRLRKLTVERIVIEATGRYEIAFVSACAKAALPFSVVNPIHVKRFAGAIGRKAKTDKLDAALIAHFSEVIQPALSTLKPENIQKMADTVARRNQLLEMQTREKNRLQIMPKTVQSSIKAILTVLKKQIQKMDDELADLIESCPEYQAKSELVQSMPGIGKVSAAALISYLPELGMMNSKQVAALVGVAPMNKESGRYKGKQVTQGGRHQVRTVLFMAMMSAMQCNAKFKATYERLVAAGKPKKVAIIACVRKMVVILNSMVRDGVMWEEKAAYCLS

SEQ ID NO: 371201 - protein, 348 aa, unidentified
MIYIGLDVHKVNTTVAWLDNETGEISAAYQCRTDQLAEQLRVLPGPQRIVMEAGSSSNFVARQLKSCGQEVMVVDAYKAHRLLEAVHTAKTDKLDAAALAYLLAAGYLDRAAVWVADEQTHRLRELTRSHQALTQTTTRLRNYIRKFLVRQGRERPASDLLGQRGRQCLDELQKSLPAPLGSILASLRAALTAVAAQVQELLDSITTAAAAHPPAVLLQSIPGVGPVLALTIVAEIGAPARFPSAAHLRSYSGLVPRVSQSGERRWTGPLTKRGNRHLRWAMVLAAQHFTRSRTTKQLAVMKCYYHHLHKHGPNPAKVAVARRLLNIILAMLRANTEFDRTRLARAGP

SEQ ID NO: 371202 - protein, 346 aa, unidentified
MEYIALDVHKKYTWARVENAKGDRLYESRLQHGHGTIKNFVNRWTAGSPVAVETVGNWYWVVNEIEAGGGKPQLVNARLAKLMMGSVNKSDKLDAKGMNRLQRTGTLPTVWIPPSSVRDARELPRTRMVLSAQRTQLKNRVHATLAKYGYVVEGVSDAFGKRGHQIMMELIRKLPCHTQQALQRVLDQLDHVGENLKAIEAEMIQTFAPCPETTLLKTLPGVGEILAVVIWTEIGTIERFGRAEQLASYSGLVARENSSGGKIRFGAVRRDVNVYLKWAFVEAANSSVLNRERCGYDHISRLYERIKARRGHGKAKVAVARHLSEASFWMLKKGEPYREPMSSTQR

SEQ ID NO: 371203 - protein, 353 aa, unidentified
MTSTKYIGMDVHKESISIAVRNDAGKIVMECVIETKANSILDFIHGLRGELQVTFEEGTWATWLYDLLKPHVTKLVVCDPRKNTRQGNKNDQIDARELADRLYMNKLSSVYHGGAGVRTLKELARSYLTISKDLARVMSRVKAIYRSWGIPCAGKQVYAPRHRADWLAKITEVGVLRRAEFYYQQLDALRSLRHEVRRDLLAESKKHKATKLLRQIPSIGPIRAALLIALIQTPHRFRTKRPLWKYSGFAIETHSSADYRSVKGQLQKAKKQVSVRGLNRDCNHDLKNLFKSAATIASVKPGPFQEFYAALVAKGMRPEMARLTLARKIATIVLIVWKKGVSFDAQYLKPQTA

SEQ ID NO: 371204 - protein, 327 aa, unidentified
MFDYYIAVDWAKANMAVAYGRNCTEVNTWEGPSDIKGLKLFLKKLEGKKALTVEECNWSQWLYVELKPLVDEMIVCDPYRNKLLCDGAKNDRIDAIKLLQLLKAGLLKPVFHSSSELIRLRRLASAYQDLVKAGARAKCERDSLYRAQGKNIKTDQIDGKYETFVIEALNKRIELHDEQRAKFRYQFDRICHKHPLVRLVHSVPGIGFSGAVTAAAIIVDPHRFKTKGQFLSYCGLIIHKKESGGKLYGYRRARCNKQLKAVFKTATASMFLHGGPFWDYYQKLLNKGLAPHNARNAVARKIAIITLGVLKSGKKFDALKLNEAENL

SEQ ID NO: 371205 - protein, 348 aa, unidentified
MAMLADTVELVIGVDTHKETHTAAVVAAATGVVIAQATVTATPAGYQQLLRLADRHDGRRVWAIEGTGGYGAGLTRFLQSHAEQVVELDRPKRAARRHGAKSDPLDATRAAREALGRDQLAQPRAAGRRAALSVRLAARRSAVQATGDAQRQLHALVVAAPDVLRGRLRGLTTAHLVSTCARLRQRSDGDVQTAATVASLRALARRIQLLEVEIADHTRAITVLVRAWRPELLARTGVGPIVAASVLCAWSHPGRCRSDAAFAMLGGAAPIPASSGQTVRVRLNRSGDRQLNQALHVIVLTRLRYDPATRAYAQRRRAQGKTNREIKRCLVRYIARQLYRLLEATPAL

SEQ ID NO: 371206 - protein, 459 aa, unidentified
MSAIVTAGEAEYAAFVALDWADQEHAWALEVAGSGKREHGKLKQTPEAIEAWAVELATRFGGRPVAVGLEQARGALIYALQKYSHLVLYPIHPSTSSAYRTAMFPSGGKDDPMDADLQLDLLTHHRDRLRRLQLDTEETRKLQLLTENRRQLVEERKAQTNRLTNLLKTIFPQVLKWFDALYSPIAVAFLQRWPTLPQVQQEDEETLRQFFHQHGSRSDSRIEKRMNEIRAAQPAIQDPAIIEPGVLMLHALLGVITALREGIAKLEESGENVFAAHPDAAIFTSFPGAGAVLAPRLLVAFGTRRDRWNSVEEFQPYTGIPPITVRSGKSEWIHFRWGCSKFLRQSFHEFAEQSILQSEWAREFHHHQREVKKLDHHAAVRSLAYKWQRILFACWKNGTPYQESFHQERLLTRHATQSQPKPAAGQGKGKTPKRTGSSNPVAFQFKKVAGFSKLSDATS

SEQ ID NO: 371207 - protein, 368 aa, unidentified
MKKIAYVGIDYHMNVVAIAVIIEGEKEFYDTIRLKNTDTVIAKYMQKLSHQFTIKACYEASSSGYCFQRKMQAWGYPCDVIAPSLVPKKPGSRRKNDFRDARELAQHYANGLLTVVHPPSEQDEALRGLIRCRQSLKEAEKRVKNQINSLLLSQGLHWQKSKWTLRHRQWLATLHLPHTYLQQVLDEHLALLHYLEARVLHFDRQIEALAQSDIYADSVKKLCTLKGIRTLAAMILIAEITDFRRFASPRALMAFLGLIPGEHSSGDKQNGCSITKTGNKRCRTQLIEAVLHYVKKPIIRGRIKTALADVDAATSSIALTCMQRLHKRYWALVMKGKEPKVARTAIARELAGFIWALMNQQPAPATTV

SEQ ID NO: 371208 - protein, 394 aa, unidentified
MKLVGIDVGKNSHHFCVMDKETGEFNVAPSSFSNNKEGFDFLINSLKPYSKKSILIGMEDTGHYHVALLKFLLSNGYTVALINPKTTDLTRKMEGGITKNDKLDTITICDVLDTPERKKQYRITKVDRFDLYEQRQLTRHHHNLKEELNVYCNRLQKSIDLVFPEFNTLFSSKYGVVYMNLLKTFGNAEIIASTDIRTIRKCFEIKGRGNRISLTPEKLKECAKNSIGISSEVETIQIKHLVSQIMLIKEQIAEIDKKIEEFSIKNNSPILSIPGISHFSGTSILSELGDIGNYSKPSQIIKFAGVAPYHYESSQYNAQHTGITKKGSKYLRKTLYQIILPVINNNPVIKKYYLLKISQGKGHRCAQGHCIRKLLRIIYHLLETGQSFDPALLR

SEQ ID NO: 371209 - protein, 375 aa, unidentified
MKEKLRFLGLDVHAETIAVAVAEPDGEVRSLGTIPNRKESIHKLVKKLGGVEHLRACYEAGPTGYVLYWQLSELGVKCEVVAPTLVPVKAGDRVKTDRRDAEKLARNHRSGDLTAVWVPDEGSEALRDLVRAREAAKQDQLRARHRLGKFLLRTGRRPGPGIKAWTQGYLVWVRQVCYAQPAQTATLLDYLHEVEHMGARVGGLEQAISEAVKLAAPEMRAVVRDLQALRGIAEISAVTIASELGRISRFETAPQLMGYSGTVPGEDSSGKRKRRGPITKTGNAHLRRIVVEAAWSYRLRPAVGPGLRKRQQEVSEPIKEIAWKAQLRLYKRYSRLAAAGKDKRKIVTAVGRELLGFIWAIGIKAEAAAQPQRAA

SEQ ID NO: 371210 - protein, 481 aa, unidentified
MSARRSPCTMKMRYADTHRGPVNVGDAWYCESAMSLTWELPAPRIVALSTQSRVVRTRLLRATAIPNPKEGAMEQLIARCAGLDVHKETVVVCVRVPGPGLDRLQHVRTFGTMTVDLLALRDWLTAQDVTQVAMESTGVYWKPVYDVLEEAVTCLLVNAAHMRNVPGRKTDVQDCVWIAQWLEHGLLRGSVVPPVPIRELRDLTRYRKVLIQERVRETQRLQKGLEDAGVKLASVATDILGASGRAMLEALVAGTTDPEVLAELARGRLRAKLPALRTALAGRFRGHHGFLVGELLAHLDYLEEAIDRLSQQLEDHLRPFAPLVQPLDAIPGINPRAIEGIVAEIGVDMRPFPSAAHLVSWAGICPGHHESAGKHTSGKTRKGNRWLRTALIEAALGAIRTKDCRLAARYRRIMRHRGHKKAVVAVAHTILVIIYHMLTHHVPYQEVGAAYLDQRDREQATRRYVKQLERLGHRVVLEPAA

SEQ ID NO: 371211 - protein, 323 aa, unidentified
MNKDIKYFGIDISHLVFDVTDSDGHYYQFKNSLIGFKKFMKLLDFNSHCVMEATGYYHYQLAYYLQENSVVLSVENPLSVKRFIQMKLSKIKTDKSDSKLICEYAKQVDLKLWQGNSKHQLECLQMTRLLSVYTKQSTMLKNKLHGEAVLGHPSKLVVTSLKRSLRQLKKEIDTIEEKLLLLVNEVHKDVLTRLKSIPGIGKKTSLMLVVLTDGFDRFKSGSELCSYAGLTPIIRQSGSSVNGRARISKIGNQKLRNLLFMCSFNACKYNKACKAIYDRIVAKGKSKKLALIAVCNKLLKQAFAIAKSGLIYDDTYRSILVKN

SEQ ID NO: 371212 - protein, 459 aa, unidentified
MSRAKKRKSKAARGTSELPVLRPNAAGVDIGATEIFVAVPPDRDPEPVQAFPTFTEDLHRLADWLKACGIETVAMESTGVYWIPLFQILEARGFDVCLVNARYFQNVPGRRTDVSDCQWLRYLHAVGLLRPSFRPTDQVCVLRSLARHRDSLIQTAATHVLRMHKALDQMNLQIHHVISDITGVTGLKIVEAILAGERDPKMLAALRDGRIKAPEETIIKSLVGDYRREHLFTLRQSLAAYRNYQKLIAECDREIEGQLKTFDARVDCKAKPLRAPKVRRHKVFGNEPRFDLRKHLYRIFGVDLTEMPGMSILTAHTLLAEVGPDLSRFPNASAFASWLGLCPDNDITGGKKVAVGTRHVNNRAAWALRMAANSLRNSRSGLGDYYRRMRAKLGAPKAITAAAHKLARIIFHLLTTHQAYDETLCARRDEQTRRRTETILRNQAKALGFQLVPASQTQE

SEQ ID NO: 371213 - protein, 338 aa, unidentified
MESFVGIDLHKYVSQLAVLRENKSPSQLRFANDVVTVEQVLKKLPEGSKIAVEAMGSWWWLVELAQKSGHEVFLSHPKQTKAIASARLKSDKVDALMLAKLLKADLLPTVWIPPATQRHIRELLSHRGRLVRQRTAVINELRAVYAKRNIDPEAKLQRVRPMVSGAEDLGGYGPRIVEEDLKLLEFINRQIGGLDKELIKIALEDAQAQRLMTIVGVGPVSAVAISCWIGEIGRFSNAKKLASYFGLAPRVRQSGDTERHGHMSKEGNRMVRMLLIQAALVHTRRGKGPSRKHYLGVVKRRGKQIARVAVANKLIGAIFHMMKEGMDYSDFIRRSGAQ

SEQ ID NO: 371214 - protein, 399 aa, unidentified
MKKHVSLELRVSVDVGCRSHNVAIGLSSGEILDEFSIAHEPEGFRHFFSRIEKQERKFGCPVAVAMEGFNGYARPLDTLVRARDYRLFNINNLKLARFKEIFPGAAKTDEIDARKGLELFQLRDHLPVAKDVLQEVYKTPQENNILKRLSRRRRRLVDERVRVLNNLQSDLQAVCPGLLEITGEADNLWFLRFLTSTDDLRKLARMREATIRKIPGIGVKYASVILQWQKRAQFSHDVEWVGEMIREDAVRVMELHDKIQSLEAKIEDVAQGSDMAQTLATIPGFGAVCTAELAGEMGTIERFSNEGSLALYLGMANLDNSSGKQKGSKPPRQVNTRAKAAMMIAVDRHRKKVLESQRYYEKKRAEGKKHNQAVRALGRHLCRVIFKMLKMNRRYILSQ

SEQ ID NO: 371215 - protein, 427 aa, unidentified
MPYKIAGIDVHKRMLHVVVSDVQVDGEYDFTRRVFGSLPEALRSLTAWLVEQQVEEVVMESTAQYWKPVWGTLERYWKPICQTREGALATSGTLHLAQALSNRGRRGRKKDFRDAERLVKRLVAHELTLSFVPDVAQRLWRTVVRTKYQLTRNRVQLQNRLAALLEEAHIKLSSLVSDLLGASARRMLEAIAGGETNRETLAALADRSLRATQEQLQDALGVCQDLNPVYRRLIKMVLDEVASIDKRIEQLNQEMANLLRPHEDQVKRLAEVPGLGVDSAQQVIAEVGATAATFPSEKHLSSWVGACPGAEESAEVNHSRRSPQGNRHMRRILNQAANAAAKHKGSIFQILYGRYVPRLGHNQTIGIIAHKLCRLVWKILHRGIRYEERGPEVSKASKQKRTRKMIRQLSRLGYRIEPSPSQSAITA

SEQ ID NO: 371216 - protein, 420 aa, unidentified
MAGVVDIVYAVCCGMDVHKDFLVACIATTDERNHTTHQIKRFSTFTGDLRRLAGWLAANNCCDVCMESSGKYWIPVFNILEKTCNVCLTHPKYVKAIKGKKTDKKDAKWISELFKCDLVRSSFIPPSLIRQLRDLCRYHSKLTNMCTGDKNRAQNCLTMCNFKLDTVFSDVFGKSATRIIDALIEHGNSDFDFTPLIDGRCKATVEEIRAALDGELIPAQTEKLNLIRKHMEYLTYIKDSLEQLILDLAKEYQPQIDLLMTVPGISTHLTAVRILSEIGADMSVFETAKKLCSWAGLTPQNQESAGKKKTTRIGRGGDYLKPLLVQIVLAATKSDKCPELKNKHQSLKKRRGGKKATIAISRKILTAVWNILSKNEPYNAELYHKIDKAPNNRELTTEQAFALLRKQGYTISDKYAALAL

SEQ ID NO: 371217 - protein, 393 aa, unidentified
MTTLHPMPDDVVLVAIDIAKARNEVLIETPGQKRRRRMTVLNTRAEHDRLIVLLKGFDRPVACAMEATGNYHRPIAWRLREAGFQVRLVSSVALARTREALHNGWDKNDPKDAQVILHMLRIGASQAYHDPLAAGINDVQELSKTHEAIAGAKTQVLHRIQTHYLPLYFPELDRFRQNSRSDWFFAFLDRFPTPASITALNKPAFIEAAWSVVGRKVSKERLLGDIYETAKTSIGLPIPLEAPAIRMFRLVIAEARSLIRQRNEIEAMADQLLAESQDYKRLGQIPGIGPIIALAILAEAGDLRRFGHHRQFLKFCGLDLSTQQSGTYRGQTRLSKYGNARLRRNLWLAGQVAIRQKENSFRDKFERYSLLLAQHADDLRLVKPALFHVRLLG

SEQ ID NO: 371218 - protein, 442 aa, unidentified
MTNLSSSVAPTEWAAFVAIDWADQKHFWALTPTGSEEVERGELDAAPEAVEAWAAELNVRFSGRPIAVCLEQKRGALVYMLAKYAHLVIFPVHTKTAAQYRETFCPSGAKSDPADAAWLLDLLLRHRHQLRELRPDTPETRLLQHLTEYRRRLVDEATRQKNRLTSCLKIYFPQLLRWFDDIGSPVAGAMLERWPTLPELQRVHPGTLRRFFHEHNCRSEERIQERITGITAAVAAIQDQAVVEAESLRARSLVALLTTLRSQIALFDQRIQEVVAKHPEQRLFASFPSAGPVLVPRLIAAFGTQRDRYATATDLQSLSGIAPVTERSGRQEWVHFRWACSHFLRQTFHEYAAHSIVKSAWARAYYESQIEAKKTHHAAVRALAFKWIRIMFRCWKDDKIYDEQAYVAALQKRNSPVAGLFRATGIGWQSSARFQRLSENPS

SEQ ID NO: 371219 - protein, 397 aa, unidentified
MIAVGIDISKAKSTVAVIDSDGTVLASPFAMAHTQPEMEAFVTYLKGLGEPTTILMEYTGHYHYPVLKKLQDEGFPVCIVNPYQMKKYGDVEIHKAKTDKKDALRIAAYALEKSYKLVPYSSMEQKYEDLKFLSRQYSQRITYVAKLKVQLIALLDQTMPGITRILPLNSRNPEKCALLLFIKRFKSFDEIQRIGKARFLASYDVLAKKASERSASSKGLSIYELAVDSITTRGEDPYIWLSQNQCVDLLSATQNAADEIISQMRNIAETIPEYKVLRAMHGVGDRLGPIILAEIGDVHRFHSGKALNSYAGNDAPPYQSGQFESRNRHISKRGSSALRKACYEVMQALKLTKPQDDPVYLFMLKKEQEGKPFNVAKMAGVNKFLRIYYARAMELYK

SEQ ID NO: 371220 - protein, 445 aa, unidentified
MAMRKRDDEVVFPNAAGIDVGASSHWAAVPRHFAEQAGCEPVREFGAMTDDLNALADWLLACGIDTVALESTGVYWIPVYEVLEQRGLKVWLVDARQLKYVPGRKSDVQDCQWLQKLMSLGLLRAAWRPGSEVCVVRAVARQREVLLTEQASWVQRMQKALVQMNIQLTEVLSDVMGQTGQAIIRAIVAGERDPKILARHRHSRIKASAEEIIKALTGNWREEHLFVLGQALAMYDDIGRHLVECEAKLRELLAERSERRVDLGKAPKAGAKARMEFDVRQALANWAGVDLTRINGLGVTVVMKLLSEIGPDLGRFANVKHFCSWLGLCPGTKISGGKVLSSGTKRSANRARQALKMAAMSLSHSDSALGAFYRRLCARMDKPRANTATAHKLARMVYFMLTRGEAFVDQGQQRYEEQQHQRSVASLRRRAAALGFQIHPVEVVA

SEQ ID NO: 371221 - protein, 456 aa, unidentified
MIMKRKKKVLQVPKLESLKQINPNAAGVDVGASELYVCVPEDRDPRPVRVFQTFTSDLHEIAAWLKRCRVTSVAMESTGIYWIPLYEVLEEAGFEVKLVNAREAKNMPGRKSDILDCQWIQQLHSYGLLTASFRPPKDIVALRSLVRHRDRLIVARAVHIQHMQKALHLMNLQLDNVLSDITGVTGMRILRALVAGERNLDTLASYRDPSCKSSAQVIRESLKGNYQEEHLFPLRQSLELYDYHTTMIQQCDREIEQKYRALPSRVDLQRKPLPPSKKQQKKPRKNAPTFDLRSRLYETAGVDLTAIDGCNAATIQVVLSETGVDMQPWRTCGHFTSWMCLAPHNDISGGKVLRSRAKKTKNRANTALRLAAQALTHSDSWLGAYYRRQRARLGAPKAIIATAHKIARIIYYMLKYQREFVDLGANHYEAQYRKRQINSLTKKAASLGLLLVPAKA

SEQ ID NO: 371222 - protein, 412 aa, unidentified
MQDILTCTMGLDVHRDVIVACLAKGELGTDPEIEIRSFSTLIPEMRKLRDWVIETGCHHIAMESTGIYWQPIYETLEPCFDGQINILVVNARHMKNVPGRKTDMRDAQWIATLLRAGLLKGSFIPDKTFRELRHLTRYRKSIVHDITAQKNRIDKFLQSSGFRFTAFLSDAFGASGRNIIRHLMEYGDISREALNKCLKTQTRKRIDEILVALNGSLSEHQRSFLRIIFEHLESLERHRHTVEDAISEEIVKHEAALNLLCSIPGIDVTAAASIIAEIGTDMSAFPDSQHICSWAGLSPGNNESAGKRKSTHINKGNPYLKSMLCEVGWVIAGKRTLYLSGWYWRIKQRKGAKRATIALARKLLALIYTMLKTGTPYNEECFEIRRKQSERKRASRMVNELQKLGYFVVVPD

SEQ ID NO: 371223 - protein, 347 aa, unidentified
MNKYSESELITVVGIDLAKSVFHLHGLNKQGHVVVRKKLSRSKLAEFMARLPSCLVGMEACGGSHDWARRLMAMGHDVRLISPQFVKPYVKSNKNDIVDAAAICEAVQRPDMRFVPIKSAEQQDIQSLHRARSLAVSHRTAQVNQMRGLLLEYGVVIAKSVAALRKAVPDILEDADNALTPMFRELLCGLWEELLRLDERIAAYDAQIKHLSEQSEVCKRLMTIPGIGPMVSTALVAAANDGKAFKSGREMAAWLGLVPRQHSTGGKPRLLGISKRGDVYLRKLLIHGARAALRWSDRKQDRRSRWVSELATRRGQNIAAVALANKTVRTAWVLMTREEEYRTAAAV

SEQ ID NO: 371224 - protein, 372 aa, unidentified
MIVIGADTHKRQHTLAGVDEVTGRVAGEKTVPVKRAALQDMVRWARSLGEDRVWAIEDCRHVSGGLERFLLVCGERVVRVPPMLMAGMRRGARERGKSDAIDAVAIARAAIREGIDTLPAAQLAGPELELRLLVDHRERLVALRTGLINDLRWNLHDLWPELEIPSRSIHRSAGWQDRIARRLADAKQTARVRIARDELRRVRDLTRFIDRLEREIASLVAKLAPQLLAEQGCGALTAAKLVGEIAGINRFQTDAKLARMAGVAPIPASSGRTDRHRLDRGGNRQLNAALHRIAITKARVDPDTAAYLARKHAEGKNRSEALRCLKRHLVRRVWHLLQPPGPVTAPQTGTRPPMIAPAGITIACTGTSGPFP

SEQ ID NO: 371225 - protein, 431 aa, unidentified
MNTQQFEVIRPKCADLDVHKKSVVAAVCTSDPVTLTASYKTEVFNTTNSDIAALRDWLLAQDCHDVCMESTGKYWIPIFNILEPHMHVILTHPKYVKAIKGKKTDKCDAKWIANLFRFDIVKASFIPPADIRVLRELSRYRLKLSYMRTAEKNRYQNSMTISRIRIDCVLTDPFGLSATRIMDYLLSGEPFNEGKCRSLIDGRVKASKDEVMDAVHGYHILEEQKFKMTHAKAHMDFINQSIDEIEAELFLRSRQYDSQIKRIATVSGITELSALFILSEIGADMSVFESDRHLCSWAGLTPANNESASKKKSTRCSKAGQYLKPLLIQCALAAAKSKKEPYFAIKYQRLAKRRGKKKAIIAIARMMLTSIYHMLLNGEDFHPDDYEATVNPPKQKPVILTVENTLQFLREQGADPEILKLIQQQCAAQAG

SEQ ID NO: 371226 - protein, 408 aa, unidentified
MTSQSLVPKRFIGLDIHKHYLLAFGVDANLNRVLGPQRVQPLNLERWMSKTLHPDDAVAIEMTTNTWQIYDDLQPHVGSITVVHPPHVALITRAQVMNDKIASTVLARLLAKSLLVGIWVPPQDVRELRALIAQRSKITRLSTQSKNRLHAILHRHHTRPPSGDIFHPRHHDWWMGLELNPAEKTNLVCNLETLAFARRQNAHIETTLKALAAQDERVTRLVHLPGINLINALTILGAIGTIVRFPSPKKLVGYSGPGGRVHISGKTRRTGRITKAGRRDLRTALVQAAQTASNTHPHWKAELARLKPRIGRNKAIVAIARKLLITVWYVLSNEVPDRFAEAEIVARKLMQYTYLLGKANRPSGQSTAQFVRQQLDNLGLGGELTEIPWGTKKPPVPLPPSRVVVERN

SEQ ID NO: 371227 - protein, 363 aa, unidentified
MKKDNRKQSKEKAKRARTVTIGMDLGDKTSRYCVLEEDRVIQESSVATTQPGMRQAFGKMRRCRIALEVGTHSPWVSRLLASLGHEVIVANPRQLKLITHSSRKNDKVDAKTLARLARIDPELLRPIRHRSEKAQMDLMKIRVRAALVETRTGLVNTLRGLAKSVGERVAPCDPDSLDAVRLEALPEALRETLRPVVQQIELLTEQIQEQDRKLEQIARVEYPNTALLKQVYGVGTLIALTFVLTVEDPQRFRKSRDVGCYVGLRPKRSQSGESDPQLPISKEGDAYLRKLLVQGAHRVLFRSSPDTDLKRWGERLASRGGKNAKKRAIVAVARKLAVLLHRLWVSGEVYRPVGYGQARAMAA

SEQ ID NO: 371228 - protein, 360 aa, unidentified
MSDITRGEIVRVGVDLAKHVLQVHAVDAQGRVVVNKALQREKFLPWCAQLPPGCLIAMEACGGSHHWARRLKSMGLDARIIAAHFVAPYRMQGKSGKNDANDAAAVCEAASRPSMRFVPVKSVDQQGMMMVHRLREGYKEERTGCISRIRGLLAEFGLVFPQSPEALRRALPDAMEDANSGLPTVARLALQQAQAHWRELEERIAWCDERIAAHVRSSEEAKAAMHLCGVGPIGASALIACVGDLAQFRSGAQFGAWLGLVPTQCSSGGKTNLGGITKRGDDYLRTLLIQGAKCALRSAHKRHDRISQWMVQLMMRTGWQKAAVALANKNARILWAVLTRGAKFDPNHVSVMPQRCAGLG

SEQ ID NO: 371229 - protein, 357 aa, unidentified
MSTRLFVVACIASTNDKGVTSYESHRFSTYTSGLKTFVAMATQTKLQGCLYGIHGKYWIPIYNILENDCSIVLAHPKYVKAIRGKKTDKKDAKWIADLFKHDLVAGSFMPPADIRQLRDLMRYRFKLTCFQSSEKNRLQNCLTVSNIQLGNVVSDTFGKSAQAILDKLLENPADTSFDLEPLVYKSLKKKLPQLRDAIDGYITPEQVGKLKVIKAHYESLESRKAELEELILALAAPYQQELAILQTAPGIRSLFTAIGIISEIGTNMEAFPSAKHLCSWAGLTPTNNESAGKKKSVRVSKAGCYIKPLLVQCANAVVTGKKHPEIRNRYLRLKASRSQESNHCHCKNASDCIISYA

SEQ ID NO: 371230 - protein, 356 aa, unidentified
MEQFNKLDFSGQSIFVGLDVHKKSWSVSIFSEHCEHKRFTQPPEADKLVHYLKRNFPGAAYHSVYEAGYSGFWAHDQLRNQGVNCLVVNPADVPTTDKERTNKRDKVDCRKLARHLRAGELKGIYVPTRLQLEDRSLVRTRQSLVRKQTRCKNQIKAFLYFHGIYLDQEFVDSSWSQKFIRGLEGLSMTRASGDMALKAHLEELSHLRQIIASVNRAILLLSREPEYRDRVKRLKTAPGISTLSAMILLTELCELARFASLDRMASYVGLIPDVQASGETEHVGHLTYRRNAQLRHVLIEAAWTATRKDPVLLLAFNQYCRRMKKTRAIIKIARKLLNRIRYVLKNDLEYVPGVIQ

SEQ ID NO: 371231 - protein, 424 aa, unidentified
MKVTYQTCCGVDVHKSFLVATIVKTTGGIEPSYQKKRFSTFNNSILEFKQWLLDNHCHDVCMESTGKYWVPVFNLLEDKINVVIANPKWVKAVKGNKDDTKDSKWIGDLFRLGLVKGSYIPCKKVRILREYTRYRYKLVSCRSSEKNRYQNALTVCNVALDSIVSDIFGKSSTSIIDYLLEQSGTSINHEEIASKLLRSLKSKEDAVIESVEGYQMTDAQKYRMRLVRAHMDYITAEINDVDKMIENMISSNPDFENAVQFLCTIPGVKRDSAITIISEIGTDMSQFSGSKRLCCWAGLTPGSNESAGKKKSVRITRAGVYLKPALVQCAHAAVKSDKSPYYKKKYESLVKRRGKKRAIIAIARMILTAIYQMLSTGEEWNPSNLYKIDMPVALVEKQKAKAIKQAKKLLQREGLLPPDEPLAS

SEQ ID NO: 371232 - protein, 376 aa, unidentified
MREKLRFLGLDVHAETIAVAVAEPDGEVRSLGTISHREESIRKLIRKLGSPEQLRACYEAGPTGFVLYWQLTQLGVECAVVAPSLVPKKPGDRVKTDRRDALELARCHRSGDLTAVWVPDEDSEALRDLVRQREAAKQDQLRARHRLTKFLLRTGQRPPLGLKAWTEKYVEWIQQVHYTHPAREATLLDCLNEVQHMEQRVKRLEQSILEVVKLAPAPVQAVIQGLQTLRGVAHISAVTIAAELGNISSRFESARALMGYSGLFPSEDSSGERIRRGSITKSGNAHLRRIVVESAWSYRHRPSVGAKLRKRQEGVPAEITEIAWKAQNRLHKRYMTLMARGKEQRKTMTAVARELLGFIWAIAIRAEAACMQQKAA

SEQ ID NO: 371233 - protein, 342 aa, unidentified
MDHYAGIDVSLECSSVCVVDASGKIVREAKVASEPEALIAWFASLGFGLERIGLEAGPLSQWLFAAMRQAGLAVELLETRHVRKAFEAMPVKSDRNDARGIAQLIRLGWFRPVHCKSMSAQETRTLLTARKLVQSKLHDVENSLRGILRGFGLKVGKTTEREFARRIEELVVGHPHLQVIANALLAVRAVLRKEFAAFEKQVRKMARSDIRTRLLMSTPAVGPIVALTYASAIDDPTRFRSSKQAGAHFGLTPKKHQSGETDYTGRISKIGDSSVRTALYEAAHVMLTKPLKGCSQLKSWAMRIARRAGMSKAKVALARRLAVILHRMLADGTPFNAAAAAA

SEQ ID NO: 371234 - protein, 343 aa, unidentified
MYYIGLDVHKKTISYCVKDVAGRVYQEGKIGSTRCELDAWIRIMPQPRTIAMEATIFTGWIYDHLLPHADAVKVAHPLMLRAIAAAKKKNDRVDAGKIADCLRCDFLPECHIAATPIRDRRRVLRYRNLVQRQSIQMKNRISGLLMETGVSYNKLRLHRMGYFAQLLSTNEEIPDSIRPLLQLCREHVDRSIRLDRTLLRSLQQDPMLSERLERLRTVPGVGPITALTWVLEVGDTSRFRSIKQAISYCGLCGAEKSSADKVLRTPISKQRNKHIQRMLVEAARLAPRYSEELALLHERERQRGNANRATLAVARKMVAHMLAVDRRKTNFVPEGKFRPAAAA

SEQ ID NO: 371235 - protein, 259 aa, unidentified
MEHLPAAPTFVGIDVAKDRLDVHLRPWDEAFALSRDGVGLEALVERLVARSPALVVLEATGGFEVAVAGALAAAGLPLVVVNPRQIRDFARATGRLAKTDRLDAEAIARFAEAVRPQPRPVPDQAARALGELVSRRRQLVEMLTSERQRRRQLRAPRLVRRLDAHLTWLQKELAAVETDLDDAVRGTPAWRAAEDLLASVPGIGKTSARTLIAELPELGTLDRRKIAALVGVAPINRDSGSLRGRRMVMGGRASVRTAL

SEQ ID NO: 371236 - protein, 342 aa, unidentified
MSEVTTIGVDLAKNVFQVHGIDVAGEIVIRRQLRRRQVLSFFKKQPQCLVGMEACASAHYWGREIAALGHEVRLMPPRYVKAYVKRNKNDAADAEAICEAVTRPNMRFVAIKSEQQQSVLMLHRTRELLVRQRTMLVNALRAHMAEFGMVARVGLPQVKELLAVITDEADDRIPSLARTCLSGLARQLLSLEREIVAGEKRIHAWHRASEVSRRLETTPGIGPITASALAASIGDPSIFNNGRGMAAWIGLVPKQNSTGGKERLGRISKQGDHYLRWLLVAGAMTVIRHAKRRGTTDPWLAAIIADKPTKVAAVALANKNARIAWALLSHGGTYRRPATVAA

SEQ ID NO: 371237 - protein, 453 aa, unidentified
MDTRIIGIDLAVKAAHKAIVLDQASNTFVSKLLSFHTDPADLERVLTTARAGTTEDVRTLAVLEATGMEWYSVGLYMRRRGVEVYRVSGQQVADLRKVYQRHAKSDRIDARVMARLPLLYPERLHACYFPSAPHMALQRACRELARLKSQATASKNRILATDQFAWLGLAEILPPFSPVALWVRAHYYDPWSVQAAGETAIARTWSEVSPEQPADTAWVTALLERAEKVIAFYGDPSCIDYALLQASLQREQARLCQAEEQAHQLRLKTIRPLYRQLHPQRYLESIQGVGQDSAAVYIAFIGDILRFPSLKDFRGWSGLIPFSRQSAESQARGLHITQAGPDLIKATAFLNAQVARQWDPQIAAIYHKQMTTLGKHYLQAVCACATHLLDLVYVVLRQNRPYELRDVDGTPLDKREARRICLERYRVPDDVRQHSNYRVRRARQQERIEKRTK

SEQ ID NO: 371238 - protein, 417 aa, unidentified
MFATNDLLVGVDVHRRSNVMQVMNGVGEMLIKPQRVANNRPGTAAFIQQVADLAQEGGFDHIHIAAEATGNYWLSFFCELEQSPDLADWPVALYPFNPKVIHKFRHSLGDWDKTDHLDALVIAERLRLGRQLPYPFHMEERYLPLRTLTRYRYHLVGELVRVKSHALSLVYLQASDYTVDPAFGDIFGKTSQAVLKEFPSLETVAAMPFDDLVEWLDVKGKRRFADPADNARRLQRIAQDSYQLPDEWLTAVNTALSLSLRHLTVLQQLLTRLDSAIADLMAQIPNSLTTIPGIGPVFDAGIIAEIGDLARFDYRHEKVASFAGLKWSKHQSADFTAEDTHLKRTGSAYLRYYLCQAAQLVRMRDAEYGAFYQKKYDEVRHHQHKRAIVLTARKLVRLVVRLLTTNEPFRARQVPSE

SEQ ID NO: 371239 - protein, 419 aa, unidentified
MEGSRSKVCGIDVHKQFLVATIIERNGHKRTKKFSNNLEQLLELKDWIITEQCEAVAFESTGEYWVSLYDILLGYVEIIVANPYHIKWIPGKKTDTIDSEWIAELALNDLISPSRILPKGMRDTRALTRLREKLVNERTNHKNRVHKILDSACIRLSAYYKDLFGKSGLKILKCILSGVPPEEIVQKLPKRLQGHSDAILEAIRTQLSAHQLIQLQTSITMIEFLTGKIKELEQTILNDLQKDRRKLQILMSIPGIGLVGATTILAEIGDVKDFSSPDKLTKWAGITPRVYQSANKLYTGSITKQGSKHLRWILVEIAHSCIRTKNTTFRIFFERIFNRSGYKKAIVALARKILKLVWHLLTNDEFYKEKNTLFTKSSRLPISCEMKSISVSAAIELLVKAGFQITEGEDHSDKRVMGT

SEQ ID NO: 371240 - protein, 342 aa, unidentified
MGEVSIIGVDLAKNVFQVHGATADGSVLFRKKLSRPQFARFMADQPPCLVAMEACASAHHWARQMARHGHQVRLIAPHYVKPFIKRQKNDAADAEAIVEAALRPTMRFVEPKSADQQARAVAFRTREQLVKQRTEAVNALRSHLYEFGHVAPEGIGYLPRLAKVVDDPDTDVPDLARDICRMLLEQIAHLTARIDALKARIAAMSNEAEMPRQLQTMPGVGPITALAVETFAPPMDQFRRGRDFAAWLGLVPRQHSSGGKQKLGKTSKMGQRDIRRLLVIGATAVIRWASRRGAPKGSWLARMLERKPIPVVAVALANKMARGIWAMLMRGESYRGPVLIGA

SEQ ID NO: 371241 - protein, 316 aa, unidentified
MLYVGIDVAKNKHDVTALNVPGKTVLKPLTFSNNKAGFELLDLSFRQLNQDCLIALEDTGHYAFNLLNFLHEQGYKVYTYTPLLIKEFAKSLSLRKTKTDKKDAHGIALKLLSDPNREQFQHDNRQVELKILARHYSSSQEKQSDWKVQYTRCLDIIFPELDKIVGKHSEYTYQLLTCYPNPQKRLEAGFDKLIEIKRLTASKIQDILSVAPHSIGTTSPAREFEIIENIKHYKRLIDKAEKCVNDLMAEFNSVITTVTGIGNRLGAVILAEIQNIHAFDNPAQLQAFAGLDSSIYQSDQIDLAGRMVKRSSPHLR

SEQ ID NO: 371242 - protein, 433 aa, unidentified
MLKLNYMSTLFVGIDVSSKTNAVYAMDFEENKYISSSFGNNQPGADQLVNMIAECMQKHKNLDTILIVLESTSVYSVHISNFLSTSEVLMPYKPYVFCVNPKATSNYRKSYIGMEKTDPTDAYLIADFGRVGRTKKLEPWRGGQFISLKRLTRHRMHLSECITREKTYMVSNLYLKFSELQLLEGDDKPFGSLYGATSSAVLTEFLSPQEIIDMPEEELLTFLAGKSRNRISDLSKTSELLRKAARDSYRLDKCMYEPLSISLASSFNCIHAYQKEIKLIEQAIEKCINGMNPNALLILQSIPGIGPIWASGILSEIGDITVFHSSDALAKYAGLYWPKGDSGDFTSEDNKMSKAGNPYLRCYLGEAANSVRKHIPEYADFYARKYAEVTKHQHKRALALTSRKLVRLVFGLLVKNQLYTGEKLDTEYNIESN

SEQ ID NO: 371243 - protein, 359 aa, unidentified
MIVIGADTHKRSHTVVAVDGVSGVVRGQLTLAATDDGMLDALRFAAGLDEERVWAIEDCRHVSARLERMLVAAGERVIRVAPALTGPTRQSARTPGKSDPVDATAVARAAVREGLESFPAAYLDEAAMEIRVLCDYRNQLIVERTRQINRLRWLLVAIAPSWEAELKRGLKSQRVRDRLARQLARLAPGAQRRVAKTILARINHITQEDHDLLDELTALVCAHSPQLLAQRGVGTVTAAIIIGHTAGAQRFRSDAAFARHAGVAPIPASSGNTTRYRLHRGGDRQLNRALHIIAIANSSTDPATRAYLDRKTAEGKTRLEAIRCLKRHLARRIYHLLTPHPDTQNPLPPKSANTELLLT

SEQ ID NO: 371244 - protein, 366 aa, unidentified
MTFKVVRFICGGMDVHKNLIVATIGTTDRQTLITEYIQQSFSTFYSDLIRLKEWFISHDCYDVCMESTGKYWIPIYNVLETELNICLTHPKYVKAIKGKKTDKRDSKWICDLYKCDLVKHSFIPKKEIREMREIARYRCKLVYMRSSERNRYQNCLTVSNISLASAVSDPFGKTATNIMKELMQSEVIEDDKILKLIHKNCKDKDKILDSLQGYHIESDQRFKMDTVMNHIEYLDKQIQACEAELIKRAYPLRDYFQHITHIKGISALSAILIVSEIGTDMNQFESDKQLVNWAGLSPANNESANKKKSVRISKAGQYLKPLLVQCALSSIKDKNSYFGIKYCRIKKLLITKLIATRTFKLNCIHN

SEQ ID NO: 371245 - protein, 344 aa, unidentified
MITIGIDPHKSSHTAVAVDAAGHQLAQRRFVVNSGTVRQLMRWCEKWPERRFAVEGAKGLGRSLAQQLAAAGEHVVDVPSTLSARARLLATGGDRKTDAADALHVAQVALFRQDLHAVEPEDQSTILRLLTERHDDLVNERTRIINRLHAVLRDLLPGGAPTRLSAEKAAALMKGLRPTTATDCCRRDLARDLLADLRRIDRQVRDNEAQMRDALAAAHTALTTLPGLGTVLAAKLLGHVGDVTRFPSEHHFASYTGTAPLDASSGKNTRHRLNTGGNRALNSVLHIIAVCQIRDGGRGQEYYLRKIAEGKTPAEARRALKRRLSNVVYRTLKRDHHTALTAAA

SEQ ID NO: 371246 - protein, 349 aa, unidentified
MQFYTKQHPFYCGIDLHTQNMYICIINQEGKILLHRNLKTDPSSFLRIITPYLSEIVVTVECMFTWYWIADFCADHNIKFVLGHALYMKAIHGSKTKNDKIDSKKLALLLRAGMIPMAYVYPAELRSTRDLLRRRMFFMHKRSELLGHIQNTKSQYNLPDFQKKIAYKANRNGIAEQFSDTSTQQMISMDLTLLDHFDEQLREVELYLDRQARRHAPNQLFLLRTVPGIGKILALVILYEVHDIHRFPTVQRFSSYARLISPQKMSNGKVIGRGQKKMGNAYLKWAFSEAATLMLRSIPEVKKYHGGLKTKHGKAKAMAILSHRIGRAVYHMLKHEKAFDVNYFLRHSG

SEQ ID NO: 371247 - protein, 342 aa, unidentified
MKQYVALDCSLKQISVCVMTEQRRIVKEAVIAADAGSIAEFVWSQVPDPELIGLESGPSSASLFYALRAEGLPVVVIDARHARAVLSLRINKTDRNDAVGLAELLVSGWYKPVTVKSLESHRVRTVLTNRALLVGIRQDLENQVRSVLKTFGFVLGKGRGSFADRVSEILAGKRLLLRLVRPLLKAWAAIREQLLSVDKEALAIAAQDDTCRRLMSVPGVGAITALAFKTTIDNPWRFSSSDKVGAYLGLTPRRYASGETDRAGRISKCGDGLVRTYLVEAAGVLLTRSKATSDLKDWGLRLAKRASAAKARVGVARKLSVILLRLWTDNSVFQPRVNVTAG

SEQ ID NO: 371248 - protein, 399 aa, unidentified
MFVGWDWASTAHDVTVIDSAGELVHRMAIPHTEDGIARAVAKLADYGDPGELPVAIEATRGLVVDRLLGVGHPVIAVHPNAFHAVRPRWGAARAKNDPGDSFKLADYARTDIHRLPMLVPTLPETLELQALTRQRDCQLALRIAAVSQLAALLDQYWPGGKTIFAQLHSPIALDFLDRYPTPRAAASLTPARIEAFCHRRGYSGRRSGAELLDRLRSAPISASRLGEPVVAQMIRGQVAVVRALQAGIDALDIVIAEKVTAHPYAGLLADLPRIGTLNLAQIIGEVGPILERATSFDQLAAETGLAPVTRSSGKTHTVAFRYATNRRARQALHTWLDNSRRSSDWAAQRYAAARARGQRHPHALRTIGRAWLRIIWACWRTQTAYDPARDERAKQPTAA

SEQ ID NO: 371249 - protein, 345 aa, unidentified
MSIVGGLDIHRKQITFDYLDTVTGQVRRGQVSPADRVHLRAWLARFAGCEDVAFAVEGCTGWRYVVEELAAAGVAAHLAEPADTAFARGRKRHAKTDKTDCRHLRMLLAEGRLPECWIPPGHILECRALLETYHDLRAEHTAWVQRIHAVLFHQGAPALGEGALRTEQGLAALRAVAADCLSPTGQLQVATALEVTAALETRLHAVRHQLLDAARHLTGAKVLAARLYGVGPVTALAMTCWLAGEGRFSSSRKAVRFAGLDVTVHSSDRKGPPGRLSRQGPPVLRWALYEAGKTHARSSAPDHGYYAQVKDRCNGKRAALSEARKILRQACHILTELGDDALSAA

SEQ ID NO: 371250 - protein, 473 aa, unidentified
MSQSKRPACSGRVGLTIAKSKRGSPKKATEQAVFQPNAGGIDIGAREIYVAAPPDRDEHPVRQCGTFSSDLDQMGEWLVSCGITTVAMESTGVYWIPVYDAMERHGIEACLVDPRNMKNVPGKRTDFHECQWIQHLHSLGLLHAAFRPESGVRAVRALMRRRNDLVEMASQHVQHMQKALTQMNVQFQHVISDLTGLTGLAILDAILEGERDPAVLAKLRDPRIKANEETIRKSLEGNWRAELLLVLKQRLSLYRSYRDQIQACDQEIEKLVAAFEPRVDPAEKPLPEDRKKRQRQRKKKSGSADFDMRTEAYQLFGVDLTQIPGVMTLVLLLFSEVGRDMSRWPTAAHFVSWLGLCPDNDISGGKVLSRAARRTNNRAGTLFRMAASSLYREQSPIGDYLRRMKAKLGPAAGTTATAHKIAIIFYTMVKNQVEYDATLWKKRDALREKRIEARLHKQAAQRGYKLVPLEAAA

SEQ ID NO: 371251 - protein, 340 aa, unidentified
MGQVITIGLDLAKSVFQVHGVDATGEVVVRRQIRRSQLLAFFAKQPACLVGIEACASSHHWARELVALGHEVKLMPAQYVKPYVKRSKNDAADAEAICEAVTRPTMRFVAIKTPDQQSAMMLHRVRLILSRQRTQLSNALRAHLAEFGIVAPIGRLGLEQLLEVVADVEDHRLPTGARTCLKMLVAQLTVVKAQILENDRRILADARSTDLGRRLMTIPGVGPLLASALVATVADPDIFRSGRDLAAWIGLVPRQNSSGGKERLGSISKAGHRYLRQMLVVGAMSVIRYAKQSARGRPWLEQLLARRKPKIAAVALANKTARTVWAMMMTGERYHEPLAA

SEQ ID NO: 371252 - protein, 371 aa, unidentified
MEHTRFVGLDIHKERISIAVAESGRSCAVEYLGEISNDPVAIGKLCDRLERPSKTLAFCYEAGPCGYGVHRQLISLGHRCDVVAPSLIPTRPGDRVKTNRRDATMLARLHRAGELTPVWVPDADHEAMRDLIRLRSVVRQIVSRARQHLQGFLLRHGRKHGRGTAWRMAYRRWLSTLAFEHPAQQIAFQDYVDAVMDAERRLQRVEEQISGLLPEWNLRPVVDALQAMRGIALITAVVLVAEVGDFTRFANPRQLMAYFGLIPGEQSSGETIRRGGITKTGNAHARRALVEGAWAYRMKARIGRHKVDRIEALPKVVRDIAWRAQLRLCTRYRRLSARGKTANVVNVAIAREMVGFIWSIACTVQSAPKTA

SEQ ID NO: 371253 - protein, 412 aa, unidentified
MDVIVSRQAALDVHKAQVSACVRVPGADGVRAQHVKQFKTTVGGVLVLADWLKAHQVTHVVMEATGDFWKPVWHILEADFELMLVNARDVKNLPGRKTDVGDSVWLCQLAEAGLLRASFVPPKPIRDLRLLTRYRRTQIAERRREAQRLHKALEETGIKLDCVATDILGKSGRAMLDALVSGTTDPELLAELARGKLRPKIPALREALAGHFEPLHAVLIGAILGHLDFLDGQIEELSGAIEEQMRPFAKQAELLSTIPGVQQRTAEILIAEIGVDMSQFPTAGHLASWAGQCPGNDQSAGKRRSGRTRKGSKHLNAALTDAAMAALRTNDSYLQALYRRKKPQLGHGRALGAVKHSMLCAVWHMLSTGELYNDLGGDYFARRDPERQTRRLVAMLERLGHTVTLQDAPITA

SEQ ID NO: 371254 - protein, 353 aa, unidentified
MATTTSLNHRWCVGIDLHKDTLTACTFCACCGETSYRKIACKNRNQIADFFGNLPRPHTVAIEAVGFYRWLWETLEPIVDELVLADATGARALAGRRIKTDRDDAFNIADLLAAGRLPKSYAPTAEVQLLRDLSRHRNGFSRQHARVLCRVKSIMNANNRPGPARLRSDGLIRYLKAYQAKLPARHVAMLWHCVDQLTVTERQIDQTEREIASVLQYDSFRERVAILNSFPGVGLVAAATILGEVGEFTRFTDRKSIGRFAGLNPSVYASGENNRTGRIAKAGSPHLRWILQQVAWTAIRTDDHVKKIYLRIAKRSGRKAAAVAMARKILTWMWYAVCRGESYRAETTPERST

SEQ ID NO: 371255 - protein, 342 aa, unidentified
MDKIIGIDLAKQYFQVHAANHRGEVIERRKLTRDKVRTYMSAQQPAVVVMEACGSAHHWSREFAAMGHTVKLIAPQYVKAFVKRQKNDAADAEAIVIASLSPGMRFVTPKGADQQAKAVLFRARERLVHHRTELTNALRAVLYEYGYIIPQGLRNVARIQEIVDAPNSDLPTMVREECCDMLDLISRTTEGINRKAEKIREQSKTTDVARRLQTMPGVGPVLAMAIEAFAPPMEFFDSGRNFAAWLGLVPRQFSSGGKERLGKVSKAGQGDIRRLLIIGAMSRLNWLGKRSIVEGSWLSRLVEKGKPKMLVAIALANKMARQVWAMLTKQEDYRNPMPVLSA

SEQ ID NO: 371256 - protein, 340 aa, unidentified
MTITTIGIDLAKNVFAVHGVDQNGKTVLVKSRVTRAALPGLIASLPPCVIGMEACSGAHYWARLFLQYGHEPRLMAAKFVSPYRMAGKSGKNDAADAQAICEAVRRPHMRFVPVKDESQQAMQCLHRTRQGFIEEKTATYNRLRGLISEFGVIAPQSTDALRHMVSALKSSLPLQVQQCVDDLLEHVDRIEANITEYDRILSRIAKTDHRSQRLMKLKGVGPTTACALVACIGNAHDFKNGRQLAAWLGLTPSQYSSGGKSKLGRITKAGDSYLRTLLVQGARSVLIGAEKRTDSFSRWVCSLVERRGYWRAVVAIAAKNARLCWASLHYGDDFRLYSAS

SEQ ID NO: 371257 - protein, 314 aa, unidentified
MRNCIGIDVAKQYFDLHCLKTRQDRRMNNSTDGIRQCVAFCNETCPELIVMEATGGYELALASKLQAEGFAVAVVNPRRIRDFARAAGQIAKTDKLDARIIAQFAATLEPMPTGQINENTQKLKALVARRNQLVGLHTAESNRLEHAVARDIRRSIAAVLKVIETQLETIDRQIEEQIRNTPQLQQRAQTIDSAPGIGPTTAHMLVTELPELGRLNRRQIAALVGVAPIARDSGTFRGKRMTGGGRKDIRSRLFMPTLVAVRHNPVLKAYYTRLVGLGKCKMVALVATMRKLVCILNTMVKNNQKWNPNLIKIV

SEQ ID NO: 371258 - protein, 339 aa, unidentified
MQTKQFNHFIGIDISKKWFDAAVVKAQNSDERFSERFDYSLKGYTSFYQWMGSLGVGIDNNTLICMEHTGVYSKPLIDQLITKHACLWVEMALRIKRSTGLQRGGSDKVSAINIALYAYRFADKARLWKPADKALEQLADLNAQRDRLINAKTMLEAPVNELVDIGLAKAAKPLQKNQSPVIRQINTAIQKIDTQIIELIKTDTSLYRKVQVATSIKGIGMVTAANLVVLTKGFSYFDNYKQLASYCGVAPFSRQSGTSIQTKNRVSPLANKKLKTLLHMCAVSAIQANKDLKAYYQTLIAKGKNKMLAINNVRNKLIKLLCSLIKNDRLYVEEYVYNY

SEQ ID NO: 371259 - protein, 345 aa, unidentified
MLVITIGIDLAKHVFQVHGVDANDKVVFNKPLRRSQVLPFFAKLAPCLIGMEACASAHYWARELKKLGHDVRLMPAKDVKAYVKRNKNDSVDAAACCEAVRRPTVRTVPVKTPEQQAQLMQHRVRDLLVRQRTQAINAVRSHLAELGIVAAQGYDGLKMLLTIIADTSDTRLPEDARASLSALVVQIASCQAEIGALEKRLLAQHRKNADSKRLETIPGIGALGASAILATVPDASIFKKGRDFAAWIGIVSREDSTGGKQRLGPISKQGDRYLRRILVIGALAVIKQARAHPEKYPWLTQLLARKPVKVAAVAVANKMARISWAVLTKKEIYRVRSITATPVGG

SEQ ID NO: 371260 - protein, 370 aa, unidentified
MNEGTTIRFIGLDTHRDSISIAVARMDGKPAESLGSVPSDVPGLIKRLLRLGPAESLRCCYEAGPTGLGLARRLAEVGIACEVIAPSLTPVQKGARVKTNRRDAQKLAQYLRAGLLTPIHVLDPATEAIRDLERARDDAKRAERAARHQLSKFLLRHGRWFEGRATWGAAHQAWLAKQQFDNKAQQDVLNDYREAVAMATARVRRLTQRVAERVADWDKAPLVTALQALRGVELISAVTLVAEVGDFRRFASPSELMSFVGLVPSEYSSGESRRQGRITRTGNGHVRRILVESAWHYRQQPRMSKAIRARNDRVSGPVRAIAWKAQHRLHKRLLRLMGRGKPATQAATAVARELVGFVWAIAREEVLLAG

SEQ ID NO: 371261 - protein, 342 aa, unidentified
MQISTIGLDLAKHVFQVHGIDADEKIVVRKQLRRSQVVAFFEKVPPCLVGIEACASAHHWARELEKLGHTVRLMPASDVKAYVKRNKNDAADAAAICEAVRRPTVRSVAVKTPQQQARLMQHRTRELLIRQRTQLINALRSHMGELGLAVAQGREGLRELLAIVKDETDHRLPDDARASLSVLAAQLMACTTQIAHLEKRIHAQHRANEASRRLEAVPGIGVIGATAITATLTDPTAFRTGRDFAAWVGLVPREDSTGGKRRLGPISKKGDRYLRRILIAGALAVLRHARAHPEKHPWLSQLLARKPAKVAAVALANKMARIAWALLAKGETYRAPALAARV

SEQ ID NO: 371262 - protein, 366 aa, unidentified
MPNGMALDAHAARAACVVSGSAGAIGGGAIVMGLDQHRAQITAEWLDTATGEVGRARVAPGDRAGVRRFLARFSGRQLEVALEARTGWRFVAWELAAVGAVAHLAEPAQTSALRGNKKRAKTDRADARHLRELLMAGRLPESWIGPSDLLDLRAQVRLRHTLVNQRGEWQQRIQAVLYHHGLPQRSGLLSGENRAWVEQVPLGAAARGQVTIALALADALDVQIAPIDKQLGAYARRQPGTRALMAHYGIGPLTSVTILAELGDTRRFSSSRQAVRYAGLDITVHQSDKRRAPGHLSRQGPPALRWALFEAAQCARRPGSPDRAYYTQAAERLGSNRACLALARKLLKRSYHTLRELGDEGLAPAA

SEQ ID NO: 371263 - protein, 335 aa, unidentified
MSQKATAICVVGEQGQRLWRGVCATDPAAISARLLRYAGVDAKVGVETGSMTPWLVHGLRSAGLDVQCLDARRVKAALQMRLNKTDENDAEGLAQVMRTGWYRAVHVKSLDAHRARALLGARAQLVGMTTRLSNMIRGVLKTFGLLPGAGRGLRFDRKVEALLEGVPELALIVRPLLATWRQLREQIAVFDKAVQQQVRTDPICRLLMTVPGIGALSSLMYVSTVEDPGRFSRSRAVGAHLGLTPRRYQSGETDRSGHISRCGDGLARTLMYEAAIVILHRVKRSLYLKDWAAAIERRSGSGKARVALARKLSVILHSVWRSGEPFRWVPQTAAA

SEQ ID NO: 371264 - protein, 360 aa, unidentified
MVFGTDPHKQSHTVAALDALRAECVDELSVRARDAGHERLLAWARELDGERVWALEDCRHVSGGLERFLLRSGERVVRVPPKLMAGARRSGREFGKSDAIDAEAVARAAIREGVETLPEARLSGPEREIALLLDHREDLVSERTRIQNRLRWLLHDLDPTIEIPGRALDRDKWLQRLQGRLARREQTIQVRIMREQLRRCRELTRQAKALERELGALVRRQALQLLALPGCGPLTAAKLIAEVAGIDRFESDAKLAKLAGAAPLDASSGKQQRHRLNRHGNRQLNLALHRIAMTQGRIHTPAREYLARRQAEGKTRKEALRALKRHLARRIYRILTPITKDMTNPNRIEIRTAPQVPCLT

SEQ ID NO: 371265 - protein, 317 aa, unidentified
MNTPVCVGIDVSQSQLDVAVRPGTGFSVSNDEAGWATVVAQLRPLALVRIVVEATGGLEVSLVGALATARLPIIVVNPRQVRDFARATGQLAKTDVLDAQILAHFAEVIRPPLRPLPDAQTQALAALAARRRHLVEMLTAEKNRLRTATPAIRQSLRRHLGWLQRERTQLDTELAAAIHSTPVWRAADDLLRSVPGVGPVLTTTVLANLPELGTLTHKQIAALVGVAPLNRDSGTLHGKRLVWGGRAHVRAALYMATIVATRYNPVIKPFYQRLCQAGKAKKLALTACMRKLRTILNAMLKNRTPWRHVMEPAAAEA

SEQ ID NO: 371266 - protein, 488 aa, unidentified
MAKRSKSTFERLSGSRRKRTQRRDLRRRVAAGDPGLTIVNPHAGGIDVGNASHFVAVPPDRDAHPVQEFGSWTADLIRMAEWLKACRIDTVAVQATGVYAIPLYDVLTEHEIRVVRVNAQHTKNVPGRKSDVPECQWLMKLHTYGLLRDSFRRDEKMQSVRTIWRLRDRHVKDASGAIQHMQKALTKMNIQLANVISDIRGVTGQAIIAAILQGERDPYQLADRKDERVKASREEVARSLAGNWRDDLLFELQQAVDSFHFAHLQMQECHRKLENFLASLPTRTLDIPSEPVGAKADTVLKPRKAKRAKKPKRPRGNEPTLDLEGELKRICGVDLTSIDGINVITAQTIIAEIGTDLSGFPTENHFASWLGLTPGKDISGGKVIGRGRRKGQNRVAAALRIAATTLLESKSYLGGRHLRRPLPSKTAAVKAMARHPGVLVYRLLTYGQAWVDRGAAKFEQKRAELELARLNFQARTRGYKLTPITQAS

SEQ ID NO: 371267 - protein, 339 aa, unidentified
MYVIGIDPHKGSHTAAVLDAGEELLGELRVVAGEGQSDELLAFAERFTPRLWAIESASGWGALLAQQLVAAGEAVVDVPPKLSARARLLDADNNDKTDRHDARSVATVALRRRGLRAVGTTDYTMVLRLLADRHHDLVAARTRTVCRLHALLCLLIAGGRSRRLNEQTARAALENVRCSSLVDVERKAIAIDLVADIRRLDDQLDRLKARITRAVETADTTVTDVYGVGPIVAAIILGQTGDITRFRTAGHYARYNATAPIEASSGDHVRHRLNPRGNRQLNHALHVAAVTQIRNDTPGRAYYLRKINEGKSRKEALRALKRRISDVVYRRLVADARRR

SEQ ID NO: 371268 - protein, 378 aa, unidentified
MKRVRFVGLDVHAETIAVAVAETDGEVRSLGVVPNRGESIRKLVKKLGPAEELRVCYEAGPTGYVLYWQLTALGARCEVVAPTLVPVKSGERVKTDRRDALKLARSYRSGDLTPVWVPDAAHEALRDLVRAREAAKKDQLRARNRLSKFLLRHGKRPAAGVKSSWTGSYLLWVKQEVHFEQFAQEFALLDYLHEVEHAAGRVERLERALEEAVKSAPPQMRAVIEGLQALRGIAQVSAVTIVAELGQISRFARARQLMGYSGAVSSEDSSGERVRRGAITKTGNAHLRRIVMEAAWSYRHRPAVGRALRLRQEVVSEEVKEIAWKAQHRLHARYRKLTARGKNQGQVITAIGRELLGFIWAIGVKVEGAQKEPLQRAA

SEQ ID NO: 371269 - protein, 428 aa, unidentified
MNCNTQNAKIASITEKTLIVGIDVGSVTHYARAFDWRNYEYTKKPLEFSNTEEGFLTFKAWVEDIAEKHGKTAVIPGMEPTGHYWFALGKFLQDCGMKPVHVNPHHVKKSKELDDNNPNKNDRKDPKTIAALVNEGRFSYPYIPTGIYAEIRNLSNLRFQTQEELTRIKNRIARWFSIYFPEYQDVYGDLKAVSGRMILKVAPLPEDIRRLGADGVNLIWRDAKLRGAGMKRAKTLVTAAEHSVGSKEAPEAARIELRNLLSDMDVYALRLEELLQSIEEKLKEIPYMDKLMGIKGIGLVTVSGFIAEVGDIGRFDNPKQLQKLAGYAIVANDSGKHNGESRISYRGRKRLRYVLYEAAISLIGKNPEFREIHEYYRTRKENPLKKMQSVVAVACKILRIFYKILTTGVAYDAEKLMGDIKRPQLQTA

SEQ ID NO: 371270 - protein, 332 aa, unidentified
MRIRKLTGREPIVKTPTREVYDYYVSLDWSERTMAVATMSASEASPQVWEARSDVTRLQQYLSSLEGRIILTLEESTSAHWLYGKLTPFVERLIVCNPGYNRLLCRGPKNDTIDAAKLCLLLRQGSLKEVYHSTSRLYELRMLVSAYDDTVRAGVVAQNQLKAHERGRQTGGNSGSLIVEQLQTRIELYRTEKRQYEQAFARWVKRTPALRQLKKLPGIGFRGAVKILGYIIDPRRFPNRGHYWSYCGLVWHQKTSGGRSYGRRRPQYNHVLKAVYKTAALAAIHGSNDVADYYQELLRAGRAPHNARHAVARYLARLSYGILKEATEHNNS

SEQ ID NO: 371271 - protein, 343 aa, unidentified
MEHFAGIDVSLEQSSVCVMDATGKIVREAKVASEPEALVRFFGGLGFPVVRIGLEAGPLSQWLHAGLSEAGLMTVLLETRHVKAALSAMVVKTDRKDARGIAQLLRMGWFRPVHCKSADAQEVHALLVGRKLLQAKLHDVELSIRGILRGFGLKVGKISKGQFAARVQELIAGQVMLETVIGAMLTARASLQSEFMRLHRKMLAIVREDAVCRRLMTVPGVGAVVALTFTSAIDDPARFSSSKAVGPHFGLTPKKYQSGETDVIGAISKTGDALVRGALYEAAQVMLTRTTSFSTLKRWALEVAKRRGMMRAKVALARKLACVLHRMWVDGTDFRFGKETATA

SEQ ID NO: 371272 - protein, 354 aa, unidentified
MALELEEVSMAIVGGLDIHRKQITFDYVDTVSGEVRCGKIAPADRVHVAGWLARFGGRDDVEFVVEGCTGWRYVVEELTRAGCVAHVAEPADTAALRGPKRHAKTDRTDSRHLRELLATGRVPECWIPPPHIVECRALLECYHDLRVEHTAWVQRIHAVLFHQGAPELGERWTGSAQNLSTVRAIAAAALSPVGRCQVDTAVGMLAVLDEHLAATHHQLLAAARQLTGAKELTARLYGIGPITALALTCWLAGAGRFSSTRKAVRFAGLDVTVYSSAGKRAPGHLSRQGPGVLRWCMYEAGKTHARPTAPDHAYYAQVHDRIDGKRAAISEARKLIRQAVHILDELGDDALATT

SEQ ID NO: 371273 - protein, 412 aa, unidentified
MRRVIGIDLHRTFGEVVIWEDGILRHAGRVDMTRTALEGLGKSLRSADEVVIEATGNSMAVSRVLTPFVARVIIANPLQVKAIAQAHVKTDKIDAGTLASLHAAGYLPQIWTPDTVTERKRRLAARRYQVVRHRTRIKNEVHSILHAHLIPKCPHADLFSARGRAWLARQPLPDDERAAVNRHVRELDRLAEDLTVLDREIAQAAIDDPAVKRLITITGVNLAVATGIVAAIGEIGRFKSPQKLVSYFGLNPRVRQSGLGAAHHGRISKIGRSHARAMLVEAAWAAAKAPGPLHAFFVRIRARRGHQIAAVAVARKLTVLCWHLLTKDADYLWARPALVANKTRAMQLQAGHPQQKGNRCGPAYAYNIKALRDREMLIAAQAEQSYERFIAQWEPRRPKEVARGRLKPAGRK

SEQ ID NO: 371274 - protein, 422 aa, unidentified
MKAFNPADFAALIAIDWADRKHDVCELEHHNNKPIFTVIPSKPEAINAWANALKQKYNGQLVAVACELKKGPLIYALSKFKHMVLFTINPSTVAKYRKAFTQSGAKDDPTDAAIQLEILQQHMPKLNVITPDTESIRSLAQLVEYRRKLVQDRVDLTNKITATLKNYYPQVLDWFNEKDSMIFCDFLLRWPSLAQVKRARKQTIIDFFNQHNSRYPAVNEKRLNDIKQAEALTNDDAIIRPNLLLVECLVAQLKPLMLSIERFDHDIKSIYKNHNDRFIFDSLPGAGPQMAPRLLAAMGSNRERYQSSEEVQKYAGIAPVTERSGKKEWIHWRYSCTTFLRQTFVEWAGISVRYSFWARAYYRQQEAKGKPHNTIIRALAFKWIRILFRCWKTKTAYDESTYLEALKRKGSPLLKYAVESKF

SEQ ID NO: 371275 - protein, 453 aa, unidentified
MSALRSKRGLRTAERNAEPQVVGLAPQTTLMTERTDTMKTYILRDANHVEPQKTSNPARAARPQPTTPSAPIAAPGPGLFVGLDVHNDSIAVSLAPSDSSEVRRYGILGGQHDDVLKLLKKLSAAHPGVALKFCYEAGPRGYPLCRFIRQHGAECIIVAPSKVPRQPGDRVKTDRRDADQLARLLRAGELTGIYVPDPPDEAVRDLIRARYQVSKQQHRARQQLKMFLLRQNIRYAGTKPWTLQHLRFLATVKLPFAEQQFVFQEQVNTITELGQRLERYEKEIASVVEGWRWQPVVRALMSLRGVALLTGATLVAELGDLHRFASAPQLMSYLGLCPSEHTTGETRQQGGITKMGNGIARKAMIEAAWNNRTPARISRGVLARQEGLPKGVTDVAWNAQTRLHQRYKHLTGVGRKKSQVAAAALGRELAGFVWAIGRMVKPHPVKPEPVKAA

SEQ ID NO: 371276 - protein, 336 aa, unidentified
MKLYCGIDLHSNNHYVSIIDQDNNRLMEKRLSNDLSKTLTLLVPYKDDLQGIAIESTFNWYWLVDGLMDAGYSVSLVNTTAVKQYEGLKHTDDQYDAYWLAHLMRLGILPTGYIYPKEQRSLRDLMRKRMQLVQCRTAHLISAQAQYWRSTGLRLRSQDIKKCPDNLLSGISDQNLFLSIQSNLQVIALLNKQIEMIEESILLQCKNITEYKQLQTVFGIGKILALTITLETGDIHRFQKVGNYTSYCRCVDSKKTSNGKKKGAGNKKSGNKYLAWAFMEAANYALRFYEPASKFYQRKLSRRNVIVARKALAHKLARASYYVMRDHVQFKPELLF

SEQ ID NO: 371277 - protein, 348 aa, unidentified
MRVFIGLDVSLAKTAICVVDRDGAVQWQGKVPSEPGPLIKRLAEWSDIIELAGIEACPLSEWLHRGLREAGIPAVCIETRHAQRFLSSRPVKTDKNDARGIAEMMRLGHYRPVHVKSPASQSMRTTLTARMQLVASQLQIEGTIRGLLKVYGLKIGAIHRNRFAARVFELLEMAALPDLSAAIEPLLRVREGMRTERKALDRTLAAAARRSDVGRRLMTIPGVGPVTTLAYVATIDDPGRFGTSKALGAHLGLTPRVYQSGEIDRSGQISKCGDRMLRHLLYEAASALMTRTRKWSRLRAWGVSVAKRRGMKRATVAVARKLAVIMHRIWVTGDEFDFGGPAVAVKAA

SEQ ID NO: 371278 - protein, 308 aa, unidentified
MKSGVGIDVSKAWLDVAWSACDRRLRVANTLVGWKVLVQAMADDPHVRIVLEASGGYEQGILDYLVQAGHWVCRVNPRQARDFAKALGQLAKTDTLDARVLAQMAATIDRLSPYRSLTAAQRELSQWVRRRAQLVQMIQCERQRIALLSEPILRGWARRQLASLQGQLGRINQGIRARLKALPVVRELARTKGAGPVLLSVLVGLVPELGQLDRRAIAKLIGVAPLNDDSGTRRGRRHVWGGRGSVRAVLYMAALSAIRHEPNIRAMYQRLRANGKLAKVAIVACMRKLLVILNAKARDHYAQAPVPI

SEQ ID NO: 371279 - protein, 394 aa, unidentified
MEDVLRSCCAGLDIHQKVIVACVIRSIDGKKRPEKFFASFDTTTRGLFELSDWLVSYDVTHISMESTGVYWKCVWRILQNHFELQLANPRQIKNIPGKKTDMKDAEWIARLTRLGVVPTSFIPPEPIQELRDLTRYRKHLVEDLNREKNRGHMVLQSAGIKLTSVIKDIYRKSGRALLYALVEDKPITESLILACVYTTLRRKVPQLMESLEGFMTPHYRKMLALHLTQIECLENQIKEVEETTNDYLAPYEEYVEHLEEIPGINRRTAAVVLAEIGLDMSVFPTAGHLASWAGVCPGNNQSAGKTRSKRVRKGNSYLKKVLAQGAAAISQGKSNRIRAFFFRIRKNAGHKKAIIAIVHLLLRIIYRMLSDQSRYQELGGSYLSNRKNTSITIN

SEQ ID NO: 371280 - protein, 346 aa, unidentified
MGMDISVLGVDLGKNVCSVVGLDASGAIVMRRKVRRETLIALAEKLAPCVVGMEACCGAHHLGRVFAAHGHDVRLMSPEYARPYVKAHKNDDPDAEGIAEAATRPTMRFVELKSQDQLDMQTLHRSRDRLVGERTALINQLRAILLERGMVAPQGKRKLEQFLSVLMDEQGGAGLSQRMIVLVADARAQWAELDRRIAAFDAEFVRWVKDNEEACRLTTIPGIGAIVASALIAAVGQAESFDRGRDLAAWLGLVPRQFTTGGRPKLLGISKRGNKYLRRQLIHGARAALPYVVKRDTPLGRWAKDLSSRAHRNVAVVAFANKLARIAWAVLRRQERFAATGMPMAA

SEQ ID NO: 371281 - protein, 416 aa, unidentified
MDAIVERCAGLDVHLDTVVACVSYGKLDIKPKKEVKTFSTTTKGLLELLDFINQKECTHVAMESTGIYWKPVWNILESGAFDLIVANAKKIKNVPGRKTDVKDAEWIASLLRCGLIEKSFVPPERIRDLRDLTRLRKELLGEVNRNKNRIHKVLQDANIKISSVLSDVFGETGKSILNQIIGNQCITEEFIYSLYEGRGKSKLKSTPMEMYEALNGKIRGHHVILLGMHNSNIVFLEKQINELEKEIDILLQKERDSLELLETIPGISKISASSIIAEIGTSMDVFKTEKHISSWAGLCPKNNESAGKKKRSGIKSGNNWLRSMLCECAWSATKKKDSRFKNKYWSMVPRMGRKKALIAIANMMLRLIYHLLKTKSTYKELEIQYFIDKDKRREDRIIKELKSKGYLVEKDSLQMA

SEQ ID NO: 371282 - protein, 355 aa, unidentified
MAMRKREEEVVFPNAAGIDVGASSHWVAVPKHLADEPVREFGAMTDDLNALADWLLACGVDTVALESTGVYWIPVYEVLEQRGLKVWLVDARQMKYVPGRKSDVQDCQWLQKLMSLGLLRGAFRPGDEVCVLRAVSRQREVLLDEQASWVLRMQKALVQMNLQLGEVLTDVMGMTGQAIIRDIVAGQRDPAVLAAHRHGRVKASAADIRRALTGNWRDEHLFVLAQALAMYDSLAQRIVECDAKMQAVLTPLGCHELMLSGPSKRPGKNSPGFDLRTALARWAGVDLTRINGLAVTSVLKILSEIGPDLSRFANVKHFCSWLGLCPARRSAAARSCRRARGARPIEFAKRSSSPP

SEQ ID NO: 371283 - protein, 343 aa, unidentified
MEYYAGIDVSLKECSVCVVDGTGKIVREIKVASEPEALVRYFDELELPVSRIGLEAGPLSQWLYAGLVASGRDAVLLETRHVKAALSAMTVKTDRKDARGIAQLLRMGWYRQVHAKSVPCKDTRALLVGRKLLQGKLLDVELSIRGILRGYGLKVGEVSRGRFEMRIRELTAGHVTLKTVIGAMLAARTALWNEFTKLHREMLKIARADKICRRLMSTPGVGALVALTYRSAVDDPARFGKSSTVGAYFGLTPRKYQSGETDRDGGVSKVGDTMVRTALFEAAHIMLTRAIRFSSLKRWALDVAQRRGMKRAKVALARKLGVILHRMWVDATEFCWSRTATAA

SEQ ID NO: 371284 - protein, 414 aa, unidentified
MESCLYLKVCALYDFQVHKMKISACLITIDSDGNEQLEIKEFGAFTDDLISLRAWLFSNNCPVVAMESTGIYWRPVHNVLEHYMEIILVNARHIKNVPGRKTDISDSKWLASLLKHGLLRGSFIPEKDIRHWRELTRQRRKITESLSDYKKRVHKVFETANIKIGSVVSDLFGKTGMNLIERLCDENVRLAEVDIAECACGRLKSKSSELYRSIQGFFEDHHRFQLCSLMRIISTLESELGILSDRITGLMGSYDDVISRLEKVPGVGTRSAQIILSEVGHDLKTFPTTASFASWAGLCPGNNESAGKRKSGKTSVQKHPFKTIMVEIAWAAVRTKGCYYKDKYYRLRSRRGAKKAIVAIAHRIAKAIYYIIKHGEEYRELGDDYLLKKRHDNNLKSLQQRAGSMGMQLIPLAA

SEQ ID NO: 371285 - protein, 316 aa, unidentified
MNTINGKEINIGIDTSQTQLDIYVRPIDVFFSHPNTPQGAQEAVRAIRAYKPDRVVIESTGRLELEFVCAAHKAKLPVAVCNPSKARNFAKSIGRSAKTDKLDAMDIAHFGEATKPRLTELKPEKLRLISDLLAVRSQCLEMSTMQKNRLKRMPKSVHAPIKKILKVIQNEIAGIDKKVDKLVSEVPEWQAQRDLLMSAKGVGKVLAYTLLSELPELGRVNNKEIAALVGVAPMNRDSGSYQGKRYIRGGRHKVRTVLFVSMLSAIQCHPKLKPMYQRMVAAGKPKKLAIVACMRKQLTILNTMVKNGTEWDENMA

SEQ ID NO: 371286 - protein, 332 aa, unidentified
MMDLQRTVIDEFTFTNNHDGIASLASRLTMDDRVVMESTGRVWTNLYNHLDDAHIPVVLANPLKTKAIASARIKSDEIDARILAHLLRTDLIPESYVPTKEIREVRALIRHRTSIVKIRTMVKNKVHAIVDRNGVEHDELFSDLFGKAGMQWLRTIQLPSLDRLMLDNHLEHLESLKRQIHAVDQEILAKASRDEDVRLLLSMTGVDIFTALLIRSEIGNISRFPEYKKLISWAGLAPSLHQSGSIEYHGSITKQGSKMLRWVMVEAARVAVNHDEKMRAFYARVKYRRGDQKAIVATASKMLKIIWFMLARREPYLSRNQRRYEEKLNRIE

SEQ ID NO: 371287 - protein, 451 aa, unidentified
MDLYLFLYSFDWCEVTQTTAFRLLLLISLLTPDVSIYVITQAKSLWKTAAPKSYIKGGTTMSTYFVGIDISKYKHDCCIIHAVDQSVVSKFTFTNNKEGFEQLLISLQSLSTPEDISIGFESTAHYALNLELFLEHASYSFMEVNPVLISEYKKSTSLRRTKTDSIDCESIARWLMTVEYKPHARGFYHAYSLKSLTRLRDRLVRQRSFYLVKITNILDHTFPEFKPFFQERFSKTALYLLETYGTAEKMARMNSASYDHLRRLSRGKFSPQQFLELKRLATETVGVDNGIFQAELDCLLTLYKNLAEQISVLEKQISDLIGEIHPHYMSIPGIGPLSAAVIYAEYGDISNFSSPAQMLAFAGLEPGISESGTESHKGRMVKRGSSQLRYVLMNCSLPLIRFDMTFATYYAKKRAEGKPHRVAMSHVAKKLVRVIFALERQNIDFTTQALR

SEQ ID NO: 371288 - protein, 426 aa, unidentified
MDCNTQNAKIAAITEKTLVVGIDIGSETHYARAFDWRGYEFTRKPFIFNNNKEGFEAFLTWIEELKSEHGKDRIVPGMEPTGHYWFNLGSFLQDHEMRPVHVNPHHVKKSKELDDNNPSKNDRKDPKVIAGLVNEGRYNYPYIPVGIYADIRNLSNLRLQVQSELTRIKNRIARWFAIYFPNYKDVYRNPDAVSGLMILKQAPLPEDVVKLGVDGVNKIWRDAKLRGAGMKRAKTLVTAAEHSVGCTEASESARYEIKILLSDFDLYAEREAELVSMIDEKIKEIPYIDKLLEIKGVGIKTAVGFVAEVGDISRFDDPKQIQKLAGYAIVANESGKHKGEHHISYRGRKRLRYVMYEAAISVVAHNAEFKEIHQHFITREKNPLKKMQSMIAVACKLLRVFYMLATTDNHYDGQKMLNDIRRPVAA

SEQ ID NO: 371289 - protein, 406 aa, unidentified
MRVVHERCAGLDVHKSSVVACALLPEGKQLRTFGTMTWQLEQLAEWLRSLEVQVVAMESSGVYWKPIFNILEVAGFELLVVNARHIKAVPGRKTDVKDAEWLADLLRHGLLKPSFIPNREERELRELTRYRRTLIEQRAHEVQRLQKVLEGANIKLEDVISNVVGLNGRRFLSALMAGDYDPEAVAATANYGLQRKQALLAQALHGTLGAHQRFLLDQLLSHIDFLEHRIAALDQEVKQRSRPFEAAIARLDQIPGVGIRAAEEILAEIGTDMSRFPSDRHLASWAKVCPGNNESAGKRRSGYAGKGNRWLRSILVECAWCATRKKDSYFKAQYHRLAARRGKKRALFAVGHSLLIVIYHLLRDGVVYQDLGTNYFDQRDRSHVARQAIRRLERLGYRVSLSEGAA

SEQ ID NO: 371290 - protein, 345 aa, unidentified
MTEGTIIGIDLSKRFMQLCVVDGAGAVVEERRVPRDRLIEAIGRHPGAVVAMEACGGAHHWGRTVAPLGHEVRLLSAYRVKAYRDPGCKDDRRDARAICEAGRRRQEHAIPVKDAEVQAVQSLERIEALYARQRTQLGNTLRGLLAEFGIVLPKGPGHLACRLPELMASPAFAAVPAALHEALAELFDQFLAAGERLAEAKRRLVRAAGRDPRARLLVSVPGIGPLVAAGFLAAVGEATRFDSGRGLAVWLGLTPKLYQSGERCYLLGISKRGNERLRSLLVVGAQSMLRRYAEGRYPGDPLAEWARALLKRKPRNVAAVALANKIARIAWRVAVSGQPYRPRHA

SEQ ID NO: 371291 - protein, 321 aa, unidentified
MNKNTEFFGIDISKDVFDVFSMENGHHQFANNEKGFKQFIKKLSSESLVVMEATGYYHYCLAQYLYGKGYVVSVVNPLSVKRFVQMKLSKVKTDKSDARSICEYARNNEVPLYTAKDKSQAECLQLLRLMDTYVKHRTAIKNKLEGEQVLGIPSKAVYRSLGRTVRQLNKELSLLESQLIALVKEEQQEQLRLLKTIPGIGEKAAILLVVFTDGFSKFENSKQLCCYAGITPTIRQSGSSVRGRSRISKIGNKKLRNQLFLSSFTACQYNKACRELFERIVAQGKSKKLALLAVCNKLLKQAFAIAKSGLPYHENFVSKMV

SEQ ID NO: 371292 - protein, 415 aa, unidentified
MALKIVYKICCGIDVHKTFVVACIASTDKQGVTSYESHRFSTYTKGLKDLLQWLLTRNCKDVCMESTGKYWIPIFNILEKECSIVLAHPKYVKAIRGKKTDKKDAKWIADLFKHDLVAGSFMPPADIRQLRDLMRYRFKLTCFKSSEKNRLQNCLTVSNIQLGNVVSDTFGKSAQAILDKILENPENTSFDLEPLVFKSLKQKLPELRDAIDGYITPEQAGKLKIIKAHFESLDSRKAELEELILALAAPYQQELAILQTAPGINSIFTAIGIISEIGTNMEAFPSAKHLCSWAGLTPTNNESAGKKKSVRVSKAGCYIKPLLVQCANSVVKSEKHPEIRNRYLRLRKRRGHKKAIIAIARMLLTALYNMLKNKEPYNAELYRKSDVLPVNREITIEQAILMAQFQGYKIKSAAE

SEQ ID NO: 371293 - protein, 348 aa, unidentified
MALTIVETRVITGGVDTHADTHVAAALDPIGGLLGVREFPVTPAGYAGLVEWLTGFGTVALVGIEGTGSYGAGLARHVTTAGIRVVEVDRSDRQDRRRQGKSDPLDAVSAARAAQSGRARGAPKGRDGSVEAIRALMVAKRSASADRIQAINQARSLIVTGPDDIRVRFARHTPAALVAELASLRPRPGSTVGYATRVSLRELGRRGQFLDGQLERLDELIAPLVTARAPGLLALYGIGTHTAALLLIAAGDHPERLRSEAAWAHLCAAAPIPASSGKTVRHRLNPGGDRQANHALWRIVFTRLGSHPATRAYVVRRTAEGLSKKEIIRCLKRYVAREVYPHLRPPAG

SEQ ID NO: 371294 - protein, 363 aa, unidentified
MVTLLTATPKLYIGMDIHKKSWSIHMRTDISDHKSFTTPPDCEVLYNYVESHFPGYQVALTYEAGCCGFSAARYFLNLGWEVLVVNPSDIPRMDKQQYQKTDAIDCRNLSKQLKADQLKGIYVPGEDQDQLKSLLRQRAEITKQLRSVKAQIKSLLLYHGHQIPDKFDNPNWSKDFIHWLSSIKWTFEPGNTCMESKLRIYEVIHKEHLQLANLLRSYCRKHYKKDYYLLKSIPGIGGYLASAILAEIGDLRRFGSETELASYIGVIPVMRNSGGTESIQRVTPRCRALLRSYIIESAWVALRLDPVMQNYYRKHAGKNPKSIIIKIARKLINRMLSVIKNETPYQINTTKEQIKKQPIKQNN

SEQ ID NO: 371295 - protein, 341 aa, unidentified
MKITTIGLDLAKNVFQVHGINAKGEVVVRRRLRRARVRDFFAGLEPCLIGLEACGTAHFWARELTALGHKVRIMPPSYVKAYVRRGKNDAVDAEAICEAVARPSMRFVPIKTEDQQSALMLHKARALLIRQRTMLINALRAHMAELGMIAPQGREKIDDLIAVIEDGEDESVPGLAKAALKPLVAQLRAAEEAIAAADAEIMAWHKGNEASRRLETIPGVGFRAASAIAASVPDPSFFRSGREFAAWLGLVPRQNSSGGKERLGRISKQGNRYIRSLLVLGATSMLRAARANRTPGADWVNALLERRPSRLVTVAMANKTARIAWALLAKGETYRAPRAAA

SEQ ID NO: 371296 - protein, 430 aa, unidentified
MDYNTQNKKIEAITEKTLVIGIDVGSETHYARAFDHRGIEYSKKTFKFSNDEAGFTIFKEWIQEHQKAHDKDKVIPGMEPTGHYWFNLGKFLQDNEMKPVLVNPHHVKKSKELDDNIQTKNDRKDPKVIAGLVREGRYMIPYLPDGVYADLRTASNMRFQIQSELTRILNRINRWFSIYFPEYKTVYGKPDAVSGVMILKKAPLPKDILALGVEGINKIWRDAKMRAAGKKRAQTLADAAEHSIGSKEGAVSARMEIRMLLEDYESRNARLQEVMELIEELVKKIPMAEKLMAIKGVGIKTVSGFLAEVGDISRFNNPKELQKLAGLAIIENSSGKHKGETTISRRGRKRLRYLLFEVAMSLVAKNPEFAEMHCYYTTRKVNPLKKMQSLMAIAAKLIRVFYTILTKGVDYDPKKMVGDIKRPETYQQAA

SEQ ID NO: 371297 - protein, 320 aa, unidentified
MQSPSAALNIGADIAKDAIVVACSEGSFPVREVANQRPAVLAFLKSLPAGSRIGVESTGTYHELFAEAAHQLGFRVFLLNPKDTHHYAKAVGLRGKTDRVDAELIARMIAHEHTKLHAWNPPTPQQREIDRLIKRRATLISLRQAVAMSLHELGGFADELKALRTRFNQLIARIDLRIRALVEASPDRKQNFTRVCTITGVGPVIGTALVNTLERVPVNSADAFVAFTGLDPRPDDSGQHRGKRRLSKRGPAELRRLLYLAAMSAAKTKTWRPLYEHYRAKGLSSTATLVILARRIARTAWSIYTHKTEFDPSRLTNPLT

SEQ ID NO: 371298 - protein, 316 aa, unidentified
MSESTSFVGIDVSKDVLDVHVLPAGEHWQVSNDEAGCAQLIERLKPLGEAVLVVMEATNVFWRMAAAALAGAGLACAVVNPRQVRDFAKSMGKLAKTDALDALVLALFAERIKPPVRALPDAQCQVAAELLGRRAQLMGMRVAEKNRLASVSAKRVRKDIEATIAFLEKRLGALDQEIDTWLQSTPIDQSRVNLLKSFTGIGQNTARSLLITLPALGSLNGKQIGALAGLAPFAKDSGSKRGERHISGGRTAVRAALYMPAITAIQHNPVIRTLYQRLVRAGKHHYVAITACMRKMLVILNAMLRSNQPWKAPQNT

SEQ ID NO: 371299 - protein, 356 aa, unidentified
MSKTNPVKIIIGVDTHKDIHVAVAINGIGAHLGTLTIPVSPKGYQNLETWARAFGSIHAFGIEGTGSYGAGLARFLQAKGHTVVEVNRPNRQLRHQNGKSDPLDAESAARAVLGGQANARPKSADSSVEMIRHLKVARDTAVKSRTQAMVTLKTIIINAPAALRQALDRIIGKMALIRHLAALRPGPIVSVTASAKGALRAIARRWLTLDAEIRAHDADLEALTASCAPAMLEAHGISTGTAAEMLILVGDNPERIRSEAAFAKLCGACPIPASSGKTNRHRLNRGGNRQANAALYRVVIVRIRNHQPTLDYVKKRKADGKGKMEIIRCLKRFVAREIFGYLCGARRSLPSISKAT

SEQ ID NO: 371300 - protein, 355 aa, unidentified
MRKMKDFIVAGKDIFIGLEDSKRSWKISCRSERMEVHYASMPAEYEILRNYLRKNYPGCKIKIMYEAGFKGFGLYHRLVKDGHECVVTPPNKVTQEKDSRVKTDKIDCRRLAINLENGDFKSCHVPDEELMADRQISRTLMAMQKNITRTRNQIRKFLELHWVGEDFPAGAWSKSDYDRLMELELGGKLGLCLNKLKETLQYFLEVKKQLEKELKALTEKDRYVSTFKAIESAPGIGWFTAIRLVLELGDDLSRFKDGKHFASYTGLTGSEFSTGETVRRGHITRQGPRHVRSWLIECSWMAKSRDPVLLDKYNGVLQRSGSKKKAIVAVARKLAVRLWRCAVTGEAYTVGLVET

SEQ ID NO: 371301 - protein, 348 aa, unidentified
MAHFVGLDVSVKQTSVCVVDDAGGVILEQKVSTEPADIVALLTSLGVNYGRIGIEAGPLSQWLVNALTAAELPVVCVETRHMKALLTAQQINKTDRNDARGIAQMMRVGLFKPVHVKTLVAQEQRMLLTSRKLLQRKLLDVESDLRGTLRNFGLKVGVVSSSRYEARVLELVAGFPGLAAIAEPLLKVRRIMRQQLAVLHKMLLDTVRDDPVCRRLMTAPGVGAVVALTYRATIDQPQRFVHSRAVGAHVGLTPKRYQSGEIDYDGGVSKSGDALLRTMLYEAAQVLLTHSGKWSWLKAWGMRVAQRRGLRRAIVAVARRLAVVLHRMWVDGSEFRWSKSSAAIPAVA

SEQ ID NO: 371302 - protein, 344 aa, unidentified
MKVTTIGLDLAKSVFQIHGLDDDGTVVLVKRLRRKQMMSFFSRLPSCLIGMEACATAHHWARALAALGHEVKLMPPAYVKAYVKRGKNDAADAEAICEAVQRPTMRFVPVKTPEQQSILMVHRTRSLVVRQRTMAANALRAHLAEFGLVCNQGVGNIVKLARTVFEECDTKSVLPEMARLALATLVRRLLELEDELQTLDKVLYEWHRKNEASLRLAAIPGIGVITATAIVATVSDAGQFRSGRQFAAWLGLVPKQNSSGDRQRLGGISKQGDRYLRRLLVVGATAVIRHNRGKETPAAFWLKNLLAKKPVRLVSVALANKTARIAWALLARGERFRPYQIGAS

SEQ ID NO: 371303 - protein, 370 aa, unidentified
MSQPSTLDVGLDVHKESITVAYSSQEPHAEVVSLGNIGTRQCDIDQLIRRLQSKSPHLIFVYEAGPCGYWLYRYLTQKGHICWVVAPSLIPKKPGDRVKTNRRDAIKLARLMRSGDLTPVYVPTVEDEAIRDLCRAREDAIRDLKAAKFRLKALLLRHDIRYTGRATWGPAHLRWLSEVVCPTPAQQIVFQEYIRAVTEHTERLARLEQELTAQVQTWRLSPVVDALQALRGVQFPVAVTTVAELGDLTRFDNPRQLMNYLGLTPSEYSTGERRRQGGITKTGNCHARRALVEGAWAYRYPATVSRHLQLRLEKVPKPIQDISWKAQIRLCKRYRQLSARGKNANQVVVAIARELRAFMWAIAREVPRTP

SEQ ID NO: 371304 - protein, 455 aa, unidentified
MKKKLEKNSVVKMGSGLPVFNPRAAGIDIGDTMHCTAINDGAGGHEVKTTSAFTCDLQEIVDYLKANGVTTAAMESTGVYWLSLYMLLEEAGIEPYLVNASHVKNVTGRKKDDTDAIWIQKLHTCGLLQKSFQPDNEIRVLRDYTRQRKNIILLSSDSVRRMQKALELMNIKIHTVISDILGKTGMNMVKAILSGERNPDTLCKLCDPRIKASREDIIKSLEGIWRTEYLFMLEQAVENYEFHQSQIKSCKEKIKEQLLKQVAIINQGDITFLNEDPKKKTKAKPKVKKNQFDFSISPYLIAITGVDLCKIPGISDVTALEFIAEIGVDMSKWKSAKHFAAWLNLTPNTKITGGKIVSSKLMKKRNKAGQYLRQAASCLSTNKTPIGDYHRRMRGKLGGRGATLNTAHKLARIIYTMLHNKTEYNVEMVNDNHENYKKDKIMKLEKQIARLRQAS

SEQ ID NO: 371305 - protein, 424 aa, unidentified
MNFTQNDRLKQVTADTLIVGVDVGSQTHFCRAFDWRGFELSRRVFKFSNDRMGFLTFLRWTEEIMNKTEMKKVIVGCEPTGCYWLTFQKFLQDHDVKLVTVNPFTVNRSKELDDNSPEKSDLKDPKTIAMLVKEGRYSTSYLPEGVYAEIREASVCRDQIMKQHVRLSNQIQGWLQKFFPEYLDCYSDWDSTSGLMLLKSAPLPQDILKIGAGGINQIWRDAKVRAAGLKRAQTLVEAAQESVGLEAGEAARLEIWVLVNDYMLKAEQLKRLDEYLEEKIKEVPNVEKLLAIKGVGISTVIGFIAEVGDIGRFTDPKQIQKLAGLEIVKKSSGKKKGQPRISKRGRRKLRRTMYESARALMNWNPAFQDVFLYYRNRTRNPLGGMQAKIAVACKAIRVFYVILQTGCDFDEEKFRKDIIRPEVA

SEQ ID NO: 371306 - protein, 349 aa, unidentified
MVAEVVDYVVGVDTHRDEHTLALVEAATGAVVAQQTVASNGRGYAQALRFAQQQVDAARVWAVEGAGHYGAGLARYLSERGETVLEVGRSPRGERRLRGKDDELDAVRAARAALRSEPLPRPRSGERREALRLLLVARRSAVDVRREALVQLRSVIVTAPERLREELRGLPVQRLLGRCSRLRRSTTVTPDQVAARLVLRALARRIEAASVEADELEREILVHVRALAPELLDEPGVGPIVAAQLVVAWSHRGRVRSEAAFARLAGVAPVPASSGQTSRQRLSRGGDRQLNRALHTIVLHRRQHDPETRDYIARRTAEGKSRRDATRLLKRYLARHLYRLLQNQKPLLA

SEQ ID NO: 371307 - protein, 346 aa, unidentified
MEVVHRRCAGIDISKKDAKVCVRVQGSGRRATTASVTTWGAMSNEILALREHLVAEKVTCVVMESTGDYWKPFYYLLEDAVNVMLVNPRDARNRPGRKTDVSDAAWLADLGAHGLLRASLVPPPPIRRLRDLTRARSELNRDRVRQIHRLEKILQDAGIKLSSVATDIMGQSSRAMLEALIEGKTDPAALADLAKRRLRSKIPALTEALTGRFTAHHGYLIRMHLNLIDSYTTALSDLDTKIIDALSPSLAAARDLLCSIPGWSTTVAEVFLAETGGDMTAFPTAGHLASWAGVCPGANESAGRVKYTKTREGNRNLKGALGIRRPVGDTISGHLLRRQVPPHLRA

SEQ ID NO: 371308 - protein, 355 aa, unidentified
MDSIKYIGLDVHQSTISVAVLNADGKLVMQSVIATHAASILDFLHGLRGTLHVTFEEGTHSAWLYDLLVRRVSKLVVCNPRKNALLKAGNKSDTIDARKLAELLRAGLLSPVYHGQNSTAAVKHLGRSYAALTEDTTRVMGRLKALYRSQAIACAGQKPYAARHREEWLARLSESGLQRRARRLYQQLDLLQELRRDARHDLILECRKHGETKLLRTIPWLGPIRVAMLIGRVQTPHRFRSKRQFWAYCGLALETRSSADYQMVNGQLERRKKPVFIRGLNLNHNHDLKNLFKSAATTASGSSGPFRPFYENLLLKGMKPELARLTLARKIAAITLHVWKKGEPFDAEFLKPQAA

SEQ ID NO: 371309 - protein, 247 aa, unidentified
MRNAVGLDISKLTFDASAMVGNAEYSAKFDNDSKGLDQFSDRLKSLGCQNLHICMEATGSYYEEVADYFAQYYSVYVVNPLKISKYAESRFKRTKTDKQDAKLIAQYCRSAKESELVKRQKPTDEQYRLLRMTAAYAQIKSECAAMKNRHHAAKDEEAAKAYAQIIKAMNEQLEVLKEKIKEQTEKPNCKEGVKRLETIPAIGRMTAAVLFHHLTSSKFETSNKFAAFAGLSPQQKESGTSVREKAN

SEQ ID NO: 371310 - protein, 416 aa, unidentified
MTDQRQWYAGVDWASENHHVRITDSDGRDIAEKLFRHGGEGLAEMADWLLATSGAIDPGQVHVAIEVPHGPVVETLLERRFNVYAINPKQLDRFRDRFSPAGCKDDSRDAEVLASALRTDPRCFRLLAVADPIVIELREWSRITEDLVAERTRLTNRMREQLWRYFPAMLELENDLGAEWLLDLWQLVPTPHKAARTREASVAKIIKRHRIRRFDAAHVLSVLRTQPVTVADGTTEAVSAHVATLVARIRLVNQQLDDAHRRLDSLTARLALSQETEPGQQRQHDAAILASLPGVGRIVLATLLAEAWDALQRRDYAALRSLTGVAPVTKRSGKSRIVIRRHACHPRLANAVYHWARVAVQHDPRSRLKYASLRGRGHSHARALRSVADRLLNVACAMLRAGTTFNPSLVPENAPC

SEQ ID NO: 371311 - protein, 412 aa, unidentified
MNVVGIDVSKGKSTVAVLRPFGELVVKPFDVFHTSTELSRLADKLKSLEGETRVVMEHTGRYYEPIAQRLHDAGLFVSAVNPLLIKEYGGNTLRKVKTDKADSLKIARYGLDNWCDLRQLSDMDTIRYQLKSCHRQYCLYTKNKTAWKNNLISLLDQTYPNSNTYFESPARNDGSQKWVDFVCTFWHIDCVRKLSQTAFVEKYRKFCKKHGYNFKESKAVEIYTESKELLPMLPKDAIAKTLVQEAVAQLNSISKTVEILRMQMNELAKQLPEYNAVMSFYGVGESLGPQIMAEVGDILRFTHKGALTAFAGVDPGSNQSGTKESKSNSSSKRGSPELRKSLFVLMTILLQSAPYEDPVFQFLDKKRAEGKPYYVYMTAGCNKFLRIYYGRVKEFMNTLDMPVDMDSTALCQ

SEQ ID NO: 371312 - protein, 384 aa, unidentified
MSVIIGMDPHKRSATIEVIDGRAVVLAAGRYGTDKAGYAQMLAAARKFADRIWAVEGCNGIGRHLAHRLVHDGEIVVDVPPKLSAQVRVFATGNGRKTDPVDAHSVALVALRTPNLVQVRVEEDLVVMGMLADRRDELGQARTQVVNRLHRLLLELLPGGAKKFLSARQARSLIAPVRPRDLAGKTRRRLAVELIAELEAIDKKTRALDKELTELVTARGSTLMDLHGIGPSGAARLLADVADVHRFARRDRFASWNGTAPLDASSGSQTRHRLSRAGNRRINRVLHIMAVVQLRNQTKGRACYDARRAGGMPSMMAMRALKRRLSNVVFARMLADQKRREAGPGGQPGTPADSSVAGPDPRTPALRTSHVPGPPLHSLNGVLT

SEQ ID NO: 371313 - protein, 424 aa, unidentified
MNLTQNDRLKQVTADTLIVGVDVGSQTHFCRAFDWRGFELSRRVFKFSNDRMGFLTFLRWTEELLNKTEMKKVIVGCEPTGCYWLTFQKFLQDHDVKLVTVNPFTVNRSKELDDNSPEKSDLKDPKTIAMLVKEGRYSTSYLPEGLYAEIREASVCRDQIMKQHVRLSNQIQGWLQKFFPEYLDCYSDWDSTSGLMLLKSAPLPQDILKIGAGGINQIWRDAKVRAAGLKRAQTLVEAAQESVGLEAGEAARLEIWVLVNDYILKAEQLKRLDEYLEEKIKEVPNVEKLLAIKGVGMSTVIGFIAEVGDIGRFTDPKQIQKLAGLEIVKKSSGKKKGQPRISKRGRRKLRRTMYESARALMNWNPAFQDVFLYYRNRTRNPLGGMQAKIAVACKAIRVFYVVLQTGCDFDEEKFRKDIIRPEAA

SEQ ID NO: 371314 - protein, 366 aa, unidentified
METIYIGVDFHARQQTICYLKTETGELVTCELKHQDKQKVRAFYAQFCGRVIVGLEASGYSPWFERLLEELGGEVWLGHATEIRRRARWRQKNDRRDAELILELMLHDEFPRLHRPAVQSREVLRMLRYRQKLIKMRTMSKNSLQAIALQAGLAKGSRLFTKAGQQELAAAEMSPVMHWQREHWLQLMEPLNQQLLETMVWFKAQSKGDACITRLRTHPGIGLLTSLCIVHTLQPVSRFRNTRKVAAYAGFDPVERSSAERKCFLGISKAGSRLLRYLLVEAAQTAVRKDEDLKRFYQRLADRRGRPKAKVAAARKLLIRAYIMLRDEIDYAEFRHRAVAARLARRGQGPSNVPEVLIGQPASPEP

SEQ ID NO: 371315 - protein, 345 aa, unidentified
MKQIATIGLDLAKQVFQVHAAAADGSPIFNRKLRRAEVLRFFEKTPGCLVGLEACGSAHYWAREIRALGHDVRLIPVYVKPFVKRGRTDAADAEAISEAVTRKTMRFVPVKSADQQAAAVVLKTRALLVNQRTQVINALRGHLSEFGIIAATDTTKVVGLISIVRDKTDLRLPKAARHALMEIASQIDALKAQIEKLEQAIVATVRRDDDARRLVTIPGVGAIIAASVRALVPDPGGFKSGRHFAAWLGLTPKPHSSGGKERLGRISKMGNPVLRSLLVVGATAVLGHARGNPKASRWITALLARRPYKIVAVALANKMARIIWVLLARGGTYQENGARNQIATA

SEQ ID NO: 371316 - protein, 343 aa, unidentified
MDHFAGLDVSVKETSVCIVDETGRIVREAKVASEPAALLAVLNNFSHHFKRIGLEAGPLSQWLFSALAETGLPVICVETRHMRAVLKAQINKTDRNDARGIAQMIRAGLYRPVHVKTLRSQKLRMLLTYRKLLQSKAIAVENDLRGTLRNFGLKVGMVGTVKFEARIKELVENLPDLAGLVEPLLVVRRVLREQITVLHRRLLAIVKDDEVCRRLMTVPGVGPVVALTYRATVDVPARFRNSKAAGAVFGLTPAKYQSGESECTGGISRCGDDMMRTMLYEAAQSMLLRSAKWSWLKAWAMKIARQRGMKKAIVALARRLAVIMHRIWVDGTEFRWTKETAAA

SEQ ID NO: 371317 - protein, 368 aa, unidentified
MEKIGVVASKRQEGLSPPKRPSDGTPVWMAIDISRSKAVYCLRWDGSEQRRLSTPLGIEHVAAVVEHYRGCALHVAYEACGFGYELAWWLQGHGVVVSVIAPSRVERAPGLQVKTDRVDVGKLARKLEKGDLKAIYIPSRPVHEQRQIGRTYAQSLKERKRAQVRIRSLMQEQGRLGPLPAAGWRGYSAWLDGQDLPEPIRLCVQAHQQLRAAADDQAKRMNAELYKLARSAEYRPLVSALSAQSGVGWQSAIRLILELGDIGRFPTTDALPHYLGLTPSQYSSGELDHRGHILKCGPGFLRALLLQCAWSAVRQGHDTELQARFATLAPRIGRKRAIIAVARKLAIKVRGRWRSHLLASEPAAAVAV

SEQ ID NO: 371318 - protein, 422 aa, unidentified
MNFGPVVGIDVSKRFSDMCILSPDNQIFAQTKIYHDSTSMKRAEALLKKATEAFGGRPAVVMEATSHYHLILFQFFSDCGYDVLVVNPLQSSSMKDFSIRKRKTDKVDALKLAMLYRTKTLRPSQIPQSAIRALRLLCRERVELLNDVTRYKNRLTAFLDQIFPGYDKVFSDVGSITSRAVLSHFPTPAILLASDEYELVEVIATASKSGYKFAKKKAEALIKTAETAKVLGIHTCADESMILSIIPVLNTLSDSVTYLEQSIGNLLAQVKTVRKNVELLQTIPGVGPHSASLIMAEIGDISLFKKPKQLAAYFGLDPSERQSGTFRGTKNKLSKRGSPYARAALHMAVVNAVFKHANAPAANPVLSGYYENKCKTKPAKVALAASMHKLIFIIFAVLRDQKPFELRTPEQHAREQGFIKAA

SEQ ID NO: 371319 - protein, 391 aa, unidentified
MVCVGIDVAKDKHDCCILDSDGMVRADCFTIPNNMDGFKQLLQTIRNCTKKSDKIKVGLEATGHYSYNILGFLLDNDLAVYVMNPLHTNLYRKSLSLRKTKTDRVDARTIATMLLSDVDLKSYTDTAYHNEELKSLTRYRFDKVRERAKLKQSVSRLVTILFPELEKLVPSLHIASVYALLSEYPGAKQISEIHLTKLTNLLATASKGRYEKEKAIQIREAARTSIGSVMSAKSLELKHTIKLIKELTSEIDEIEDSIQQIMDELHPPLLSIPGMGIHSAAMILGEIGDFSNFESPDKILAYAGCSPSTYQSGKLTNCYAHMEKRGSRYLRYALYNATKYVCHWNPVFAEYLAKKRAEGKHYNVALSHATKKLVRLIYALQKSGKTYLTAA

SEQ ID NO: 371320 - protein, 337 aa, unidentified
MKFSGIDLHSNNAVVAVIDDQDRVLYCKRLTNDLRLILAALAPYQAELEGVVVEATFNWYWLVDGLMAAGFAVHLANTAAIKQYEGLKYAGDERDAVFLAHIFRLGLLPEGYIYPPQERALRDLARKRLQLVQQRTLHILSIESLLARQINLRMNGEHIQRMDDAAVHALALPPHVERAMMANMAVLRTVRSEITALETILHQEARLRPEFETLKSTPGIGNVLAATIMLETGTITRFADVGHFSSYCRCVDSKRISNGKKKGEGNVKNGNKYLAWAFIEAAAVALRCCPQARRFYERKKAKRLPVVAMKALAHKLARAAYYMMRDGKPFEVKRCFS

SEQ ID NO: 371321 - protein, 421 aa, unidentified
MQVLYERCAAVDVGKDVIAVAVRLPGGEPDGRQTIRRTFKTFYGVLREAARWLGSLGVTHVAMEATGIYSMPVYHALAGHGHFEQVLVCNAAHVKNVPGRKTDLADAEWLVHLLECGLLRGSFIPPAEIKAARDVLRYRTKVVQQRTSELQRLGGVLQDAGIKIDSVASSIATRSGRAMIEALIDGERRSQVLADLAKGKMRAKIPDLELALEGRFGDHHALMCRLHLDHIGHLDEMIAKLDAQVEAMMAPFRAERQLLTTIPGIGPLAAAAVIAEIGASPARFFPDAARLASWAGICPGNHESAGKRRSGKPRHGNQQLQPVLVEAAWAAVRHHGYLKSLYHRHVMKWGGYRSPVAKKKAIIVVAHAMLVIIWHMLAGGAPYHELGADYFTRRLDPERETRRLITRPEALGHHVSLQPAA

SEQ ID NO: 371322 - protein, 388 aa, unidentified
MIYVGIDIAKLNHFASAISSDGEILMEPFQFSNDADGFHMLVSRLDSLESDNIIIALESTAHYGDNLVRYLVASSFNVCVLNPIKTSSMRKNNIRKTKTDKVDTYIIAKTLMMQDSYRFVTFYDLDLMDLKQLGRFRQKAIKQRTHLKTQLTSYVDQAFPELQYFFKSGLHHKAVYALLKEAPSPQDIASMHMTHLSHLLTTASHGHFKKEQANELRALARKSVGANDSALSIQITQTIAQIELLDSQLKKVETEMTEIMKFHDSVIMTIPGIGYINGGIILGEIGDIHRFSTPSKLLAFAGLDPSVYQSGNFQARRTRMSKRGSRVLRYALINAAHNVVKNNATFKAYYKKKMAEGRTHYNALGHCAGKLVRVIWKMLTDEVEFNLD

SEQ ID NO: 371323 - protein, 332 aa, unidentified
MRIRKLTGQEPMVKSYAGEDFDYYVSIDWSERAMAVAIMAASDVAPRVWEGRSDITQVERMLQALSGRIILTFEESTAAHWLYGKLLGSVERLVVCNPLYNRLLCRGPKNDTIDAAKLCLLLRQGSLREVYHSSSRLYELRLLVSAYEDVVRAGVIAQNQLKARQRGRVLTSRSGSMIGQQLQTRIELYRQEKKRYETRFATWIKQTPVLRRLKRLPGIGIHGAVKILGLVIDARRFPNRGHYLSYCGLVWHHKMSGGRRYGRRRPQHNHSLKAVYKTAALNAMKGTNPAAEYYHKLVASGRAEHNARHAVARYLARLSYGILKQEARHNNS

SEQ ID NO: 371324 - protein, 371 aa, unidentified
MKSILSVGMDVHKNSFSLCAYDGYTGEIVSESTFASDVKLVIKFIETLKSRYENDVEIKCGYEAGCLGYSLYKSLTARGVDCVILAPTTMQVSAKNKMVKNDRMDALNIAKNLASGSYKAVYVPDEEDVEIKEYIRMIHDFKKELKRVKQEICAFVLRHGYQYDGKSKWTIRYMNWIRELEMSEIQRETLNEYIAEMENLNDKINRFMNRIDEMYQSERYHEKVSKLRCFKGIETFAAMTIQVETADFERFPNAKAYASYTGLTTGEHSSGDKNNRIGITKQGNTVIRKTLVECAQSLVKGNVYAKKSQGLKSRQKEMDVNIIAYADKATERLKKKYQKLIERNVPRNKAIVAIARELACFIWGMETGNIH

SEQ ID NO: 371325 - protein, 360 aa, unidentified
MTSTALASVPQVTIGVDTHKHIHVAHAADELGRPLGSYTMPTTSIGYGDFLAWAQGLGELEVVGIEGVGHYGAGLGRALRAAGVRVTEVGRPNRQRRARYGKTDSVDAAGAAAMVLAGDDLGDPKTADGITEMLRVLRIARVSAVRARAKAFNALKDLIVTAPDELRDELAGRHKLHLIGACAGLATSEIPSTPTEAVSIAVKSLAERCLQLDAETKARDTQIEALTAHACPALRQVYGVGPDTAATLLVTLGDNPERIGSDAAFAKLCGVSPIEASSGKTVRHRLNRGGNRDANRALHVICVVRLRRHQPTRDYLARRIGEGRTKPEIMRCIKRYIAREIYHAVLPTRQEIPTQTIATR

SEQ ID NO: 371326 - protein, 317 aa, unidentified
MTKIICGVDVSSTSLDAFVGPSGPAHSFRNTAEGIAELAAFCRQQSVDLVAMEASGGYEKQAFALLWAGGVPVALLNPRAVRDFAKGMGLLEKTDCIDARVIAWFAAVKGSMSNAPASAEQQRLKALVTRLRQLTELQAAQRNQRLLVSEATVLELIAELLKVVASQMRMLEAEIAALLASDPLWQKLDQALRSIKGVADRTVARVMSEMPEIGTLSNKAVSKLAGLAPLAHDSGKREGKRLVRGGRRNVRAILFVVAGVVRRHDPDFAAFHQRLSAAGKPRKVIRIALAHKLLVRLNARARDARKAFAGASVCQSA

SEQ ID NO: 371327 - protein, 354 aa, unidentified
MIIIGVDFHPEFQQIALLNTTTGEVEEKRLGHPDEAEKYYRALATAGETVRIGMEASGHARWFERLVAELQFELWIGDAAEIRAKRGRKQKTDRQDAQHILKLMLKDDFPKIWVPNWENRDLRQLLWHRHRMVQARTRVMNQLQAVALNEGLHCKKKLWRERGRQQLESFALAPWASRRRRDLLDLLDRLNPSIAELTQAIEREVENYPAAQRLRTHPGVGVLTALAFVLILGDAERFRCGKQVASYLGLVPLEDSSGNRRRLGHITKQGSSIVRFLLVEAAQVTVRSLPEWRSKYFHLVLRRGRKIAKVAMARRLAVQLFWMMRKEWNYEQLKKFGSHAGQPGHRHGVQSNTE

SEQ ID NO: 371328 - protein, 392 aa, unidentified
MFYLGIDIGKNTHVASLMDEKGKVVFKAHSFSNTSEGAATLLEKITPYAPELEIGMEATGHYWLSLYSFLIKNHFVVHVINPIQTDGWRKGVEIRKRKTDIIDSVLIADFIRYGDFLETSLADEDTMSLRNLSRFRNYLVGSISDLKRKTICVLDQIFPEYHSVFSNIFNKTSKELLLQFNSPSDYEEVTSKQLEELLSQVTLKDFATKKFKNISSLAKTSFGITFCVDSFSFQLKLLIEQINFIEQQVSDVEAQMSELLKKINSQITSIPGIGEVIGATILGEIGDISRFSNASKLVAYAGIDASISQSGEYESTNNRMSKRGSPYLRKALFRAAFVASNNDPVFEAYYKKKRSEGKHHNVALGAVARKLCHTIYAILKNNVPYEVQVPKE

SEQ ID NO: 371329 - protein, 326 aa, unidentified
MHGVDAAGQVVIRRQLKRRFVLSFFEKLPSCLVGIEACASSHYWSRELQALGHTVRLMPPAYVKPYVKRQKNDTTDAEAICEAVTRPNMRFVPTKTVEQQSCLMLHRARHLFIRQQTAVINSIRAYLAEFGIVAPVGRRGVDQLLEVVADTADRRLPEVARACLAVLGSQLRALKVQILEFDRRIVAWHRSSATSKRLDAIPGVGPALATALVASVADAKAFRSGRDFSAWVGLVPKQNSNGGKDKLGSISKQGDRYLRSLFTAGALAVIRYAKIHGTGRRPWLSALLARRATKVAAIALANKLARIAWAMMARNERYKEPAALMA

SEQ ID NO: 371330 - protein, 357 aa, unidentified
MLTMPCLDGEAILGVDTHRDTHAVVLIDELGRLVASEVFPTTRRGIRALIVWAQRRGTIRQAGVEGTGSYGAGLTRALRLEGIEVIEVTRAARVGGRHRGKNDTRDAEAAARNVLSRQATAEPKTRDGIVESIRVLRNARASAVKARTQAILHIKNLVVTAPDELRESVTDLTNKQLVTRCARMHRSPRRDTLAATRYALRSLARRHHDLDKEITELDGLLADLTAQAAPRLLEEPGIGPEVAARLLLVAGDNPTRLRNDAALAALCGASPIEASSGKTTRHRLNRGGDRQGNSALWLIANNRMIHDPQTRDYVNRRTTDGKSTKEIRRCLMRHIARGIYPLLIADLHEPHQQPALT

SEQ ID NO: 371331 - protein, 408 aa, unidentified
MKVLYARCAGLDVHQAEVVACVRVTQGAAATHEVRRFATTTRGLLALAEWIQGSGCSHVAMEATGVYWKPVWHVLEGQAELVLANAAHIKNVPGRKSDMTDAVWIADLLAHGLIRSSMVPPTPIQELRDLTRTRKQLTREVVQHTQRLQKVLEDANIKLASVVSNVLGASGRRMIEAMIAGETQPEALAALGSDRLRCSRAELVDALHGRVTAHHRFLLEQHLHLIEELERRIDAFDQRIEVALAPFRATIEHLTAIPGISATAAHVIVAEIGLDMSRFPTAGHLLSWAGLCPRLDESAGHRRSTRVRKSAGWLKPLLVQCAWAAARSKDSYLRAQFLRLKARRGPKKAVVAVAASILTAAYFMLRDHAAYCDPGPDHFSRRDRARDAERLARRIRALGYDVHIQTAA

SEQ ID NO: 371332 - protein, 345 aa, unidentified
MNATTVAVDLAKNVFEVAAADGNWRVIERARLTRAQFERWFANREVARVVMEACGSAHHWARVLRARGIEVRLLPAQYVKAYVKRNKTDAADAVALLEASRAADIKPVAVKSVEQQALQALHRTRSAWMGSRTGRINMLRGFCREFGLEVAVGAVRGLAQMARFIADEHSGIPAMLRTPMRLVLEEIRLMEARIETLERELAAIARESPACHALASVPGIGLLTSTAMVAAVGDPKSFASGRRYSSFFGLTPREFSSGEHRYLGRISKRGNRYIRMLLTHGARSVLRAATVARRLGRPVDRLRSWALAVQERTNHNKATCALANKLARIAWAVWVKHEKYQSAAA

SEQ ID NO: 371333 - protein, 320 aa, unidentified
MSVSSVVAGIDVAKAHVDVDVVGVEFAPRRFDNEADGHSAIVAALKAMGVGLVVMEATGGYETSLACALQGAGLAVAVVNPKQPRKFAEAMGYLAKTDRIDARVLAEFGQTLARRSDLSRFLRPIDDVDQQWLAALVTRRRQLVAMMTSERQRLQITPSKLHPSIEAIIKAIKAQLDDVEGQMVGHVKKHFAQLDAILQSVTGIGPVASATLIAELPELGKLNRRQIASLVGVAPFAKDSGTTKGRRRVRGGRFDIRRVLYMATLTAAFRNPVFKAYYQRLTAAGKLPKVALVACMRKLLTTLNAMVQAGSKWDPERHGA

SEQ ID NO: 371334 - protein, 350 aa, unidentified
MLIIGCDFHPSLQQIAGLEETGEVVERRLGHREEAEQFYRSLLGPVRVGMEACGHYPWFERLLQELGHELWLGDAAAIRAKVVRKQKTDRRDAEHLLHLLLEDRFPRIWVPSLEERDVRQLLVHRHKQVQTRTQVKNQLQAMALSQGVQKKRKLWTEVGRAELEQLPLLPYAAERRKHLLLSLDGLQAEIEALNRRVEEEVQKRPAAVRLQTHPGVGPVTALAMVLTLGPAERLPSGKEVGSYFGLIPSEYSSGGRQRLGRISKQGSSFLRFLLVEAGQSAVRYDAELGRFYRRLAARKHRALAKVAVARKLATRLYLMLREDWNYAQLCRAVVQVSLSHSVVGRQKPTA

SEQ ID NO: 371335 - protein, 321 aa, unidentified
MIIVGCDYHPGFQQIAYVDTETGEVKEQRLEHRELAEKFYRELASQGETIRLGMEASGHARWFERLLAELNIELWIGDAAKIRAKRVRKHKTDRQDAQHILQLLGEDRFPQIWVASWENRDLRQLLWHRHRMVQARTRIMNQLQAVALNEGLRCKKKLWREQGRKQLEAYRLAPWASRRREDLLKLLDELNPTIAELTQAIDQEVEKSAEAGRLMTHPGVGPLTALAFVLIIGRAERFQCGKQIAAYLGLVPLEDSSGERRRLGHITKQGSSMLRFLLVESAQVAARSIPHGTSTFTWRCDGDERSPKSPWPGSWRFACFG

SEQ ID NO: 371336 - protein, 346 aa, unidentified
MTYYAGLDVSLKEVSICVVDDDGTIIARGTAPADPDGVAGWFENRSLTPKRIVHESGQLSIWLQRGMVELGLPAICIDARKAHKSLSARLNKSDSADAEGLAQLARMNWFSPVHIRSEESDRLRSLIGARERLIRLRKDLEGHVRGMLKTFGIRLTGISQGRQRQAFRDQLAAAGQTDPVLSAIADGFIAAHATLCQATADLDRALKAKSKSHPVARRLMTIPGVGPIVSLSFVALVDNPDRFGKTSDVGAFLGLTPRRHQSGEMDWSGRVSKCGDAAMRGLLFESASCLIRQVKRFSAIKSWAVRLAGRRGFRKAAVATARKIAVLMLTLWKTETEYQWTQEATT

SEQ ID NO: 371337 - protein, 373 aa, unidentified
MPKYSTAFGMDVHLRSTTVCALDADTGEAVTRRFPGNPWGEIAGWMDGFPGPSLAAYESGYLGFAPQRELAGLGVECVVAAVSKIPRSAADSASKNDRNDAARMAKAILAHDISPVWIPSPEVEGIRDLAGAYGGATARLATAKQRLLAFLAKRGFVYGGTTPAGNPRKYWTYDFLRWLDKVRPEDDGGVRTLAALRNEVEAAAEARADLLSEYRAAVDASPIAAEVAALQSIKGCAFALAAAFSAEVGDFTRFRSGRQVTAYFGLAPSQRSSGDSVRLGGISGAGNALVRKLAVEGSWCYAAARHQPKLMPRDTGVPLEIRMHGRKGSERLLRRRKEMLARGVPAAKANAATAAEFVRWLWALGMMCREGAE

SEQ ID NO: 371338 - protein, 436 aa, unidentified
MNSSESKRKSPTEDIVAWVGLDWADQQHVVCVYEVESGQSEILHLEQKPEALESWLGQLRQRWGSAKVAIVLEQARGAVIYALLGLDFVVLYPVNPQALANYRKVYTSSGAKSDAADAVLWMEMVRQRPECFRPWKPDDAETRSLQLLTENRRQLVNQKTALTNQLTSVLKSYYPQALELAGDLDSDQGCDFLRRWPTLEALQQARPSQIRKLYQDYGRPRPERLEQRLEQIRWARPLTQDPAAVLSGSMMVEALVPQVRSLLRAIEQFDRQISLLFRKHPDRPLFESLPGAGAVMAPRLLAAFGADRDRFQSVQEMQQLSGIAPVTEKSGKQHWVHWRWACSKFLRQSFHEFADHSRKWCGWAKAVYQQLRRRGQGHHAAVRRLAFKWIRILFHCWKTRSPYDESIYLRSLQKRNPVLWAEIQALPPRVRRQPAA

SEQ ID NO: 371339 - protein, 387 aa, unidentified
MQQPNDLSRSLAALDQDSTLIAVIEMSRSTWLVAGIVPGINRQPLKKLAADETALLQLLYRWRDEATKAGRTINRIAVAYEAGRDGFWLARWLRGRGIEAYVIHPTSVAVSREHRRAKTDRLDTELLKRAFLGWLRGEPRHCSMAKIPTPEEEDAKRPNRERENLVGERTRIVNRMKSTLARLGLRGFKPTLRKAAERLDRLRTAEGVPLPPNTLAELRRDMARLRFVMDQIREIEAARLIRLEQHPELASHAMVRLLARVIGVGIETADMLVHEILSRNLRDRKAVARYAGLTGSPDESGARRREKGLARAGNARVRRGMIQLAWRFLMFQKNSALAQWYRMQTTDHRGTTRKTMIVALARKLLVALWQLVTTGEVPEGVVLRPAV

SEQ ID NO: 371340 - protein, 366 aa, unidentified
MVILGIDAHKRSHTVVAVDELGCQLAVTTVAATTPAHVELWEWARGFGPGRSWAVEDCRHVSRRLERDLLGVGERITRVPPKLMAAARSSARTYGKSDPIDALAVARAALREPGLPIARLDGPEREVRLLVDHREDLVSERVRIMSRLRWHLHELDPGWEPAPRSLDRAKTWATIEARLDGIEGLVARLARNLVERCRQLTVEINALHGEITAMITPLAPALLAVCGCGPLTAAKIVAETAGVDRFRSASAYARHTGTAPLPVWSSNQPRHRLSRTGNRQLNAALTASRSPRPAAIPALEPSSSVAAPRETAPAKPSASYAAASPTSSTEPSKPTKGPAYAPPLDTGAIGAKPFGLTGRKPSTRPL

SEQ ID NO: 371341 - protein, 311 aa, unidentified
MTIYQDHIGIDVSKDQLDLFSIARDKAWRIANERDAIRVLLRELPPDALVVFEATSVYDKTLRRVLSRAGRPFARVNPRRAREFARATGLLAKTDRVDARMLAWLGARLDPTPTCEPSPERQHLAELLQRRNQLVEMRKQEKTRLKQVDPGPLRRDIKSLIEVLSRHIATFERAIKNLIETNTEFDRLVHTLQTAPGVGPVIAATLIAEMPELGNLDRRAVALLAGLAPIADDSGKRKGYRKISGGRPRLRRALYLAALTAKRNPAFQPFYDRLRDNGKQPKTAIIAVARKLIVTLNAMIRNNETFKQQTA

SEQ ID NO: 371342 - protein, 317 aa, unidentified
MNSINNQNEINVGVDTGKNQLDIYIRPLDIYFTVSNDEKGINKAIKEIKKYNPTRIVIEATGRLEQAFIIVCANEKLPFVVANPVRIKKFAGSVGQLAKTDKLDAKLIAYYSEAIKPELSTLKPETLRKMSDLLSRRCQLMEMRTMEKNRLQILPKSLESTINPMLTVINNQLTKIDNKMVKLIEQCDEYQIKNDIIQSVPGVGNVVAFSLLSNMPELGYITNKEAAALVGVAPINRESGSFKGKRMIRGGRHQIRTAMFMSMMSAMQCNPVFKATYQRLVAAGKPKKIAIIACVRKMVVILNSMVRDGVYWDPKMN

SEQ ID NO: 371343 - protein, 377 aa, unidentified
MTAKDQFAAHVGLDWADKKHDVCVQFKNGDRIFHVIEHTPEALDIWLNELHQRVKGRIAIAIELKKGPVVYALQKYPFVTVFPIHALSLARYRQAFWPSGAKDDPQDAELALDLMLRYPHKIKAIEADNPDIRLLQQLVEQRRLLVEDKRRFVNRLINTLKQYYPQPLEWFSHRDSSLFCELIIRWPSLQQLKRARSDTIRHFMNAKGGPAVAYTEARVASIASAIPLTTDKTVIEANALMATALASQIKLAGDLIRTYDERIESLFDTLPDAELFKSLPGMGPCMGPRMLAALGDNRDRFNSAEEIQNYAGIAPVTERSGQKSWVHWRWQCAKFVRQTFVEWTAKTVNSSYWARLYYQGQREKGKSHQSANPGSGV

SEQ ID NO: 371344 - protein, 310 aa, unidentified
MDAIYVGVDVSKDRLDVHVRPGGEAFVVSRDGKGLEELVERLRKLSPALVAVEATGGFETIVAAAIAGAALPLAVVNPAQIRHFAQAVGKRAKTDPVDAAVIAHFAEAVQPVPRALPDEAARLLGELVSRRRQIIDMIVAERQREKRAMNVRVRKSLARHIAVLEKELREIDADIDTLVRGSPVWRAKEDLLASVPGIGKTIARTLIAELPELGTLGRRQIASLAGLAPYTRQSGRWRGKSMIAGGRSAVRSVAFLAALVATRHNPPLKNFYQNLLHTGKPKMVALIAVARKLLTILNAILRDNRPWQNA

SEQ ID NO: 371345 - protein, 472 aa, unidentified
MKLYPKGTKTTREEEAKKSFRYKGGLDVIHPGAAGLDLHKESIVACVPKREGEKEYPIREFGTYTQDLEELGEWLKERGVTSIAMEATGVFWWPVVDHLRSEGMEVLLVNAREVRSVKGRPKTDKADSRWLRRLHACGLLRGSFIPDAETSALKNLWRHRQSLEEESVRAVQRIQKALQIMNVRLDIAVSNVVGETGMRILEAILRGERDAEELAKLRDPRVKCSEAEMATALRGNYKEEQVFVIGENLNHYRYLQVRIEEAERYLRERMERMEKRVTVGAVAVEEKGNGAQPQNVPSREQLHELLGVDLTQIKGVGVTTIAAFLVTVGRDMSPWPTAKHFVSWLGLAPMVHESAGKKKSAHSAKNSSLLAQAFRMAAMVIGRLDTYLGAYYRRLKGRIGAAKAITATARKLAMLFYHAVRDGGEVVSFTAEWYEELYREKTLHNLQRKAARQGYQLVPIGVTTGGVVGATR

SEQ ID NO: 371346 - protein, 387 aa, unidentified
MSQPNDLSRCLVSLEQDTTLVAVIELSQSSWLIAGTVPGIERQPLKKILPDEVALLRLLHRWRDEAIGKGRIITRIAVAFEAGCDRFWLARWLAKCGIETHVIHSSSVAVSREHKRAKTDRLDTAMLTRVFLGWLRGERGHCSMVAVPTVEQADAKRPSRERESLTGERTRIINRMKSALARVGIRGFKPDLRKAPQLIDALRTPEDVPIPPNTLAELRRELARLAMLREQIKDIEQARLRHLEDVAQSGPNAMVRLLASVIGLGIETAYLLVQEVFSRELRDRRAVARYAGLTGAPDESGLKRREKGLTKAGNARVRRGMIQLAWRFLLFQRDSALAEWFRSRTGGANGARKTKMIVALARKLLIALWRMLTTGAVPHGVVLRPAA

SEQ ID NO: 371347 - protein, 532 aa, unidentified
MGPNDFYIGSEYKRRGSLTKEIGALPIRWEIKEPKGSVQTPRDKDLHHSVFARLLLASLQAGRQGLVAIIPRHLLRKNEDILISTTVERRISMKSVQLQHKRSLINGKIIIGIDPAKTKHQAAVIDTHGVQLGKSFSFDVSLDGYTKILWQKLTQILPTYGPDSTAFAIETSCNLWLTLAFYLHHEGYHVLLVSPLTTYHSRPMASHDFSRTDPKDAFLVASNARQGFFDLYEDFPPLSNAMHRLTITYSKLRKELAQNRARLRASLEQIFPEFLEIVEPDTQTALYLLKRYLFPCDFLDIDLASEANAILAISRKQCGLQTLLQLRKAAHHSIGVLKSQEEAIAERLSVNCWLALIESLSAQMQTVFTALADYAARLPEFTIVRSLKGISDLTAALFLGELRDIHRFSHYKQIEKKAGFNLRLNQSGQYVGARHISHIGSKRLSWLLYTMTEETARWVPEIRAKYLRRQLHRRNHRKSVVASIPQLLKLIMVLVKEQREYELHPDSVIQMQALENQYSQLKVQQNKIQQAA

SEQ ID NO: 371348 - protein, 339 aa, unidentified
MTKYVGLDVSQKTTVLCIVDGEGHRLWRGECSSSPDQIVHTVLQHAGAGASIGVETGPMTPWLVHELRSRGLDVICLDARHARAALRMQLNKTDRNDAEGLAQIMRTGWFRAVHVKSFDAHRARALLGARQQLVGMVTKLSNHIRGVLKTFGMLPGSVRGRSFAERVELLVAERLDVAPIVRPMLTAWSKLREQIAAFDKAIRAEVKQSRECRLLMSVPGIGPVTVLAYVSAIERPDRFRRSRLVGAHLGLTPRQYQSGDVDRSGHISKCGDTLARLCLYEAATVIMTRVKRPLGLKIWAMKIAKRSGTNKARVALARKLAVILHSIWRTGEAFCWGTH

SEQ ID NO: 371349 - protein, 385 aa, unidentified
MKEQNFVPREFEIFGGLDVDKKSIAVTFMSHQGILQSFSMPYRAEHLLSYVGKHFDGKKIAFAYEAGPTGWGLYDKLTSEGYLCVVAAPSMIPKVPGQRVKTNRLDSQKLSEHLRGGQLKSVHVPSESYRQLRQLVQLRDTFVQDIVAMKLRIKALLLFEGLEFPPAPSGSQWSLIVRGKLKRLSCSSAVRFKLDQLMESLESSEKRVLKTIKEIRRFYQQDPELCQAMVNLKSIPGIGEIVASHLLARIGDPQQIGNVRQLAGFIGLAPSEHSTGDRVARGHITRSGDGRLRSKLIQAAWSAIRQDPELREFYRSVYQRHPRDRAARKAIVAVARKLTTRIYVVLKQQRPYVVREIVHSAPLTQEETSPQGTTRRRGEPGETLS

SEQ ID NO: 371350 - protein, 452 aa, unidentified
MPFAAFDIHLKSVEAVVADDAGAILLRRNFPATRKAIEDFARQHLSQAHRIALEATFHTWAIASVLEPFVAEVVVSNPLRTRAIAEAKIKTDRVDAEVLVHLLRLDYLPRVWQPDADTRDLRRATTERANLVADRTRLKNRIHAVLHQRLLAPPKGDLFCPANLRWLEKLELDPPGRESLDRHLRQLAFLEKEIADQKSTLAGQAYADPRVKLLMTLPGVDFTVAQSLLAAWGDVARFPSAEKAAAYLGLVPSTRQSAEHCYHGPITKQGRSHSRWLLVQAAQHVDRHPGPLGVFFRRIARKKNRNVAVVAMAHKLALIAWHMLRHNEPYRYAQPKTVEAKFTRLRVGATGKRKRGGLPKGAPRPAAYGTGVRTRAVPALDEIYAGEGLPPLASPTAGERNMLEQTQTAAWAETVRRRQRTPRQPNSQPAGGAGAPPRDSVPHPAGAPPLRP

SEQ ID NO: 371351 - protein, 335 aa, unidentified
MKNFDYYIGIDVSKLKLDVTILSKIENTPKTAYYQIENTEKSIARFVKKTLCKYDLQQMLFCFEDTGIYSLPLAYYLSDNQISYWQVPAIEIKRSKGITRGKSDKIDSKDIAFYAFTHTHKFRPCAIPEQSIRQLRLLFTEREKLLKAIALFKTTAENKDFMPQEVFNTVAAANKSVICKLKQALKQMEEKMLTIIESDDKLKRQYKVITSIPGIGMQTAIYLIIATKGFDAFENWRQLACYAGVAPFPYQSGTSIKGRTKVHPLADKKLKSLLNMCAMVAIRHDKELKAYYERKVKDGKAKMLVINNVRCKLLSRVFAVVNRNTPFANTFKFAS

SEQ ID NO: 371352 - protein, 399 aa, unidentified
MSGYPPEADIGTAGIYEYSLLGAKRTWAFNDGVDAPPTASMCQSGGVEHHLREASVSEVITIGLDIAKHVFYVYGADERGRAVFSKRISRAKLLDFFAAQPSCTVALEACGGAHHWARQLAQLGHEVRLIPPAYVKPFAKRQKNDAIDAEAICEAAQRPSMRFVAVKSEQQQAAGLLFRTRDLLVRQRTQLINAIRGHLTEYGWIAPKGPSHVAMLADLIDEKELASSLPAAALAMFRLMLDLLAGLNSKIADLDREIARRAREDEVSRRLMTIPGIGPISATAIAALAPPAETFAKGRDFAAWLGLTPLQRSTGGKQKLGATSKMGERTLRRLLIIGSSAVVKQASKRGAPRGSWLEQMLARKPRMLVTVALANKMARIVWALLLKQENYKAPVAAKA

SEQ ID NO: 371353 - protein, 391 aa, unidentified
MILVEIDVAKDKHDCYIMTSEGEVLFKSFTIANNMEGFNQFYEKILSVTDNLDKVKIGLEATGHYSYNILGYLLDKGLTPFVINPLHTNLYRKSLSLRKTKTDKVDSRTIASMLMSDVSLKPYSDTLYHNEELKSLTRYRFDKVQQRARLKTSISRLVTILFPELEKLVPTLHMKSVYSLLYEFPNAKAIAKAHLTKLTNLLYASSKGHYGKEKAVSIREAAINSIGSYMSAKSLELKHTIKLLEELTLEIDEIEKEIKFIMDKINSPILTIPGIGYSMGAQIIAEIGDFKNFDSPDKILAFAGMSPSTYQSGKLYSSNAKMEKRGSKYLRSAFFNAAVCVCRFEPNFALYLAKKKAEGKHQYVAISHVVKKLVRLIFHLEKTGEHYVALT

SEQ ID NO: 371354 - protein, 403 aa, unidentified
MYAVGIDVSKCRSTVAVLEPLGKTVAKPFEVRHTKSGMNDLVNYLNTLGGECRIVLEHTGRYYEPVVRWLSGAGLFVSAVNPKLIKDFDNNSLRRVKTDKADARKIGRFALDKWYMLRQYTAMDNIRTQLKTMNRQMSFYQKQQTAYKNNLIALMDETYPGANKFFTSPKRPDGSEKWVDFIEKFWHVDCVCNLSLKSFTEKYQKWCKKHGYNFQPDKPAEIYNASKELIPILAKDDMTKLFVQQAVTQLNAISKAVEELRQQMDSLASQLPEYPVVMSMFGVGTTLGPQLIAEIGDVHKFTKRSQLTAFAGVDPGVNESGDYAQKSVHTSKHGSPYLRRTLFLIMEVLIKNQPEDDPVYRFMAKKRDEGKPYYVYMTAGANKFLRIYFGKVKEYLNNLPPEE

SEQ ID NO: 371355 - protein, 332 aa, unidentified
MLTESGYRERHPQQASAKTLFDFLKKHFPDGEYHAVYESGFSGFATYYALKEYGIDCVVTHAADVPTTQYEEVMKTDKVDAAKLARSLRAGDIRPIYIRERENIDDRSVIRIRKTIQKQLSGYKSRVKHLLHCNGVEIPDRFASPGTHWSRAFIKWLKEDVVLLSPSRLSLDLLVKQVETIRQTLLDATRAIRRLARTDRYGSNCELLMSIPGIGVSVAMCILTEIYDVKRFRNENQFASYLGLIPTCHNSGGRTSSGEKTFRGNRHLGPMVIEAAWIAVYRDYGLGLAYARYKQSMKPQEAIVKIARKMSNIIFSLLKNGRKYEPYRWDKE

SEQ ID NO: 371356 - protein, 344 aa, unidentified
MEHFAGLDVSVKETSVCIVDEAGRITREVKVASTPEALMQVLRAPAYHLKRVGLEAGPLSQWLFGALAEANVPVICVETRHMRAVLKAQINKTDRNDARGIAQMMRAGLYRPVHVKTLRSQKLRMLLTHRKLLQSKAIAIENDLRATLRNFGLKVGMVGTAKFEARLKELVGDDSDLVLMVEPMLIVRRVLREQLAILHRHLLALARDDGVCRRLMTVPGVGPVVALTFRATVDVPARFQNSRAVGAVFGLTPCKHQSGESDYTGGISKCGDEMMRMMLYEAAQIVLIRATKWSWLKSWAMQIAKRRGVKKAIVALARRLAVIMHRIWIDGTEFCWIRQQAVAA

SEQ ID NO: 371357 - protein, 371 aa, unidentified
MAKRLKYIGLDVHKETIAVAVAEGERGGEVRFHGTIPNEDDAVRGMVKRLAGPGITLDFCYEAGPCGYGLQRLLTRQGQPCIVISPSMMPRRPGDQIKTDRRDAMTLARLLRAGELAPIWVPDEAHEAIRDLIRARRSAQEDTSAAKQSVRSFLLRHDRRFSGKSAWTKTYWRWLSEQRFDFAHQQLAFEEAKRRVLEAQARTARLEAALVEAVDGWRFAPLVRSLQALRGVRLIVAATLVAEVGELTRFQNPKQLMAYLGLVPSEYSSGARVQRGRITRAGNAHARTMLVEAGWTYRLPAREERRYRDRVADLPEDIQAIGWKAQVRLCQRFRRLSATGKPQPKVNTAIARELVGFAWDIARRVQPVVAV

SEQ ID NO: 371358 - protein, 420 aa, unidentified
MAQRVAGIDIHKKVLMVVVAVVSRTVGNGEVEEQIEYESRRFGSGAREREHLVAWMRERGVEEVVMESTAQYWKPLWLDLEPHFGKLYLAQAYSNKAPKGRKHDWGDAKRLTRRLVAGELILSFVPDAEQRAWRTMTRSKQQLVRDRVRLQNQLEALLEEARIKLSSVISDLLGASGRRILEALAGGESDPVKLAELGDDRLKCSREELRDALRGRPEPMHAQILKLDLERLQLLDRQIESLDQMTAQALKKHEKAVIRLAEIPGLGVDSAQQIIAEVGAEAKAFPSAGQFASWVGTIPGSDESAEVNQSSRSPKGNRFLRRVLSQAAQAAIKKKGCHFQNVFRRLMPRLGYKGAIWAIAHRLCRLVWKILHDGVRYIEQGLETTPQAKQRRAQKLAKALRKLGYNVAITPIAPAPAPAG

SEQ ID NO: 371359 - protein, 410 aa, unidentified
MSKTCGIDWSERHHDVAIVDDQARVVGRARVSDDAAGFTRLLELLAEHRDGEDGPIEIAIETDKGLFVAGLFAAGFTVFAINPRAVARYRERYGQAGGKSDPGDAGVLANILRTDRHVHRPLPADSDLVRAVKTCARQHQEAIWARQQAMNRLRSLLRDYYPQALQAFPNLAHRAAASVLRAVPTPQTAQRLTLNRVVALLKKAGRRNDPGLAETIRTTLRAPALRQPAPIEHALGVAAVGLIDVITAMSDAITALEAELATVFDEHGQAAIITSQPGLGPVLGARVLGELGDDPHRFTDTAGLRSFAGTAPITRASGRSRVVTSRRICNRRLGDACHWWAFAAITKSPGARAHYDHRRAAGDTTTPPCATSRTSCSPNSGTACKLAPSTTKRPPGQPLPTHRNRPPLDS

SEQ ID NO: 371360 - protein, 320 aa, unidentified
MSESIERFVGIDVSKGALDIHADPPCAELPRHCGHDDAALKSLCDDLARLSPTLVVVEATGGLEQRIAAELAARGVPLAVVNPRQVRNFARACGELAKTDAIDAQTLCAFARAIRPAARAPKDSDTRELADLLSRRRQLVDMRVQELQRQHTAFSRSMKRSLAEHVAWLDKRIQRLDDDIGQRMRESDVWRVKDELLQTVPGVGPVLSRTMLGMCPELGTLNRRQISKLVGVAPLANDSGKHRGRRRIWGGRADVRRVLYMGTQAAIRHNPDIALFAQRLRLAGKLPKIVIVACMRKRLTVMNIMLKTGQPWHAVHVAKT

SEQ ID NO: 371361 - protein, 330 aa, unidentified
MAVTIVETRAITGGVDTHADMHVAAALDPVGGLLGVEEFQVTPAGYARLLEWLGGFGTVCLVGIEGTGSYGAGLSRHITNAGVRVVEVDRSDRQDRRRAGKSDPLDAVSAARAAQSGRARGAPKGRDGAVEAIGALMVAKRSARSERIQTINQARSLVHTGPDDLRARFTGHTTVALVAGLASLRPRPGSTIGYATRLALRELGRRAEFPGAQMERPGELIVPLVTAHAPRLLALYGVGPDTAALLLIAAGDHPERLRSEATWAHLCAAAPIPASSGKVTRHRLNPGGDRQANHALWRIVVTRMSSHPPTRVYVERRAKKGCRRRKSSAA

SEQ ID NO: 371362 - protein, 343 aa, unidentified
MEHFAGLDVSVKETSVCIVDETGKLVREVKVASEPDALLQVLTNDAYCFKRIGLEAGPLSQWLFSALAEAGLPVICVETRHVRAVLKAQINKTDRNDARGIAQMMRVGLYRPVHVKTLRSQKLRMLLTHRKLLQSKAIAIENDLRATLRNFGLKVGVVGTTKFEARIKELVQNLPDLVVLVEPLLIVRRVLREQIGILHRRLLAIVRADDVCRRLMTVPGVGPVVALTYRATVDVPARFRASKAVGAVFGLTPSKYQSGESDRTGGISRCGDEMMRAMLYEAALTMLVRSTKWSWLKAWATKIARHRGLKKAIVALARRLAVIMHRIWVDGTEFRWTREAAAA

SEQ ID NO: 371363 - protein, 389 aa, unidentified
MKIYVGIDIAKLNHFAAAISSDGEIILEPFKFTNDADGFQLLVSKLESFDKNSIIIGLESTAHYGDNLVRYLVAEFYQVCVLNPIKTCQMRKNNVRKTKTDKVDTFVIAKTLMMQDDLRFITFFDLDMMDLKALGRFRQKTIKQRTRLKIQLTTYVDQVFPEIQYFFKSGLHQHAVYALLKEAPSPKEIASMHMTHLANLLKVNSHGHFTKEQAKELRVLAQKSVGANDSAISIQITQTIQQIELLDSQLEKIEAEMTDIMKFNDSVIMTIPGIGYINGGMILGEIGDIHRFSNPNKLLAFAGLDPSVYQSGNFQAKTTRMSKRGSRVLRYALVNAAWNVVRNNATFKAYYDAKRAEGRSHYNALGHCSGKLVRVIWKMLTDNVEFNLK

SEQ ID NO: 371364 - protein, 328 aa, unidentified
MTMNPAPRVFNHIVAFDVAKESLAIHVLPGDERQAIANKPKAIRKLLIAQIRRNAKLGLGPLLVVCEATGGYERHLLEICAELGIAAHKAHGSRVRNFAKYLGLIAKTDPIDARVLALFGLKTENLRLHAPLTPALTALIDLRARRDQVQAMLLAETGRLEHVRYAGVTRSLKEHIASLRKSLAALEAQIAAHIQASEPLARKAALMRTLKCIGPGAVAALLAYMPELGALSRAQAASLAGVAPFDDRSGKLSLPSHIEAGRAAVRRALYMAALTATRHNRIMKSFAERLRRNGKCAKAVITAVMRKLIVTLNAMLRSEEPWRHAQTA

SEQ ID NO: 371365 - protein, 346 aa, unidentified
MVEISIIGLDVAKQIFQVHGVSADGMVTLKRQLRRSDVLGFFGKLGRCIVGLEACGGSHFWARGIRALGHDVRLIPPAYVKPYVKRGKTDAVDAEAICEAVSRPTMRFVPIKTTECQAALMVLKTRDLLVRQRTQAINAVRGHLAELGIVAAKGLAKVGTLIAIVRDENDQRLPSAARTAFKLLADQIEALTKQVDALGRQIVTEVRQDDTMRRLSTIPGIGPITAATIQALVPDPGAFTSGRHFAAWIGLTPKMHSSGGKEQPGRISKMGNPALRSLLVVGATAVLQHARRGATISPWLTALLARRPAKVAAIALANKMARIVWALLTKGGTFVRKNRVAEHAVA

SEQ ID NO: 371366 - protein, 483 aa, unidentified
MAKRKMSTFERLNSGEMNRRQRRELARKVAADDPELLIVNPNAAGIDVGNESHFVSVAPDRDPHPVREFGCWTAALRQMAEWLKSCGIDTVSMQATGVYWIALYDILEQYGIRVVVSNAQHTKNVPGRKSDVQECQWLRKLHTYGLVRDSFRLPEQMQSVRTIWRVRDRLVKDAGRAIQHMQKALTKMNIQLANVLSDINGVTGQAIIGAILKGERDPYKLADLKNYRAKASREEVARSLEGNWREDVLFELQQAVDSYHFLHQQMQECDRKLEGYMASLPTRTLNAPAQPESAPAGTPPKKKKAKKPRGNEPAWDLSAELARIYGVDLTTIDGINVMTAQTVLSEIGTDMSRFENEHHLASWLGLTPSKDKSGKTVRKGKKKVKNRVAEALRMAATTLLKSDSYLGARYRHLRRQLPTAAAAVKAMAHYLALLVYRMLTRGEAWVDRGRQHFERKRNQRELASLKSKARVHGFQLIPISQAS

SEQ ID NO: 371367 - protein, 428 aa, unidentified
MNEEDRSRLEEFRQFRKEVRGSSEYLLVGIDIAKEKHYAFFGTARGKTLLRRLVFENNIEGFEKLLGQARALKDQNGLRRIVFGMEPTANYHKPLGEHLIRCGHLVVLVSGVAACENRKTLDGRWDTNDTRDAANVADLVSQGKCLFYEFPVGTLQDLRNLLSLKRRFKRVEHGYRVRIRNHLLAKYFPELDRYYEQSESTALAVVRWCLDPSEIVSLEYRQFAEMVSSTRWRSSQEKRLLAIWKLAVDSVGCEAGPVVEFEAKVMVEGLKQIRESLRQIEEKIQELCSPFPEYECLLSIPGFGPDISSKVLGAIGDPFRFQNGRQVLKMAGLDLSAKRSGKTSESVIPVISRKGKADLRFALYQAALIASVQNPDFIGYYTAKLRGREREPGIKIKVRVKLAAKLLLIAWTLMKNKEPFNPDHLVTE

SEQ ID NO: 371368 - protein, 386 aa, unidentified
MYELMKKVSAQMVKLIVQKPFFTIQTETMNKLNQLDFTGTTIYCGVDVHLKNWRIHIRDEEMELRDFSQNPDPVLLSNFLKKQYPGATYKVGYEAGFCGFHIQRRLTSLGIQCVVLNAADIPKSNKDKRQKNDKRDARNISEEIKKKQVGIYIPSVDWQYGRSLVRTREQQIADSTRMKARIWQFLYFHALATPQKQEVGQHWSRRFIEKLQAHDCHNNTQLKAALHIMLTDYLQKRKLLLETIKAIRQLYRQEPYNKYMELILSIPGIGEINAAVIVFELQDIHRFKTFDQLCSYVGFIPDTDDSGETKRVMGITHRFNKRLRKALIESSWVVIRQDPAMLMKYKAYCKRMHKNKAIVRVAKHLLARIRFVLKEQQKYVEGVLAG

SEQ ID NO: 371369 - protein, 413 aa, unidentified
MDLLVERCAGLDVAKREVVACVRTPAPGAGGRRRQEVRTFATFSADLAALADWLEAEGVTQVVMEATGQYWKPVWYVLEERGLALLLVNARHVKILPGRKTDVADAAWLAELLEHGLLRSSFVPPPAIRQLRDLTRYRKKLIQAHTAECQRVQKTLEDAGIKLDSVASDVLGVSGRAMLRALVAGERDPAVLAELARGVLRKKLPQLRQALQGRFSDHHGLLVGLSLAHLEHLEAAVGKLDARVDQVVAPFAEARDHLDTITGVGKRAAECIIAEIGVDMAAFPTAAHLASWAGRCPGNNVTGGKRRSGTPTKGNRWLADVLTECAWAAARSRDTYLAAQFWRLARRIGKKKAAVAVGHSILVVAWHLLEGDCDYHDLGGDWFTRRSDTDRHKAHLVKQLQSLGYSVTLQPAA

SEQ ID NO: 371370 - protein, 428 aa, unidentified
MTQSPNPSTPTVAAFVGIDWADQQHAVCLRPADTLVPEQLTLPHTPEALTEFVATLRTRFGGRPIAIGLEQARGALIYALMSYEFLVLYPINPATAKKYRDAFAPSGAKDDPVDARLLCELLVKHRDQLRPWTPDDATTRHLALLCEHRRDLVGQRTRYVQQLRAALKAYFPQAMDWTGEDLATVMAADFLLKWPTLEALQKAQPPTVRAFYYAHRCRRADLVNQRLAQIKMATPLTRDAAVIAAHALRAQCLARQLRPLLAAIAEYDRQIAVLFATHPDAPIFASFPGSGECLGPRLVAAFGTQRERFPAPEAMQRLSGVAPVTRRSGQSHRVQRRYACAKFLLQTFHEFARCSIKFCEWARLYYEAQRAKGKGHHAAVRALAFKWVRILWRCWRDRIAYDDATYTAALKRSHSPLAKALSSTPVAV

SEQ ID NO: 371371 - protein, 430 aa, unidentified
MEVIYKKACGIDVHKSFIVAVICDSTSIEPKYLRKRFSTFNNSLIEFRNWLIENDCQNVCMESTGKYYVPVYNALEGHISNVVVANPKWVRCIKGEKDDNKDAKWIADLFKLGIVRSSFIPNKDIRILRELTRYLYKLTNMRTSEKNRFTNALTVGNCKLDMVFSDIFGKSSSAIIDIILSQNEFDDKDILKNVDKHCKSSAEDILNSIRGISWEIAQKQRMNVIQNHIDYLDKSIQNVNNIINSIISPYESAINLLCSIPGIKRNSAITIISEIGTDMSQFSSHYRLASWAGLAPGCNESAGKKKSVKISRAGVYLKPALVEVAHCAIKDKNNPYFANKFNIISKRRGKKRAYIAIARKILVAIYHMLSTGELFNPTDSSKVETSDKDKIKFTKNNFMQSTKQLLSLGLTIEDLQALITSKISGSAVAT

SEQ ID NO: 371372 - protein, 401 aa, unidentified
MSKKNTRNALDTSLSYAVIGLDLAKADCAVAAVLCSDDELGLIDRMDYESLFEQAEKLKPTLFAMEPCCGYSQISLRLQNMGHEVKVISGHAVKNWIATHKSNQKTDLNDATALAKLALYDHDLQPIRVKNVEECRIASVQAIRIQLRTQATKSLVCFKSLCQCWGIVIRRGSLNTKKMAEAVAAVEKLLGAEVTSSLMILRDAYKFTMKQINALDKLLDALVEANEQARTMKTVLGIGTQTAARLAVTTGDIKRFPMPRSYVAYFGLAPRNIITGHSGTPSPSKRGALKPVSSRGQGKVSRRGDRVARSFIIQGAATIYMLYCKDMLPECQLRRWLHEQIKRGKPYGKIIVSLAAKLLRIVWALLTYGEKFDSHKAGIPRSVLAAMEKPLKHDAAAESAA

SEQ ID NO: 371373 - protein, 345 aa, unidentified
MTMPLDTIGLDLHKRETQVCILTADGELIERRIATTRARFTEVLGNRPRARILLEASTESEWVARHLESLGHEVIVADPSYAPMYATRSRRVKTDKRDARTLAEACRLGAYRAIHRVSDTQRHVRSELAVRDALVRTRTRYVALIKARVRSEGLRLTQGDPEFTTRKLAALTELPDLTRAELAPLVALLEPINTAIAAADHRIVALVATDPIVMLLTTAPTIGPVTAAAFVATLDVVTRFPSADQVTAYLGLVPSEHSSGERQHRGRITKTGNTRLRWLLVEAGWRILRSTHPDVAGLKAWGEAIAERRGKRVAVVALARKLAGILYAMWRDHAPYRATTHRAAA

SEQ ID NO: 371374 - protein, 391 aa, unidentified
MIYVGIDVAKDKHDCFITNSDGEVLFKSFTIANNREGFETLFQRIQSVSDDLTKVKVGLEATGHYSYNLLGFLLDNGLPTFVINPLHTNLYRKSLSLRKTKTDKVDSHTIASMIMSDVNLKSYSDTSYHNEELKSLTRYRFDKVKERAKLKTSVSRLVCILFPELEKLVPTLHMASVYALLSEFPSAKHVATAHLTRLTNLLSESSKGRYGKDTAITFRDSARASIGSNMPAKSLELKHTIKLIQELDSEIDEIENEIKIIMDEINSPILSIPGINYRMGAMIIAEIGDFNRFDSPDKILAYAGFSPSTYQSGQLDGAYAHMEKRGSRYLRYALYNATKYVCHWDPTFAAYLAKKRAEGKHYNVAISHAVKKLVRVIYHLEKTKQQYIKAA

SEQ ID NO: 371375 - protein, 346 aa, unidentified
MAISIVGVDLSKSVFQLSLADAKHHVVDRKRLSRAQFHRFLAQTQPVRLVMEACGTSNYWGRTAQSLGHEVKLLHAKYVKAYVRRTKTDAADADALILADNDKSLHPIPVKPEELQALQGLHNIREQWKRARVARICEARALLAEFGISTPAGVRGIGRKLTLVTEQAPMLIQPTLQDLIQEIGELEHRLKRVDQALAAYANSNPDVQALLGIQGIGVTIATAFVARVSSIHMFKRGRSFSSWLGLTCREYSSGQTRRLGRITKQGDCYLRTMLIHGARAALMAARRKAANGKELTRLETWAVNTQDRVGHNKATVALANKMARIIWAVWTRQDTFNGNDALRFAA

SEQ ID NO: 371376 - protein, 343 aa, unidentified
MIIKHVSGIDVSKDTLEVGFGTLLDNQEQNITNPITVSNNLKGFRELLSFVRKNKGKSKAPLYFVMEATGVYYENLAYFLSDHKQHLTVILPNKSKSFANTLSIKSKTDKLDARKLTQYGLEKQLKPWELPSPMMKALKALTREHYSIKQMIVQIKNQIHAKNYSHKPLKETLNRSKESLRVFEKQILAIEKQIKELIHNDEDLNNRIQKIEKIKGIGFMSIASIIAETDGFVLINNGKQLTSYAGLDVLINESGLKKHKTSISKKGNKHLRSALYMPALSASRFEPKLKQLYIRLIIKKQIKKVALIAVARKLLLLVYTIYKTNVDYIPDYHPGLRPQHTMS

SEQ ID NO: 371377 - protein, 320 aa, unidentified
MSQNTIAIMTPNITPLYVGLDIAKATLQLHLQGRQYDLKNTTAGHTRLIKHLNVIPEAQVVCEATGGYERAVVGALHAAGITVSVINPARVRQFARASGTLAKTDPIDAAVLSAFGQAFSPTPTALRTPTEIKIAALVTRRIQLIELRVAEAQRAETCADSDLKKLFKSWILQMRRQIVKVEELIEKLLKQQTPLAVQVERLEEIVGVGRLTAVMALATMPELGRLTRRQAAALAGLCPYNRDSGQWAGKRCISGGRAQIRRALYMAALSASRSNHLLKPFYDRLIAAGKPGKVALTAVMRKLIVLMNQLLKNPEFSLAH

SEQ ID NO: 371378 - protein, 343 aa, unidentified
MSIVILGVDLGKNACSVVGVDAAGAVVVRRSMRRQTLVDYVAKLPVCVVAMEACCGAHYLGRLFAAHGHEIRLMSPEYVRPYVKAQKNDDRDAEGIAEAASRPTMRFVELKTQEQLDIQTLHRVRSRLVAERRSLTNQLRAILLERGTIFPVGRRKLELGIDALLADEDTTLSPRLRQLVAELRAEWRELDTRVEALNGEFVELARNDAAARRLTSIPGVGVLNATALIAAVGDASSFAKARDLGAWLGLVPGQLSTGGSQRRLGIPKGGKTNLRTLLIHGARAALPSLARSETPLGRWLTGMIERGVHRNAIVVALANKLARIAWAALRKDATFERGYQVAA

SEQ ID NO: 371379 - protein, 317 aa, unidentified
MERILGVDVSKDYLDTDTLPPTQQRRFTNDPAGTAELVEWARGFRPDRIVFESTGPYQKAAVGALLAAALPAVVVNARQVRDFAKALGILAKTDTIDAAVLARFGQVVPTIVRPLPTPEIQAFQELYDRRGQLVRMLAAEKNHRYAATSAKVIKNIDAHIRYLENQIETLEDRMDQFVQNSEAFKARDEILQSIPGVGPQVSRTLLAYLPELGQGTRQQLSALVGLAPFNDDSGTQSHTRHIRGGRAKVRLGLYQAAVVAIRHCPPMKDFYIRLKARGKASKVALIAVARKLLVLANALVRSMKPYDPANSVCLPSP

SEQ ID NO: 371380 - protein, 356 aa, unidentified
MNKISKLDFEGQQIYVGMDVHKKSWSISVLTDEFEHKTFTQPPEVSTLVDYLKRNFPGASYKSVYEAGYCGFWIHDCLQERGVQCLVVNPADVPTKDKERRKKTDRVDCRKLAKSLRSGEIEGIYVPCRPKVEDRTLIRTRHSMVKKQTRCKNQIKSILQFYGIQIPEELVDSHWSKRFITWIEAIRMERASGNFALKAYLEELNNMRKIIAELTRGIRSLANAEEYRQNVCLLKSVPGISILTAMTILTELYEISRFRNLDKLCSYVGLIPDTNSSGETDRDMGITKRRNAQLRGILIESAWVAVRKDPALLMTFNTLCKKMPKNNAIVRIARKLLSRIRYVLKNQQKYASAIVQ

SEQ ID NO: 371381 - protein, 352 aa, unidentified
MKINRVGVDLAKQVFQVHGVDSRGKVVWKRQLKRSQWLRALVEQIDTDCEIGMEACGGAHHWARGLQSRGYEVKLIPPQFVKPYVKGNKNDASDAAAICEAMGREDMTYVAVKSVEQQDIQAVHRVRASVMGRRTASSNQIRGLVAEYGLVAPKDLGPLRRAIPDWLEDAENGLTDRFRRLLHELWEELLRLDERLAALDREIEVIAETHADAKRLLKLRGVGPLVATALVARFGDGSHFKRGRQAAASVGLTPRHHGTGGKNRIYGLSKQGDRYLRSILIHGARAVVSQAKRRDDRLSLWITDLKERSHTNVAAVALANKTVRMAWSMLRSGTDYEPELAAGERYRGWVMA

SEQ ID NO: 371382 - protein, 285 aa, unidentified
MKKLEPDAAAVLGLIEHWRGEAIKAGQTIRRVVLAYEAGRDGFWLARWLIARGIEVHVIHSASVAVSREHKRAKTDRLDAAMLMRVLLGWLRGERGHCGMVAVPTLEEEDARRPSRERESLVNEKTRITNRMKSALARLGIRGFKAHLRKAAQRLEGLRTPEGTGLPANITEEFRRDMARLALVREQIAAIEKARIERLHRAPNTGPNLMVRLLARVIGIAIETADMLVREILSRNWRDRRAVARYAGLTGSPDESGTKRREKGLAKAGNARVRRGLIQLAWRFL

SEQ ID NO: 371383 - protein, 401 aa, unidentified
MVSDFRKGRYNLMKIYVGIDIAKLNHFAAAISSDGEIIIEPFKFTNDADGFQLLVSKLESFDKNSLIIGLESTAHYGDNLVRYLVTELYQVCVLNPIKTCQMRKNNVRKTKTDKVDTYVIAKTLMMQDNLRFVSFFDLDMMDLKALGRFRQKTIKQRTRLKIQLTTYVDQVFPEIQYFFKSGLHQHAVYALLKEAPSPKEIASMHMTHLANLLKVNSHGHFTKEQAKELRVLAQKSVGANDSAISIQITQTIQQIELLDSQLEKIEAEMTDIMKFNDSVIMTIPGIGYINGGMILGEIGDIHRFSNPNKLLAFAGLDPSVYQSGNFQAKTTRMSKRGSRVLRYALVNAAWNVVRNNATFKAYYDAKRAEGRSHYNALGHCSGKLVRVIWKMLTGEVEFNLK

SEQ ID NO: 371384 - protein, 355 aa, unidentified
MNEITRVGVDLAKRVIQVCAVNSAGVRVTSRALARDKFLPWCAQLPAGCLVAMEASSSAHHWARKLLALGLQARIIPAHLVVPYRLQGRGGKNDANDAAAICEAASRPQMHFVAIKSVEQQSMLCIHRLREGFKEERVACINRIRGLLAEFGLVFPQKPEVLRQALPDAMEDASNELGSLARLALQRAYAQWQELDEHMRWCDQRIAAHGKASEQVRQAEQLMGVGPVTASAVVATVGDFKQFKNGAQFGAWLGLTPRQNSSGGKNNLGHITKRGDMYVRMLLIQGAKSIVLTAHKRDDPISRWAHALREKSGWQKAVVALANKNARILWAVFVRGRPFDARHVSTKPAGCVVAA

SEQ ID NO: 371385 - protein, 341 aa, unidentified
MQITTIGLDIAKNVFQVHGIDATEKVVVRRRLRRSQMLEFFKALPPCLVGMEACATAHYWARELTKLGHRVRLMPAKDVKAYVKRNKNDAADAGATCEAVRRPTMRFVPVKSAEQQAQLMQHRARDLLMRQRTQVINALRAHLAELGITAAQGREGIRDLLAIIADEADARLPIDARASVMVLAAQLQALQTLIGSIEKRIVARHRSSEASKRLQTIPGIGILGASAITTIVTEPKAFRSGRDFAAWVGLVPRQDSTGGKRKLGPISKQGDRYLRRILVVGAHAVLKRARLHPQKYPWLTQLLVRRPFKVVAIALANKMARVAWALLAKGETYRMPRLAAA

SEQ ID NO: 371386 - protein, 346 aa, unidentified
MEIIRVGVDLAKNVFQLHGVDRHEKAVWKRSLRRGQWLQELQRRVAPGAEIGMEACAGAQHWGRRLEALGYRVKLIAPQFVKPYVKSNKSDRNDAEAICEAMSRPSMRFVELKSIEQQDIQAVHRVRAELVKQRTAKVNQIRGLVGEYGLVAPQQVSYVRKALPQWLEDASNGLSDRFRRLLAGLAEDLRGLDQRIEELDEHIGAIASESPVAQRLLTLRGVGPMIATALIAALGTGKGFTRGREFAVAVGLTPKHHGTGGKERILGISKRGDAYLRQLLVHGARAAVRAARSKDDSLSRWIQGLLAHKHSNVVTVALANKTARMAWALVRHDVDYDPTLAAKTNC

SEQ ID NO: 371387 - protein, 338 aa, unidentified
MNIVFLGIDLAKNVFQLCGLNQAGKPVYTKRTGRKELLQTLANIPACLIGIEASTGAFYWQREFEKLGHKVKVISPQYVKPFVRGQKNDGNDAQAIAVALMQPTMQFVPPKNPEQQDIQALHRARQRIVNHRTATVCQIRGLLLDRGIPIGSAVSRARRAIPLILEDAKNGLSSRMRRTIAELYDLFNDLERRIHFFDKEIETVFRQSEACQRIAKVKGIGPKTATAVVAAIGKGTEFKNGRHFAAWLGLVPRQHSSGDRQVLMNMTKKGDKHLRTLFIHGARAVVRVATNNNDGYMNQWVNQLKERRGFNKTTVAVANKNARIIWSMLRNETEYQVV

SEQ ID NO: 371388 - protein, 415 aa, unidentified
MEIVYECVAAIDVGKKEVTVTVRMPGQTRGVRTQQTRKFRTFYQVLRQMVGWLVDQGVTHVAMEATGVYWKPVFHALCEPDTLEVVLVNARHVKNVPGRKTDVKDSEWLAQLLECGLLRGSFIPPKEIAAIRELTRYRKKTIQTRTRELQRLSKVLEDAGIKIDSVASSITTLSARDMIEALIAGQRDPRVLANLARGTMRTKIPDLTMACAGRFADHHALLARMHLDHIDHLTRMIDGLDERIEQVLAPFASQLRLLRTIPGIGQRAAQVLISELGVDMSRFPTAAHLASWAGLCPGNNESAGRHLSGRTRKGNAEVRDILTECAWSAGKTGSYIGAQFHRLHRRFGKKGGGKAAVAVAHTLIVIVWHVLHDQSEYRELGHDYFTRRDDPEAAKRRLIHNLEALGYHVELTAPA

SEQ ID NO: 371389 - protein, 367 aa, unidentified
MKKISTVGAKQSQNFSDQKLTIGLDLGDRSSWYCVLDEVGEVVLEQKLGTTPKAMREVFGGMPRSRMALETGMHSPWVSRVLSELGHEVIVAHARKVRLIGESRRKDDRFDARTLARLARIDPRLLAPVQHRSAQAQAHLMVIRARAGLVRARTSLINPARGLTKSYGERLRGCSPRNMNAEKARQLSPELQAALEPLLGAIESLSERIYEYNQQIEKIARESYPQVARLTQVKGVGTLIALTYRLTLEDAQRFRKSRDVGCYVGLQPGRRNSGQSEPQLHISKEGDPYLRTLLVQGAHHILGPFGADSDLRRWGLKLAERGGKNGKKRAVIATARKLAVLLHRLWVSGEAYEPLRNSRPVRLLAAA

SEQ ID NO: 371390 - protein, 357 aa, unidentified
MKYIGCDFHPSFQQIALLDMETGELVERRLLHTEEARAFYEGLQERVLVGIEASGNTHWFESLLARCGHPLWIGDAAAMARQNGRKQKHDRRAAELILKLMVENRFPQIWVPTVAERDLRQLLIHRQHLVRMRTRVKNQLQHIALNQGWQKKRKLWSEAGLGLLRSLKLEPWTQQRRDTLLEMLEKLEEKIQPLDLAVGKEAEACEAARRLATHPGVGPVISLATVLTMGDVQRFADSRSWVSYLGLNPSEESSGQHRRLGAISKQGNPFLRYLLVEGAVSAARGDKSLARMYARLKAKKHHGVAKVAVARKLAVRLYWMARTQKSYPEVVRTQGSQSHSVAEVMAETLNRPPASHQ

SEQ ID NO: 371391 - protein, 413 aa, unidentified
MKDRTITAVGIDVSKGKSTIAVRRPGGEVVLTPFQVEHDAAGLSALVKTLRSIGGDIRVVMEHTGMYWRPIALALKEAGFFVSVVNAMLIHDFSDNSLRKIKTDKADSMKIANYALSFWAELRDYSPEDETRQMLKMQNRLYLRTKKSSVILRNGLISLLDQTFPGVNMLFDSQPKRSNGHFKWVDFVKRFWHKDCVAGISLAAFSDAYRKWCARSGYRFSQSDAEKFHTAARNAVATFPKNDSTKLLIAQAVDSLNAVYDALYILRGEMLRLASILPEFDVVMAMQGAGEVTGPQLIAEIGDVRRFTHKGALVAFAGMDAPPFQSGTFDSKSRRISKRGSPHLRKTLFMVASTILQHSDPDNPIFQFMDKKRAEGKHFYVYMVAGAAKFLRVYYARVKAHLTALDSGANTAA

SEQ ID NO: 371392 - protein, 360 aa, unidentified
MRHLSAKLLLFRISSNREPSMGEVTTIGLDLAKHVFQVHGVDAEGAVVVRKQLRRNQVVAFFSRLPRCVVGMEACATAHHWARELGALGHEVRLMPALYVRAYVKRNKNDAADAAAICEAVMRPTMRFVPVKTAEQQGALLLHRGRERLVRQRTGLANALRAHLAEFGVIAPQGLRNVGKLIAIVRDASDARLPAVARSVLQVLATQIEQLEVALAALEKQLMAFHKNNAVSQRLATIPGIGPIIATAIATTVTAPGQFRNGREFAAWLGLVPRQNSTGGKVRLGGISKRGNQYLRRLLINGASANLLRSKATNANPWVIGLRRRRPSMVVAVALANKTARIAWAVMNRNENYQRLAAAV

SEQ ID NO: 371393 - protein, 476 aa, unidentified
MVATGLHGLNRKQRKELARRMRAQDPGLDIVHPHAAGIDIGNSSHYVAVRPDQDPDSVRRFECFTGDLHRLADWLQQCGVTTVAMQSTGVYWIPLYEIHDARGLEIYLVNARHTKNPGRKTDVQESQWLLKLHTYGLLRNSFHPSADIRIVRTYWRQRGGHVQAVSTCIQRMQKVLTQMNVQLANVISDLSGWTGQRIVRAILAGQRDPQTLAALSHPGIHATRDQIARSLEGTWQSDLLFVLQQEVTMYDAYLQRIAECDQALEHHLKTFADKAIPDAPSDAEPSSPVAPRQTRVKHRRKAGSHTPQFNLGHELHRISGVDLTRIDGIDVGVAQTVISEVGVDMTRWKTEAHFASWLGLCPDNRITGGKVIRKGTRHVVNRAATALRLAATTLLRSQSYLGAQYRRLRARLGAPKAITAMAHKLARLVYRMLKWGHEYVDKGLQYYEERHRDQQVQLLKKRAAKLGLQIVEHDAA

SEQ ID NO: 371394 - protein, 364 aa, unidentified
MEEPTHIGLDVHKETIAVAVLRPGTVECDERVIPNTPEALRRLLSRYPDGAALRTCYEAGPTGYDTQRLITSLGISCDVIAPSLIPRRSGVRVKTDRADARNLARLHRAGELVAVRVPTPAEEALRDLVRAREDLKNDRRIARQRIRSFLLRYGKRYPAPGSRWSFRFEVWLRPLRFSEPAPQAAFEHLLGAYFMRDSQLGAVDKQIAELALAEPLAGAVARLRAFRGIDTLTAVTLLTETCDFRRFGSAGSFMAFTGLVPSEHSSGQSRHQGSITKTGNAHLRRVLVEAAWAYRYAPAVRGKLRGRQIGQPPEVVAYSWAAQCRLHGTYRRLAAKKGPNKAVVAVARELSGFVWGAMSDRMAV

SEQ ID NO: 371395 - protein, 471 aa, unidentified
MSTTPTRAKRRRQVRIASKPKVPLPPQLQRVNLNAAGIDIGSEEHWVAVPPGRDREGQDVRRFGAFSGDLCALADWLQRYEIETVAMESTGVYWIALYELLVERGFEVLLVDARRVRNVPGRKTDVLDCQWLQELHTYGLLRGAFRPADQVCVLRSYLRQRSMLVAYASHHIQHMQKALEQMNLKLAHVVSDITGVTGMGIIKAILGGERDPVKLAKLRDPRCNSSEATIARALEGHYREEHLFALQQALELVEFYQRQITACDRQIEACLQQFEDRSPKTPLTDRPRRRRRSGVAFDARSYLYRITGVDLTQIDSIEANTALTVIGEIGLDMSRWPTEKHFGSWLGLAPGSKVSGGKRLSGRTKPSANRAAAALRLAAQSLNQSQSALGAYFRRLKARLGAPKALTAAAYKLARILYRMLKYGAGYVDQGETVYEERYRDRLLRNLKRRAAELGFQLTEINSSTGQPALT

SEQ ID NO: 371396 - protein, 347 aa, unidentified
MDHVGLDLGKRESQIAILAEDGELINMRIRTERRRLVEMFGRRPKARILMEASTESEWVARCLEDLGHEVIVADPNYAPMYAQRTRRVKTDRRDAHALAHACRAGTYRPAHRTSTERRELRARLAVREAVVRTRAAWITRIQSLVRREGCRFRTGAPETFLTRVEELALPPALMTVIAPLVELLGPINKQIAVLDEELERIVAADEVARHLTTVPGVGPVTATAYVATVDDVTRFRGAHQVEAYLGLVPSEWSSSEVQRRGHITKAGNRRMRWLLVQAAWCILRRRKRPQTAALRDWAERIAGRRGRSIAVVALARRLAGILFAIWRDGTVYDATKVRGPLPARRAA

SEQ ID NO: 371397 - protein, 412 aa, unidentified
MQVVHARCCGLDVPKKSVVACVLLTREDGTVQRQVRSFGTMTVDLLALADWLTAAGVTHVALESTGVYWRPVFNLLEDEARTIVLVNAQHMAAVPGRKTDVRDSEWLADLLRHGLVRASFIPPAPIRELRELTRYRKTLVQERAQEVNRLQKLLEGANIKLAAVATDVLGLSGRDMLRALIGGEQDPEALAELARGKLRAKLPALRQALQGRVQPYHLILLTRILAHIDFLEGSLAQLQAEIDARLTSCAEAVTLLQTIPGVGPIAAATIVAEIGTDMSRFPSAKHLASWAGVCPGNKQSGGKRLSGKPTNGDPWLRGVLGEVAQAVTRTRNNYLNAQYHRLARRRGKYKAILAVAHSILVIAYHVLRDKQPYSDLGADYFDKLDAARIERHHVRRLEQLGFTVTLAPNHAA

SEQ ID NO: 371398 - protein, 343 aa, unidentified
MTKDTMIGVDLAKNVFQLHAASMTGQPQFCKKLSRQSFTRFMAEQPPAVVVMEACGSAHYWAREMIRLGHEVKLIAAQYVKPFVKRQKNDAADAEAIVIAAQRPEMRFVEPKSAEQQSRAILFRARERLVHQRTELVNALRASLYEYGHVVPQGIRQINRIAEILDAPGSDLPDLMREECQDLLEQIAEQTERINARTAKIKALAGETATARRLQTIPGVGPLTALAVEAFAPPMENFRCGRDFAAWLGLVPRQFSSGGKERLGRISKAGQSDIRRLLIIGAMSRLNWMGRKSIPESSWLAGMLARKPRMLVAIALANKMARTIWALMTKEEDYRVPAKVAAA

SEQ ID NO: 371399 - protein, 359 aa, unidentified
MKKISTVATKQNRNFSEQKLTIGFDLGDRSSWYCVWDEAGSVLLEQRVGTTPKAMKEVFGGMPRSRIALETGMHSPWVSRLLSELGHEVIVAHARNVRLIGESRKKDDRLDARTLARLARIDPQLLCPVKHRSAKAQADLTVIRARAGLVRARTALVNTARGLAKSYGERLRGCNVRNMNPEKAEGLSPELQRALEPLLAAIESLSDRIGECNEGIETLARESYPQVARLKQVKGVGTLIALTFLLTLEDPHRFRKSRDVGCYLGLQPGRRNSGQSEPQLHISKEGDPYLRTLLVQGAHHILGPFGADSDLRRWGLKLAERGGKNGKKRAVIATARKLAVLLHRLWVSGEAYEPLRNSN

SEQ ID NO: 371400 - protein, 401 aa, unidentified
MKYVCGIDIGSQSCAGCVTRPDKRVMVKPITFANTKEGWKVMEEKLAQLDAAPNQIVIGMEATSRYHENFYHELEQRGYQMRLLHPGQTHHYHQQQGLRAKTDRLDAMTIARVILGGEARVGYIPGEQVAIYRELVRLHTQLSEEAARYQNQIQILVVVLFPEFSQIFADPCGQGALAVLKAYPDARAVAQAGVEAVYQVLRAVPAAHFGRPTAKKLVAAAQVSSSSGRAVSGRASSLRILCDQLEHTQANLKRLEEELEQLITMDPSTKGLQQMPELGPKTVAVLRAELGEADRFACTDQAVAYAGMDIEIKESGKFKGKAKLSKRGSGLLRQILYLAALRSIHLEGSAFGAYYHHLVERGLKKMSAMMAVMRKMVAVATHLMKTGEDYDPSKVWVGTTS

SEQ ID NO: 371401 - protein, 350 aa, unidentified
MIIIGVDFHPEFQEIASVDTDTGEYQEKRLTHSEEAEQFYRSLASVGQTVRVGMEASGHGRWFERLLEGLGLELWRGDATVIRAKRGRKQKTDREDARHILKLLLKDDFPRIWVPSWENRDLRQLLWHRHRMVQARTRVMNQLQAVALNEGLRCKKRLWREGGRQKLEAFELAPWASRRRRELLELLDRLNPTIAELSQAVEQEAEKCPEAKRLMTHPGVGAITALAFALIIGNAQRFRCGKQVASYLGLVPLEESSGNRRRLGHITKQGSSIVRFLLVEAAQVTVRSLPDWRSKYVHLMMRRGRKTAKVAMARKLAVRLYWMWRKGWDYEQWKKFGSHVGQPGNRDGVC

SEQ ID NO: 371402 - protein, 467 aa, unidentified
MLNKFKSKKISSKNKKLLQKKVTLPLHLQHINRMASGIDVGSTAHFVAVPEGCDEINVREFSSFTSDLYALADWLKQCKIETIAMESTGVFWIPLFELLESKGFDVKLVDARNVKNVSGRKTDVLDCQWLQQLHTYGLLNGAFRPEELVCSLRVYIRQKSMLTKKAASHIQHMQKALSQMNLQLHNVIRDITGDTGMSIIREILAGQRDPKILAQHRDPRCKNPIEIIEKSLCGNYKEEHIFSLKQAVELYDFYCNKMSACDVEIEKILFKFEPKKEISEDHLKNHDLQKQSNSKNAPLFNVQAHLERITGIDLTEIPGINTITALIIISEIGIDMGRWKDSKHFASWLGLCPGNKVSGGKRLGGAPSKKTSNRAAAALRTAANSLYRSTSSLGAFLRRLKSRLGPMKAITATAHKIAVIIYNMLKNGVGYIETGADYYEQQYKDRTIKNLKKRAKSLGFELIAVAT

SEQ ID NO: 371403 - protein, 347 aa, unidentified
MRFYNRQHRHYCGIDLHVRTMYICILDAAGQVLVHRNLKSTPEAFLEIVAPYRDDLVVAAECMFTWYWLADVCAAEGIAFVLGHALAMKAIHGGKSKNDKIDSHKIASLLRGGLLPQSYVYPATMRSTRDLLRRRLHLVRKRGQLLAHIQNTRAQYNLPDFERRLAYPANRDGVSDHFPDASVRKSIEVDLALLDSYDGLITDLELTLVRTAKQHDADAFHRLRSVPGIGKVLALTILYEIHDVSRFDRVQEFASYARLVKGRKQSGGKMLGTSGAKMGNVHLKWAFSEAAVLFLRHATGGKKFLATIEKKHGKGKALSILAHKIGRAVFYMLSRETVFSMEKFMAA

SEQ ID NO: 371404 - protein, 340 aa, unidentified
MTVQSKQKIVDKPLSLFAGIDVGSSELVLLIRKSGTSYKSQKFANTAADRARLVHKLVKMPGIIVCLEATGIYHFDLSVSLHDAGVALMVVNPKASHNFAKVLMKNSKTDDIDADTLAQYAERMDFVPWVRPSDEKIAIRGFSRRINALTRQKAAAKNQLHALIASKETPKEVLHDVKLGISQMEKRIEKLSQGALILVEKHPELKRVLNLLLGIKGIAETSAIALMGELLLLPSGLSQKQWVKFAGLDPRAFDSGKSVHKQARLSKGGNSHIRSALYMPALSAKTHDPHVKAYFQHLVDNNKKPLQALCAVMRKLLHAIHGMLKHDKPFDNSRFYALPA

SEQ ID NO: 371405 - protein, 414 aa, unidentified
MDAFQWFVGIDWGSREHRFSVLDHTGRVQGRRTVEHTLSDLTAAFQWVCAQSGIPPAEIAVGLEVPRGVLVDAALEYGFAVFALNPKQTDRFRDRFTLAGAKDDSRDADTIGDALRTDRRAYRRIHPDDPAVVTLRELARLADDLTTDVLRLTNRLREQLSRVDAPWLRVCPAADEPWLWTLLSKRPDPTQWPTLSRRELANILRRHRIRRLTAADLFALVQQPRLPAAPGVATAVQTRLASLVPQLTLLQEQRRRTQRQIDQALQQLAEESDSEPTEHRDVVILQSLPGVGRMVTATMLTETSGALPARDYDTLAALTGAAPVTRQSGKCRHVHMRRACNPRLRQALYHWARASLQRDDAARAFYDRHRQAGASHATALRCLGARWLRILVAMLKSRSLYDPSRCSIAAVPAA

SEQ ID NO: 371406 - protein, 343 aa, unidentified
MEPMYYIGLDVHKRTISYCVKDGSGTIHGEGSVPATRFDLDRWMKTLPQPWTAAMEATVFSGWIYDHLQPHAAALKVAHPLMLRAAAKKKNDRIDAKKICDCLRCDFLPECYMASMAIRERRRTLRYRTLLVRQMVQMTNKISGVLMEAGVSYNKQRLHKAGYFRELLATNPDINEELCSLLRLCRETVVGLQKTERALVRSLERDSLLMDRVERLMTIPAVGPITALTWALEAGDAKRFSSIKKAISYCGLCGTEKSSGTTVQRTPLSKQRNKHLQTALIEAAKMAPRNSPELAMLYDREKQKGNANRATLAVARKLVAYLMAVDRAQRKFQVAETSNCIAA

SEQ ID NO: 371407 - protein, 340 aa, unidentified
MQVTTIGLDLAKNIFHAHGVTANGKVVFNRALRRGQVLAFFEKLEPCLVGMEACSTSHYWGRELTRLGHEVKLMPPAYVKPYVKRGKTDAADAEAICEAVTRPTMRFVPIKSPDQQAVLSLHRARQLMIGQRTQLSNIVRGLIGEFGHIVRKGPNHIRDFAERLKRGDGPDLPDIAHDVIASLCDQLLTLHRRIGLLEKRIFAASRKDERVKLLLTIPGIGPVTASAIIATVGTPDQFRTGREFAAWVGLTPLNRSSGGKERLGKISKMGDQYLRRLLVVGMTSRVRVARTRPDRVEPWLVSLLERKPVRLATIAMANKTARIVWAVLTRNEPYKSPVAA

SEQ ID NO: 371408 - protein, 378 aa, unidentified
MARPSSSPLRRNALKTGNCLWAPVTTGFQLGQATIAIDIAKRVFQVHKVDPDTGEVTRKKLGRQEVTEYFAQLKPCVIAMEACGTAQHWARVFRSHGHEVMLISPQFVRAFVKTNKNDAADAQAIWTASQQPEMRTVAIKSAEQQSILALHTVRERFKKARTAAVNQLHGLMGEYGVDLPKGWRTMLPKAAEALDDATSAVPAILRPQLRAQLDEIRALTVKIDEVEAQLSGWQRKEEDCQRIAAIPGVGLLTATAIVATVGDDAKVFRSGREFAAFLGLVPRQTGTGGKTKLLGISKRGDVYIRTLLIHGARSVMNWNESKQDPESWLSRMIERRPHNVVATALANKMARQIWALLAHKRTYEANRSIGHGDVVEAE

SEQ ID NO: 371409 - protein, 338 aa, unidentified
MTFYCGIDLHSSNSVVVIIDEADKIVFKQRLRNELRLIVDALTPYREALSGVVVESTYNWYWLVDGLMDAGFTVHLANPAAIHQYSGLKHTDDEDDAAWLAHLLRLGILAEGYIYPREQRGTRDLLRRRGQLMGQRTANLLAIQTQVARATGSLISGNLVKQLKACEIGGFVADRDATLGISANLAVMASLSTEIKKLEREARKRLVPDAAFQALLTVNGIGDILGMTIRLETGDLRRFAAAGNYASYCRCVEAKRMTNGRKKGEGNRKCGNKHLAWAFVEAAHMAIRYDDRARAFYQRKKAKTKTVVATKAVAHKLARACFYVMRDQVPFEPKRCFG

SEQ ID NO: 371410 - protein, 334 aa, unidentified
MDLCERIRTRVAKETKKRVEMVSCYEAGYDGFWHHRLLQAHDIRNHVIDPASLQVDRRARRAKTDRVDAERLLRSLMAYLRGEPKVWSVVRVPSVAEEDDRRLHRERGRLINERIQHVNRIKGLLAIHGIYDYQPLRRDRIQRLEQLHTADGRTLPPRLEAEILRELQRLEIVIGMIKTIEAERDAIASANTETERGSVKKIQHLAKIKSIGPEFATTLVGEVFYRSFDNRKQLASYVGLTPVHFQSGAMSRDQGISKAGNAKARTVMIELAWLWLRHQPDSDLSVWFRDRVGKLKGRIRRITIVAVARKLLIALWRYLETGLVPKGAALKVCD

SEQ ID NO: 371411 - protein, 368 aa, unidentified
MQDSMFIGLDVHKATISVAIARGKRGGEVRHWGTIPHRPDHVRKLVERLGADGFRLHFCYEAGPCGYGLHRQLVEMGHECIVVAPSLIPMKAGDRVKTDRRDAVMLAKLHRAGELTSVWVPDAAHEAMRDLIRARATAVRVLGKARQHLQGFLLRHGRIYPGKKGWTVAYRRWLTTVRFQHPAQQIVFQDYVDAVADAEARVERLTGQIADLLPSWNLAPVVEAVQAMRGVAFIVAATVVAEVGDFHRFDNPRQLMAYLGLTPSEHSSGTSVRRGGITKAGSGLARRALIEGAWSYRMQARVSRKLHDRIEALPKAVRDIAWKGQLRMCQRYRHLVAAGKAKVVVTTAIAREMVGFIWAIARVVTSPA

SEQ ID NO: 371412 - protein, 369 aa, unidentified
MEEASTFVGLDVHKESIDVTIAEAGAAGEVRHFGTIGGDLEAVARLLRKLRRKRHELKFVYEAGPCGFEIFRFLREQEIACAVVSPSQIPRRSGDRIKTDRRDSETLARLHRAGELAALYVPEPEDESIRDLARTREDIRRARHKARQQVQALLLRHGRRYTGKCAWTLAHRRWLSDLKMDHPAQRFALEEYLAVVDEATARLERIEEALIEQVASWRFASVVDALQAMRGIDTIAAITLVTELGDLTRFESPRELMAFLGLVPSEHSSGGRRRLGSITKCGNSHARRTLVEAAWAYRHPARIGRRLLLRSEKLPATIRAIAWKAQVRLAARYRRLAARGKPHQVVVTAIARELTGFLWAIARAHAANR

SEQ ID NO: 371413 - protein, 343 aa, unidentified
MQTIATIGLDIAKSVFQVHGVDAAGQVVVRRQLKRRHVLAFFAKLPPSLIGIEACASSHYWARELQAVGHTVRLIPPAYVKPYVKRQKNDAADAEAICEAVTRPNMRFVPIKTVEQQGCLVLHRTRHLLIRQQTATINSIRAHLAEFGIVAPVGRRGVEHLLEVIADANDTRVPEIARACVATLGVQLQQLKTQILELDRRILAWHRSSEASRRLNHIPGVGPLLATALVASIADPKAFRSGRDFSAWIGLVPKQNSSGGKDKLGNISKRGDRYLRSLFTAGALAVIRYAKIHRTQHRPWLVALLARRPTKVAAIALANKLARIAWALMTKGSRYRQPAELMV

SEQ ID NO: 371414 - protein, 346 aa, unidentified
MKQISRIGMDTSKYIFVLHGVDAAEQVVLRKKLSRKQVLEFFAKLPPTVIGMEACGASQYWARELRKLGHEVKLMAPQLVKPYVTRNKNDWRDAEGLCEAMSRPSMRFVPVKSAEQQAALMLTGIRDGLIARRTQLTNTIRGHAAEYGLIAPKGLDKIEPLLAQIAQDETLPAMARELFTVLGRECARLEGELEAIEAKLMAWHRGDAMGRRLAKIPSVGPIVATALVMKTPDPRAFRSGRHFAAWLGLTPKDHSTAGKTRLGKITRAGDEDLRRLLVIGATAVIRQARRGRGHHSHWLLALIQRKPPKLAAVALANKVARIAWKLMVTGQTYDATRINATVAVAA

SEQ ID NO: 371415 - protein, 407 aa, unidentified
MELIALHKRVIGLDVHQAQITACAILEESDGTTRIEQRQFGAFKRDRRALAEWARALLPDEVVMESTGIYWKSPYAALEAVGIRAQVVNARHVKHVPGRKTDVGDAQWLATLSRAGLLRGSFIPPARLRELRLISRQRQKWAGQLASEKNRLHKVLTDGGIRLGVVVSDVHGQPARAMVKALIADRPCHEVLDLASRRLKASREELFDALQGELTKSHRFVLDELMHPIEEIEARISRFDTRLLDGLVNQRNELALLQTLPGVDLIGAAMLLVEIGMDMDAFGSAGRLASWAGICPGNNESAGKRKSGRVRKGNLYIRRLLCEFAHAASRTRSVFKSKFQALIVRRGHKRSIIAIAHKILRTLFFMLKRRECYRDSTTDYEALSVQRNAPRWIKALTKFGFIPGSAA

SEQ ID NO: 371416 - protein, 356 aa, unidentified
MYNAKYIGLDVHQATISVAVMDSTGKVVMESILETKATTILEFIQGLRGSLYVTFEEGTSAAWLYDLLVPHVSKVVVCDPRKNATLKVGNKSDRIDARKLAELLRGGHLSPVYHGENGVRTLKELARSYLAITKDLTRVMNRLKAVYRSWAIPCAGTRVYAAHCRAEWLKQLPETGVRRRAERLYQQLDMLQPLRQEARRDLLAESRKHRANRLLRQIPCIGPIRAALLIALIQTPHRFRTKRQLWAYCGLALETRTSAEYRIVAGQLRRSKKLLAIRGLNRNHNHDLKYLFKSTATLASSRCSGPFREFYDALLAKGLKPPMARLTVARKIAAITLTIWKKGGRFDAEYLKRQAA

SEQ ID NO: 371417 - protein, 335 aa, unidentified
MKVFYLGVDVSKKKLDLCLRSNGKDILYDVIPNDLSSIKSWLTRTFEKFFLSEDSLVVCAEHTGQYTYPLVCATKSIGVYLCLEDAAKIKYCHGIPRGKNDKIDACRIAMYAERYNDCLQPYTASELIIQKLKNLSTERSMLVADRAKYQSQLKDQVDYMEHSIYIAKCNRVEGIINTFTDYIAQIDLEIKELINQAPVIAHQMDLLMSVDGVGERVALKMIMEKDAFTSFTDPRKFCCHAGVVPFVYVSGSSQRSKNRVSNRADKSIKHLLHMAALSVSQVKNSPLKKYYDRKVEEGKNKMSVLNAVRAKLVTIMFAVIRADAFFSRNYQNSLA

SEQ ID NO: 371418 - protein, 424 aa, unidentified
MKVTYQTCCGVDVHKSFLVATIVKTTGGIEPSYQKERFSTFNNSILEFKQWLLDNDCHDVCMESTGKYWVPVFNLLEDDINVVIANPKWVKAVKGNKDDTKDSKWIGDLFRLGLVKGSYIPCKKIRILKEYTRYRYKLVSCRSSEKNRYQNALTVCNVALDSVVSDIFGKSSTSIIDYLLEQSGSSINHEEIASKLLRSLKSKEDAVIESVEGYQMTDAPKYRMRLVRAHMDYITAEINDVDKMIENMISSNTDFENAVQFLCTIQGVKRDSAITIISEIGTDMSQFSSSRRLCCWAGLTPGSNESAGKKKSVRITRAGVYLKPALVQCAHAAVKSDKSPYYKKKYESLVKRRGKKRAIIAIARMILTAIYQMLSTGEQWNPSDLYKIDMPVALVEKQKAKAIKQARKLLQREGLLPPDEPFAS

SEQ ID NO: 371419 - protein, 320 aa, unidentified
MTEAQSYVGIDVSKGYVDVAARPPGEQWRLSNTEEGLSQLVGRLQGLSPALVVLEATGGLEVPVTAALGAAGFPVAVVNPRQVRDFARATGKLAKTDKLDAQVLALFAERVRPAPHPLPDPQAQELHALLARRRQMVAMLVTEQNRLGTALPNVRPGIQEHIAWLEERLEGLNDGIAKLLRESPLWREREDLLRGVPGIGPTVAATLLAELPELGTLDRRQVAALVGVAPLNRDSGTLRGRRTVWGGRATVRAALYMAALVATRFNPVVRPFYQRLLAAGKPKKVALTACMRKLLTILNAMLKHRAPWQPCTFQATDPCS

SEQ ID NO: 371420 - protein, 322 aa, unidentified
MSVSNQRCAGIDVSKGTLDIAISNIASQFTVPNGTDGFTQVLRELKRNETRLILMEATGGLESGVACYLQSEGFDVVVINPRQARDFARAMGYLAKTDRIDARVLLQMSKVINQHPEREKYIRPLPDAHRQILAAMVARRRQLTAMLTAERNRLHPSHPLSHASIRSIISALKGELARIEGEMAIHIKKHFSELSELLNAVKGVGTATVAVLLAEVPELGSLSRREISALIGVAPVNRDSGTMRGRRTVFGGRASVRTALYMSALVGTRHNPIIKEFYTRLVAAGKPKKVALTACIRKLLTILNAMLKKNEAWDPMYHQHAS

SEQ ID NO: 371421 - protein, 402 aa, unidentified
MNYFVGIDVSKDTFNIAVLHQQSFILSKHLPMSQEGFSQLLSILKQYPKPIVVMESTGRFFLPLYHFLLANDIQAFVINPKILHRFFQFLSANNPSKSDTKDAKLLALFAQANPQFLNPLPPDHHLRNLSRLIQKLKKELSEAKTQIKYVLSVLFPEVEKHLNIFSFSFLNILLKYPGASYLKKASTDDIASIINSTSKARKPSFSPQEIINLAKKSIGIHNPYLSQTLIFYIEKILFLEPRIQKLENMLLEEIDHDQNQQIKLISSIRGISPKLAVHFIAEVKDVNRFSNAKKLIKYAGTDPVIKQSGKFRINMSISKQGSPWLRNILFQMAVGVVTWNSYFREYFLRKKKEFKSYKKAMVAVMNKLIRVIYGLCKKGSYFNLVLSFNSKNFISICEGSHA

SEQ ID NO: 371422 - protein, 353 aa, unidentified
MEDSTTEARFIGVDFHRDTTVVTRLRQDGSRCGKTQSYPSTRAGLTEFKYSCTAADHVAVEATYHWALFADVFEDFEGELVLGHPLKNRLIAESRNKNDKVDSKVLADLLRTNFLARAWIAPREIRSQRELLRYRVSLVRIQTALKNRIRVLLAKAGCDFEATDLFGVGALARLEHLDLGAERNRIVRGYIGVARQIARTVREAEKVIAAATESSPEARLVDSIRGFGALAALTVVAEIGDIERFSRAGKLVSYAGLAPTNRASAGVLRHGPITKQGSPWLRWVLIEATQHAIDGYPQLATLYRRVAAAQGGRKNAGRIAVARQLLVSIYHMLKRRQAFEPGRIGEQRACAKR

SEQ ID NO: 371423 - protein, 321 aa, unidentified
MENFTHTSKTVVGIDVSQDKLDVHISPENTKLQVANNSKGHTKLIKILTKCNPNQIVMEGTGGLEKSIAIAIGKAKLPLAIVNPRQVRDFAKGIGRMAKNDAIDAFVLARFAATVVTEPRFIPDETLVELEELVSRRNQLMKMLQAERNRRSRVHSQLTRNSLDAMIASIESQLKDINRQIKDTIHASPVWREKDNLLQSFIGVGPVVASKLIASLPELGDMNRRQVASIVGVAPLDHDSGLFHGRRSIKGGRGDVRHCLYMAALSAKKHNPDITAFYDRLLAQGKKKKVALVACMRKIVTILNAMAKTNRPWIENFETSS

SEQ ID NO: 371424 - protein, 383 aa, unidentified
MRIVCGLDVHKDSVFVCILNEKGEKFEAKYGVLTPELEELHQLLLTHEVKEVTMESTSIYWYPIWRILSDIECLKLVNPYFIKQLPGRKSDVRDAAWIAECTMKDLIRGSFVPDEIVQRMRQYNRRIFDLNKEKVYKLTKLDALLQRCNIRISNYVSSTDSKSYKDVVKLLSEGIVNAEKLTEAIHGRTVNRVGKEVITAALTGVVNEVDIDLIRQYREEILMDDKHLRECQEKLTEICRKEFPREFDNLQTIPGVKERSATSILSELGADMKMFITAAALVSWCGLKPRNEESAGKIKSRRITHGNKYIRKTMIECAWGASRTQNCFYSNFSYTQTVVRRKNAMKVKVAIARKMLVVIWHVLSDGVPYNDYKKPEAIAEGNS

SEQ ID NO: 371425 - protein, 427 aa, unidentified
MKHDNVNRYAEFCQFRREIRGSAEYVIVGIDVAKERHHAFFGTATGQALLKRLLFDNSAGGFSELLERVGQLKTRHGLSKAVFALEPTGNYHKPLANWLLEQGQLLVLVSNHAIAENRQTLDGRWDKNDTKDSANVADLVSQGKCQFFEEPDADLLELRTLLSLRKRLKKQEHSIRMQIRNGLVARHFPELDRHWGSCLTENLAIVRWCLDPRKISAMSFTDFLSLVTTRDRGQRQVRRLRAIHELAASSVGCPVNEATVFEAQTLVERFHDVHRRIEQTEAQIETICRRFPTYRRIRTIPGFGPYVCSQVLAKIGDPHRFKARKQVVRLAGFDLNAKRSGKRSQTAVPVISKRGNTDLRYALYQAALIASYHHAGFRALFTRYLKGREKERGIRTKMRVKLAAKMLVIAWTMMRTETDFDPNLLAV

SEQ ID NO: 371426 - protein, 361 aa, unidentified
MKEEQATSGYRNVVGGVDTHKDLHVAAVVDEHNRLLGSECFPTTRHGYKQMLLWMRSFGELARVGVECTGSYGAGLLRYLQQAHVTVLEVTTPDKSDRRKRGKDDALDACNAAHAAFAGVRTVTPKTRDGMIESLRVLKVCRKTAISARRVALQLIHNTIISAPDELRESLRKMTRMQLIRTLAAWRPDLSDYRNLISANRIALKSLGRRYLELHDEIADLDVMIAALVDELAPDLVSRNSIGYESASQLLLTAGDNSDRLQSEASFAALCGVSPVPASSGKVTRHRLNRGGDRAANSALHIIAIGRLRTDDRTKAYVAKRVSEGHSKLEAIRCLKRYIAREVFYVIRQRYRQIAQTQFTP

SEQ ID NO: 371427 - protein, 338 aa, unidentified
MTIVMGLDQHRAQITAEWIDTATGEVSRARVAPADRAAVRRFAARFGDRELEVALEATTGWRFVVEEFDAVGARVHLAEPAETAARRGTKKRAKSDRADARHLRELLMVGRLPESWVPPAHLLDLRARVRLRHTLVDQRREWQQRIQAVLYHHGVPPRSWLLGAESRAWLAGLALPPAAREQITIALALTDGLDAQLAPLDRELRTFARRQPGCRALMGHYGIGPLTAVTILAELGDTRRFSSSREAVRYAGLDITVHQSDARRAPGHLSRQGPPALRWALFEAAQCARRPASPDHDYYTQTAARLGGNRACLAVARKLLKRSFHTLRELGEEALAPA

SEQ ID NO: 371428 - protein, 342 aa, unidentified
MDAKRYIGIDLHRDCFTACLRLENGREYLKEWKLEELAKFTAKLRPSDEVAVEVTGNTRLFHDAVAPHVGRIVAVNPSQFKVITHSVKKTDPNDARNLALYLAKDLLPEVRMKDKTQAQIASLTQTRDTMVKLRTALKNKVNNLCSAHGVNLNKESLASEKGLRMVLEMRFDPLVNLELKIIIDQIRSLNQSIAELEETIGKEGQKLEGHKNLTSIKGIGGLSAGILLSIIGDIGDFADEGKLAAYFGIVPRISNSNETEHSGRITKRGTKLGRTTLVQCALIAQRYSPYLKNYYEKKKSRGTGKAIIALARKFLGIIYRTLKNKWLFEDFPNFVLADEATA

SEQ ID NO: 371429 - protein, 372 aa, unidentified
MPQRSRVFVGLDTSKLKISVALAEEGRQGEVRFLGEIDNTPEAVRRLVGKLASRYSEVLFCYEAGPTGYGLQRQIAALGHECDVIAPSLIPKRPGERVKTNRRDALTLARLHRAGELTAIWVPDPGHEAVRELVRARDAAMADLRAKRQHLQSFLLRHGRLFPGRKPWTRAHARWLSELAFEHPAQYLVLREYRQGLEDAQARLERLTQQIAEVLTTWSMAPVVEAYQALRGVALLTAVTFVAEIGDVRRFESPRQLMAYLGLVPCESSTGERVRRGSITKAGNTRVRRVLIEGAWTYRFPARMSRLLQERQANLPQLVRTIAWKAQVRLCARYRRLMAAGKRQTGVTTAIAREMAAFLWAIGHAIEPRSAA

SEQ ID NO: 371430 - protein, 411 aa, unidentified
MIKENYIYVGIDLHKETHTAVMIDCYNQKLGEITFPNRPADFPKLVAKVKKCNTDGKTIVFGLENAYGYGRALAVWLIDKGYLVKDVNTAISHRQAKHRGAMYRKSDSDDAEAIALATLNMLDKLPDAYPNDAYWSLGQLVHRRDNIMKQRTRLVNQLHEQLCITYPSYKQFFNDISRPTALYFWEHYPSRKYLKGKSVEDLRAELVPVSHNKCSTKTCEKILDAVASDKVKNNAYQDARDMVTLSIVSDLQHYDKQLAEVDKMLEQMYKMLGCTLTNIPGVNVITAVKILAEIGDIKRFSNANKLAQFAGIAPLHLSSSGKGKDVATKQGNRRLQATIYFLAIQMVQVSSKGTPRNSVVRAYYEKRKAEGKTSQQALICISRRLISIIYGMLKHGTEYRMPVVESAGENR

SEQ ID NO: 371431 - protein, 393 aa, unidentified
MRKPKKQPKPFNDLSRSLIPFDPNQTLTAVVELSKKTWLVAGIIPGIERQPLKKLAADENELLKLLERWRGEAEKAGHKITRIAVAFETGRDGFWLARWLRARGIEAHVIHAASVPVSREHRRAKTDRLDTEQLKRAFLGWLRGERNHCKMATIPTFTEEDTKRPHRERETLVGEQTTIINRVKATLTRLGIRNFDPKLEKSPDRLEQLRTPEDEAIPPNTLAELKRDLARKQLVAEQIQQIEKARLEQLKQAPKAGPNLMVLVLMRVIGIGIETADMLVKEILSRNLRDRRAVARYGGLTGSPDESGSRSREKGLSRSGNARVRRGMIQLAWRFLRFQNESALAKWFEMRTKNARTSRKKMIVALARKLLIALWHLVRDGVVPEGVVLRPAH

SEQ ID NO: 371432 - protein, 341 aa, unidentified
MGDVSIIGLDIAKTSFQAHGADASGGVVFRKKLSRSRLLAFFAAQPPCVVALEACAGAHHWGRELARQGHTVRLIPPAYVKPFVKRQKNDAADAEAICEAAQRPTMRFVPVKSQEQQASGVVFRARDLLVRQRTQCVNAIRGHLAEYGWVAPKGVFHVERLIQRVDDPAEILPEAARTILKVLAETLRVLGEQIMVLDAEIGRRAKEDPVARRLMTIPGIGPVTAAAIVALAPAPEAFTRGRDFSAWVGLTPMQKSTGGKQKLGRITRMGERTLRRLLVIGASAVIKQALLRGAPAGSWLNQMLARKPRMLVAVALANKNARIVWALLAGGGIYRAPVAAA

SEQ ID NO: 371433 - protein, 330 aa, unidentified
MSTYKVFIGIDVSKKYLNAAILNGDTTVTFKSLYCPEEFEKELNRHLKEIKKSELLIVMEHTGVYHLRLAHYLYESGYNVGVINPYSMRKFFEAKGKRAKTDKVDSIVIAEYGRQFFDGKLYRPKTEAQKQIETRLRLLDDFQKQINMVKNQREALSHVPMEGIKKVLRYYDGIIKALSSSMKKVEKEIQKLCREKFKKQWELLESIPGISDRAISVVVSMLRGFEGFSRAKEVGSFVGICPSPYESGDTVRGRGSIMKRGNSYVRKVFYMCTLSAIRVNVYCKGLYERLLKKGKSKKLALVAVGHKLLRQCFGVLRSGKEFNPSLVKST

SEQ ID NO: 371434 - protein, 321 aa, unidentified
MQGKKLLGQSAERVYVGIDVCKDRLDVYLHPIGQELSVANTIDGLRKLKRVLQKHDVALVVVEATAKYHWLAHRVLGAAGFRVAQVNPLRTRLYAQVRGQLAKTDKIDARTLAIFGETMSPEARPPAPEAMADLHEIVRARQEISDDLVVLKNRRGAAQCDFLKREIGRAIKSLQAHEERLEAEIKRRIERDPALKRRYQILTSMPGIGSAIAAVLLIGLSELGTSSGKSMSLLVGVAPIAADSGETIGVRHIRGGRGYVRRTLYMAALTAVAWNHDLKTFYKRLLKTKEKKVALTAVIRKLVVLANTLVKEDRPWQPIRP

SEQ ID NO: 371435 - protein, 348 aa, unidentified
MDCVAIDLGGINSQVCVRSGDGKVKLERKIATRRLRDFFATIEPSVVILETCAEAMAVAGQAKAYGHDVRIVPATLVRSLGVGARGVKTDERDAQALSAASCRVELQSVHIPSSRAWELKQLMGAREALVHSRTLLCNHVKGQLRSQLLRVRAIPQRLPQAVRRLLLEKRQGMPLHLERVLKSLEVLTEQILEANKEIARIAKSDPVCRRMMTVPGVGPITSLRFLSTVDDPTRFKKAHQLESYLGLTPGEDSSSSRQRRTGITKAGSSAVRWTLVEAAWSFCRSRPEDPAAIWCKDMAKRRGKKIAVVALARKLAGILFAIWRDGTNYEPSRTARAATISGGDQLAA

SEQ ID NO: 371436 - protein, 349 aa, unidentified
MLILCTRPLAVGRCCRQRRANEDILGIPAIGIDVAKDTLDVSAFTGGKALSKQFANSDRGFALLVGWLAQSKLGQVHACLEATGRYSLGVALALHAAGHVVSIVNPAQIRDFTRTKLGRNKSDKVDAGHIREYGSVFRPPPWRPPSPALRRLCELQTMRAGFVAGRTEWQNRAASLGGDAAVGALAEATMAHFTSQVAAVDQAIAATIDQDDELRGRRDLLLSIDGVGQALAALVLAELPAPDVLGSSAAAVAYAGLNPRQFQSGTSVNRPTRISRIGNAVLRSGLYMPAMAALRHNAAVAALAARLRAQRRLRPKQILIAAMRKLLVICFGVLKSGRPFDAALAMPAA

SEQ ID NO: 371437 - protein, 376 aa, unidentified
MLYVGIDIAKNKHDVTALNVPGKTVLKPLTFSNNKAGFELLDLSLRQLNQDCLIALEDTGHYAFNLLNFLHEQGYKVYTYNPLLIKEFAKSLSLRKTKTDKKDAHGIALKLLSDPNREQFQHDNRQVDLKILARHIHRLKKKQSDWKVQYTRCLDIIFPELDKIVGKHSEYTYQLLTRYPNPQKRIEAGFDKLIEIKRLTASKIQDILSVAPRSIETTSPAREFEIIEIIKHYKRLIDKAETCVNDLMAEFNSVITTVTGIGGRLGAVILAEIRNIHAFDNPAQLQAFAGLDSSIYQSGQIDLAGRMIKRGSPHLRWALIQAAKACARFSPAFKAYLKTKLEQGKHYNVAIIHLAKKLIRTLFYILKKSCHLTNKK

SEQ ID NO: 371438 - protein, 400 aa, unidentified
MNPEYSTVAGIDVHKKWLYVVVGPQQRRFGSTVGELDALRAWLTQERVRTVVMESTAQYWRPVWMALLGSFELFLAQAQSNRARPGRKTDFLDAERLVRRLEAKELVLSFVPAAEQQEWRMLTRQRTDYAQQRTRVRNHIEALLEQSRINISGYVTDLLGVSGRRMLEALASGERNPEVLAALADSRLRASKEELVRALSGEMTRNQQLLLRQHLDQIAQIDRHAAELSAALAESLQQHRDAIEHLCEIPGIAVSAAEQIVAETGPCAATFPSPRHLASWIGLCPGRHESAGISRADTSPKGNRPLRRVLTQVAWAAVRTKNSFFQTLFRRLVPRLGTQKALWAVAHRLAHVIWIVLHRKQRYRELGPLATSSASLQIRIRRMIRQLRGFGYAVTPTTTA

SEQ ID NO: 371439 - protein, 315 aa, unidentified
MAMLVAQTKPVVGVDVAKNELVIYQDQSDRLEAIPNTKASISKWLRTLAGTVSIAVEATNTYHVLFADMAYEAGCTIYMIDGYQLSHYRKGVNVRAKTDALDARLLARYLKKEADELHPWVPPCPLYRQLLSLFRRRAALVQARTGLVQSWSNEPLLKTAFAAQINSMKRLEALVEKKIKDVLQRAELMGQVSRCMKVEGIGFLTAARLVTTFQRGEFSNANAFIAFLGLDLRVSKSGQSDGPRRLTKRGDPEARRLLHNAAMSGSRTAAWKPFYEEQRKRGFSTTQALVMLARKMARVVFALLKTQSEYQSKAA

SEQ ID NO: 371440 - protein, 340 aa, unidentified
MSAITIIGVDLAKRVFQLHGAKADGSVAFRKKLSRGRFLSFLAEQPPCVVGMEACSTAHGWGREIEKLGHTVRLIPPIYVKPFVKRQKNDVADAEAIAEAASRPTMRFVAVKSEEQQARAMLFRTRDLLVRQRTQLINAVRGHLAKHGVVAAQGPAHLKRLADAVVDEPSPLPAMVRELGKLFLEQIDVLDTRNGELDKKLRTVAGQAETTRRLQTMPGVGPITAVAVETFAPAMGSFTRGRDFAAWLGLVPRQHSTGGKQRLGKVSKMGQRDIRRLLIIGAMAVVQAASRSGAPKDSWLARMLAKKPRMLVAIALANKMARGLWAMMTKQENYRNPAAV

SEQ ID NO: 371441 - protein, 369 aa, unidentified
MENTLEKLNLVNLSNHLYLGVDTHKDKHAVVGLDCFSQVLYEKEINNSEEDFDQLIKEVKKTGLTPVFGLEDCYAYGSRLAGCLYQQGFSVRIVSPVLVERGRKYQTHPEKSDLLDAKGVAEALIHRIGTLPHYSISKTEEVSQEIKELVMDREFLVKEQTRLKNQLHRLLHKAYNSEYRIKFKNIFSDKALGYWLKSSLKIQFPVLKNQIRRKVKRLADIRKEIKEIEEELRILVDQTDQRLETMNGCGLVLTASVLAEVKNIDRFASDDALAKYGGFCPRERSSGKTIRRIKTKSGNRRLNKAIHRIALSQIGRNGNKYAKEYFLRKGSEGKSKSQALCCLKRRLVKIIFMMMKYRQEYRYFRNILT

SEQ ID NO: 371442 - protein, 402 aa, unidentified
MNDRQAHIWVGIDAGKAHHWVTAIDDQGAMLWSRKVSNDESAILDPLAEVLTLGENFTWAVDIVGTTSALLLALLASHGQSALYVPGRIVNRMAGAYRGEAKTDARDAYVIAETARHRHDLTPIRLPVEIIADLKLLIAHRGDLVADRVRMLNRLRDVLTGIFPRLDRAFDYAKHKGALTLLTGYQTPTALRRMGQVRLTKWLARRGVQGAPAVAEAALEAASGQQTQIGNETIAAQIIADIATQILALDKRLRTLENQITTMFHAHPQAEIIESMPGMGPILGAEFLAAAGPLDNYADDGHLAAAAGLIPVPRDSGRRTGNMHRPKRYNRHLRRSLYLSAQTSVIREGPNRDLYLKKRSEGYKHTQALLALSRRRVSVLWALLRDNRTFTPAPPIRSAQMS

SEQ ID NO: 371443 - protein, 483 aa, unidentified
MKKKNIYVNQSQELLRLFEEAGNGSKVMCVPMDYAKKDHVVMLCDGNGHILRKPFPVKNSPEGIEYLIEQVTRSCQHRQIDPKHVFFGGEDVGSFAENFIHTLRSGGWIVAGVNAQDTKKQRANLQASTDRLDLMGIASMLLNRRANCSPAQSGIYRNLRTIVRHRRKLAAMSTEVKNRVHTFVDRLFPGFLDDTKSGIPPFSKSSLYLMENRFSPRQIRRRKRPKLIETLHRYGTEKPEDAAAKLQEYATRVLLTPDEYIITLQISLAHHVKLFRCLQDSIHQLEHELAVWLAQTQGAFLTTMRGIGIVLAAGVCAEIGNPDAQKPVNNLVSYSGIIPKVKQTGGPEGKTHTGKVAKRCNRILKDYVVQSANQLGLHGPEDLMTDYKRREAAGQHADFGIGRRYLRTAMHLMRTSQVYLPQRLRNNADATPEERTGYYLMTWPSLREKWNKADALEAAFEKDRPLERWRNMVQELYEIKLKL

SEQ ID NO: 371444 - protein, 317 aa, unidentified
MDAYLGIDIAKRKFDVALLVGAKFKSKVCSNDAAGFAALTAWLKMHGGGPVHVCMEATGTYGVALAEYLYDQGHRISIVNPAQIKAFGQSLLTRNKTDASDAKLIARFAASHHPPPWQPPPLEVKLLQALVRRLAALQEMQQQEQNRLATADPLVQAAIARHLQFLAAEIDATRRQIHDHIDHHPGLKQKQRLLDTIPGIGEATIAQILAFIGEPTAFASARQLAAFVGLSPRQQQSGTAVQRPAHISKTGSAALRRALYMPAVVACRYNPIIKAFCTRLKAAGKPSLVIVVAAMRKLLHIVYGVLKSRQPFNPRLT

SEQ ID NO: 371445 - protein, 318 aa, unidentified
MTENVLKKYVGIDVSKATLEVCIDGESKTVIFNNDIKEIKRLIKKLQSFNNVHVVMEATGGYERQASYLMLEHGLFVSVVNARCVRDFAKSRNILAKTDKIDAYVIKEFGCSNNPKSMRSPTALEKKLLALKNRREQLVKLIKQEKQHIELVTKDIKKNIVSTIKHLGQQKEIIEEKIRSIIESDAELKEKTEIISSMKGVGEVTTTILLCDLPELGMLQNKEISALVGLAPFNRDSGMMKGKRTVYGGRAQIRAALYMCALSASKFNPGIKGFYKRLIAKGKTKKVALIACAHKILIILNVLMKNKVRWNESYCCEI

SEQ ID NO: 371446 - protein, 344 aa, unidentified
MSKHVVQGGDVVGLLTRLAHLKEKARGRRRKEFPLVVIQEAGLDGFWIHRVLEQEGIESHVVDSASIMTSRRRRRAKTDRIDGEGLVRALLAYHRGEPRVCAMVRVPTPEVEDRRRVSRELKTLTTERVGHVNRIKGLLFAQGVSGYAPLRRDRRARLEELRTGDGRLLPDHLKRQIGRELDRLELLLQQMNAVAAERDALLVPAEEQAAPTPAKMLLDLRGIGPDFASVLWQEGLFRHFDNRRQVAAYAGLAPTPWQSGEVDHEQGVSKSGNPRLRTTMLQLAWLWLRHQPSSALSQWFHQRVGDNGRIRKVMITALARKLLVALWKYVTAGVVIEGATMKTA

SEQ ID NO: 371447 - protein, 418 aa, unidentified
MASGHENRASRSYEGGASELRCGHPKLEDLLMLQTVAALFPAAVDYERTLVLAIEVSNKSWVLAAQVPGLPHTKAKRTVNPEAEALLAAIAGYRTRAAATGRSIERVIAVYEAGWSGFWLARWLIRRGVEVYVIQPSSVPVDRRMRRAKSDGIDAELLLRTLLAWLRGEPRVCSMVPVPDEADEDARRCIRERTELISERVGLTNRIGAVLATLGVTDYNPLLRNRHHRLAELRTGLGEPLPPNAHAKIARLLARLELVLAQIAELERERDAVVETETPDHASKMIQQLISLRGIGVQSATVLVREAFVRRFANGKALGSYAGLTSSPYSSGGIDREQGIGKGGNRRLRTVMVELAWLWTRYQPAAAQVCWFRERVGSTGRRVRKIMVVALARKLLIALWRFVIDGVVPEGAVLKPAA

SEQ ID NO: 371448 - protein, 351 aa, unidentified
MPCKTEVAVARTIGIDTGKNTLHMVGLDQEGAIVLREKVSRTRIAARLVNVPRCLVGIEAGMASHHVARELLALGHEVKQVPPAYAKPFRQGHKNDFRDAYAVAEAVQRPSTRCVPVKTADQLDLQALHRVRSRLIGNRTAVINQLRGFLLEHGIPVRQGLRFLRQQLPQILATRNDVLSPRMVRIIGALIGDWTYLDERIERVTDEIETLARADENCRRLMTVPGIGPIIASAMVAAIGNGAAFAKGRDFAAWLGLVPKQMSTGDRTILGRITKRGNRYLRMLFIQGARAILFRPAGWAKHSFGPWLAAAARRLHRNVLATAFANKLARIALTVLVEARSYAARIEPRAT

SEQ ID NO: 371449 - protein, 425 aa, unidentified
MNSISNKKINQVTDQTLVVGMDIAKKKHYACFVDERGRVLKKSFPVLQSREGLEWLYQCIVEAMKEFGKTEVIVGIEPTGHYWLNLAYFLDEKGIPLVMTNPMHVKRSKELDDNLPTKHDAKDALVIARLVKDGRFSYPRILKGMEAELRVGATFRSKLVEEQGAIRNQMIRWLDRYFPEFSQVFPSFGKMALAVLEYTPFPSDLAGKELEEVLALYRQSEGLQSPQKPKAKKLMELAQHSIGVTEGQQMARIEIATLVRRYRQLEEEIEALTEQLIELVQTSVEYEWLKTVPGLGDATIVELLSEIGSFSHYQDPRQLIKLAGLTLREHSSGQHKGQKRISKRGRRRLRALLFRVMMPMIRHNEAFRQLHEYYTTRPDNPLRKKQSIVVLCGKLLKVLHAVCTKHQAFDAKRMMQDIFGLETAA

SEQ ID NO: 371450 - protein, 463 aa, unidentified
MELRLGIDIACRAAHQASLADGRGEFVWSGRPFRTAPADPEALWASLPPGTAPADVTVVMEPTRNAWVPLAAWFRRRGASVVLVPPERAADLRAYYAKHTKSDRLDSRLLARLPLLHPDGLHPERGLGPGDALRRATKLHSTLVLRRGKSLARLDALLEILGPGWHRALGGDLANKTPLRFLAAGYADPDAVRRLGRARLGRFFARHSRGAWGGAKADELLAAAAESNALWAGELDYPDLAEDVAIEARLALALTHEIKELDERIAAMLEQADPAGIIRSAPGVGAITGAAILGRLGDPGRFASLAAVRAFTGLVPSLDSSGQSGRHGGPTKRGDAVLREALFLAADHARRLDPSLAARYHRLMTEAGKHHTSALCHIAPALLTRVVACWRAGERYVLRDVDGRPVDPVEARAIIAARYTVPSDVRLRQARVHPARRTGRRDQGSRGAPSASPFATDATTVPA

SEQ ID NO: 371451 - protein, 387 aa, unidentified
MTARTLNNPPAASHDEAVRCQFAIELSKDSWIIAYSTPLSDKLSRYTLKPCNSKGLLELIDRVCSRVGRELQRPVEVITCYEAGYDGFWLHRLLETHGVRNHVIDPASLQVNRRARRAKTDRIDAEQLLRSLMAYLRGEPRVWSVVRVPSVAEEDARRLHRERDRLIAERVAHVNRIRGLCALHGNYDYHPMRSDRLQQLERLRTPQGQPLPPALKAELKRELLRLELVLKMIAGVEAERDGIVSDAAPAHLNAKKIKDLYQLRSIGPEFATVLVGEVFFRSFDNRRQVGSYVGMASSPFSSGAMAREQGISKAGNPKARKTMIELAWLWLRYQPDSALSIWFRNRVGTTKGRIKRIMIVALARKLLVALWRYLETGVVPQGAVRKG

SEQ ID NO: 371452 - protein, 422 aa, unidentified
MLEEIQEREEIIERVAALDIGKAELVSCVRVPGAAGKSRRVQEVTTYKTMTRSLLLMADRFAELGVSRVVMEATSDYWKPVFYVLEAAGFETWLVNAKDVKHLPGRPKTDRLDAVWLCKVAERQMLRPSFVPPEQIRVLRDLTRYRWDQVAIRTAERQRVEKLLEDAQIKLSAVVSDIFGVSGRDMLEALLAGQRDPTVLAQFARGRMRGKITDLEEAFTGRFDEHHAFLLEKMLTRIDMVTADIADLEARIDAELVPFEEVVERLDEIPGVGRTAAAVIISEIGVDMSRFPTAGHLCSWARFSPGIKESAGRKKGNAATGHGNAYLARVLGEAAVVAGKTDTFLGERYRRIARRRGKKKAIVAVGRSILIITWHLLSDPDARYRDLGSHYYDAHQSSATRRRQHVRQLEALGYKVTLEPAA

SEQ ID NO: 371453 - protein, 456 aa, unidentified
MSQTKLSRKSRELSPVHPAAAAIDIGATMHVAAVGSDRDNEPVRTFRTFTADLHRLADWFSECGIKTVVMESTGVYWIPVFEILEQRGFEVMVVNARDAKHVPGRKSDVSDAEWLQRLHEYGLLRASFRPQAEMAALRAYLRQRERLLDYAAMHIQHMQKALMQMNLQLHHVVSDITGATGMSIIRAIIAGERDLNVLVLHRDRRCHASLETMCQALIGNYREEHIFALSQAVELYDVYQAKRLICDARIEAVLERLKKNAAPPKGKLPPARRRARQSNEPEFEVREALHAILGVDLTQINGLGPSLALKLVGECGTSLAAWPNAKHFTSWLGLAPHNKISGGKVLSSKTRRTGNRAASLLRLVASTVGRTDTALGAFYRRLSARLGKAKAITATARKIAVLFYNTLRYGMSYADPGATYYEDRYQQRVLSNLQRRARSLGFILHKVEPDTQAGVS

SEQ ID NO: 371454 - protein, 343 aa, unidentified
MELYVGLDVSLKETSICVMDRDGVIVAEDTVLSEPEAIAGYLAVEAPGVSRIGLESGPTSTWLWHELKARHLPVICIDARHAKAALAMQINKTDRNDAIGIARIMQTGWYREVQVKRLSCHEVRAALNSRALLVKMKRDIENQIRGLLKNFGLMIGKVGRSVFPVRVRELLVERPILERAVLPLLGLREQLKAEITGFDRMLLQLTRDNDVARRLTSVPGVGPITALTFISAIDDPARFRRSRSVGAYIGLTPKRYASGEIDRTGRISKCGDAMLRCYLFEAAGVLLTRVPKWCSIKAWGVRLAKRIGFKKAKIAVARKLAVIMHRMWCDGTEFFWTNKEART

SEQ ID NO: 371455 - protein, 341 aa, unidentified
MGEVITIGLDLAKSVFQAHGAGGSGEVVFRKKLRRGQVLTFFSGQPRCLVAMEACASAHYWAREIAALGHQTRLIAPAYVKPFVKRQKNDMADAEAICEAAQRPTMRFVTPKSAEAQAATTVFRARDLLVRQRTQMINALRGHLAEYGMVVRKGAENTPKLVELVRDPASDLPQEARSVLEVLAQMLQLVDERIAVLDTEIARRARTNPLIKRLMTIPGVGAISATALAALAPAPETFRRGRDFAAWIGLTPLQKSSGGKERLGKVSKKGERALRRLLIIGASSAAKAAARKGATTETWLGRMLLRKPRMLVSVALANKIARIAWALMAHGGTYRAPAAAV

SEQ ID NO: 371456 - protein, 346 aa, unidentified
MSEGYDGRQYVGIDLHRRRSVLVRMTDGGETLETVRIVNDRDRLAAVMARAGERPEVVLEATYGWYWAADELAELGAVVHLAHPLGVKAFSYRRVKNDERDAADLADLLRMGRLPEAWIAPSATRELRELVRHRAKLVHLRTNLRCQVHAVLAGQGIAVPVSDLFGVAGTALLDRCELSPAAGLRIASLRRLIEAFDTEIDQAGQSTTARLGADPGYLAVQTIPGVGPVLGAVFVAEIGDVTRFPDPTRLTSWAGLTPKHHESDTTVHRGRITKQGSRLVRWAAVEAVQRAGRHSRLGAHRDRIAARRGRNIGTVAAARELLELVYYALRDHTVRRLNSPAAAPAA

SEQ ID NO: 371457 - protein, 428 aa, unidentified
MNEADRIRLEEFRQFRKEIRGSTEYLIVGIDVAKDKHYAFFGTATGKTLFRRLVFENNLEGFRKLLVQAEAMKVQEGLKKVVFGMEPTANYHKPLGEHLIRCGHRVVLVSGAAAHENRKTLDGRWDSNDTRDAANVADLVSQGKCLFYEFPIGVLQDLRNLLSLKRRFKRQEHGYRVRIRNHLLAKYFPELDRYYKQSESTSLAIVHWCLDPSVIAGLEYKRFVEMVAPAKGRISRESRLQAIWKVAVDSIGCEAGPTVEFEAHVMVEGLKQIREALRSIEEKIQEICVQFPEYEYLLSIPGFGPDVSSKVLGAVGDPFRFQNGQQVLKLAGLDLNAERSGKSSDLARPVISRKGKADLRYALYQAALIASIRDRHFIVYFTNRLRGREKEPGIKTKMRVKLAAKLLIIAWTLMKKKEPFNPDYLKIA

SEQ ID NO: 371458 - protein, 338 aa, unidentified
MSIVFVGIDLAKNVFAVHGVNEAGRPALVKPSVARGKLLELVASLAPCTIGLEACSGAHHWARQFTAHGHTVRLMAPKFVAPYRLSGKQGKNDAADAAAICEAVQRPNMRFVPIKNLAQQGQLGIHRVRQGFIDQRTATINRIRGLLAEFGIVLPLKASTVRREATGCLEDLPGWANTAVGDLLSELHHLDERIGQYDKHIAQMAREDSRAQQLMRLKGIGETTASAMLAMIGNGHEFKCGRQFAAWLGLAPSQYSSGGKARLGRITKAGDPYMRSLLVLGARAVLNRAKDKTDSLSRWALALAERRGYWRAIVAIAAKNARMAWAMLARGERFAMPA

SEQ ID NO: 371459 - protein, 365 aa, unidentified
MRYHGIDLHKRYSTISVRNEEGTEEKFVRAQTDIKGYVASLGSEDAVVLEASGGALYWAEKVQSQGASCVVIDAYRFRIIRDSWQKTDKRDAANLSLALWLASRSGEMKLPEVWQPGPVVRELRRLFGLYELLNKQIRQLKNEIHGVLLDNGVRDRALGKRLADNPAKAEDFLKVVELSAASRVCIITSLALLANVQGQKEALTHEIYQAGRPLEAEVKLLISIRGVTPLLALAFLSEVGDVTRFRSARRLHSYLGVVPTVRSSGGVTHNGAINRRSRGFTRSLFTQAVIHIVDSSALLDHFYRELVARKGYGRARIALIRKIFSMMRRMLLSGETYRWVEPVLYERKLNDYAKRMKIKAKQEVA

SEQ ID NO: 371460 - protein, 313 aa, unidentified
MTTNTYVGIDVSKDTLDLAVLEENRVEQFTNTVGGIRDLVKEMADLSPSLIVVEVTGGYERAVVMGLFEASLPVARVSGYRARQYARAKGLLAKTDPLDALNLADYGKHVQPRLFVAKSEQGQHLSGKLARRRQLGEMLKAEKNRLRMAYGEIGPSIERVIEFLSRELKQLDQEIRAYLDSDPEWLEQEQLLRSAKAVGPVTAATLLADLPELGKLNRKQIASLVGLAPINRDSGKRSRYRKTGKGRPAVRSVLYMATLTGIRYNPVIRKKYHDLLSRGKVKKVALTACMRKLLTILNAMVRDQEPFRYPTIS

SEQ ID NO: 371461 - protein, 346 aa, unidentified
MDLYIGFDVSVASSAMCGLSEKGKLVKEATCPTEPEDLVKALHALPGRVVAVGLEAGPLSQWLYQHLTEAGFPTVLMETRQVKGALKAMPIKTDRRDAEGIARLLQMGWFRSVHCKSLSAQEMRALLSSRKAIQQAASSLELSIRGVLRNFGLKMGQVAKGRFEQRVLELAEGNPMLEAAASPILSARRALRQELAGMEKLLRDHAKSDPVCRHLMTMPGVGALVALTFKAAIDDPDRFSSSRDVGPWVGLTPRREQSGERDIIGKISRAGDAGLRTALYQAATVMLNRGRPNWLSAWAWNVAKRRGKKRATVALARRIGVVLHRMWQDGTEFRFTRADAATAAAA

SEQ ID NO: 371462 - protein, 433 aa, unidentified
MIKINYMSTLFVGIDVSSKSNVVCAIDFDENKYISSSFQNNQPGAEELAAMIADCMAHHKNLNTVVATLEATSVYSVHIANFLSTCETLMPYRPYVFCVNPKMTANYRKSYIGMDKTDPLDAYLIADFARCGRIKKCQPWRGSQFLALKLLTRHHLHLAECITREKTYMVSNLYLKFSELQLLDDDSQPFSNLYGATSSAVLTEYLSPQEIIDSSEEVLLQFLSLKSRNRIADLSKTSELLKKAARDSYRLDKCMYEPLNVSLASSFNCIHTYQKEMKLVDQAIEKSMNGMNPNAFTILKSIPGIGPVWAAGMLSEIGDINVFHSSDALAKYAGLTWRKSDSGDFSSEDNPITRAGNAYLRYYLGEAANSVRRHIPEYGEYYAKKYAEVTKHQHKRALALTSRKFVRLVFGLLVKNQLYTGEQLDAEYNIESN

SEQ ID NO: 371463 - protein, 403 aa, unidentified
MNNVAGIDVSKGKSMVSVLRPFGEVVAKPFSIGHTGSELKELADYLKSLDGETRVVMEHTGRYYEPVARFLHDEGVFVSAVNPKLIKDYGNNTLRKVKTDKADSRKIARYGLDNWAELRQHTPMDTIRMQLKTLNRQQSLYTKTKTMMKNNLIALLDQTYPGVNALFDSPVREDGSQKWVDFATTFWHVDCVRNMSLTAFAERYRKWCKRHGYNFSQSKAVEVHAGAQDLIAMLPRDALTKTMVRQAIDALNAISASMERLKAEMQALAAQLPEYPVVMAMHGVGDSLGPQLMAELGDVTRFTHRNAITAFAGVDPGADQSGTHEAKSTRVSKSGPPELRRALFLVMDCLLKTQPQDDPVYRFMDKKRAEGKPYLVYMTAGANKFLRIYYGRVKEYLASLEGN

SEQ ID NO: 371464 - protein, 426 aa, unidentified
MNQKTKTIINNRSTPLEAPAAWIGLDWGDKEHAFVLQEPTGAPEHGRIEHSAENLHGWLRELEARFGGRPVFIAIEASRGAVIHALLRYAWMRIYPINPATSVRYRTAFKPSGAKDDLPDAEMLLELVRMHSEKLRPLEPQDECTVKLGGLVEARRKLVDRRTAVLNELTSLLKSYYPQALQLAGKLNSDLAIAFLRRWPDLIALKAARPATVKRFYYLHQVRSAKLVSERLELIAKAVVLTTEEARVSVAQMQLEELLDRLEVLQKHVHRFDQEISRAFAAHPNAELFRDLPGAGPQLAARLCVAFGTVRPAYPDPGSLQKYAGIAPVREKSGGQLWTHWRWRAPTFLRQTFVEWAGQTVRYSVWARVYYHHMLQRGKKHAMIVRALAFKWIRILWRCWYENVPYNETFYLHQLARRKSIHAATP

SEQ ID NO: 371465 - protein, 316 aa, unidentified
MSASPLFVGIDVAKAELVVALGPSRDLLAVPNDESGIRQILEHLQAASPALIVLEATGGYETAAVAALAAAGLPVVVANPRQVRAFAKAMGILAKTDNIDAHVLALFAERVRPPIRPLPDEALRMLDALLTRRRQLIEMLVAERNRLAHALPPVEKSLKQHIRWLERRLADVDSDMDQAIQQSPVWRAKEDLLRSVPGVGPVVSRTLLADLPELGALNRKQIAALLGVAPLAKHSGTLRGKRMVWGGRAPVRAVLYMGALIASRHNPVIRDFYQRLVAAGKPKKVALTACMRKLLVILNTMVRNNTRWGERYAIPA

SEQ ID NO: 371466 - protein, 427 aa, unidentified
MRVLYDRVAAIDVHKDMVKVAVRVPGSKRGTRKTDVLEYRTFYGVLQAMARELRRRGVTHVVMEASGVYTEPVYYALTELDFTEVLVINPAHAKALKGHKTDAKDAVRLLDLYECGALLRGSYIPAPDLKEVRDLARYRMKTVQARASEIQRLQKTLETAGIKLDSVVSDITGMSSTAMIEALIDGERRGGVLADLALGRMRTAGKLADLSMALTGRFTDHHALMCRLHRDRISMFDDAIGELDAKIAPLVARYAREAELLKTLPGFGEVVAAGWLGAIGPAPHRHFGTAERLASWVTLCPGNYISARKSRSGRTGDGGSHIKPLLVQAAWAAIRTPGRLQAKFHRLVRKFGGPKNKGARKRAIIAIAHALLKIAYAVLKTGKPYQEPGADFYTRRESAQAREEYLLRQLQKLNPGCVITITPAEAA

SEQ ID NO: 371467 - protein, 409 aa, unidentified
MKMAGIDVHKKVLMVVVVDTSALQEKPARRRFVTLPSELQRFRIWLQEQGVEEAVMESTAQYWRSVWLELEPHMHLHLAQAFSNRAPRGRKHDFKDAERLVRRLIADELILSFVPNGEQRIWRSLTRMKVQLTRDRVRLQNQMECLLEEMRIKLSIVVSNLLGASGLRILHALAQGETDPKKLAELGDERLHCTEEQLVDALTGRVQPMHRGMLALQLQRLQLIDQQMAQLNHMIAQAMKSHQDAVIRLAEVPGLGVDSAQQIIAEVGAQASTFSSAAELAAWVGTCPGKEESAEQNQSSRSAKGNKYLRRVLNQAAHAAVAKKGCHFQVVFRRLMPRLGYKSAIWAVANRLCRVVWKILHEGVRFIEQGREVGPREKKQRAQLLARALRKLGYEVTITPINQPAPKPA

SEQ ID NO: 371468 - protein, 343 aa, unidentified
MDHFAGLDVSVKETSVCIVDDTGRIAKELRVASEPDALLRVLGNPAYRFKRIGLEAGPLSQWLFGALAEAGLPVICVETRHMRAVLKAQINKTDRNDARGMAQMMRAGLYRPVHVKTLRSQKLRVLLTHRKLLQSKAIAVDNDLRGTLRNFGLKVGVVGTVKFEARIKELVESFPDLAELVEPLLIVRRTLREQIGILHRRLLAIVRNDDVCRRLMTILGVGPVVALTYRATVDVPARFRNSKAVGAVFGLTPSRYQSGEIDRPGAISRCGDEMMRAMLYEAAHIMLVRLAKWSWLKAWAMKIARHRGMKKAIVALARRLAVIMHRIWVDGTEFRWSQEVTAA

SEQ ID NO: 371469 - protein, 341 aa, unidentified
MRGRQFVGMDLHRRRSVLVRMSETGEHLETVRILNDREVLADVMSRAGESPEVVLEATYGWYWAADALAELGATVHLAHPLGVKAFSYRRVKNDQRDAADLADLLRMGRLPHAWIAPPETRELRELVRHRAKLVAMRSQCKAHVHAILAKGGIWVPMSDLFGVEGNLLLDNVTMPAPYKARIASLRRFIEAFDAEIDLFTGLAQRRLTHHAGYTAIQQIPGIGAVLAAVFVAEIGDVHRFPGPAQLTCWAGLTPSHHESDTTVRRGRITKQGSCLVRWAAIESVKSLPDTSHIGAIRDQVAHRRGNRNIGAVVVARRQLELVFYGLRDHHIRALHHPPRAA

SEQ ID NO: 371470 - protein, 338 aa, unidentified
MENYYLGIDVSKKKLDLCLRKSGKDIRIGIIPNEMHAIMEWIQDEAEKNAFSLEKLIVCAEHTGQYTYQLVCASKILQVRLCLEDAARIKYANGLSRGKSDKADAHKIAAYAERYCDVLNMYKQPVEEIKQLKQLYADRSLLVADRAKYKAQLKDQKDCMNTSIFKNKVSIFKNLIKQFDGCIEKLEQQMRAIICHSSLMYRQYISLTDIDGVGQYMAIKMIIETEAFTQFDFNPRKFCCHAGVAPFSYTSGSSQCTKARVSNRADKSIKYMLHMCALVNIRIKGSPLKAYYDRKVAEGKNKMIVLNAIRAKLVFIMFAVIKNDSVYSRSYQNNLVIS

SEQ ID NO: 371471 - protein, 352 aa, unidentified
MFAALMANAQLGTNLFLSQKEHKSRDYLSLKVLELLIIKIISRLMQAQSNKLNFDGQNIFIGIDVHKENWTVCIFSEHLEHKKFSQPPTVDALKTYLHRNFPGAKYHSAYEAGFCGFHVHYALLEAGINNIVVNAADVPTTHKEKDNKTDKRDSRKLGRSLRSGELTGIHIPTRKTQEDRSLLRLRYTVRKDLTRIKLRVKSLMSFYGIDHPEQFSSPNKHWSRRYMDWLKTIKMEEDSGGAVFQTLIREVEEIRKIQLEVTRKIRDLSQTKSYEKDYGLLFSIPGIGLITGMTFLTEIEDINRFSSTDHFASFIGLVPSCHSSGEKENNGDTCTAYEVRVLPHAPKKYCAI

SEQ ID NO: 371472 - protein, 350 aa, unidentified
MTTESVFAGMDLHSNNVMIGIVDQNGQRLQHQKLPCDLQKIVQWLEPFKARLKDSAVESTYNWYWLVDGLQQAGFPVSLANPAQIEQYAGLKHADDKTDAYFLAELLRLNILPKGYIYNAQLRPVRDLLRRRLSLVRQRSAVLLSFKSLYTRTTGQELALREVKSMGPTEASGLYEHPANQLIAGLQIEHIRQFSQSIGRIEKVVLKTSQGLPYYAKLTTLPGIGIILGMTITMEVGAISRFASAGDFASYSRTVAAQRFSNDKKKAENNRKCGNKYLAWAFVEAAQFARRGDKQCRQWYDRKAAKCGKIVATKALACKLAKAAWFTMAQGTSYQAQRLFGASGDPAMKA

SEQ ID NO: 371473 - protein, 355 aa, unidentified
MNSIKYIGLDVHQSTISVAVLDSEGKLVMQCVLATHASAILDFFHGLRGTLHVTFEEGTHSAWLYDLLVRRVAKLVVCNPRQNALLKAGNKSDAIDARKLAELLRAALLSPVYHGESSTQTVKHLGRSYVSLTEDTTRTMGRLKALYRSQAIACSGQKPYGRRHRQAYLEQLRETGLRCRAERLYQQLDLLQQLRREARRDLILECRKHADARILRQVPLLGPIRVGLLLGRVQTPHRFRTKRQFWAYCGLALETRSSADYRMVNGQLERRQKPALIRGLNLNHNHDLKNLFKSAATSAAVRPGGFRDVYENLLRKGMKPELARLTLARKLAAVTLHVWKKGEAFDAEHLKSAAA

SEQ ID NO: 371474 - protein, 400 aa, unidentified
MNAVGIDVSKGKSTVAVIQPFGVVIAEPFDVFHTDSGLKELVSFIKSLSGETRVVMEYTGTYYEPVANALHHAGIFVSVVNPLVIDDYDTNRVRKVKTDKLDALKIASYALDKWIKLRKYEPIETIRKTLQIMNRQCIKLNKILVMQKNSLIALLDCCFPNANTLFTSPRRVSDGHEKWVDFAVKFPHVDSVAKLSLSAFKTKYKSWCKKEHYNYSESKAEHIHAYARTIVSTLPMTEIVRKMISDAAKLLNSTLEALGTLHSEMDTLASQLPEYETVMNLYGVGKVFCSQLIAEIGDVTKLKSNKSLTALAGIDPPPDQSGDHNPKSRSISKRGSPALRKTLFLIMTIYLQNQPAGEPVYQFLDKKRAEGKPYKVYMIAAAHKFLRIYYARAKEVMPKE

SEQ ID NO: 371475 - protein, 343 aa, unidentified
MQIHSVGIDLGKTTFHLVALGDDGKVLLKKKFTQKQLIAFTVNLQTSLIGMEACSGAHFLGRALRAQGHDVKLIPAQFVKPFVKSNKNDFLDAEAIAEAVDRKNMRFVPIKTDDQLDLQALHRVRDRLIARRTSVINQLRAFLLERGMTFAKTPTKLKVAMPEILENADANLTPRMRNLISLLWSEWKDLEQQIVTVNAEVELIASSDAACLRLRQIPGIGPLIATAIVAAIGNGAAFHKGREFSSWLGLVPRQHSTGGKARLFGISKRGNSYLRKILIHGARSAVVRMKRDRAPFGAWLDALQTRAPLNGVVTATANKLARIAWAVLSTGKEYRALPSPPPA

SEQ ID NO: 371476 - protein, 342 aa, unidentified
MKYVGLDLHKRNIFATVLGGDGKILSRVTIGSNRDDIGYFLKKIGDGSKLSVAMEASYNWLYYYKILEEITDNITVAHPLKTRIIGEARIKTDKIDSEALAYMLKADMLPKIYIPTKISMENKLLLRSRISLVVLRTSIKNKVHAIIDRNRDNYRGLESKTDIFCKSGMIILSDTEIPQPDYMIAKNYLDLIDELNKKIKEVETEIDKRVVSDSDIELLKTIPGVGKFISFLLKSEIDSIDRFISKEKFASYAGLTPSVHQSGPRSYTGKITKQGNKFIRWALTEAAQVAIVHSSYFRNHYFKIKAKKGTNPAIVAIARRIAEIAYVILKEKRSYIEKPINL

SEQ ID NO: 371477 - protein, 367 aa, unidentified
MKKSSTVAIEGIQIFKDNQLTIGLDLGDRTSHYCILNEAGEVILEQALPTTAKGIEQVFSKIPRSRIALETGTHSPWVSRQLTELGHEVIVAHARNVRLISESSRKDDRLDARALARLARIDPALLGPVRHRSAKAQIHLTVIRARAALVSARTALVNAARGLTKSYGARLRKCGTEQMNREIAKELKPELREALNPLLAEVESLNERIAEYDTRIEQMAKEVYPEVARLQQVKGVGPLIALTYVLTLDDPHRFRRSRDVGCFVGLRPGRRNSGMSEPQLHISKEGDRYLRTLLVQGAHYILGPFGQDSDLRRWGLKLSERGGRNAKKRAVVAVARKLAVLLHKLWVSKEVYEPLRNNNRKQMAAVA

SEQ ID NO: 371478 - protein, 469 aa, unidentified
MKRKSRRAKCQKVSPFSGDLQLIEADAAAVDVGSRSHWVAVNPQRDPNPVREFGTFTTDLISLADWLAQCEAKSVVMEATGVYWVSLYELLERRGFKVYVVDAHTVRHLPGRSKSDVKDCQWLRRLHSYGLLRGSFRPPAQIRQLRNYLRSRTKIVEAAAQQQLRMQKALTLMNIHLHHVISDLSGLTGLAIVRTIVGGERNPNRLARLRDPRIRASKETIQKSLEGHWQEELLFDLKIALESYDHFQGQIAAYDEQIRQELKEVESKVNLANEPLPAARLKACRKRPGMSQQDQLDLREELYRISGVDLTRIDGISLQTAQKVFFEIGTDVSAWSDEKKFSSWLGLSPNHRISGGKVLKRGSRKVVNPLSVALRLAARTLRNSRSALGANFRRLIAKIGMPKAITAMARKLAVLLYRMLKYGTQYVDKGMQHYESKYQETKLQYLRAQAAKFGMILLPKQAAATHVAS

SEQ ID NO: 371479 - protein, 352 aa, unidentified
MSQQTLAHRWCVGIDLHKDTLTVCVYCPCCGEIRFQKLACKCRGQILEFFASLPRPHAVAIEAVGFYRWLWDLLEPIVEKLVLADATAARALAGRRLKTDREDAQNIAELLAAGRLPVAYAPPLEVQILKDQSRHRNQLSRLHARVLHQVKSLMNANNRPGPARLQSHGLIRYLKAFESKLPARHAAILWKCVDQLTLIERQMAQAEIELRHLLDGERFRDTAALLQSFPGVGLIVCATVLAEVGDFRRFTYRKAIACYAGLHPRVFASGGRQREGHIAKTGPRDLRWVLQQAAWTAIRCEPGIKKMWLKMSRSAGKKAAAVGIARKLLSWMWAAVIKGQTYQPRGVAPLTT

SEQ ID NO: 371480 - protein, 589 aa, unidentified
MANKLLAISRLKPGQVKTFQIRFALRQFAAGCDIDKPVGTYCVLYPTPNGFQAQVQQFANSPSGCQEALAWVLSHAHKHLPPAEKALFIIESTGCYHELPVKTFDDATEVVVVNPHRIKAILRAEGKDDVKDALTLTKLVLSFDLKKSVLAVGAQKRLKKVLRMKRKLINNRTQISNRIGSLLTENSLPLPNVVKVMTASGRALCHAIAQGQTNRDQLMLLWQGKNLPPSALELVAQGQPFLQVLAAFAPTMPTKDVARLKEIHDALFYLADLEQAILNLLAQQLRLLEMYDQELELIEQEVVMAVEAYKVALPGGGQRTAQEMIDLICTAPVFSEESARMLVAEAGLNFPEIYGSADAFTRNFGLTPGNSKSAGKVVGNDVVQGNQYFKPVIVQAATAFLRRQLEPNDNGWFLWLWGRRYQQRTDAQHARIAVARKITRSVYFMCRLWQPYDDSQHRCLREDYALQTANRLANTAKELSAASPDIIGLDATTKLKQASFAINQALGLQLSRYKLCPFDHDFPVDTLDLSTRVVNLLLKNNIFSLSQLVLRLVSGTLLSVNGLGLKSAQEIERLLISKKLIEVQTSEPL

SEQ ID NO: 371481 - protein, 360 aa, unidentified
MQTKVNEKLFEGQSIYVGIDCHKKNWTVTILGEQYEHKIMNQNPNPDILASYLRRNFPGAAYHAIYEAGFNGFYSCRRLRELGINCNVIHAADVPTKYKEKIQKIDPVDSRKLARSLRSKEFEPIDVPDPSLEADRALVRQRFRVMKDVTRTKARVRSFLFQFNISVPDQFTSSQTRSWSRVYVNWLKELQIEHENLKQTLDNYIRIGELQRKELLSVTRQVRSLSQTDTYKGNYNLLISIPGIGLFTAMIFLVQIGDIRRFESLDDLCDYIGLVPMMHGSGPKMYTGNLINRGRKELKTMIIEAAWEAVRLDPALMAKFNDLTRRMNKNKAIIRIARKLVARLRSVLMNQVPYKLGVTE

SEQ ID NO: 371482 - protein, 311 aa, unidentified
MQSSVIGIDVGKYELVVYWDGKYFNIENDEKALKSWLKKHSKALKSVTLIVYEPTGGYERTLQKCLDLNQLPYRRVHANRVRDYAKATGMIAKTDRIDARILAEYGARMELVAKPVKPSEPLLKALLTRREQLIGMRLQEKNRLGTCDPLLAKWIGKNIKQLTKQLEEIEGEVKSFEEEHSAVEQLLALYQSIPGIGRITGLQLIVDLPELLDHSDKTLAALVGLAPWNKDSGTKVGRRQTRGGRTRIRGLLYMAALVAARCNPELKKFYMKLKHKGKATKVALIAVAHKLLAIARSVAQRNSPWVPVLER

SEQ ID NO: 371483 - protein, 348 aa, unidentified
MSQIIRVGMDTSKHVFQLHGVNAAEEVVLRKKLRRNEMIAFFEKLPPALIAIEACGASHHWARVLSAFGHEVKLIAPQLAKPYVKRGKNDAADAEALCEAASRPTMRFVPAKTAEQQAALMLVGVRDRLVRNQTQLANSIRGFAAEFGLTATAGMDQLAPLLDRLVADENLPTLARELFASQAKEYAQLRAKIEEIDGKLVAWQKAEPRCGRLVKVPGVGPIGSALLTMKTPAPEMFKSGRQFAAGIGLTPKDHSTGGKVRLGVITRAGDEALRSVLVAGATAVVNQVRRGNSKNAFAPWVASLLLRKPPKLVAVALANKMARVAWKLMVTGQGYIDKPAPAVLVSAA

SEQ ID NO: 371484 - protein, 387 aa, unidentified
MPQPNDLSRSLVALDQNSTIIAVIEMSQSSWLVAGMLPGIERQPRKKLEPSPERLLALLQRWRDEAVRAGSTITRIALAFEAGRDGFWLARWLEARGVEAHVIHASSIAVSREHRRAKTDRLDTALLQRGFLGWLRGERGHCSMARVPTIAEEDAKRPNRERDCLVGERTRIVNRIKSTLARLGIRNFKPTLRKAAERLATVHTPEGVPLPPNTLAELQRDMARLGVVVSQIRQIEEARQKRLEQQHETGPHAMVRLLARIVGVGVETADMLVHEVLSRPMRDRRAVARYAGLTGSPDESGAQRREQGLARAGNARVRRGMIQLAWRFLMFQKESALALWYRARTTDSRRGTRKTMIVALARKLIIALWRFVTTGEPLEGVILRPAS

SEQ ID NO: 371485 - protein, 376 aa, unidentified
MREKLRFLGLDVHAETIAVAVAEANGETRSLGTIANREDSIRKFIKKLGSPEQLRACYEAGPTGFVLYWQLTQLGVDCAVVAPSLVPKKPGDRVKTDRRDALKLAHCHRNGDLTAVCVPDDASEALRDLVRQREAAKQDQLRARHRLTKFLLRTGQGPPLGLKPWTERYMRWLAQVRYAQPAQEVTRLDCMNEFEHMSARVKRLEEAILEVVKQAPQAMQELIRGLQALRGVAHISAVTIAAELGNISSRFETARKLMGYSGAFPSEDSSGNRIRKGGITKAGNAHLRRIVMESAWCYRHLPRVGEKLRKRHQGVPAEIIEISWKAQNRLYKRYRKLTMAGKDQRKVITAVGRELLGFIWAIAIKAEGISTQPIAA

SEQ ID NO: 371486 - protein, 319 aa, unidentified
MDYYLGIDISKASFDAYLIGPKKTKHRTFTNNAAGFNMLSDWLRSFEVDVVHACMEATGRYWEHLAEHLYQTGHQVSAINPARIKGFSQSLLSRLKTDKADAEIIALFCQALKPRLWKPLATHSRELQELVRHQSNIRQTMQREKNRLQFGITSASLIKVLEDHVQFLTSQLEELEQRIKELVASNQELSSQCVLLLSIPGVGLKTALSFLSEIGEVANFSSTKQLVAYAGLAPSEKSSGSSIRKHARISKIGNSRLRKALYFPAMVAEVSNPTIAEFSSRLKLSGLKPMPRIIASMRKLLHIMFGVLKNKTVFRPIAA

SEQ ID NO: 371487 - protein, 341 aa, unidentified
MDKELYFGVDVSKKTLDLAYYDGETIDWKNAHIKVSNDDAGFKKIGSWVAKVGKDFDTFLFCMEYTGLYNQNFRLWLESKEYIYGMVEPRKMHRFEPDLDDDQRSLDRIKTDELDAFRIAIYCEQNHKKILRNPSKLPSPVYFKLKRLLAERKQNTKQSTLYKQQLHDICAYDTDLSVERKKLLLKNMNENQKAIDREIDSYMDEDASISKNYDLLTSIPGIGRIIALETIVLTENFTAISNPRKYACYIGIAPFKKESGTSVRKRTAVSKKGFSEAKADLSIAVLSAIKNNPSIRNYWIRKRKEKCGGIVLNAIKFKLVLRMFAVIKRGTPYVETDAYKN

SEQ ID NO: 371488 - protein, 351 aa, unidentified
MSGNYIGMDVHQTSTAIVVVDDGGKVLQRTVVKTDGKTLRGLVSAWPGRKELTFEEGSMSEWLFGILEPVVDRLVVCNPMANKTEFHGNKNDLLDAERLAELLRIGHLKPVYHKAHPLREIRSCLRTYHQVTGDLVRAKNRLRVLFLSRGIAVGREVYDREGGDLAAQGLSDPSDRERYQYLMDQVEFFTRQKESLTDDLVKKARRNKDYRLLQTIPGIGPIHAAELMGVVLTPHRFRTKRQFWRFCGLAVVKRTSSDWVQGARGLERRTFEQTMGLNQDRHPVMKGVFMQAALVVTRSSPFKELYDSFIARGHSPALARVYIARKLSTITLTIWKQGGKFRPEMIASNPS

SEQ ID NO: 371489 - protein, 453 aa, unidentified
MRPKRPARKPARQHTTVIRRDAAGIDIGARRIHVAVDPERDARPVREFQTFTQDLYALADWLEACAVRTVAMESTGVFWIPLFQILEARGFEVCLVNAHHVKHVPGRKTDIADCQWLQSLHAVGLLTASFRPAQTICGLRSLLRHRESLIQAAASHVQRMQKALDQMNLQLHHVISDITGLTGLAIVDAILAGERDATTLAALRNRRIHATADTITKALVGDYRPEHIFTLRQSLGAYRYYQQLIAECDVEIERHLTALPDAHPDVPSPPTLAGRRKPRGNEPDFDLRTHLHRLFGVDLTTIPGIDVLTAHTLFTEVGPDLSKFPTPEAFASWLGLCPDNRISGGKVLSVKTRRVKNRAALALRMSAQAVQGSHAALGGYYRRMRAKLGGPKAITATAHKLARVVYHLIKTQQSYQESTFLKHEASHRERVHKRLHAQAAALGLRLVPATVVP

SEQ ID NO: 371490 - protein, 426 aa, unidentified
MKEHIDYLSTLFVGIDIASRIHVISALDFNQDFYIKMKPFENTKDGAGIVEKLIADVLADNHQFKYVVIGMESTGFYGVHLANYLSTSELLAPFSVRVFCLNPKEVKNYKKSFNDIGKNDGIDSFVIADFARVGRIAIKPWRGSQYLALQRLTRHRMHITECITREKTYMLNNIYLKFSQYALLRNGEHPFSNKYGATAEAILTEFTTNEDIVNSSIEELVEFINSKSKGRIADPEETAKIVLAAARNSYRLDKCLYEPLTISIASSFNCISSFEKELKAIDKAILQTVQGLNPEEYTVLNSIPGIGKVYSAGILAEIGSIKAFQNANQLAKYCGIVWNDNDSGDFESEDSRMSKAGNRYLRYYIIEATGSVINHCPEYKAFYQKKYAETRNHQHKRALALTSRKFIRLLFGLLDKGQLYSPEKSR

SEQ ID NO: 371491 - protein, 377 aa, unidentified
MNASATALRGKHTATPSELYMAFELGEKNWKLALGDGVRGPSRYSVTAGDTSGVLECVAKARARCGLAKGAKVHSCYEAGRDGFWLHRWLLASGIDNVVVDSASIEVNRRARRAKTDRLDGDKLLAMLIRYHAGERRIWSVLRVPTVRQEDERRAHRELERLVRERTAHINRIRALLVMHNLRVKYVGGRLWQRWWAAHAGELLPGVRAEIEREGERLLLVRAQMRAIEAQQHQALATGSEPQVARLAKLGGVGVSSGWVLVKELFGWRRFGNRREVAGCLGLAPSPYSSGKLETEQGISKAGNRRVRALMVELAWSWLRNQPQSALSQWFSKRFAAGGKRMRRIGIVALARRLAIALWRYLQDGLIPEGAKLKAIG

SEQ ID NO: 371492 - protein, 349 aa, unidentified
MIVVGIDPHKQTHTAVALDAATGRVMAELTVPARTPGFERLVRWARELDAERTFAVEDGRHVSGHLERHLIARGERSVRVPPRMMGESRRTDRVWGKSDPVDATAVGRAALRHPELPEATLAGIEREIGVLVAHREMLINERTDRICKLRWLLHDIDPDLAPPLRTLNRFKTLDRLLMTLGALEPSAQVEVCLDLVARCRVITVRANELERRIAGLVQAHAPALLEIPGCSALTAAKIVAETAQVNRFPSEGHFARYAGTAPIPASSGARHRQRFNRRGNRQLNVAVHRIAITQLRIHEPARDYLMKKRAQGKTKTEAIRALKRHITRVVFKTLTSMDQPTDRLTTVAA

SEQ ID NO: 371493 - protein, 352 aa, unidentified
MLYTGIDYHKKYSVASTVDATGNRIREARIDENDPVAFAAYFKALPEKSNVVIEACWNWGWLYDELGEIEGIEDVVLAHPFKTRLIADAQIKTDRLDARALATLLRGNLVAAVHAPDAANRSRKHVIRQRLFLVRMRTMVRNRVHTVIARQRNLDRPVFSDLFGKKGLHWLRTVQLPEPDATLLKQDLATLDQLGTVIKELETQIEATNDQDEATGRLQTLPGVGLILAAVMAAEIDGVERFPRADKLCAYAGLVPTTHASGGKVHHGRMLPYSNRWLKWAFVEAAWVAVGCSPYFGGIYTRHRGRGKKANTAITIIARRMCTIAWHLLHEKRDFQANPPTKTLSPVAPHSD

SEQ ID NO: 371494 - protein, 351 aa, unidentified
MYTLGIDLHKKTSVWVLIDEERTELWKESVPCHPEYINIAMEKIPISPKEIQVAIEPVAGYRWVSQQLKEAGMDVHIAHPRKMQLIAKSTKKTDEEDSRTLANLLQSGYFPEAHLAGEDVYQLRLLLRERTFIVRQRTSVKNQLHGIATTQGLHLIPSGNPLFKRGKESIMAGDNFVMKELHHLEEELGERIKPFDERLKKEALKYEEVALLQSMPGVGIITALTIISEVDDFKRFKTGQKLTSFAGLVPRQRSSGETIRYGSITHAGSKPLRTAVVETAMRIRESNAPELFAFVKRLTPICGAKKARVALARKILVIMWKMVTTNTPYNPSILSSSCITNVSDLDTGSDV

SEQ ID NO: 371495 - protein, 313 aa, unidentified
MYYIAVDVSKKVLSVYDGKKDLTFANRTKLGSLKNYLKRHYRDFTDLAFLFEATSSYSDSLIEFCARCKIKAFIMNPKASHHFAKSLSIRSKTDKIDARMIYQYRKLIDPQMLAVPKINREAKRLFGYLKSYQLAIKQRVALSNHIWHIQDKNLARLLKKELQNVKKVEEEILSRMTGYILEHPQLKKDYERLLTIPGIGKKSAPALLTLFITYQGTNRGQITALCGLDPIKRQSGTSVLGKSKISKHGNSMFRKVLYMPMLSAIRNNARIALFYRRLLENHKVKKAAVMAAMRKMILIAHAIYQNKTEYVLR

SEQ ID NO: 371496 - protein, 414 aa, unidentified
MKGIKKKNGVKVNRKGLIGTVDIGKKTNYGYFRTGEGEEVPPFPFENNGRGYLKYLRKMHEFMNAHGLETVVVGFESTGAYGLPLIHFLSEKGVRLEQVNPMHTKRVKELDGNSPNKTDRKDPRVIADIMMLGHTLSVVVPRGVIAELRNLVHARERAHVSRTVCFNQMHDLVYRVFPELIDCMKHSDSASARYLIRHHPTPEEIVWLGVEELSAILRKVSRGRYGKREAHALWEAAVTSVGIREGRDAVLMEIGHLLDLIEQGDAYIEELEHRMEIALSQVPSSTYLLSMKGIGVVCAACLIGEVGDFTHYRSAAELVKFAGLNLYEISSGIHKGKRRITKRGRPLMRKILYLAAMNMVRTGGIFHEPYQKMVKRGMPRLQALVAISRKLLRVAFALVRDEKEFTASTLRQAA

SEQ ID NO: 371497 - protein, 416 aa, unidentified
MDAIVERCAGLDVHLDTVVACVSYGKLDIKPKKEVKTFSTTTKGLLELLDFINQKECTHVAMESTGIYWKPVWNILESGAFDLIVENAKKIKNVPGRKTDVKDAEWIASLLRGGLIEKSFVPPERIRDLRDLTRLRKELLGEVNRNKNRIHKVLQDANIKISSVLSDVFGETGKSILNQIIGNQCITEEFIYSLYEGRGKSKLKSTLMEMYEALNGKIRGHHVILLGMHNSNIVFLEKQINELEKEIDILLQKERDSLELLETIPGISKISASSIIAEIGTSMDVFKTEKHISSWAGLCPKNNESAGKKKRSGIKSGNNWLRSMLCECAWSATKKKDSRFKNKYWSMVPRMGRKKALIAIANMMLRLIYHLLKTKSTYKELEIQYFIDKDKRREDRIIKELKSKGYLVEKDSLQMA

SEQ ID NO: 371498 - protein, 339 aa, unidentified
MSKLFKNFVGIDISKTWFDAALIKSDDSSVVIHEQFAQKPDGFKKMQAWLHTHHVLLDEQTLFCMEYTGIYYTGLVHYLVKAKAALWVEMPLKIKKAGGFERGTDDKAAAVKIAWYALRFKDQVKLWQPVDSNIESIKNLIAQRDRIVNGINLLTVPVNELKDCGCAEDAKTLEKLQKAPVAALQKSKLSIEALIAKTIQQDEQLNIKVKRVASIKGIGQVTSVALMVYTKGFTAFENGKQLACYCGVVPFTKSSGTSVRYKSTVSPFANMKLKKLLHLCAMSAIQNDQEMKGYFERKVGEGKNKMSVINAVRNKLIHRVFAVIRDERNYEDNYVRKCA

SEQ ID NO: 371499 - protein, 319 aa, unidentified
MTQYIGIDVSKDHLDVASEDGKTVFRVGNTEEGQTQLLQRLMEMKPKLVVLEASGGFELDVVLALGSAKLPVAVVSPSQVRHYAKALGILAKTDAIDANVIARFGAATTPTPQPVPDEETLELEALLLRRRQLVSMLATEKNRLATFSITRKVGGEKAVKSIRRTIEFLEEQLESLDETTRAQLQKSPLWKEKEDLLRSVPGIGPVTARTLISDLPELGRLTRKCIAALAGLAPFNHDSGGHTGKRRVRGGRTTVRSALYMACVASLKCNPLIKAFFDRLRATKPAKVALTACMRKMLTILNSMARTGRKWSPELPVSS

SEQ ID NO: 371500 - protein, 396 aa, unidentified
MGQDSIQYVGCDVHKETITVAVATAGREPARVVATIPNRPEAVRKLMARLGSPATVEVGYEAGPCGYALQRHLTGLGITCVVVAPSLIPKRAGDRVKTDRRDAIQLAELLRGGYLTAIWVPDEADEALRDLVRARHATRQDVTRIRHRISSLLLRRGVRPAEGVNNWTVTHRTWLAGLALPEAAQQTVLREQLGTLAEAEGRLTRLEAAIETTIRASRHAALAAAYQALRGVDLVTAATLVVEIGDPSRFERPQQLMRYLGVTPSEQSSGGTRQQGGITKAGNARARHVLIEAAHHARHKPAVSRALAKRQRGIDPVIIAISGAAQQRLHRRYWHLVNRGKLPTVAVTAVARELAGVLWAIGHEVARHRERQASQTTTTSATDTTSPPSTAALAAD

SEQ ID NO: 371501 - protein, 371 aa, unidentified
METNTYVGLDIHRKSIVATALDARGETLGEAKLGPSTTELTAFLRSLPGIKHVVMEPCTIWEPLYESLESQGVDTSLTNPLRTRLIADATIKTDRVDSQALATLLRLRAIPQIYVPDAETRALRHLVRERYFYRRKSASVLNRAYAQLIRRGVEYPDRALRTVAGRKRIRVLGLPDVNRAIDTIEYLREKTKELDREVHDALLRMPEAQWLKTIPGVGELAAVTLAAFLCPIERFPTIGRLSLYVGLAPSTHQSGEFCYQGKLKWDSNELLQWLLIELSWTHRQRAPRGTVAKLGARVTRRRGKGKGTVAAAHKLLKIIYAILKEKRAYRPHAPERPAAMQRVQDPTRVAATQLVRGTALGSIAANSLSAQ

SEQ ID NO: 371502 - protein, 346 aa, unidentified
MLADEVEYVIGVDTHRDQHTLAVVVAPTGAVLAQTVVRATGRGYAQALGFAERHAGGVRAWAIEGAGHYGAGLTRYLGDRGETVLEVGRHARTERRLRGKDDPLDAVRAARTGLAAETLALPRAGQRQEALRVLLLSRRSAVDVRRVALVQLRSVIVTAPEQLRDELRRLPVTKLIQRCSRFRRSGSRTPDELAIVLALRSLARRIEAATAEADELEREILKHVRALVPELLDEPGVGPIVAAQLIVSWSHEDRVRSEAAFARLAGVAPLPASSGQTIRHRLSRGGDRQLNRALHTVILHRRQHDPATRDYITRRIAEGKAHATRPASSSATSPATSTESCRRPHR

SEQ ID NO: 371503 - protein, 340 aa, unidentified
MLSPTFFTAFMMVTASLLPVVGLDVSKATLAVCYQVDDLVKHLEVSNNKAGFQQLVKACGAHCRFVMEATGTYNLALAYYLHEQGGEVVVLNPLVIKRFIQMHLSKGKSDRKDAQWLLRYGQQQPAKVWQPDETVLVECRQLEQVSEQLLKQKTMVSNSLEALQRQPVISKLALKRLQQMLKTLTQQVALVEAELLTLLEQRFATQMTLLCSIPGIGRKTAGMLLLFAGGFTRFDNYRQVIALAGLSPREHTSGTSIRGKVRITKMGGGLIRGKLFMCSFSAKKTNAACAALFDRLVAKGKNKKLALIAVCNKLLKQAFAIVKSGVPYQADFSSKLTPIS

SEQ ID NO: 371504 - protein, 425 aa, unidentified
MNKDVLSTLFVGIDVSSSSNYFCAINFEGKHILDFSIANDLPSSEIAIERIFNALKDNDLKFVTMVLESTNVFSFHIANLLASNNSLFNFNSKVFVINPKESSNFTKTYSDMDKTDPKDAFVLADMARCGRINQQPYKASQLFALQRLTRQRFHLVKTITREKAYMMSNIYLKFSSLYIAKKEDGPFSNLFGNTSKSIIADFTPDDIVNMSDEDMITFVMEKGKSRFSNPEENVRLLKKIVRDSYRLDKLAYDPINVAISSSFNTIKALEDNLKVIDKAIEKNIKGLCDNEFTILKSIPGIGDVYAAGIISEIGSIEFFKDNNALAKYAGLTWRKTQSGNFEVETTRMTKTGNKYLRYYLIEAVSSLKNHSKDFNEFYTRKYNEVSRGAHKRALALSARKLVRLIFGLLHHNQLYSTIKLDNRNN

SEQ ID NO: 371505 - protein, 360 aa, unidentified
MEYYIGLDVSQRQTAICIIDGTGERVKEGKALTLPSDIYSWITRHVSAENVTKIGLEAGAMSSWLYSELTKLGLPMICLEAYQAHLFLKTQRNKTDKNDARGLAQLVRMGGSFIRAVTIRSQANQEARALLTMRQHLVAQKIGLENNITGTLKPFGLITPRGHACPTTFRKRVLTTLCRADERGIGVGAAVMPLLDLYDNLCQQLAILTKQVTALAKTNPICKRMMTAPGVGPIVALSFVTAVDDPKRFKSSSDVGAYFGLTPQQYQSGETDIMGTTSRRGDIMTRCHLVQAATTLLASTKKWCALKAWGVKLAKKHGFSKARVAVARKLSIILCRMWLKEQDFCWTTIPANTPSAGMPA

SEQ ID NO: 371506 - protein, 368 aa, unidentified
MGDCILVGCDLHDENMLLKVAVGAGAVRQQLWRNSAAGRRAMIRGLRRDAERVGADRVVFAYEASGLGFGLYDELTASGIECHVLAPTKIARSAQDRREKTDARDAQRLLDLVRAHVLAGNQLPSVWIPDRQTRDDRELVRARLDTSHKLTGVKTQVRTLLKRNGVSTPRAAGKSWTVGYRAWVASLAGGAEALGWGARLALGSLLRQLGFLEQEAAGLDAHIAELAGSARYAEPARELQALPGVGLLTAMVFLTEMGVLGRFANRRQVGAYLGLVPSKHESGESSDRKGHITRQGPARVRKVLCQAAWARIRWDRSEGAAYARIAERNPRHRKVAVVALMRRLAVQMWHVGQQAQERSGARPAEAAV

SEQ ID NO: 371507 - protein, 438 aa, unidentified
MKKKNGGAELPRKSNSETKSGLKSKRAKARGPVQRDSKEVMAELVAKLTERLGSKPVPANATEVKPQGALAPNRDRLTVGVDLGDQWSNYCILGLEGETLAEGQLRTTQQDVTEFFQALSTARVIIEVGTHSAWVREVVVGCGHEVLVANPRLMDGTRRRKRKNDRVDANKLARVGRIDPQSLFPIEHRSTEVRQDLVVLRARDALVAVRTQLINTTRGLVKSMGARLPKCSTQSFAKKAEGALPAAVREVLLPLVRLAETLSSYIQEYDERIEKLATGKYAHTELLRQVKGVGPLTSLAYVLTLEDPQRFVKSRDVGPYLGLVPKQEDSGDRQPQLRITKMGDMMLRRLLVGSAHYILGPFGPDTDLRRYGLRLCERGGKNAKKRAVVAVARKLAVLLHRLWVSGEVYEPLHQALPKVTQEQAARPAPAEATEEEAA

SEQ ID NO: 371508 - protein, 337 aa, unidentified
MKYCGIDLHWNNSVVLVSDEKDRIVLQKRLPNELGQIQATLEPHRDELVGVVVESTFNWYWLVDGLMDAGYRVHLAHPSAIKKYEGLKYSGDFADAGYLAQLLRLGLLAEGYIYPREERAVRDLSRKRLQLVRYRTAQVLSIENILARQTGARLSGEAVKRLTAAQVEELGFAPDVALAVEANRAVSQALAQQIAALEQRLKERVRLRGEFKLLKTTPGIGDTLATTIMLEMGTPTRFAKVGNFSSYCRCVDSLRESNEKKKGEGNAKNGNKYLAWAFVEAANFARRYCPQAKSFYERKKRKTNGILATKALAHKLARACYHMLREQKPFDVSRCFG

SEQ ID NO: 371509 - protein, 357 aa, unidentified
MCAKKQGSLEDLAVVGVDIGKDVFHLVGFDRSGQVVLRRKIKRFALQETFDALPRCIVGMEACLSAHFVSRGLRKLGFEQRIIPAIYVKPFNKGQKNDYNDAEAIAEAALRPNLRAVPEKDQDQLDLQALHRIRSRLVSRRTATINQIRAFLIEQGITVRSGLRALNNSFEAILDQRQEEISPRMRRVLIGLRDDWRGLDERIDRISDEIKEISRSEENCMRIMSIPGVGPMISTAMVTAIGKGEAFDRGCDFAAWVGLVPQQFSTGGRTILGRITKRGSRYLRMLLVQAARIIMMRPHLWPNFSFGDWLAAAVARMPGNKAAIALANKLARTAWSILRHGTSSDAERNRDMAMEAV

SEQ ID NO: 371510 - protein, 352 aa, unidentified
MQCIAFDSHKKYTWASVEDETGKVLREQRIQHTRGALRSFLEEFEAGSPVAVETIGNWYWITDEIEQAGMVPKLVNARRAKLMNGSVNKTDKLDARGLNRLQRSGTLPTVWIPPRQLRDARELPRTRMALVQHRTKLKNRIHANLAKYGLKTEGATDLFGKRGRQILGRCLGELPPETRYATQSLLGQLDQLKLRISELEERMADLFGDIEALKNIQTLPGVGSILGVVILTEIGDVARFPSASHLASYCGMTPRVHASGGRVRYGRTRVDTNHYLKWAYAEAANVSMMHRRRHPERHVSRLYVRVKSRRGHQKAIGAVGRHLAEATYWMLAKNEAYRDPATEQTEESKREA

SEQ ID NO: 371511 - protein, 360 aa, unidentified
MARRSRRPDKRRVVGGVDTHHDTHHAAVELMNGGRIADAQFPATVEGYARLLAWMEGFGRIHAVGVEGTGSYGAGLTRYLRGQGVTVVEVNRPDRRQRRSVGKSDPLDAYAAADAVLAGRARALPKGNDGIAESIRVLHLTRTGAIKARTAAINELRAVLVTAPAQLREHLTGKPTPALISACARLRPGTDLTDPLHATKHALRALAHRHQHLTTEIDGLNLHLKALITQTRPDLLAIYGVGVETAAQLLITCGDNPDRLTTPAAFAALCGVAPIPASSGKTTRHRLSRGGDRQANRALYLITITRMSHCARTRTYVQRRTSQGKPKPEIIRCLKRYLARELFKALTSTNTTNKQLPAAT

SEQ ID NO: 371512 - protein, 464 aa, unidentified
MTDKKMWRSRKERKEWAQRLQSEDPGLEVVHPHAAGIDVGNGLHYVAVRRDRDPQPVRRFECFTADLHRLADWLQHCAVKTVAMQSTGVYWIPIYEILEERGIQVYLVNARHTKNLPGRKSDVQESQWLLKLLTYGLLNNSFQPPSEIRVLRTYWRQRGEHVRGAATCIQRMQKSLTQMNVQLANVISDVSGMTGQAIIRSILAGDHDPRKLAELSDPRIHASREEVAKSLEGNWRPELLFVLQQEVAMYDTYQQRIAECDQQLQKHLATFAETIPLQPRKEEPKRKKTKLAKNAPRFELRGELQRITGVDLTRIDGIDVMVAQTLISEVGLDMSRWKTEAHFSSWLGLCPDNRTSGDKVLARGTRRVVNRAATALRMAAVTLMRSRTYLGAQYRRLRTKLGAPKAITAMAHRLARLVYRMLKYGQHYVDKGAEYYEHRHRRQQIQFLTKQAAKLGFQITLPHT

SEQ ID NO: 371513 - protein, 440 aa, unidentified
MGKAAPFTLIRPDCAGIDLGSERHYVAVPEDRCDSEISNFGCYTADLRAMGDWLLSLGIRDVAMEATGVYWIPVYEALASRGLRVTLVDARSAKSLSGRKTDVEDCQWIRNLHMYGLLKSCVVPEAQILVLRSYWRQRDRLVQQRSEQIQLMHKALEQMNIQLHKALSDVTGVSGMAIIRAILAGERDPKVLSELLVHRARLKKDLVEKALEGRWADHHLFALEEAVATYDFLGSRLQSCDRKLEEEMCKLGGGKVGTKRPSNASKNAPNFDLKPRIKDLLGVDPTVIDGVEASTAAVLVCELGTDLSKFKTKKHLGSYLGLAPQNKITGGNIKSSKTKKVRHPAANALRLAAQSLHSSGTAMGAFYRRLCARIGPAKATTACARKIAEAYYDLVVHGIVYQDIGEQAYNERFRDQRIRRLRKQAGKYGMCLVEEPAMTT

SEQ ID NO: 371514 - protein, 313 aa, unidentified
MDAVVGIDVSKDKLDVHIRPGGESFVVGRNAEGLDELMRRVGPLSIAAIGVEATGGFEQVVAATLAGARLPVVVINPVQVRAFARSLGQRAKTDPIDAAVIAHFVEATKPAVRPLPDEQTGLLAELVTRRRQIIQMLVAERQREQHPLSRAMKKSLARLIKALEKELNTLDGGIDEAVRNCPAWLEKAELLKSVPGVGDVTARTLLAEMPELGALDRRQIAALAGLAPYAQRSGKWRGKSFIAGGRGSVRSVLFMAAMTAARANPVLKLFYERLVGEGKSKVCALTAVARKLLTILNAIIRDAKPWTPVQVHA

SEQ ID NO: 371515 - protein, 334 aa, unidentified
MENVALIGIDLGKNSFHIHCQDHRGKAVYRKKFTRPKLIEFLATCPATTIAMEACGGSHFMARKLAELGHFPKLISPQFVRPFVKSNKNDFVDAEAICEAASRPSMRFVQPRTESQQAMRALHRVRESLVQDKVKTTNQMHAFLLEFGISVPRGAAVISRLSTLLEDSSLPLYLSQLLLKLQQHYHYLVEQIKDLESQLKRKLDEDEVGQRLLSIPCVGTLTASTISTEIGDGKQYASSRDFAAATGLVPRQYSTGGRTTLLGISKRGNKKIRTLLVQCARVFIQKLEHQSGKLADWVRELLCRKSNFVVTCALANKLARIAWALTARQQTYEA

SEQ ID NO: 371516 - protein, 328 aa, unidentified
MKKLFIGIDVSKDVFDYCCLDQENQIVLRGKADNTKQGIKKFCKLINALKGYSLWICMEHTGYYDSLLAFEFAKKKLCYSLLNPLELKRSMGITRGKNDRIDAYRIASYALSNSHKLQPYILPAEELRVMKVLMSSRDRLTKVSVQLQNGLQGLRVVSRTMNLKKHIEENKAIIKQMKVRIKDVEKQILEIIKSTPELKENYDKIEKVIGVGKITATKCIIETNNFTKFTDARKFNCHCGLAPFEYSSGSSVKSRTKTSHISKKSLKGILYKAAASAIQHDPQLKHYYNRKLKAGKEKLNALNAVANKIVLRIFAVQKRDEPFVKFLV

SEQ ID NO: 371517 - protein, 265 aa, unidentified
MDRYIGIDVHARSCTVAVVDAAGKRVGEHVVETNGQALVECLRMIPGQRHVCIEEGTQSAWLYEILAPHTQQMVVSNVTESRGQKSDQRDAFGLAEKLRVGAIEHRVYKEVGGYRKLRELARVHTMVVRDSVRVQNRIKSMMRSRGVSVEGKAVYGADRGEYLQKLPDGTRAAVATLYAQYDVLREVRKRAEKELVAEARLHPASKILATAPGIGAIRAAQLMPIVVTPHRFRSKRQFWSYCGLGIVMRSSADWVRDTRPPDIGG

SEQ ID NO: 371518 - protein, 391 aa, unidentified
MIFVGIDVAKDKHDCFILNSEGTVLADVFTIANNRIGFETLLSRIQSCSQGESKIKVGLEATGHYSYNLLGFLLDSGLATYVINPLHTNLYRKSLSLRRTKTDRIDARTIAMMLMSDVDLKSYSNTAYHNEELKSLTRYRFDKVKERAKLKSSVARLVNILFPELEKLVSSLHIAVVYALLSNYPGASYIANANTEELAETLCTASKGRYTKSKTAEIQVAAGVSIGSKMPAKSMELKHTIALIRELDKEISEVEFAIDKITSQMDSPIFTIPGIGRHMGAMILAEVGDFSNFASADKLLAYAGLSPSTYQSGQLQNCYAHMEKRGSRYLRYALFNAAKYVCLWCPTFSAYLEKKRSEGKHYNVAISHAAKKLVRLIFAMQRSGKAFLADY

SEQ ID NO: 371519 - protein, 347 aa, unidentified
METEQDTLGYRLFVGVDIAAATAMAAWQAVGGTVGRPVQIAQSSEGHADLHAKLRASGVLARETLVVMEATGSYWITLATTLAQWGYAVSVINPSQAHDFAKALLKRAKTDAIDAQTLAQLAALLQPERWTPPPAIYMELQQRLAQRDSLLDLRQQVRNQLHALEQGPVVIAAVRQRMEALIATLTVQIKEVEKEITPVLQQEEAWAKAAALLQTIIGVGLVTAAWLVTSTLNFSVCPSPDAAAAYAGLVPYVRESGTSVRGKQAISRSGNKRLRRTLYLATLAATRWNPQIKAFYTRLRAAGKPAKVARCAAARKLLHLAWSVVTKGRAYDPAYPQRSTAQPASAA

SEQ ID NO: 371520 - protein, 425 aa, unidentified
MKNISQFAATVGWDWADRKHDLSLPSADGGKAEHSTLEQSPEAVHEWVAKLRERFGGRPVAVCIETSRGPVISALMTYDFIVLFPVNPKALKNYRAAFCVSGAKDDRTDALLLEEFVRLHPDKLKALEPDTILTRTLAGLVELRRQLVDDRTRLVEQLHSSLKAYYPLAETLLGAQLTTPMATEFLARWPDLESVQKAGASALRAFFFKHNSRSRKTIEERQESIAKAKALTSDPAIILVGRARITALVGMLRPLHRSIAQLEKQIEKSMDQHPDAAIFRSLPGAGPCLAPRLLVAFGTNRERFADATEVAQFYGIAPVVRQSGESRTVHVRTRCPKFGRQSFHENAGCALKEEPWAKQFHAQYKRRHQDRHHQANRSLAFKLTRIYFACWKNRQIYDPQRYLQALEKNGSPLHKILNQNDTPKL

SEQ ID NO: 371521 - protein, 411 aa, unidentified
MQVIFERCCGLDVHKRTITACRLRWMGSEWEKEIRQFGTMTKELLGLMDWLVSEGCTHVAMESTGVYWKPVYNILEGQFELLVVNAQHLKAVPGRKTDVRDAEWIAELLAHGLLRGSFVPPPHVRELRELTRYRTSLIRDRARTMNRLQKVLEAANIKLANVVSDIDGVSARLMLERLVAGERDTEDLASLAKGRLKEKHAQLVEALSCRLQPHQSFLIAEHLAQIDYLEGAVERLSQQIEEKLRPFEQQIGWLDTVPGVNRRTAEVLLAETGGDMSRFASARHLTSWAGMCPGNNESAGKRLSGRTRKGSPWLRHCLVEAAHGAAHTKNKYLSSQYHRLAARRGKKKALMAVGHSILVITYHLLTRQQAYRDLGANYFDERDRQAVTKRCVNRLQKLGYQISLDKLQLAA

SEQ ID NO: 371522 - protein, 331 aa, unidentified
MSNIIGIDVSKASLDCAYLRDPDQDKAKRKSCPNNVHGFAALVTWATARSGLPIQALAFIIEPTHVYHEQLVHFLFNAGATVYLVNPGRVRKFAEGIGILSKNDLVDSDLLVRYGLMARNLIAYQPVAQEVNDLRSLLNRLDALEHNLRSELNRQEKVGKTMVFHRLEQQSIARSVKRLRAEIITFKRAIRECVKATPSLQQSFHLLCTIPGVGAKTAWIMIVILASRPFMSAPEVASFLGLNPIEKRSGNSQYRRPRLSKSGSGHYRQKLYFPAMVATRKNPDIKALYERLLAAGKTKMCALGAAMRKLVHICYGVIKNQTPYQVQTIPS

SEQ ID NO: 371523 - protein, 347 aa, unidentified
MQVTTIGLDLAKHVFQVHGIDASGQVSVRRALRRKEVLSFFGKLPPCLVGIEACATAHYWAREIGRFGHEVRLMPPVYVKAYVKRNKNDMADAEAICEAVTRPTMRFVAVKSAEQQSVLMLHRTRALLVRQRTMLANAVRAHLAEFGIVIGLGVQNVIAMVRKLMIEQADNEFAPPRDPLPDLVRIALAPLLTAMLDLNGRIQMIGTEIIKWHRANEMSRRLETIPGFGAITASAVAATVTDPSVFESGREFAAWLGLTPRQNSSGGKERLGGITKMGDGYIRTLLVVGATAVIRYAKQDGSAKSAWVRKLLEKKPARVVAVALANKMARIAWALMTKKENYRAVPA

SEQ ID NO: 371524 - protein, 342 aa, unidentified
MSIVILGIDLGKNSCSIVGLDANGAVIVRRRMRRDGVIAFAAKLKPCTMAMEACCGAHHMGRSLAGLGHEVRLMSPEYVRPYVKAQKNDDRDAEAIAEAATRRTMRFVELKSEEQLDVQSLHRVRDRLVGDRTSLTNQIRSLLLERGHVVAQGHARLRLLLGELLDSDGSPLSPRMAFLLQDMRMRWEELDRRIEAFDAEFAAMTRTDDRARRLTSIPGIGALNATALVAAVGDGATFDKAPDLAAWLGLVPRQATTGGRPKLLGITKRGSRYLRKMLIQGARSAMPSLAKRDTAVGAWLRGLLARAHSNVAVVALAAKMARTVWALLRRGQTYNPSLSAMN

SEQ ID NO: 371525 - protein, 381 aa, unidentified
MNKTYYIGLDVHSEKNAIAYALEGSREQATYYGSCGASVPNTEVTLRRLAKKLGVIFKDLKVCYEAGPTGFVLARRLIHLGLECIVIAPTKTERKPGEKVRTDRLDAKKLAKLYRNGDLTAVYIPPASDEAVRDVCRARTDAVDDLSRTKFRLKAFLLRNGYRPQGANWSQKYMRYLRELVLPDSNQKIVLEEYLQAIDTGIERVARLETKMFALLEEWEWKPVVEALMAFKGFQEVAAMITISELGDLTRFKHPRQLMGFLGLVPSEDTTGTRRRQGAITKCGNSHARWLLIESAQAYRSAPKVSAGLSKRQDGQSGAVKALSWRAQNRLSGRYRKLKLRGKRENKVIVAVARELCAFIWELHQLMRDRLPASSETQHPS

SEQ ID NO: 371526 - protein, 353 aa, unidentified
MHTHQKSSDPVATIGLDIGKNTFHVVGLDERGSIALRIKVSRSQLVHRLVNLPPCLVALEAGSGSHHIARQIQPLGHHVRLIPAQYVKPFLKGHKNDYRDAEAIAEAVQRPTMNFVAIKTPEQSDLLSLHRVRSRIVRQRTAIINQIRGFLIERGITVRQGPRPLRKVLPEVLSSPAEALSPRLVRLIAELDDDWRRLDERLEALSTEIESLSENDAACHRLMTVPGIGPIISSAVVAAIGTGSGFKQGRDFAAWLGLVPKQESTGDRTKLGRISKRGNKYLRTLFVQAAHVVIERRPAAAMRALWPWIEKTSRRLPHRNLLAIALANKLARVAWAVLARGRDYEPRITPNAA

SEQ ID NO: 371527 - protein, 322 aa, unidentified
MRLPNPLCVGIDVSKATLDIAATAEIEQFTTSNDSDGFDEIINKLKECRISLVLMEATGGFEAAIACSLQAAGFDVTVINPRQARDFARAMGYLAKTDRIDARVLAQMAEVINKHPDRERFIRPIQDAERQVLTAMVVRRRQLIAMHVAERNRLHPAHPQSRKSINIIIKALDDELARVDAEMSKHVQNHFKELADRLNTFKGVGIRTTASLLAEVPELGNLTRREISALVGVAPVNRDSGTMRGRRTIFGGRIGARTTLYMAALVATRFNPVIKAFYSRLLAVGKPKKVALVACMRKLLTILNAMLRKNEEWDMSYHSVSL

SEQ ID NO: 371528 - protein, 334 aa, unidentified
MKKRYFMGIDVAKATFDFCLLSRSGACLWRGQFSNDARAIERFVHQLRAHGWKLEQIHFALEATGVYGQKLIAALHQAGLAVSVLNPAQVKYFALSVLRRTKNDTVDAEIIARFCRERKPLATQPLRPIETQLELLVRERESRVVEQTRERNRAKKDPYQIELPKLISRQRQQRLAQLKKELAQLDAEIDSLIASDQRLKTQSQLLCSIPAIAKLTAAKLLAELAGKEFQSARQLGAYAGLTPAESRSGYTLYGKTRISKIGNAFLRKALYMPAAVARRWCKPFQLWIAMLQSRKLHDLAIRGAIMRKLLHIVFGVLKHHQPFNPMLASIPKTV

SEQ ID NO: 371529 - protein, 319 aa, unidentified
MLPHPTPFATHLVGIDVSKDWLDIAFDDTKVERVDNTPAALQRLARRLVKAGLTTAGLEPTGGYERLAVAVLREAGLTVLQVDSWRCRQFAKACGQRAKSDPLDARIIRAFMLHHPCRPFPEPSQAQSDLTAWVREITRAEADIRRLENRKAHPTLAAITARLDAEIAALRETVAAAEQAIEALIAADPAMDAKAKIITSVPGIATKTARVLLAEAPELGRFTPRQAGAIGGCAPYRNDSGKARRPAHIEAGRRALKRACYLAAFAAIHWNPWAKQLYADLKARGKPAKVALIAIARKLLTILNAMIRDNKPWRDPKTA

SEQ ID NO: 371530 - protein, 413 aa, unidentified
MTANTLFVGIDIHRKSNTCCLMDGQGNSLSQPFNVENNLPGSQTLIKQIAHQVIQGNFDSILIAAEATGWYWWHLFYTLYHDPFLNQWPLELYPLNPRLTANFKKTYSDLDKTDLIDAFVIADRLRLGRDLPHPFYYDDLYLPLRFLTRHRFHLIHRLAQEKAYCLSFIYLKFSEYTSIKPFANTFGAASKAVLQEFASIEEIAAIPFDELTRFINQKGKRRFSDPARNAHKLKLVAQHSYPLPQTLQQPINLILEMNLQLISFLEQQEKMINQAIAEYMQAIPHTLDTIPGMGPVFSAGIIAEIGDLARFDFDQAKVAAYAGFKWRRRQSADFEAEETSLSRKGNRYLRYYFCEAANRVRMCAQEYAAYYWRKYQEVRKHQHKRAIVLTARKLIRLVVRLLTTHQPYQPRRQ

SEQ ID NO: 371531 - protein, 319 aa, unidentified
MNQKELFIGVDVSKHHLDVAFGHGEDAPVERIQNAPDPVAQLVARLQQLQPTLIVVESSGGYERMLLEACHKAQLPIALVQPQRVRAFAKAEGLLAKTDRLDARLLARFGARMCPAASEPPDEKQLIMDELAKRREQLMQMRTAELNRLKTTRYAARELIQKHLEYLEQELAEVEHKIDELMKQSNELSAARDLLMSVPGVGRVTANILLIRLPEILKLGPKAIAALAGLAPMANQSGSKDKRRRIHGGRQDVRNVLYMATLSATRYNPVIKPFYQRLIARGKPFKVALVAAMHKLVCILNAMLKRKQAWNPNLCPSTS

SEQ ID NO: 371532 - protein, 453 aa, unidentified
MKGKRNPKPKIAVMTHVTEANAAGIDVGATEMYVAVPPDRDSQSVRCFATFTSDLQRLADWLKQCGITSVAMESTSVFWIPLFQILEERGFRVCLVNARHVKNVPGRKTDVLDCQWLQYLHSVGLLRASYRPPQTICGLRSIWRHRESLVQIAATHIQHMQKALDQMNLQLHHVISDITGATGLAIVDAILAGQRDPEKLAELRNRQIKASRETVIQSLIGDYRAEHVFVLRQSLTAYRQYQTWISECDRDIERQLETLETKVDPAEKPLAKSKDRHKPRRNEARFDLRNHLYRVFGVDLTAVPGISSLTAQVLLTEVGTDLTKFSTASAFASWLGLCPDNRISGGKILSVRTRHVVSRLPAALRMAAQSLHRSQSYLGDYFRRIRARLGTPAAITAAAHKLARILYRLITAREAYSESVFAVAERRSQQRRIAHLKKQASALGFQLLENSVP

SEQ ID NO: 371533 - protein, 447 aa, unidentified
MEEAVAVRKRELAVLYPNAAGIDIGSAKHYVAVPPERCEQSVREFESFTADLAAMAEWLASCAIDTVVMESTGVYWIPVYELLESRGFTVYLVNARHVKNVSGKKSDVLDCQWLQQLMSFGLLAGAFRPDGKVCALRALVRQRETLIAGQAQQIQRMQKALTQMNVQLVHVISDIAGQTGQDIVRAIVAGERDARKLAQLRNYRVHASEEQIAKSLSGNWREEHLFCLAQALTLFDTHQQLLEQADAQIEAMLGHLQRHAPGAIKPDKNKGRAKHAPRFDVRAALVRWAGVDLTRIGGIDVCTALKVLAELGTDLSKFKSAKHFASWLGLCPGTRITGGKRISGVTKRIANRVAQALKLAAHGLHRSHCALGAYYRRMAARLGAGKAITATAHKLARLVYAILTRGEEFIERTQDHYEDQVRSRTIRYLQKKAASLGFKLQPNAVCP

SEQ ID NO: 371534 - protein, 305 aa, unidentified
MMENVFGVDVAKGWIDVVGPGGHERVENADLDRFAARVSRLGGRVAFEASGGWEAPLRQALARAGVAAIRINPRRARAFATSLGQLAKTDRVDAGAIREMALRLDLPECPPESEELRTLKALRLRRRQLVEDAKREKQRRSQARDDAMRASVERVLRLLQREIGRLEAAIERHIAASKTLRERARLLRTAPGVGPVSAAALLAEMPELGTLSPRQAAALAGLAPIARDSGLRSGRRRIGGGRKSLRDALYMAGLSAARHDPTLRAFAQRLRANGKAPKQAIIATTRKLLTILNAMIRENRPYYQT

SEQ ID NO: 371535 - protein, 323 aa, unidentified
MQGQKSPERSAQPGVYVGVDVCKDWLDVYLHPIGQKLRVSNAPGGLRALKRRLADLPVELIVMEATGKFHRQAHRTLHAAGLAVAVVNPLRARLFAEAVGQLAKTDRLDARMLALMGQTLEPSALAPAPEALEALQELARARAAAKAEETALSNRRGASQTAFLKAELGRRLKLLAGHVERLDAEIERRIGADPALKRRYDILITIPGVGPVAAVALAIGLPELGACSGKAASLLAGLAPLARDSGAKAGERHIWGGRAFVRTGLYFAAVSAATHNPQLRDDYNRLRDAGKKAKVAITAIMRKLVVLANVLIKEDRPWRPVQP

SEQ ID NO: 371536 - protein, 430 aa, unidentified
MSKYLNSTIVGIDVASEFSYVAILCPDGHEYRKPFKLVHTRNGFNYLLETIKKVENEFNMKPIFFMESTGVYHLTLLHFLRDNKFEAFVINPLVTNSNKNKDIRKVKSDKRDALNIAKLGKYDDIRVSSDTDVIAFEFKQLVRNYYRLIDNRADYKKQMSSYLTIYFNGYKKVFRNICCDASIRILKKYPTPNTILNAPKEDIINLLLQSKKGMSWSEEKYRQLIKCADEATFISVPSCIFDTSLQSFITLYELVDDEVNSILSSIKAFIKSGNLPSSYAKNISLLQSITGIGFICAVTLVAEIGSFEKFKSPKQLVGFIGIDPAVNESGEFKGDRVKMSKRGSRYARRALFAATLTAIRTKNNVPENPVIHEYYKVNLKGKKKKVALVAVMHKLTKYLFAVMRDQKPYTIQNPKEHQVLFLKNHHLTAA

SEQ ID NO: 371537 - protein, 484 aa, unidentified
MAKRKMSTFERLSTGQMNRAQRRELGRQVAASDPGLTIVHPNAGGIDVGNASHFVAVPPDRDAHPVREFGCWTAALHEMAEWLRSCRIDTLAMQATGVYWIALYDILQQHGIEVVLVNAQHTKNVPGRKTDVQECQWLMKLHTYGLVRDSFRLQQDMEYVRTIWRVRDRHVKEAGEAVQHMQKALTKMNIQLANVISDVSGLSGQAIITAVLQGQRDPYKLADLADYRIKASREEVARSLEGNWRADVLFELQQAVDSHHFAHRQMQECDEKLKLYLASLPTRVLDNPAPSQGAPETPAQKRKRAKKPRGNEPQMDMKTELKRICGVDLTSIDGIHVMTAFTVLSEVGTDMSRFRDEHHFASWMGLTPSKDITGGKIVRSSKKKVKNRVAVVLRTAATTLLESDTHLGARYRHLRRQLPTFKSAVKAMAHQLALLIYRLLTKGEAWVDRGAAQFERRRAERELAHLQSKARAKGFTLVPITEPR

SEQ ID NO: 371538 - protein, 375 aa, unidentified
MTKSNILFIGMDVHKESIEIAIANDGTNGEVRRYGRIGGTLDALKKTLRKLVSEDKTLHFCYEAGPCGYELYRYLSDAGHICIVVAPSLIPKKPGDKVKTDKRDAVQLVRLFRAGELTPVYVPDREDEAIRDLSRAREDAMIIQKSARQRLKSFLLRHNIRYQGRANWGEKHLRWLADEVRLPNPAQQVVFQEYVNTVTEAAYRMERLVAEIHHYVKTWRLYPVVQALMAMRGVRMIVAVTVIAELGDLTRFENPQQLMSYLGLTPCEYSSGERQRRGAITKTGNHHARRILIEAAWSYRFFPKVSPEIQKRQQYQPLPIRDIAWKAQLRLTKRYKVMIQRGKVPNIVVVAIARELAGFMWAIAQTVPLSNQPTV

SEQ ID NO: 371539 - protein, 345 aa, unidentified
MEWEIANEPRAVRRMAKRLKREAVGELRVCYEAGPCGYALQRQLRELDVSAIVVAPSLIPVKPGERVKTNRRDAVKLAVMLRAGALTAVHAPTPEEESVRDLCRCRDDIREDMMRARHRLLKMLLRRGLIYPGKAWTDAHRRWLRSIIFERAADRAVFDDYVRAIEHLEERRCTIDVTIETMSHREPYREPVAWLRCFRGIDTVTAMSIVAELHDFRRFQSARELMSYLGLTPSENSTGDRHRRGPITKAGNKHARRLLIEASWHYRHKPGVGQKLRKRREGQPGWVLALADRAQARLHRRYWRLVTHGKAHNKAVTAVARELSGFLWAALRQPRAGKGSGASAG

SEQ ID NO: 371540 - protein, 330 aa, unidentified
MKFKNIIGIDTGKSSIDFSFLENGEKKKIGIVENSVKKLELFFNDLKIDVKETLFCMEHTGIYNFHLLSVLQNHGANIWLENPIQIKRSMGMTRGKNDKIDAFRISKYAYLHQERAKLWQPTRLVIQNLKLLMSQRSRLNKAKKLIEIPVVESKEFIAKDQYKLLKQNCKSTLTGIKKDLALVTAQIKKIIESDDTLKELFKYVASVPNVGLITATAIIVSTNEFQKIDTARKFACHAGVAPFEYTSGSSVRGKTRISHLADKELKTVLHLATLSAISRPGELRDYFVRKVKEGKNKMLVINAIRNKLIHRVFACVRDQRKYFKKDLTFA

SEQ ID NO: 371541 - protein, 385 aa, unidentified
MRGNSFIPRDYDVFTGLDVSKKSMSVTFTNHQGFIRSLNMPHKAEPLLNYVRKHFPDQKIAFVYEAGPTGYGLYDGLAAQAYPCLIAAPSMIPRAPGQRVKTNRLDSKALSESLRGGQLQSIHIPSPTYRQLRHLTQLRDVLVSELAGMKQRIKSLLLFEGIEFPPAPAGSQWSFLVKDKLRKLPCSGTVRFKLDQLLDSLEFNEKQVLKTITEIRRFCRNDPELSQCIEYLMTLPGIGWITASQLLARIGDWRELKNIRQLAGFLGLVPTEHSTGERVDRGSITRTGDERLRSKLIQASWSAIRQDAELREFFRSVCRKHPREVASRVAIVAVARKLSVRISVVLMQQRPYEVRERVHSAPLTQEETSPQGTTRRQAEPGEKNS

SEQ ID NO: 371542 - protein, 337 aa, unidentified
MKYSGIDLHSNNSVVTVTDEEDRVVAEKRLPNDLAKIVGFLLPWRDELKAVVVESTYNWYWLVDGLQEAGFVVKLANTGAIKKYDGLKHSGDEADARQLAHLLRLGILPTGTILPPEHRAIRDLARKRMQLVRSRTSHILAIENIVARQRAMKINSNQIKRLTADEIDQMLLPADVGLAIKSNLAVITTLGEQIDLLEKRLQESMSERAEYGLLTSVPGIGRILATIILLETGPIDRFASVGNFASYARCVDSQHMSNGKKKGEGNTKNGNKYLAWAFVEAANFALRFCAEAKRFYERKKAKTNTIVAIKALAHKLARACYHMLKENKPFDVTRCFA

SEQ ID NO: 371543 - protein, 348 aa, unidentified
MKEQSNRSEFTVGLDLGERRHRFCVLNGKGEVVEEAILSNDRASLARLTARYRGALAVMEAGAHSPWVSRYLEGLGWEVIVSNPRKVRAIYQHERKSDRRDALMLARIGRMDRALLYPVRHGSEEAQQDLLRIKLRDSLVHARVALINSVRFSLKSLGYAVRNPSSERFHKVAMETLPEVVREMIAPSVQALAELSGRIAVLEREISVLARTKYPQTLWLQQVPGVGAITALYFVLKIEDPKRFKNVRAVGAYTGLCPRRDQSGESDPQLRISKRGDAYLRRLLVSAAQYILGPFGPQSALREYGLRLAAADGTTRAKKRAVVAVARKLCVLLLSLWKNQTPYQPYPA

SEQ ID NO: 371544 - protein, 367 aa, unidentified
MSETIVAYQSFIGVDLHKNTVTLAAVQPDGTLIDRVKIPTKCRDRIASWLLARPRPSHMAVEAVGFVEWFIDDYRGCVDRIDIADATELANRRGKRRKNDPNDARDIAQRLARGECPLGYIADDELMQLRKLGRHWHQLSRLLSRSKHSLRSMLLAANIAGPKLDGHAAQKWILARGYLLKPVQQQAFANFLDIIQLVERQRARLHLQITFANRAPRFRKIVELLKSVPGIDEIWACIIAAEIGPFGRFPNSDALEFWAGMTADLKESAGRTQSGNITKAGSRSLRWALCKAALTLCRSDKKQEAIRQRLIRRIGKPKANVAMGRRLLRILYAMIRDEKDFVRGPATKHNLGANRARMARKQRKEVA

SEQ ID NO: 371545 - protein, 392 aa, unidentified
MGVVEDVIIGVDPHKLSATIEVVTRRGVLVGAGRFTTDKEGYGQLRRYVAPWPRRLWAVEGSDGAGRPLAQRLLEAGEDVVDVPAKLAARVRLFDTGHNRKTDALDAHSIAMVALRTPGLRVLVADGPLQALRMLADRRDELGAHRVQTVNRLQRLLSELVPGQSKKDLTAAQARAILSRVRPRDVAGKMRRRMAGEELKDLVAVDAKLKALKAELKAAVLARGSHLMDLHGVGPIVAARILADVGDIARFADRNRFASWTGTAPLDVSSGQQIRHRLSRAGNRRMNHAIHIAAIVQLRHATPGRAYFLRKTAAGKTRMEALRCLKRRISDAIYRQLLADAHAEPPAHQNAGPGGHHGASLQSSAAGSHPHTEAPQVFGRCYAGCGSRLRVA

SEQ ID NO: 371546 - protein, 429 aa, unidentified
MNYTQNAKIEQVTDATMVVGVDIGSQLHYARAFDNRGRELTKKVFSFQNDIEGFNSFNAWMEKLMSGNGKTDVLIGCEPTGHYWFALARYVEDHQKKLVMVNPFSVKKIKELDDNSPKKTDAKDPKTIAKLVVDGRYSIPYMPEGIYAEIRDLVYSRDRIMKQHNIAANRIQRWLAIHFPEYLGIYNKFDATSGLAVLEKAPMPKDVIALGVDGIRKIWHEKKLRGRGVTEGRAKTLVEAAHNSVGIDGGYGTKSELFMLLEEHRLWTSQLIAVNKVLDEMIRKVQHVEKLLAIKGVGLVTIAGFIAEIGDIRRFKSPKQIQKYAGLELVENSSGKHKGRSRISKRGRRKLRKILYQVMIPLLARNAEFRDIYDYYVTRVKNPLKRRQAMIAVSCKLIRVFYAVLTKGLDYDRMKMKSDIHRDSDLIAA

SEQ ID NO: 371547 - protein, 387 aa, unidentified
MKSVTSATVVATTARSNAITLFASLELSKSKWVVTISSPGSEKFSRHTVEGGNGGCLLDLLSRWRAKAEERYGVAIETVVIQEAGLDGFWIHRLLLANGIESHVVDAGSIAVARRHRRAKTDSIDGETLLRTLMAWGRGERRVCSMVQAPSPEEEDRRRLTRERGTLVKERIQHTNRIRGLLTGQGVRDYNPLRRDRVERLEAVRTGDGRPLPPMLKAEIRREVDRIAVVTTQLAAVERARDALVHAPAEEPNTPAGVLLKLKGIGPEFASLLWLEALFRSFANRRQVGAYGGLAPSPWQSGSIERDQGISKAGNHRLRRTLIELAWSWLRHQPNSALSRWFQARVGAAKGRIRRIAIVALARKLLVALWRYVTQGVVPEGAELKAA

SEQ ID NO: 371548 - protein, 317 aa, unidentified
MFVGIDVSKERLDVAVHGRKECWQFGRDENGMARLVDHLRSLGEPITLVVLEATGGLERDVAAGLAVAKIPAAVVNARQVRDFARATGKLAKTDGIDAAVLAHFAEAVRPAVQVVGDELAQALEARITRRNQLIGMLVAEKNRRATLLVQRTASSAVAKSIDVHIQWLEKQIAEIDDDIDKLIRNSPVWREKDDLLQSVPGVGPVTSRMLLGYVPELGSLDRKKIAALIGLAPYNRDSGQGVGRRAIWGGRAEVRSALYMATMAALRCNPLLRAFYDRLKAAGKAPMVAITATMRKLLITLNAMVRDGARWAPPALT

SEQ ID NO: 371549 - protein, 419 aa, unidentified
MSRRTRDCRPIQPEILVVGVDVAKEKMVARAVGGDGRTAKTLQFGCDAAGFEKLLGYAEKAARDLGASGFVAAMEPTGHYGEPLAAWLKGHGVEVYAVQPLKTSRAKELYDGTWRKTDEKDALVIADLCRRGLGSPWRVQTGPFAALRVLTRRREQLVEQRRQVVNRIHRHRDVLFPELRALFPKLEGRASRWVLRNVATPAAVQAMGVEALTDALHQESRGQLGRKRAEVMSEAAQRSVGVSEAGESHQFALGQLLDELEGVLARLKAVERQMAAQLAAVPYAERLLTVPGFGPVIVASLLGEFGDLRNYRVAGQLIKMAGLDLAESSSGERQGHHHISRRGRPYARQLLFMAALTAGKVALAQRRQRLVEERAKPARVAAVANACALLRISHALVRDEQDFDPMRHAPKAAEVALAN

SEQ ID NO: 371550 - protein, 352 aa, unidentified
MDEQPTIFVGIDVSKYRLDVYLRPLDEAFHVPRDVKGLEALARRFTSLPVALVVLEATGGFEASVAAALAAAGLPLCIVNPRQIRDFARAMGRLAKTDTLDAEVIALFAERIRQPVRPLPEPERSHFAELVSRRRQIIGMINMETNRRDQAVDKQLSRRLSRHIAFLEKELVELDGDIGQTIKASPVWCETEALLKSVPGVGDVTARTLLAQLPELGTIGRHQLAALVGIAPINRDSGLMRGRRSIAGGRTSVRGVLYMAALTAIRRGSPFRPFNERLTGRGRPRKVALVAVMRKLLLRSTPSSATARPGGPSRLDLQHSRSVVVALPWRTCPIARPSMRYQSYHHTAGTNI

SEQ ID NO: 371551 - protein, 349 aa, unidentified
MSMVCGLDLHRQQITFDALEVESGEVWRGRVWQPDRERFRRWLCRDVARRADGQPVAMAVEGCTGWRYVVEEIVAAGFEAHLAEPADTQAARGRKRHAKTDRSDARMLRELLQSGDLPESWIPPTDVLEWRERVRLYKSLVDQRRVWIQRIHAELFQHGVAVPEGAIRSTATRDRLLSDDVALTPAGRQRVRVGYSMLEATDAEAQLLKRDLQRFGHRQPACRALVEETYGIGGLIAVAVWSELGDCRRFSRSEQVVRHSGLDISVDSSDRHRAHGYLTRQGPPTLRWALFEAAMNASHHRSPDHAYYSAVKDRHDGKLAAISVARQFARRCYHILRHLDPDIVYAMPD

SEQ ID NO: 371552 - protein, 338 aa, unidentified
MQAYAGIDLHSSNNYIGIINEQDQRLYGKRIPNELDRVLLALEPFRDQLEGVVVESTYNWYWLVDGLQEHGYKVHLANPSAIKQYEGLKHTDDKWDAFWLAHMRRLNILPEGYIYPKEDRAIRDLLRRRLLFVRHRTSHILSLQSMITRNLGFKVSGNEIKKLRGEDVDGMFNSHNLIFMAKNNIAVIQFLKKIITDIEKNVKSQVKLRKEFAMLLTIPGIGDILGLTIMLEVDDINRFLKVGDYSSYSRCVKSERFSNGKKKDENNRKNGNKYLAWAYVEAANFMIRYNVRAQRFYQKKKAERNGIVAIKALSNKICRASYYIMRDHVPFDEDMLFR

SEQ ID NO: 371553 - protein, 366 aa, unidentified
MKKTSTVRVNGNRIFKGHKLTIGLDLGDRWSNYCVLDEAGEILLEQKLATTPEAMKQTFERIPRSLVALETGTHSPWLSRLLKELGHEVLVAHAQKVELISKSNRKDDRHDARTLARLARIDPELLGPVRHRGAKAQIHLTVIRARAALVSARTALVNGARGLAKSYGERLPKCGTEQVSRELAAELSKELREVLEPLLKEIESLNERIKEYDARMEKIARESYPQVALLKQVKGVGTQIALTYVLTLDDPHRFTKSREVGCFLGLKPGRRDSGQSQPQMHISKEGDRYLRTMLVQGAHYILGPFGEDSDLRRWGLRLAERGGKNAKKRAVVAVARKLAVLLHRLWVSGEVYEPLRNNRKAMRAVA

SEQ ID NO: 371554 - protein, 359 aa, unidentified
MDSIEGSTRHIVGGVDTHKDLHVAAVVDEQDHVLGTGCFATTRQGYRQMLSWMRSFGDLRRIGIESTGSYGAGLLRFMQAAGVEVLEVTTPDKYDRRRRGKNDDLDAQNAAHAAFAGRRTVTPRSRDGMVESLRVLTVCRKTAVAARRVALQLIQATIVSAPDGLRDTLRSMTRMQLVRTLAAWRPDLTAYRNVEAAYRISLKSLARRYLELHDEIADLDTMIGAIVEDLAPELIARNSIGHNGAAQLLLTAGDNPERLRSEASFAALCGVSPVPASSGKTIRHRLNRGGDRAANSALHIIAIGRIRTDPATKAYVAKRVTEGHSKLDAIRALKRYIAREVFHIITKRHREINQSRIAA

SEQ ID NO: 371555 - protein, 337 aa, unidentified
MGLYCGIDLHSNNHVMTVIDEGDRRLYERRLPNDLAITKAALEPFRAQLVAVAVESTFNWYWLVDGLMDAGYEVRLVHTGAVVQYEGLKHTDDEHDAFWLAHLMRLGILPTGYIYPKGKRGLRDLARQRMRLVQHRASHITSVQSQVWRSTAVRLSGHTIKGEGKQPWPELRDADLALSIETGRAAIDALTVQIERLEEVLLKRVGLSPQFQVLKTVTGIGPILALTIALEVGDIKRFPGVGEFASYCRCVDSQRLSNAKKKGEANRKNGNPYLAWAFMEAAHFAIRYLPAARRFYERKCRQRNALLAVKALAHKLARACFYILRDQVPFAPERLFV

SEQ ID NO: 371556 - protein, 352 aa, unidentified
MVTVPVFVGLDYHTVSVQVCVLDSGGEMLANRSVANDSEAIGQLVHDHGNKVYAAVEACNGSADLADELIQRFGWSVDLAHAGYVARIKQNPDKTDYSDARLVADLERVGYLPKVWLAPEEVRELRRLVRYRQQLAKERRDVKLRIGALLREQRLSSPTTCTKWTVAWLKWLEETKELSVQGRWIVDQQLRRLRELDLSLRTVEARLSQVTADDPQVQALMAMRGVGLITAVTIRAEIGRFDRFRTGKQLSRFCGLSPRNASSGQRQADAGMIKAGNPQLRTVIIEAAHRLMRHDPHYRAMGQRLRQHGKPGSVVAAAVANRWMRSLYHIMIPYGKGRPATETAPIAGPGSC

SEQ ID NO: 371557 - protein, 374 aa, unidentified
MVDHSEDCLGFDTSKLRNAVAIAEAGRAGEVRYFGEIDNSAEAVRRLVKKLSSKHDRLTFCYEAGPTGYGLYRLIRGLGHECLVAAPSLIPKKPGDRVKTNKRDAKALARLLRARELTAVWVPDERHEAMRDLTRARGAAVVDLRTKRQQVTAFLLRLGRHYVGKTTWGKAHLAWLMSQRFEHAEQRIAFEEMLLAVRQAQERIERLEEAIRAAVPDWSLEPLVISLMALRGIDLVAATAFLAEIGDLTRFRTPRELMGYLGLVPSEDSTGDTIKRGPITKAGNRRARRILVESAWSYRYPPRVGRAKQARVEAAPQAAREIAWKAQARLYARYRTLIRRGKLKTVAITALARELAGFIWAISREIAPPRAQAS

SEQ ID NO: 371558 - protein, 416 aa, unidentified
MDMEREVVCGADIHKQFLLATVLSNDGKKFQDRFDANFEGLLNFRQWLLDLGCQKLAVESTASYWLPIYLVVGKDVEFILANAYQIKHVPGRKTDVLDSEWIAELCLKDLIAPSRIFSEDERDLRSMTRTRESYVKMRTQNKNRIHQELESACIKLSSVLSDIFGKSGIHIIRGILKGSSIEDILDSIPSKKLKAKRKEIQDAIRMNMSPAQVDLISLLLDSVDILNREIESIDKQIQDLISKRQDDLKIAMSIPGMGFTTASAILAEIGDFKDFRTGDKLAAYCGLVPSVYQSAGKLITGHITKHGSPHVRRMLIEVAHAISRTKADSNLKRFYFRIKGRHGAKVAIVALARKVICILHHLIVNREMFEDVGTNKSKRNKPGRSFSSPEPTITDAIQILVRAGYAIQKRSEREGG

SEQ ID NO: 371559 - protein, 373 aa, unidentified
MSTNLRYLGLDVHAETIAVAVAEPGGEVRPLGIIPNVPEAVAKLVRKLGPREQLRVCYEAGPCGYVLYWQLTKLGVQCDVVAPTLVPTKPGDRVKTDRRDAAKLAHCYRAGDLTPVWVPDAAHEALRDLVRAREAAKQDQLRARHRLGKFLLRHGRRPPEGVKPWTQRHRRWLDALHFELAAQQATLADYLYEVDHAATRLERLEAALDEAVQAAPAPMRAVMAALQTLRGIRQVIAATIVSEVGSLSRFPHPRELMGYSGTVPSEHSSGSHVHRGAITKTGNAHLRRVLVEAAWAYRFPPKCAKGLRQRQRGQPEAITALAWKAQQRLCSRYRRLLARGKPTPHVITAIARELVGFIWAIGVAVEREQTMAA

SEQ ID NO: 371560 - protein, 455 aa, unidentified
MNRKRSKARIDRKMLMVHPNAAAIDVGATMHMAAVRADHTPEPVRSFGTFTTDLHRLVDGFTECGVETVVMESTSVYWIPIFELLDARGFTVFLVNARDAKHVPGRKTDVSDAQWLQRLHSYGLLRASFRPKGQIAELRAYVRQRERLLEYAASHIQHMQKALTQMNLQLHHVVADITGATGLRIIRAILAGDHDPKVLAQLRDYRCHARAETIEKALTGSYRPEHLFALEQALALYDAYHEKVSACDVRIEAVLKELSIGRGRRSDSLLSPRRPRTNPVNGLAFDVRAALFALLGKDLTQIDGLGPYLSLKLVAECGDDLSAWASAKHFTSWLGLAPSNKISGGKVLSSRTRRCGSRAAALLRLAAVTVGRTDTALGAFYRRLSARVGKAKAVTATARKIAVLFYNAVRHGMEYVDPGASYYETRYRTRVIDNLHRRAKAFGFVLQPVEPSAVS

SEQ ID NO: 371561 - protein, 345 aa, unidentified
MKCTRVGLDIAKQVFQVHGVDERGGVVVVGKRLARAKVLEYFAQLPSCVVGIEACGGAHYWARELGKLGHTVKLMAAQYVIPYRKRGKNDANDAEAICEAVGRPNMRFVAVKSEEQQAVLTVHRARSLAMANRTALANQIRGLLGEFGIVIPWGITRLRSQLPQVLEDAENDLPMLAREVLADLREQFRALDQRIRQYDLQIRELAQESEPARRLMQIESIGPMTATAIVAGMGQAQVFKSGRNYAASLGLIPRQDSSGGKTRLGPITKRGDRYLRTLLIHGARAYLRTVEKRTDAKGAWARRLKERRHVNVAAVALAAKHARIAWAMLARGTDYRPVPLQQALA

SEQ ID NO: 371562 - protein, 449 aa, unidentified
MKKLNSERKGLPVINDRAAGIDIGSRFHVVAVPTDLAEQPVRTFRAFTADLECMAKWLTGLGISTVAMESTGVYWIPVYEILESHGLHVVLANARDARAVPGRKTDVNDAQWIQRLHACGLLRASFHPDREIAALRSYLRLRERHLDYAAAHIQHMQKALTHMNIQLHHVVADITGATGMRIVRAIVAGERSAAVLATMRDSRCKSSIETIQSALVGNYQPEHIFSLTQALAMYDAYQAQLELCDQQIAHSLLRLSQQNVPPCKPLPKPRHRTRQPNALNFEVRTMLYQLVGVDLTQIHGVGPYLALRLVAECGTDLSRWPTAHHFTSWLTLAPGCRVSGGKVLSAHTRKTKNRVTAHLRLAAVTVGRTNTALGAFYRRLSARIGKAKAVTATARKIAILFYNAMRFGMDYKDPGADHYEQKYRERVVKGLHRRAAEFGFTLQAVDGVS

SEQ ID NO: 371563 - protein, 324 aa, unidentified
MKLQKSNYDRYIGVDVAKAKLEIADSKQLMSKSIDNDAETIVETIVQSIDPTEATLVVCEGTGGYERRLVCAMHAAGVPIVVANPRQVRQFAIGNGILEKSDPIDASVLLVFGQDARNLTLATPKSDDQEKLGAMARRRKQLLDMINQESNRLEQTVDREIAELIRENLQTLKKQLKTVDKRLTKMINKQAESNPTVRLLQSVPGVGAVTISTLLSELPELGKLSRGEIAKLVGVAPMVNQSGRVDGQRSIFGGRGYVRRVLYMATLVATRHNDTIKRFYTRLVAKGKAKMVALVASMRKLLTILNDMVRNGECWRVADLSGSK

SEQ ID NO: 371564 - protein, 454 aa, unidentified
MARPKKRKYRKLDRSLPVMRPNAGGADMGAREIFVAVPPDRDTESVRSFPTFTQDLHALADWLQRCHVDTVAMESTGVYWIPLFQILEARGIEVHLVNAQHVHHVPGRKSDVLDCQWLQYLHSVGLLRASFRPEHAVCEIRSLMRHRENLVQMACVHVQHMHKALDQMNLQIHHVISDITGVTGLAIVDAIVAGKTNPQELAKLRDHRIKASIETVTKSLVGDYRAEHIFTLKQSLTAYRHYQQLIADCDQEVQQRVQAFDTQNTKDDGPTATATDESSSTTTSTSSFDLHSHLERIFGTDLTLIPGFECLRIQTIFSELGADLSKFPADDSFCSWLNLCPKDGTSAGRRIHSPKIQTKNRVANAFRLAAQSLHNNKSYLGDYYRSQRARHGALKAIKNAAHKLARIFYHLVTTRQAYDETVFAKLETRNHKRRLNKLQSLARQMGYSLVEVPA

SEQ ID NO: 371565 - protein, 347 aa, unidentified
MTIVEARPGITGGVDTHLDTHVVAALDPLGRLVGTESFPADAAGFKALLAWLEQFGQVSRIGIEGTGSYGVGLARFLRRRGLEVVEVNRPNRQARRNHGKSDTLDAVEAARAAISGRASGAGKTKEGPVEAIRVLMVAKRSARHARVKAITQMRHLGFTAPDQLHCRLKGLTVTALVGEAAKLRPTRSADPLTAATKASLSSLAHRVQSLDAEVAELEEKIESLLIATAPDLLALFGVGPDTAATLLVAAGDNPERLHSEAAWAHMCGVSPVPADSGRSSGHLRHHKGGDRQANSALWRIVMVRIAHDPETRAYFERRVKEGRTKRDVIRILKRYVAREVYRHLPRG

SEQ ID NO: 371566 - protein, 311 aa, unidentified
MKKFYIGIDVSKSTLEVDLLDGSTRTFANDKAGHRLLARALSALGGKGAVAVYEPSGGYERAMALSLSCSGVALCMASSSRVRQFARSQGIAAKTDALDAQVITRFAQASRLEPKALSGSALSAVRELLRRRESLVEMVKAETCRGSQQAQRVCLSQGKRMVALLKRQIAELEKEIRRIVAEDADLANKVGRLESVKGIGWLTAATALAELPDLGTMGPRQAAAMAGLAPFARDSGKSFGKRHVSGGNFHLRKALYMPAQCAKTHNAHLRAFYLRLRENGKPFKVAITAVMRKMIVLMNRLLADPNFQPSL

SEQ ID NO: 371567 - protein, 355 aa, unidentified
MDSLRYIGLDLHRDTISAAVLDSDGTLMLQSVLATRAAAVTDFLSGIRGTLHVTFEECCHSAWLYDLLSSRVAKLVVCNPRKNALLKFGSKSDAIDARKLAELLRAGMLAPVYHGENSVLEIHHLARCYGMLTDDTTRIKSRLKAVFRSQAIACTGKRLYGNKHRDNYLKELGDGGQRRRADYLYQELDALQKLRRQARHELATACRKHPAAKWLQSVPFLGPLRTAILLGRVKTPFRFRTKRQFWAYCGLAIETRDSGEYHLIEGQIERKKKPGLVRGLNQNHNHDLKDLFKGAATTASACEGIFREFYLGLLHKGMQPEMARLTLARKIAAITLKIWKKGEMFNPEYLMPQAA

SEQ ID NO: 371568 - protein, 420 aa, unidentified
MTAINPTVSTLFVAIDVSKHRHEVLIAVPGKTRRRRLTICNTQDDFNRLIAILASFGLPVRVGFEATGNYHRPLAHHLGQAGFELKLVSSVGLARTREALHNSWDKNDPKDAQVILHMLEIGAVQFFHDPLVSGIADIQELSKTHEIVSRSKTELWHRILTHYLPLYFPEAERFHRNSRTDWFLAFLEKYPTPHMISSMDREAFVADAWQVVGRKVSKERLLSDIYATAVSSVGLPVHADSDAVRMFRLVLAEGRSLVRQRNEIEARAVELLSEHPDYQLLTTIPGIGPINAMTILAEAGDLRRFRHHRQFLKFCGMDLATVQSGMFRGQSKISKYGNARLRRTLWMAGQTAVLKHTNSFRDKFERYISKDRNNAHLRRKAYTAIAAKMARTVYAVVKHGEPYRPFFEGAMPRRKDLSLS

SEQ ID NO: 371569 - protein, 437 aa, unidentified
MSEKKSVEIRVSVDVGYRRHSVAIGLPSGEVLEEFEIAHRPEGFAEFFSRIEKYQKVRDCEVAVAMEGFNGCARPLDAMVRRRGYRLYNINNLKLARFKEIFPGAAKSDRIDARKGLELFQLSDHLPLAKEVLQEVKGTPRENEVLKRLTRRRRRLVDERVRVISNLQTDLQAVCPGLLEITKNAGNQWFLNFLLSADTLPQLARLRPATLLKVPAVGRKYARLIEDWQKRAHFSEEVEWVSAMIQEDAQRCLDLDEKIKALRAKIKEVAKDSTIVKVLLSIPGFGTICTAELAGEIGTLERFSKEGSLALYIGMSTLDNSSGKYQGSKQPKHVNTRAKAAMMVALDRHRKVVPQSQRYYEKKRSEGKKHNQAIRALGRHLCRIIYKLLKEQREYEIRLEKGNTKGKVSPRSLIKTQIRKAKISTKGTNNKIYQQST

SEQ ID NO: 371570 - protein, 289 aa, unidentified
MEITTIGLDLAKNFFQVHGVDDAGVAVLRRTLRRSQVIPFFAKLSPCLVGMEACGTSHYWAREIARLGHEVKLMPPAYVKPYVKRGKTDANDAEAICEAVSRPTMRFVAVKSPEQQAALSMHRARDLMVQRTQMINMIRGLSSEFGVEAPRGLHQALALAHRLIDGEPMPIPALAIEVLASLSKQLLACHDRILDFERAINKWHRSNDVSRRLASIPGIGPIGASALAASVTDPHQFKSGRQFAAWLGLTPLQNSSGGKERLGRISKMGDQYLRKLLIIGMTALILAGR

SEQ ID NO: 371571 - protein, 444 aa, unidentified
MEVVNERCCGLDVHKKTVVACLIVPDEKGRRHKEIQTFGTTTRELLALRDWLVLAECSHVAMEATGVYWKPIYNLLEGAVELLVVNARHIKAVPGRKTDVRDAEWIADLLQHGLLTSSFIPSAAQRELRELTRYRTSLVQERARAVNRLQKTLEDTNLKLGDVASDIMGKSARAMLEALLSGQTDPARLADLAKGRLKAKRRQLEEALVGVLKPHHRFMLTEHLALIETLEEAISRASQEIERRMGPPDPTPQQPEDEAKEGPEPDDQAQESPEQAPLAWDEAVRLLDSIPGINPRAAQAILAEIGTDMSRFKSARQLASWAGMCPGNHESAGKRLSGKTRKGSPWLRQQLAEAAHAASRTKNTYLSALYRRLASRRGAKVALIAVGHAILVIIYHMLSERTLYHDLGGNYFDERDRQATGKRLVRRLEKLGYHVELQTASQVA

SEQ ID NO: 371572 - protein, 345 aa, unidentified
MNYCGIDVAMKSSYIYITDGDGRIKTRGELPTTAEDFRRALKRFVPGGLKVAVEAGPQTAWIHDLLVEIGAEVNVVNPNKVRLIAESRRKTDKIDAKVLCDLLRLDALPHPVHVPDKETRSLRGLLVARRQLVSARTKVCNVVRGMLRQEGIRLPSRFLTSLAAWQRLLEVEFTHSHLRPIVEAYAETFKTLTRSLQALDRELAQREKSDDRAARLQTMPKVGRIASLTFLAAVDDVNRFSSSRKLVGYSGLAPTVRSSGERTEYGSISREGRRELRAVWVQIAQLVAMDSGRDTAPLRKWFAKVAFHRGKKTAIVALARKLLTIAYQLLKQQTVYDAKKLRRAA

SEQ ID NO: 371573 - protein, 346 aa, unidentified
MKIIGCDFHPSFQQIAVLDVGTKQRVRRKLDHASGEAEQFYRSLQGERVKVGMEACGNTYWFERLLEELGHELLIGHAAKIRAGVVRKQKTDRRDADHLLELLEMERFPAIWVPSAGERDLRQLLWHRHKLVQMRTGIKNQLQHVAMNQGLQKKRQLWSKQGQQWLKQLVLPPWTERRREDLLLLLQGLEPAIAELSQAVEAEAEQDERVRLLMTHPGVGPITGLAFVLVIGDVKRFSRSRELASYLGLIPSEDSSGTRRRLGAISKQGNTLVRTLLVEAGQSAARLDPELRRAYQRLCHKKQHTGIGKVMVARKLAVRLYWMLKTQQPYAPARMQDSPSHPVSAV

SEQ ID NO: 371574 - protein, 391 aa, unidentified
MYSDGSKHSSFSVPNNRNGAKTIVDRVTSVLLSQDIPQVVIGMEATSVYGDNLMRFLRESGSLGQFERSLHMLNPKQVKKFRDAYSDLPKNDHVDSYVIADHLRFGRINKEVYMDDYKYQALKMYTRARHQLVQELTREKQRLLNNIFISFSGLAQEKIFSDKFGATSMALIEEFSSLDELAYMSTDELADFIRKEGKNHFENPEEIAEAVQRAAKNSYRPPQVIADAAKQMLAISMTTIRLLQKQIKEYDKAIEKMLEAFPQTLTSIKGIGNIYAAGIIAEIGDINRFPSQASLAKYAGLVWTQHQSSDFEAEDKRMIQGGNHHLKYYLCEAANALRRCDPEFKRFYALKYKEANKHNHKRALALTARKLVRLVYTLLKTNRLYIPPEEY

SEQ ID NO: 371575 - protein, 410 aa, unidentified
MSSEEKVFLRYVGLDAHKYYVVIGGVNAKLEVVLPPRRIQLSELEDWLRAHLKLTDKVVIEASTNTWTIYDQVARYVGEVVVAHPPHVKLIGGAVVKTDKHDVRRLAKLLAVGMIPEVWVPPLAVRELREIVSHRLRLVRGRTQTTNRLHSMLQRHNLAAPAGDPFAAKNRLWWERLAISATEKLRVGQDLATLDHLNQQIKEVEQELCRLSTVSPWTEQVPFLVQLPGIGIITAMVILAAIGDIFRFERAQHLTGYAGLGTYVHDSGETHRHGRISKRGRADLRQAMIEAAWVAVRTHPRWKAEYERLSKRMPANKAIVAIARKLLVVVWHVLHDQEADHQAQPNKVAAKLRVWSGRLSPDQRAGLSHRHFVRWQLVHLGLGEALTHFRFGGKPCSLPSADELHTLKRT

SEQ ID NO: 371576 - protein, 341 aa, unidentified
MEQATTIGLDIAKHVFHLHGADAAGHVLFRKRITRAKLLGFLAAQTRCVVAMEACAGAHYWAREIAKLGHHVRLIAPVYVKPFVKRQKNDAADAEAVCEAAQRPSMRFVPVKTEEQQANGIVFRARDLLVRQRTQCVNALRGHLMEYGYVFPKGITHLETLVALVEDPHSSLPDGVRVILKLLVDTFTALEAQITALDAEINRRSKSDPTARRLMTIPGVGPIASTAITALVPAAEGFSAGRDFAAWLGLTPLQKSTGGKQKLGAVSKRGERTIRRLLIIGASAVVQQASRRGAPKGSWLAQMLARKPKMLVTVALANKMARIVWALLVKGGTYKTPASAA

SEQ ID NO: 371577 - protein, 328 aa, unidentified
MHDGTNLPVPERTEIRGDCATLFVSLELSRSTWVATSLAPGSKKMSKHTLAGGNGRELLDLLARLKARAEQRIAAPVKVVAIHEVGLDGFWIHRLLDANGVESHVVDPASIAVPRRHRRAKTDAIDGETLLRTLMAWQRGEPRVCAMTVPPSPSEEDRRRISRERAALLRERIRHTNRIRGLLFGQGIVNYNPLNKNRRVCLEELRTGDGRSVPAHLKAEILREIDRLELVLRQISQVEAERDEMLRPAEANSPAALLMRLKGIGAEFATVLYLEGLFRHFENRRQLAAYAGLAPSPWKSGSIDHNRVSRRQAIHVCARQWSSLPGCG

SEQ ID NO: 371578 - protein, 416 aa, unidentified
MSLTVLYPRCAGLDVHKKTVVACLLLTAPSGKVSREVRTFATTTASLVALSDWLASQEVTHVAMESTGIYWRPVFNLLEGHCEVILVNAQHMKALPGHKTDIKDSEWIADLLRHGLLKASFIPPKPIRDLRDLLRSRKTLVQERAQAINRVQKVLETANIKLSSVASDVLGKSGRDMLEAMLSGVSDAEALAQLARKRLRAKLPALREALDGRVEATHRILLRHLLDLIDFLQGEVDTLSDEIEQRLAPYEEQLGRLMQIPGIGRTAAATLVAELGTDMSRFPSAKHLASWAGVAPGNKQSGGKRLRAATTKGNTHVRAVLAEVVWVISHTKDNYLSAQYHRLARRIGETRAIVAVSHSVLVIIYHMLRANQDYHDLGPHFFQTLDTTRQRDSAVRRLQALGYKVTLEEKTEEESA

SEQ ID NO: 371579 - protein, 397 aa, unidentified
MIAVGIDVSKGKSTVAILDGDGSIRAHPYEMNHSRAELDALIKYIKAVDDQPIILMEPTSHYHYPLLKAFIDAGLSPSLVNPYLMKKYGDAELRKTKTDKKDALRIARYALEKWYSLVPYSPLDQKYEDLHFLSSQYSQRISLVTKSKVQLINLLDESMPGITKILALKSRNPEKCMLLQFVKRFHSFDYINSIGKTRFMNRYIALAHKVGERNAETKGLAIYELSKASITTRSNSEYMAVALDQCVDILSESQRAADEIMLQMQNIAETIPEYRILRSMNGVGERLGPIILAEIGDIRRFHSGKALNAYAGNDAPPYQSGQFESRNRHISKRGNPALRKACFEVMQALKLNKPQDDPVYLFMMKKEQEGKPYNVAKMAGVNKFLRIYYARAMELYR

SEQ ID NO: 371580 - protein, 324 aa, unidentified
MSEAAAAITVGIDVGKTELVLAVVPSGETWTTTTDARALRALARTLAARAPRLIVLEATGGYEVPVLGALAERELPVSLVAPGRVRAFAQATGQLAKTDRLDAHLLARYGAQLRPAPTPLPDAVQRALMLLVARRRQIDDMLVAERQRLDQQSFFPDSPVRASIEATIRFLEQGRAALDRELHAHLAAHPRFAEPLALLRSVPGVGPVTAATLLAFLPELGTLSRQQVAALVGVAPMAAESGRWRGQRRIRGGRAVVRHVLYMAAVTATRWHPVLGPYYHALRARGKPAKVALVACMRRLLVLLNSLLKSRTPWRAPQPQAATA

SEQ ID NO: 371581 - protein, 364 aa, unidentified
MKEKKTETRYVGIDLGKRTYEMAVVDEKGKVKMSSGKTYVAARQSMYKKLRPYDKVALEAGAMAFMMAKEIEATVGCKVFVLNPGRLAIIYKSMKKTDKEDALKIAHMLQDFQEERLPTVPVPSDREMNRRKLVAGSKRAHQYRNRSINQLHGLFLLQGITTIVKEDLATCEKRRESIKILSGLELEEAEYLLKCLELYEERIKSLDKKIEDESAGDEQIERLKSIPGVGPKTSFAFVSHVAAERFENASQVSNYLGLVPRVYMSGDTTRYGRITKRGNGYLRALLVQSSWALVRSRNGGKLKQRYEYMTKEKSIGKKKAIVAIARRLAELMYTLMKYEAKYLCLPLVIEKKEIYFKNQLTKCA

SEQ ID NO: 371582 - protein, 357 aa, unidentified
MAQVKKLDFTGTTIFCGVDVHKKNWRVNIQDSEFELEDFSQNADAVLLHKHVNRKYPGARVKVCYEAGFSGFSAQRWLSNQGIDCRIVNAADVATTDKEKRQKSDKIDARKLCEHLQTKKMKGIYIPPLHWEHGRSLIRARAKIVSNQTRCKNRIWQLFHFSGLALPKDYEAGQYWSRSFVKELQATDCGTEELKITLGLYIKDYLQTRQLLLEATRAVRKLCKQSEYQTGIALLRSIPGIGEINAAVMLFELQDVSRFKRFDNLCSYVGLVPDTSDSGETKKTKGITSRHNHYLRTALVESSWSVVRKDPALLMKYKAYCRTMEKNKAIIRIAKHLLSRINYVLKNKKEYVTGVVA

SEQ ID NO: 371583 - protein, 312 aa, unidentified
MTHIICGVDVSATTLDARIGREGEHRRFTVSAEGLDQLVAFCRDHQVSLVVMEATGGYERQPAGQLWAANLPTAIVNPRAVRDFAKGMGVLEKTDRIDCGIIAWYAETKRIKPMPPASATQARLNALVRRHRQLTDQRVQETNRRCLVTEPDVVASYEPVLAAIAGQMRQLEALIAQAIGDDPLWARLDAAFRTIKGVADRTVARLMAEMPEIGTLSNKAVGKLAGLAPIARDSGQHSGKRRVRGGREAVRSILFVIAEVVRRYDPRLAAFHQRLVAAGKPKMLIRVAVARKLLVQLNAKARDVRRESAVPT

SEQ ID NO: 371584 - protein, 424 aa, unidentified
MTASESIPRYDLLVSLDRSDRTAALALFDLTTGAFLTESCLDLAPEALDAWWRALCAAHPQARIAVAFEQPAPNLLAFFAPRQPAAIYALNPSATWAYRQSLTVSRARNDQSDARDQALFVKNHLAELKPWAPPPRPIAQLERLTLSRRKQVNARTALTNQLQAALKRYFPQALALLHEDLWRPMNLEFLRQWPSAQKLQTVRRPRLRAFYQKHGSRSEARWIERRALVAQLVPLAEAGPADELEVSALVDQIEVLNASILRHDQVSAELFQAEGAAAERIAALPGAGPTLAPRIYVALARHAPNCESAEALAAAVGVAPVTDQSGKMCKVYRRLRCDHHTRQSFVEWAKESWKHSVWAEAFVRQRREKGQGFHAIIRALAYKWIRILWKCWHDGVAYHEEKYLAGLRQKGSPLAPKLITPQVA

SEQ ID NO: 371585 - protein, 352 aa, unidentified
MITIGVDVHKRQCTVAIQQEGGELKCFGPMENTREGWRELLEQLPPEAEIALEVSTSGYFAMSVLEEAGGRDRAHWVDTAGIDSLRKQKYDRLDAKRLARKLSVADQDPLPEAWFPPPAMRALRLRARQRCWLAVLRAQVKNRLQSLLQMHGLRPAVTDVFGKAGRAWRATQVLPEATRESVEQLLRVHDFLGQELEKAEGYLHAVDRQFPELARLRTLPGIGEILAPVIWREMGTLERFRSADAWVNYPGLVPSLYESGEVSIRGGITHPGSAWVRWALVQAANGVIQGVNPFARRYRRLRRRKPANVAKTAIARSRARCVYGVLKSGGNYQEVGWGRRPRGASEAWSRQA

SEQ ID NO: 371586 - protein, 351 aa, unidentified
MIIIGCDFHTRYQQIAMANDETGELLLERRLDHESGEAHAFYRGLQGPVRVGIEATGPIHWFERLLAELGHELWIGDSAKIRASEVRKQKTDERDARLILDLLLAKRFPKIWVPTPAERDLRQLLWHRHKLVCLRTMLGNQLHFLAMSQGLCRKRKLFTKKGRTELTGLALGPWTRRRREELLKLLDQLDPAIAELDRAVLEEAQRRDDAVLLMTHPGIGPVTSLAFVLAIGPITRFPRSKKIASYLGLNPSEESSGQRRRTGAISKQGNTMVRWLLIEAVYPAVRKDLALRQDYQRLKFRRGHAVAKVAIARKLAVRMYWMLRSGAAYAQLVRRQGSPAATLVDANPSLG

SEQ ID NO: 371587 - protein, 370 aa, unidentified
MKQRLLYVGLDVHKKTTDVAIASGRSNGKVRSYGKILSTLDALNKLIKKLQDGDKELRFVYEAGPCGYQIYRYLDARGIHCSVVAPSMIPRRSGDRIKTDRRDAINLARLFRAGELTSIYVPTPEDEAIRDLIRCRDDMKRFERKARQRLLSFLLRHGYQYSGKRNWTKGFYTWLATVRFSHPAQQVTLQEYIDVTNECSERIKRITQQIQVHVEEWSRAPFVKAYQALRGVSIIVSTTVAAEIGDMRRFQNPKQLMAYLGLIPSEHSSGKTVRRGPITKTGNSHVRRVLIEAAWTYKMQARVSNILLNRQKGLPKSVCDISWKAQTRLCARYRRLYARGKTKQTVVTAIARELSAFIWAIDKEIQLVVL

SEQ ID NO: 371588 - protein, 423 aa, unidentified
MDVLYERVAGLDVHKDTVVACVRIMVDGKTTRECRTFATTTEQLVALRAWLEECRCTHVAMEATGVYWMPVFRLLDADKFALIVANAAHIKNVPGRKTDMNDAMWIADLLACGLIQASFVPNEEVQELRALTRTRKQLVREQTRHVQRIEKTLAEANIKLSSVISDIMGASGRRMIQAMIDGVRQPNKLAELAGKQIKASPKELYDALHGRLTDHHRFLLALHLKQWDSIDETIRKLDGELDQRIGRMETAAEDRKIPFRALIELLTTVPGVSAVAAPAILSEIGPDMSRFPTAGHLVAWAGLCPGHNESAGKRKSSRLRKGAPWLKTMLVQCAWAAKRTKDSYYRAQFFRLQAKRGPQKAICAVAASILTAIYHILKHGTEHHDLGSAHFDRRPVEVKASRLVAHLKKLGFNVQLQPIAEAA

SEQ ID NO: 371589 - protein, 345 aa, unidentified
MKYFAGLDVSLEETAICVVDESGRIVKEGRAASEPRALYEALRKINLPLERIGLEACSLTAWLYDGIRAEGLPAICIETRQANAAMKTMPNKTDRNDARALAQIMRTGWYRQVHVKSRQCRFWRSLLVARRTVLNEMRTIENVVRAILREVGIKLGTPSRAAFADRVRELIGADTVIMALVEPLLVILATMLREFGRLTKQVLIIARQEQVCRRLMSVPGVGPITALAFRATIDRPDRFRRSRDVGAHLGLTPARYQSGETDIQGKVSRCGDELARTALYEAAHSLLVLSKKWSSLRAWGMNVAKRRGMARARVAVARKLAVILHRMWSDATEFRFGKAPGRVSA

SEQ ID NO: 371590 - protein, 362 aa, unidentified
MLKSTTIIAFDQHAATTMAAVLLPAHRTPALHPLKSDPPTILRFVARLQRQGAVTCCYEAGPCGFELQRALTAKGISCDVIAPALIPRRPGDRIKTDRRDAGQLAVLYRAGALTAIHIPTEQEEAARDLLRCREDIRADLLRARHRLSKFLLRHGRRFTATKKAWSKRHDAWLRAHTWPLPALDQTHRAYLRAVDEVLARLRDVETDLQALLALEPLRPRVQRLRCFRGIDDLTALTIAAELGDPRRFATAPSTMAFVGLVPSEHSSGPKRAQGGITKTGNAHLRRVLVESAWHYRHHPFVSATLRARQRGAPAQVIARAWTAQQRLHRRYQRLAARGKPKQHVVTAVARELTGFVWAALTQ

SEQ ID NO: 371591 - protein, 424 aa, unidentified
MKNTTKEPKKQTPPQEGRPEGCETYLAPPPPSKGRIIGLDCHPDTFTAAVFKGTTPHDAIKLATRPDVSLQRLLDWAAREFTKDDLFLMEAGSNSFEIHRRLLALGLRAVVMESCHVGKHAKTYADNDKMAAARIALVYLQGNAPCVWIPDDLTRERRELLHIYQKAVADHTAASNALKGYLNQYAVRLGSRQQPEAAKTETWLMARREWTPTQRFILSDLLGHLRVQAARRKELLRLIGQQICTEPLMLRCMRLLGIGQINAFALLAIIGDVRRFERPEKLVAYLGLNPGQRESGRGKHIKLGIGKRGRGDLRHLLVQGAHAVLRMGRSTPLGQWGWKLFARKGNRNIAVAAVARKLVVQVWHLLSGNPPEALEPSKSFDLKLHKLAVTLGKTTRAKLSLPESLAGCVAHLRNQLPNATVNTA

SEQ ID NO: 371592 - protein, 457 aa, unidentified
MPEKEKRTRARLSSGLSTINEHAAGLDVGSTFHVVAVRGDQDDEPVRTFRSFSGDLHQMADWLTSVGIKTIAMESTGVYWIPVFEILEARGFEVLLVNARAVKNVPGRKTDVNDAQWLQQLHQYGLLRGSFHPRADVAQLRTYLRLRERMVEYAAAHVQHMQKALMQMNVQLHHVVTDITGATGLRIVRAIVAGTHAPEQLATYRDVRCAASEETIREALTGNYRPEHVFALKQALELWDFHQTKIAECDIEIEAVLKSLNEAHADPEKPIPAVRHAKARNEPKFDVRSALYTLLGADLSQIHGLGPYTVLRLVAECGDDMKKWPTAKHFTSWLTLAPGNKISGGRLLSSRTRRSSNRAAALLRIAAVNIGKTQTALGAFYRRLSARTGKAKAVTATARKLAVLFYRALRFGLAYTDPGAGYYEERYKRRVIENLQRRARGLGLTLVENPEETGGVS

SEQ ID NO: 371593 - protein, 425 aa, unidentified
MKITRKAEKINLNQIVDVSVDVHKDILNLLFEVGGKEYTDECRNRTTVIEKRLLRYHDIACESGKKGLRIICEPTGGYQNKLLRTARRLGFFTCYVNTESVAKFRMIESNDNSKTDSKDPRVISSLGRLNKTLQFRMLSEEYLLLRKLGIIYDDIEVSITRQRCKLDKAMGELFCDYSFKKDFLYSKSGRALVKKYGCNPYRIIQHGFTKFSTTMKKAVPRIRKTTLTRLWSDAQSSVLNEMPTSYVDIIEKRLGQLMQDYQQELERKEEQVAQMEAILARLRDKDPHVPPPTPGVISAKNLARLLGETGPLRDFINSRQLLRYGGLNIRMRQSGKYQGHNKISKKGRRLLRKILNQIALPLVRRRELYGEFYHHKKEKDKMVGNKAMVVVARHFLRKFYGWYTSGEAFDRQRFFTCKTEYLKAA

SEQ ID NO: 371594 - protein, 420 aa, unidentified
MHVLTDTPFTAYIGIDWADSKHDACLQAAGSEQREFTCFSHQVDRIEAWAHSMHQRFGGPIAVVLELSKGPIVYALQKYEFFVLFPVNPSMLAKYREAFIPSRAKDDPTDAELALDLLMRHPERFKELQPQSVEMRTLISLVEQRRRLVSDKIRFTNRLRNTLKQYYPQTLEWFDHIDTPIFCDFISRWPTLIQVKRARRSTLERFFHAHNMRFAHVLEARLRSIKEATALTLDEAVVTPHRLQALVLIDQLRVTLQAIQRFDDEIAALASTHADYPLFSALPGAGPHLAPRLLVAFGEQRERFRNAAELQQYAGIAPVTERSGKKHWVHWRWQCPTFLRQTFVEWAAQTINKSFWAGAFYSQQRAKGCSHQAALRALAFKWIRILYRCWATRTPYNEAEYLRALERRESPLLEQFATPK

SEQ ID NO: 371595 - protein, 412 aa, unidentified
MQVLYSRCAGLDVHSRSVSVCVSVCDSGAKKRQLVRVFPTFTRDLLEMADWLKREGVTHVAMEATGVYWRPVWAVLEDQFEQMLVNPQHMKAVPGRKTDAKDCEWIADLLQHGLLKGSFVPPTPIQDLRDLTRYRAQLRQDQGRAANRIQKLLEQANVKLSSVASNALGVSGRRILKKIIEGQADPGQLAQLARGALKNKIPALMLALEGRVREHHRFLLGKFLREWEWYEEEIADMDQRIEEQIQPFAFGVALWQTLPGVSEVTAWSLVAEIGVKMEQFPSAHHLASWAALCPGNHESAGRKKSGRMRDGNKWLRRSLCQAAWCSTRKKDCYLASQFRRLSTRRGMKRAIIAVAHSMLIIGYHMLKTKQAYQELGGNYLDRIQKESLQRYHVKKLQNLGFTVSIEPSVVVP

SEQ ID NO: 371596 - protein, 348 aa, unidentified
MNATIVAVDLAKNIFEIAAADADWRIGQRSRLPRAKFFGFFVQLKPCQVVMEACGSAHYWARRIGALGHTVRLLPAHYVKPYVRRNKTDRADAAALLEAARCAGIHEVPVKTVEAQKIQSLHRLRSQWMSTRQRYVNTLRGILREFGFAIPLGVNVAKDRIGTALADPESEVPQALRATLADMLQEVRLLEEKILAVEHQLNALTRADGRVQQLRQIPGIGALTSTALRAIVGDIQRFPSGRHFASWLGLTPSERSSAERRRLGKISKQGDVYLRTLLVHGARSVLLAAHRAVRAGHSLDRLRQWVLDCERQRGHNKATVALANRLARIVWATWKHERAYDAHWIAAA

SEQ ID NO: 371597 - protein, 415 aa, unidentified
MKFNTQNAKIEAITEKTLVLGIDVGSEMHYARAFDYRGIEYTKKPFKFSNTEAGFMSLQAWILDLKEKHEKDKVVPGMEPTGHYWFNLGKFLQDNEMKPVLVNPHHVKKSKELDDNNPTKNDCKDPKVIAGLVREGRYMIPYLPDGVYADLRTASNIRFQLQAELTRIQNRISRWFNIYFPEYKKVYGKPDAKSGILILKTAPLPEDILTLGIDGVNQIWRDAKMRAVGKARANTLIEAAEHSVGSKEGTVSARMEIRMLLEDYESRNIRLQEVMALIEELVAQIPMAEKLLEIKGVGIRTVSGFLAEVGDISRFNNPKELQKLAGLALVENSSGKHKGETTISRRGRKRLRYLLFEVAMSLVAKNPEFRELHVYYTTRRLNPLKKMQSLMAVAAKLLRIFYVMLTKSVDYDPKM

SEQ ID NO: 371598 - protein, 322 aa, unidentified
MSVTVLGIDIAKQKFDVALLKDGKTKHKACKNSTEGFEILMIWLAKQEVKMVHACMEATGNYGEDLAIYLHEAGHKVSIVNPARIKGFAQSELIRTKTDKIDAGLIARFCLAMKPDAWIPPAPEIRSLRALVRRVDSLIDMRSQEKNRIGTAHESVIVLIKAHIAYLDKEIEKIRKQIADLIKQNPQLKQRKDLLDSIPGLGKATIPHLLAELDNLDKFTHVREMVAFIGLAPRERISGSSIKGKPRLCKIGHARLRKALYMPALVSIQCNPVMIAFYNRLKERGKNGKVIVCAIMRKLVHVIFGVLKSGKMYDPNYKPTLA

SEQ ID NO: 371599 - protein, 353 aa, unidentified
MRIVVALDVHRKQITYKALDRETGELRRGRIAPATRAELRAWLSQFADGQAEFAVEGTTGWRFVVEEIERAGHRAHLADPAETAARRGRKRRAKTDDADCDLQLRLLLAGELPESWIPPTQILELRTLVRLRRTLIDQRTAWQQRIHAQLFHQGVRGGLRLRTQAGRDALQRAELSPAGRELVALGLRMLDAFDRELAPLDRELRTFARRQPGCRALIEQLYGVGPVSATAILAELGDCRRFSSSDDAVRHAGLDITVYQSDEKRAPGHLSHEGPAVLRWALYEAAVSAARASSPDRGYYLQVAERIDHNRACLSVARKLCRRAYHILRELGEDALAPIEQPVAQTETITAAA

SEQ ID NO: 371600 - protein, 348 aa, unidentified
MIIIGVDFHPEFQQIASMDTATGEFQEKRLAHPAEAEKFYRSLVGQKVRMGMEASGHARWFERLVAELQFELRIGDAAEIRSKRVRKQKTDRQDAQLILRLLLEDRFPQIWVPSWENRDLRQLLWHRHRMVQARTRIMNQLQAVALNEGLRCKKKLWRERGRQQLESFRLAPWATRRRRDLLELLDRLTPTIAELSHAIEQEVEKCPAAQRLRTHPGVGSLTALAFVLIIGEVNRFRCGKQVASYLGLVPLEESSGNRRRLGHITKQGSSMMRFLLVEAAQVTVRSLPEWRSKYLHLVLRRGRKIAKVAMARRLAVHLFWMMRKEWNYQQLKKFGSHAGEPGNRHGVQ

SEQ ID NO: 371601 - protein, 339 aa, unidentified
MGLYTAFDLHSNNAYLGIIDETGKRLFKKKLPNKAEMIKTTLLPFKAAIEGIVVESTYNWYWLVDMLMEEGYQVHLANPAKIQQYSGLKYSDDKHDAFWLADMLRLGILPKGYIYPKESRPIRDLLRKRSHLVKLRTSLIISLQNIIARNVGSHLKASDIKVLTTDRVKPLLEYNEDLALAGRVSKQAIDSLSQQIKAIEKTIEGRIHLRSPYDHLLSIPGVGPIIGSTIMLETGSIARLPKVGNYCSYCRKVPTGRFSNDKRKGSGNPKNGNHYLACAYSEAAEHAKRYDEESRKFFNRKLKSTNAPIAHNALAHKFSRAAYYIMRDGVDFMPEKAFA

SEQ ID NO: 371602 - protein, 341 aa, unidentified
MKIKAFVGLDVHRKLVVATAVNPLGKRIRQSTFGPSPKELTRFLSRLPKPTKVVLEACSVWERFYEAAVSTGAEVVVSHPLKTRLIAEASIKTDKVDSAALANLLRLDSIPLTFVPPPKIRALRRLYLERDFYTRTKSSIMRHAYARLAERGVDYSKGALQHRPQREKLRKHGIPEFDRAIDSMDDLERKCKELDAEIHAAFLKSEDAQLLKTIPGIGELMAVGIAGFLCPIDRFPNVDKLTSYAGLCPTTHQSADTLYHGKLKKDVNRNLRALLVAASWTHRVHAPKGEVAKLVRRVIRRKGKMRGTVVGAHKLLRIIYAILKQRRPYLPSAPEGYASGQ

SEQ ID NO: 371603 - protein, 423 aa, unidentified
MEVLHECVAGLDVHKDSVVGCVRTVSGDKTTREHRTFDATTDRLLALLEWLTSCRCELVAMEATGVYWMPVWRILSDGAFKLIVVNAAHIKAVPGRKTDMKDSTWLADLAAFGLLKASFVPDEEQHELRALMRTRKQLVREQTRHVQRIQKTLTEANIKLDSVISDIMGRNGRRMIEAMITGVRDPRKLAALADQRLKATPKQLYDALHGRLTDHHRFLLQLHLGQWDTLDATIKGVDREVATRVFRMDTEVTAAKANFSDLIDQLVTIPGVSRLSALTILSEIGTDMSRFATAGHLVAWAGMCPGQNESAGKRKRTRLRKGAPWLKTMLVQCAWAAKRKKDSYYKAQFFRLQSRRGPQKAICAVAASLLTAIYHMLKDGTIHQDLGSGYFDQRPPEIKVKRLVNQIAKLGFEVTLQPIAKAA

SEQ ID NO: 371604 - protein, 344 aa, unidentified
MLHAGLDLSRRRLDVCLVDDAGELVAQIAAAPDADGLRHLVARVSAGRVRAVIESMNGARFVHDTLEELGWEVLVADAQKVKGLAPLACKTDKIDARVLAVLSQRDLVPAIWLPDPSIRRERELARFRLHLVRHRTTLKNRIHATLITFGHPCPVSDLFGHAGRELLDRLQIPDPWRRTVDVSLGLIDDLELQIAHLTCELKRQGADHRYIPLLVTAPGFGWINAYTVASEIGDIERFPSPAKLVGYTGLCPRVIQSGNTDRRGPISKHGPRYLRWGLFEAAMNACKHPIYAERYQHTKRRLGRQRGPKVAQIELSRKLTEAIWHMLTRNQPFAPAGAGFRLAA

SEQ ID NO: 371605 - protein, 379 aa, unidentified
MGHHSEAFVGIDTSKLRNAVAIAEAGRRGELRYLGEVDTRETATRKLVAGLAAKYRKLTFCYEAGPTGYGLQRLIESLGHTCIVAAPSLIPKKAGERVKTNRRVGVGLARLLRAGELTAVWVPDERHEAMRELTRARDASRQDLTRKRQQVSSMLLRLGRHYPGIRTWGARHRAWLANQKFVHPEQRLAIEELLLAERQAGERIARLEQAIRSAVADWSLAPVVPALQAMRGIDLVSAVTILAEIGDLSRFASPRQLMAYLGLVPSERSTGESVKRGSITKAGNGRARRVLVEAAWAYRHPPRVGYEKQAQVAAAPVRAREIAWKAQVRLCKRFRTLSRKGKKSTVVATAIARELAAFIWAINREVSGQIKTAETSRRA

SEQ ID NO: 371606 - protein, 304 aa, unidentified
MNGIGIDVSKRQLDVGTTDGEILQVSNSASGFAELDLWLRKHPASQIVLEATGGYEQSVLNFLHNAGHPVVRANALRARRLAQGLGQLAKTDRLDAYALAQMAALVKLPTYQPLEPWQQKMREFVRARRQTMEALAVARQQQEMVTDRELRRLLQANISRLQGIVGRLGKQIAEQVAQQPQLAVLKSMKGVGPGLQAVLASYLPELGRISGKRIASLVGVAPMSHDSGTMRGKRSIHGGRAEIRQVLYMASMSAMRHEPRLRDFYQSLRARGKEGKVAIVAVMRKMLVILNARVRDAESGLVPA

SEQ ID NO: 371607 - protein, 345 aa, unidentified
MQIKSIGIDLGKTTFHLIALADRFQVVIRKKFSRSQLLEYTANLPSSLIGMEAGVGSHFLGRALREQGHEVRLIPAQFVRPFVKSNKNDYRDAEAIAEAVERENMRFVPIKTEDQLDLQALHRVRDRLVARRTSVINQMRAFLLERGISFRKGPASLRRQMPEILENADETLSPAMRRRLDFLWQEWRSLQVQIESLNTELEQIASNDPSCVRLQQIPGVGPLISTAVVSAIGNGAAFKKGREFAAWLGLVPRQWSTGGKAKLMGISKRGNPYLRKMFIHGARAAVLRVKREGSSLGKWMSGLETRTARNVVMVATANKLARISWAVLASGNDYQPLHRAALLSN

SEQ ID NO: 371608 - protein, 346 aa, unidentified
MSEEYDGPQVVGLDLHRRRSVMVRSSADGRVLETARFVNDAQVLAGQIAKAGMEPQVVLEATYGWYWAVDVLRAAGAQVHLAHPLGVKGFAYRRVKNDVRDAGDLADLLRMGRLPEAWIAPVPVRERRELVRHRQKLVQQASGVKAQVHAVLAKCGIAVPMDDLFGVSGMRLLERVALPVVFRDRVDSQLRVIDALETEVARFDTKIKAFMYAHPAYAVLEQIPGVGPVFAAVFIAEIGDISRFADAGRLCSWAGLTPRHRESDTTVHRGAITKQGSRLVRWAAVEAVQRAPKNSAMGRTYQRIVERRGTTAKSVAKVAAARKLLTLVYYGMRDGYIRCLAPRAAA

SEQ ID NO: 371609 - protein, 440 aa, unidentified
MEVINPNAAGIDIGSRSHFVAIGQGTEDVREFGVYNEDLKEIANWLKENEIETVAMESTGTYWQSLFDVLQAEGLSVILCNGKFTKNIKGKKSDVQDCQWIQKLHTMGLLSGSFLPDEATEQLRTYCRHRANLLDQAADTTRKMQKYLRLLNLRLDVVVNDITGLTGMKIIDSICKGEVNSKKLASLRNGNCKKSEQEIAKALETNGRKDYLFTLNHEYKMYLNLQSKIIECDTEIEKMLNLQINNDDNKKQHHIDKKVHKRINKNTPKNIDINLLSYQFFEGVDLLAIEGVSYSTVLTLMSEVGQGIHKFETAKQFASWLRLSPNNKISGGKVLSNKIPKGSNRLKIALRNAANAIGNLKNTALSNFFARISHRKGRVSAISATARKLAVIIWNMIVKGQPYIPLTEYQFVDQKRKKITAMKRLITKFEITTDDLNLQL

SEQ ID NO: 371610 - protein, 412 aa, unidentified
MQDILTCAMGLDIHRDVIVACLAKGELGTDPEIEIRSFSTLIPEMRKLRDWVLEAECRYVAMESTGIYWQPIYEMLEPCFDGQISILVVNARHMKNVPGRKTDMRDAQWIATLLRAGLLKGSFIPDKTFRELRHLTRYRKGIVRDITAQKNRIDKFLQSSGFRFTAFLSDAFGASGRNIIRHLMEYGNISREALDRCLKTQTRKRIDEILIALNGSLSEHQRGFLRMIFGHLEALEQHRHTVEDAITKEITKHEEALSLLCSIPGIDVTAAAAIIAEIGTDMSAFPDSQHICSWAGLSPGNNESAGKRKSAHINKGNPYLKSMLCEVGWVISGKRSLYLSGWYWRIKQRKGAKRATIALARKLLALIYTMLKTGSPYNEDCFEIRRKQSERKRASRMVNELQKLGYFVVAPG

SEQ ID NO: 371611 - protein, 388 aa, unidentified
MHVVAAQSEAAIAIRTDLCATFVSLELSRSTWLLTSLSPGAGEKMSKHSVSAGDTAGLFSRFVELQQKARTRTGRTFPIITIQEAGLDGFWIHRLLQGEGIESWVVDPASVLTSRRRRRAKTDKIDGETLVRTLLAYKRGEPRVCAMVKAPTPEEEDRRRICRERKTLTAERVRHVNRIKGLLFAQGVGDYEPLRRNRRGRLEELATGDGRPLPEHLKAQISRELDRLEVILAQLKAVGSERDAMLEPAKEGPPTPASLLVELKGIGPEFAAVLWSEGLFRSFNNRRQVAAYAGLAPTPWQSGSVAHEQGVSKAGNPRLRTTMIQLAWLWLRHQPGSALSIWFRERVQRNGGRGKKTAIVAMARKLLVALWKYAVHGILIDGTTAKAA

SEQ ID NO: 371612 - protein, 367 aa, unidentified
MENNNIVWVGMDTDAKKNHVALYRGWEKDPATEFEAGMDGKGIQKLIERLKREQGEVRCVYEAGPCGYELYRKLRKAGLHCDVIAPSLTPSKPSDRVKTNRRDAQNLARYYRSGDLTVIEVPDEKQQALRDLTRAREDVREDLTCRQHRLNRFLVRQGLHYQDGDRWTLKHWAWIRKIRCDDENAQMVLDESIRAVEQSQEQLKSFDAKLEENAQKPEYAKKVGRYATLRGVKTVTALTIVAEVGDMRRYETAPQFMASTGLVPSEHSTGDHERRGKITKAGNAHLRRVLVEAAWHYRHRANSGQTIKKRRKGQSAALVSIAERAEQRLNRRFRRMVDRYNKKPVIAAVAVARELAGFIWAIGRIEK

SEQ ID NO: 371613 - protein, 523 aa, unidentified
MATTRRRKQSRSRPRQVLQKPRGVIHPRVQRVGPEHFGIVSVDCAKARSKWMLCDFYGNILVPPTVVEHNRAALEAAVAQIRQALKTHALLDLLVAVERTGRYHRPVQRAFAAAGWEVRIVHPFATKQFRQPSNPDYKTDDTDLAAIHLAAVNGFALLETELDETWKTLQLLIRHRRDLVFKMSLVCCQVREHLDAAFPGFAACFDKLWESACAWHLVQHFAAPQDIAAAGLARLCRSLDDAGVRYQRRTIQRILEWAGAAAAPDLAAAQHRWIALALNNDRARKTQEILGLERQIAARLVHTPYLLLLSFPGINVVSAADYAGEMGPMANYANHRCITGRAGLRPCRYQSDQVDHANGSLVHNCNRKLRAAILGIADNLICCNHHFNILGHHWKAAGKDARDIRICVADRFCRISFHMVAGRQVFRHPGLQGRHYILDKLTAFHREHETPGADLLRDLQAAVAQLPRKEYQAEARPLHEELEKIQAGRRRGPQLLGNILPIVLARLGVGAVQSTASGEEDPH

SEQ ID NO: 371614 - protein, 402 aa, unidentified
MAQSPTRFFGLDIHKEYFVAVGVNAQREIVFGPQRVSNYQLEDWIERVLTREDAVVLEMTTNTYEFHDALSSRVHSVIAVHPPNVALVTNAQVKTDKKAALSLAQLHAAGLLTGVWIPPHEVRDLRSLIARREKMVRLSTIAKNRLHAMLHRHHLRLAEKPFAPEQRLWWESLPLSVTEKFLVRSDLDTLEFAQKQIKQVEEGLKKQSAEDERIPWLIQLPGVAMLTAITILAAIGDITRFPNAKNLVGYAGLGTRVHDSGMTHASGRITKAGRRDLRRAMVNAANHAVVHHVHWKQEFEQMEPHLGRSRAIVAIARKLLVAVWHVLTKQVVDRFADPRDVATSLLRYAYTIGRRNRLQGQSALSFTRDQLDLLDIGKDLQTIPWGSKTHQLPPSKLPAIKE

SEQ ID NO: 371615 - protein, 324 aa, unidentified
MQSEFNAKCWVGIDVSKDWIDVVVLVEENKVQQLRCDRSAEELAGLAQTLLSYRPQGIVLEATGGLEGAVIAALAGAGLRVMRMNPKRVRDFARAHGLLAKTDALDAYALALFGARMQPPMRAWPEVERQQLAAWVGRQQQLTVERASERTRLKQASEPALRKSVERVIAFLGKEIARLEKQLAAWVGASKIWTEQEALLRTAPGVGPKTALRLLAQLPELGQVNRRQIAALVGVAPFACDSGKWRGRRAIRGGRAGVRAILYLASWTTVRKAGPLQTFYFRLVAAGKPKQVALIAVMRKLLLALNEMMRTRQPWRPANAAVLA

SEQ ID NO: 371616 - protein, 370 aa, unidentified
MKSSHRIDTPAAGAKDGTLYVAFELSKSKWLIGLVVSGESKLSRHQVSGGDTAAVWQLISKKRAYAEKKLGRAVRVVSCYEAGYDGFWLARRLGEQGIDNRVLDPSSIEMPRRARQAKTDRLDLERLMRVLIRHDGGEPRVCSVVHPPSPEQEDARRLSRERDRLIGERTGHGNRIKGLLHGQGVREVEPRRKDFLERLAQARTGDGRVLPARLVAEIKREHARLVLLGEQLAEVEGQMRAEREAAAPDSRARQVNQLLGLKGIGAVGGETLVNEVFWRDFQNRRQVGAYFGLVGTPFDSGQSSREQGISKSGNARARTLAIELSWLWLRYQPDSALSLWFKQRVGDQKGRVKRVAIVAMAGGPVCRAGS

SEQ ID NO: 371617 - protein, 343 aa, unidentified
MYYIGLDVHKKTISYCVKDAAGRVYREGKIGSTRYELDAWIKTLPQPRMIAMEATIFTGWIYDHLLPHAEKVKVAHPLMLRAIAAAKRKNDKIDARKIADCLRCDLLPECHMASTEIRDRRRTLRYRNLVLRQAVQMKNRVSGLLMETGVSYNKLRLHRMGYFAELMSTNEEVSESIRPLLRLCREHIDRSIRMDTALLGSLERDPLLADRLRRLRTVPGVGPITAPTWALEVGDTSRFRNIKQAISYCGLCSAEKSSADKVMRTPISKQRNKHIQQVLVEAARLAPRYSDELALLYERERQRGNGNRATLAVARKMVVLMLAVERRNTDFVPAGEFKRTAAA

SEQ ID NO: 371618 - protein, 325 aa, unidentified
MSKLSKKVIGVDVGAKFLTVSFTDNVNQDQVFNIQNNQRSILSFLKKFPTEDYCLVIEATGNYSSRILHLSLDNGFESSLINCMSVKYFSRMKNIISKTDAEDAKVIRLYGEIFRPEVYIPKSIEIEHLDQEIKLLNDLEEEKRRYSVKLKSLRYNPQLNPNTEKHYEKRLKQLDKEIREVEMRLPQLQDEEFREIKGLIQSVSGIGEKTSLQLMTATSGFKNFDSSKSLVKYFGLAPRIYQSGKKSYSPGKCRTSKTHIRSLLYVCSWTAIKHNTQCKELYLRLLEKGKPKKLALIAVCNKLLRICFGVVKNKTAYQQNFQKNF

SEQ ID NO: 371619 - protein, 346 aa, unidentified
MNNSFSGFDPCGIEVSARTLLVALGREGRAASPREFPNTAEGHQAVLRWLKSRQRPVRIVMESTGLYGLDLALCLDRAGMALMVANPRAARHFAQAMMQRSKTDRLDAEVLRQFAARMPFVAWRPPSAAAFKLVAVARRLEALTEMLAAEKNRLHAASLSEALPVIIRRDIQRSILNQQRAIERLTRAAQEFVVSDPELGRHYPLLLSIPGFGATSALHTLAELALLPAGLDVRQWVAYAGLDPRQHSSGSSVEKKPRISKTGNKHLRRALYMPALVAVVHEPHLRAFYEHLLARGKAKMQALVAVMRKLLHAIFGMFKHHQTFDGAKAYALAPVNLPTPIPQEVA

SEQ ID NO: 371620 - protein, 457 aa, unidentified
MSQRAYVGVDLGGKFHQVQITAADGTSLGRSFRIGRGRAGLAALQQGVRTVVGEAVEAIYTVEATQNYWQELVHPLRRSGATVYLVSPAKTTALRTFYRRHTKTDVIDAGATSRLPSVDPSLHPAVVGDGRFDALRRLVRQSWQLREAMANRKRRIIARVLMVYPGYEDVFRDRYCGASLLFCRRYLDPAKARRLGRSRLAALLRKRALGKFDAERAARLWAVIENAPELAVAYDDLQRVVNLDLDLLDAEERAQLELRERIAELYGEVEPATRLTTMPGLGDFLAAAITAFIAEPGRFRSADEVVSLAGLCPRKKSSAGTDTANQSLTKHGDPTLRSCLYVAAEVARHYDPELQAFHARLRARGKHYKQATCALAAKILRRCWAVLQSQRAYVVEHQAVLTQAKQAGKTVRESVHEVAERLNDMSGVPSPAPNARPLLRRRQRPLAPAVSVERSLP

SEQ ID NO: 371621 - protein, 413 aa, unidentified
MTVVCGIDWSEQHHDVAVVDADGRLVAKRRIGDDAAGFGRLLELLAEAGDRPQAPIPVAIETARGLLVACLRATGRPVYAINPLAVARYRERHAVSGKKSDHADAVVLANILRTDRAAHRPLPTDSELVRAIAVLARAQQDAVWDRTQAHNKLRSLLREYYPGMLAAFRTARGGILRPEARALLAAAPTPADAARLTPPQLVGLLRQAGRQRRLATHAARLHQVFAAPCLRQPPLVEQAMGRHALALLGALNTACANAEDLAAATRQAFDRHPDAQIITSFAGLGQLTGARVLAELGDDRSRFAAAKAVKAYAGAAPVTRASGKSLHVSHRRVKNQRLATAGYQWAFAALTASPGARAHYQRRRAAGDAHPAALRNLFNRLLGCLHHCLQTRQPYQEHAAFTPPSRQQRPAPA

SEQ ID NO: 371622 - protein, 406 aa, unidentified
MFIGWDWATETHDVTVMDHLGARVDRWELAHTEEGITKTLARLARYGAPADLPVAIETTRGLVVDRLLAAGHPVVPVHPNAFHAMRPRWGAAKAKTDAGDSMKLADYLRTDGHFLPRLEPTDQATLDLQALTRQRADHIEAKVAAVNQLAASLDAHWPGGKAVFYELDSDIALAFLERYPTPAAASKLTAGRLQAWCKRHGYSGNKPGSFLIERLRSAPSAASRLSPAAVEQLIRIQVQLVQGTRATLRALDKAITEAVKAHPYAPLFATMPRIGKINLAQIIGELGPILERSQTCEQFIAEAGVVPVTKASGKSRTVASRYATNRRARLAVTTFADNSRHGSDWAAKIYTDARTRKKRHPHAIRILARAWLRVIWACWRDGACYDPATHQANGKINTSADTPVAA

SEQ ID NO: 371623 - protein, 341 aa, unidentified
MEKNTYFIGLDIACDDFVASIYQSPEKPVITKEVIENNPDGFSMLVSWLKEQGINSSNSVICMEATGVYSEACAHYLFVNGFKVSVEPPLKVKRAFDPIGHKTDPIDSRQIAEYAYRYSDELRFWQPKQEIVEKIKQLLTAREQFTKQSTAIQNSIKAYERHVIKVPLIINAHQETLKELKKHIKAIDKELDRLIRQNPTISQISNQLKSIPGVGLLLASDLIAITGAFNNISCHKTLAAFLGICPYQHQSGKSVYKQPHMRNFGPNYARKLLMLAARSCATHNLEFRKYYMRKLAEGKAKQLVLNNISNKIVKIACALIKNNAQYNETYRSVNPLCFNLA

SEQ ID NO: 371624 - protein, 377 aa, unidentified
MDRTKYIGMDVPKEAITIAVLNSSGKLVMESLVETKAATIPEFIRGLRGELQVTLEEGTWAAWLYDLLRPPVAQLIVCNPRKNALLKSGHKSDRMDARKLAELLRNGSLSAVYHGENGLRTLRELSRSYLTVSKDLARVMNRLKALYRSGGIACAGAKVYAPQHRSEWLSKITEAGGRCRAEFICQQLDGLHALRQAVRRDLLVESRKHGATKLLRQIPSIGPIRAAVLIARRQTPDRFRTKRQLWADSGLAIETRSRGEYRYAEGPLRRSQKPVALRGLHKNHNHDLKWIFQSAAVRASSCAGPLHEFYEALLAKGMKPALARLTGARKMATIPWIVWKKGARFDAEHLKQQAAGASRIESPCDPPDHLRRCPSGS

SEQ ID NO: 371625 - protein, 352 aa, unidentified
MDITTAGADLAKNVITVCAQDRSGRTMERRDLRRDAFLAWLRRLPAGCIVGMEACSASHYWAREMGAIGLQPRIMAAEFVQPYRKSRAGKNDRNDAEAIAIAVRDPNMRFVAVKSVEQQARLARHRVREGWKEERTALGNRIRGLLGEFGLVIPKSQAALAKALVEALHDERVPEPVRELVRATREHLDLLGKRIADCDRAIGLACRGDPAAKRLQEMFGVGPTSADAVVATAGDARAFRNGRQFAAWLGLTPRQFSSGGKTRLGAITRRGDAYLRTLLVQGARSALKAAQRCAPERASRLQQWIVQLHARVGFQKTLVAIANKNARVIWALLAREETYNPEAWKAYAPAKG

SEQ ID NO: 371626 - protein, 313 aa, unidentified
MDPVYVGIDVSKDTLDFCVYPNGKEGLFRNNRVGIGRLIRMLIKVKPALVVFEASGGIEMPMYLAMSEARLPVAPVNPRQVRDFARSMGILAKTDRIDAQVIARFASAASIEPKLIPDTQDLKEMLTRRDQLVQMITMETNHLRTASRELRKSIEEHIAWLKQELVDMDTMLKGRIQQDPVCSDKDTILQSAPGIGPAVSAMLIGRIPELGNLNRRKIANLVGLAPLNRDSGQYRGKRTIWGGRSRVRALLYMATLVATRCNPAIRCLYLRLLEAGKPTKVALVACMRKFITILNSMVKHHATWSNSYTLSPG

SEQ ID NO: 371627 - protein, 387 aa, unidentified
MFYCGIDIAKHKHVVSIMDEKGQVTRKALSITNTREGFDQLLEALHGQSEAVSVGLEATGHYWLSLYDELTRQGYPVTVLNPLQIAAYRKTGIRKVKNDVSDSIWIADYIRVSNLPPTTPDLPVLLQLRELTRFRFRLSEQIGDVKRKLLCILDRVFPEYDRLFSSVFLQASRAVLQEAVSAHEFADFDLHELADLLSQASRGRFGQEKAELLQKQARQSVGVAFLADAARIEMGCLLAQINLLEEQRSQLDLAIAERMQQIPQHITSIPGIGPATGAAILAEIGDIQRFETLDKLVSYAGIDATVYQTGQFTASEAHMSKRGSPYLRQALWLAAVAALLHDPSLKAYYQKKRDEGKHHGTAVGAVCHKLLARIFVILKEQRPYVIR

SEQ ID NO: 371628 - protein, 413 aa, unidentified
MDVLVDRCAGLDVHKDQVTVCVRRWGQGRVRESETRTFLTFTSALRELRLWLQSERVSEVAMEATGVYWKPVWYELEDAGVFELKLVNPQHVKAVSGRKTDVRDAAWLAKLLECGLLAGSFVPPRAVRELRDVTRYRRRVAEERGRETQRLQKLLEDAQVKLDSVVSDICGVTARLILEAMCAGERDPMVLADMAQGRLKAKIPQLREAVPGRFSDHHGLLVAELLAHIDYLAATESRLDTRVDELIDPFVAARDLLTTIPGIGKRNAEIIIAEIGTDMGCFPTAAHLASWAGVCPGNNESAGKHRTGKTRKGNPWLESALIEAGWRAARIKGCSMQVRFWRIAKRRGSEKAAMAIAHHLLVVIWHVLAEHATYNEMGPDYLARFDNPTRRQRQLVHQLEQLGLKVTIEPTAA

SEQ ID NO: 371629 - protein, 428 aa, unidentified
MHVEENTRIKEFRQIREEIRGSEKYLIVGIDVAKEKHHAFYGTSNGKTLKRKLVFDNSFSGIELLMDFACALKTEHCLEKVVYGVEPTASYHKPLAEYLIKSGCNVVMVSGLAITKNRELLDGRWDKNDDKDAANVADLISQGKCQYYDYPTLEIRDLRGLLSLKRMLRKQEHSMRVRIRNNIIAQYFPEFDSHFAKGRFESLAVVKWCIRPKEINDMEFEEFEELLAPCRRTRPQIERLKLIWEDANESIGCEAGDAIQFGAKLMVEELKNIMESINAVDEQIEKICSGFTEYQYLLSIPGFGPDVSSKVLGAIGNPLRFDNGKQVLKLSGYDLSASRSGKPSDFIIPRISKRGNAYLRYALYQAALIASTRNKYFMRYYTNQLKGRERERGIGTKMKVKLAAKMLIIAWTLMKNKERFDPAYLNIE

SEQ ID NO: 371630 - protein, 433 aa, unidentified
MDSSPAFGLIVGLDRSDRTADLHLIQTATGQRSSHRIDTSPEALWDWLLHLRQQHPQARLGLCLEQPAGHLLAFLETYAWITLYPINPITLQKYREAFVTSRAKDDAKDARGLAELLLYHPDKLKAWAPEDSQTRTVQQLVLHRRAIIDERTGLTNRLKALLKQYFPQALVLCGQELWRPLATRFLLKWSSLQAVQKASTATLKKFYYLNGSRSAGLIEQRVRLLQKAVPATDDPALIDSFALRVQLICHQLQDLVRTIKTFDQRIAESFKAHEDHALFASFPGAGPVLGPRLLASLGSQRERYGSANHLQHYTGIAPVTKQSGGKCHIHRRYLCPKFHRQSFHEYARESILWSRWAAAYYFQQRTKGAPHHTAVRALAYKWQRIIWRCWQSRTPYDERIYEAALRKANSPLVRLLDRIQLGKNPFKNTLNKN

SEQ ID NO: 371631 - protein, 455 aa, unidentified
MKLKNSSKNKAKRIKKHLEEINLYAAGIDIGSREHFVSVPESLDEEPVRHFGCFTLDLETMADWLVRIGITTVAMESTGIYWIPVFEILDARGLQVILVNAHHVKNVSGRKTDVKDCQWLQQLHTYGLLAGAFRPEDEYCALRAYMRQRGTLVSTLSTHIQHMQKALRQMNILLDNVVSDITSKTSMSILRAILSGERNAEKLASYRDRRCKNSVEVIAKSLMGNYRKEHLFSLKQSIELYDVYHEKLSDCDHEIEQQLALLEKQPDLTEGQRPTKKRNKKHERNAIQFDVANYLYDLCGTDLTDIDGLDEGSVLKVLSETGSDMTKWKTASHFVSWMGLSPNNKISGGKVLSSKTVKTQNRAKQAFKLAAWGLSNSKSGLAAHYRRLRARIGAPKAINATARKIAVIFYNMLKNKTAYVTQSQEEYDKIHKQRTLKQLQQKAVQFGLELVPIAE

SEQ ID NO: 371632 - protein, 388 aa, unidentified
MQMQTPNDLSQSRIVLKQDSTLIAVIEMSLSSWLVAGIVPGVERQPLKKLAVDESALLKLLNRWREEAEKAGRKIERIAVAFEAGRDGFWLARWLRARGIEAHVIHASSVAVSREHRRAKTDRLDTELLKRAFLGWLRGEREHCKMVAIPTIEDEDAKRPNRERESLAGERTRIVNRMKAALSRLGIRGFNPKLKKAAERLKDLRTPEDQPIPPNTLAELRRDMERRRLVSDQIRQIEHARLERIEHAPSDRPHAMVRLLARVIGIGIETADMLVQEVLSRNMRDRRAVARYAGLTGSPDESGTKRREKGLARSGNARVRRGMIQLAWRFLMFQKGSALAQWFRARTENARGTRKTMIVALARKLLIALWRLVREGVVPDRIVLRPAQ

SEQ ID NO: 371633 - protein, 387 aa, unidentified
MGVIIGMDPHKRSATIEVIDERAGVLAAGRYGTDKAGYAEMLKAGRKFEDRVWAVEGCNGVGRHIAHRLVASGETVLDVPARLSAQVRVFATGNGRKSDPVDAHSVALAALRSPRLVQVEVSPDLLVLGMLADRRDELGRARTQTINRIHRLLLELIPGGAKQFLSAAQARALLATTRPRDIVGKTRRRLAAELITELEAIDRKIKTCKKEITAHVQAQGSTLLQLHGIGPSSAARLLADVGDIRRFASRDHFASWNGTAPLDASSGQQLRHRLSRAGNRRINRALHIMAIVQLRNATEGRAYYDARKAAGKTSMEAMRCLKRRLSNVVYRQMLHDQHNRQVTGPGGHSGTTLKSSVTDLTPDIGSSDKPLPGPAAPQPRTPVRAAS

SEQ ID NO: 371634 - protein, 372 aa, unidentified
MNYNTVYVGMDVHKESFTLCSMTIEDEKASHYQKTEADYKKVLKYLEFLRTIYGGNAKFICGYEAGCLGFTLYHQLTSQHVECIILAPTTMLEQRSRKRIKTDKRDAEIIAKCLAQHNYSPVHIPTATDEQTKEFLRMRDDHKLALKKIKQQILAFCLRHNYRYDGNSHWTAAHLCWLKSLQPEALYKETLDEYLLTYTTLNDKIERFDKRIEELALKDEYKESVQKLRCFIGVRTHTALSVLVEVGDFNRFASAKNFASYLGLVPGENTSSDDRNLLGITKAGNRHVRLLLTEAAQSYARGQIGYKSKDLKSRQSGNSAQVIGYADKANERLRRRYYKMVLGQSKKHNVAKVAVARELACFMWGMMTEHIS

SEQ ID NO: 371635 - protein, 349 aa, unidentified
MDHIGMDLGKKESQIAIITEGGELVEKRMRTERERLRQYFKERPPSKVLIEASTISEWVARVLEELGHEVIVADPNYAPMYAQRSRRVKTDKRDALALAEACKLGAYRPAHRTSDEQRHVRALLVVRESLVRARARFVTLAQAILSREGVRVPTGSSGCFGERVAELELPELLKAEIAPLLALLMPLNEQIGRLDERIVEIGHKDERVKRLMTMPEVGPVTAVAFVATLDQAGRFRGAHQVEAYLGLVPREWSSSEVQRRGNITKAGNSRMRWLLVEAAWRLATHGKRPETQALRDWAERIARRRGKRIAIVALARKLSGILYAMWRDGSAYDPKMLKGAVRSKAEHAA

SEQ ID NO: 371636 - protein, 338 aa, unidentified
MGFYSGLDLHSNNCVIGVMDKEGKRLRKKRVPNELPAVEAVLAPYREELLAVVVESTYNWYWLVDGLKAGQYPVRLAHPAGNKPYSGLKHTDDGDDAYFLADLARVNCLSEGYIYPRETRGVRDLLRQRGRLVRERTAHILSIKNMIVREGGQSLTRSQVEELSDEAIAELMRDSYGQVGLKTLGKVVGVINQQIRHIEKTVLAQAKPDPIYQRLQTIYGVGPVLALTIRLESGEMSRFPTVGDYTSYCRGTGSQRLTNGKPKGENNKRNGNAYLAWAFLEAAHFAVVNYRLAQRFFERKRAASNRILASKALASKLSKAAFYVMRDQIDFDPERLFR

SEQ ID NO: 371637 - protein, 364 aa, unidentified
MSQDVSNKQNIKIKERQTVNNNNSKGKVTVLGIDLAKNSFQLHGVDEQGNRVLKKKLTRKQLVAFIAQLPPCLIGLEACGGAHHWVRVFSEFGHTVKMIAPQFVKPYVKSNKNDAVDAEAICEAVQRPSMRFVPSKSIEQQDIQSVHRVRSLLVGRRTAQANQIRGLLMEYGIVIPQGINQLRKAIPDILEDAENSLSSYFRELLRELYEEIVHFDERIETIELKLKVISEQNEDCKRLLTIPGIGLLTATALIAAIGDISVFKSGRELAAWIGLVPRQHSTGGKQTLLGISKRGDSYLRTLLIHGGRSVVRVAHKHEDKRNQWIGEIKQRRGENISNVAVANKNARIAWALLTKKQDYCVTGA

SEQ ID NO: 371638 - protein, 321 aa, unidentified
MNKSTIFVGIDISKDTFDVYDSEQGHFQFNNDVIGFKLFRKQLTSAHWCVMEATGCYHQQLAITLFEKDFRVSVINPLIIKRFMQMKLSRVKTDKSDAKMICSYGEEQALDLWSPEPDYIVECKTLQGVVRLYLKQRTALKNTLHAMSTSKRGKGKLIRSIKRQLKCLDKEIRLLETEIENLIQTHEQTLFTRLNTIPGVGKKTSMLLIVSTNGFRDFESSRQLSSYFGLAPNERSSGSSIRGKSRISKMGDPLVRNHLFLCSFTACIHNPQCKALFDRIVGKGKSKKLALIAVCNKLIKQAYGISKSGLDYDKNYVGRLS

SEQ ID NO: 371639 - protein, 370 aa, unidentified
MRKDTSRNKQQIRSKKERETREGFEFYIGIDLGDKNSDVCVLDQSGEVSKEFRLRMKEADFRTYFASIPRSRVAIEAGGQSRWVAEVVEKCGHEVYVSNTRKVPYIHQSDDKDDPGDACKLAELLYFKPRLLHPVQHRSREAQVDLSWIRAREVLVKSRTQLINAVRGISKAFAERLEKCAAESVTAKLAGQIPEVIRGAVAPLLETIDHLNEQIRYYDEMEEHIARERYPKYRLLEQVSGVGVHTALSFMLTIGDPERFQKSRMVGSFLGMRPKKQESGESKPQLGITKAGDLYLRKTLVNCAHHILGPNRKDSDLRRFGQRICARGGKNAKKRAVIAVARKLAVLLHRLWITGEVYEPLRNSKQSKAA

SEQ ID NO: 371640 - protein, 349 aa, unidentified
MAIVGGFDIHRRQVTFDYLDTATGQVRRGRIEPACRQVLRDWLAERFAGRDDVTFAVEGCTGWQFVVKELHRAGIAALLAEPAGTAGLRGSKKRAKTDKTDARHLRMLVAEGRVPASWIPPAQVLELRALLQLYRDLREEHTAWTQRVHATLFHQGVPSLAGRLGDPKARARLATAPAEMGLSAAGAQAVVVALRRMEDLEAELAPLHAQITAFARRQIGCKTLAAELYGVGSLVAAIVWAFLGDTRRFSSSAQAVRHTGLDVTVHSSDAKGPPGRLSHQGPPILRWALFEAGHQGSRLTSPDHRYYADVAARIDPNRAALPVARKLARRSHHILRRLGDQACAPVPGW

SEQ ID NO: 371641 - protein, 317 aa, unidentified
MSTQEVFAGIDVSKENLEVCLWPQEERMSFAQSEDGWALMTEFIQSFSPRLVVLEATGGLERGAVATLAVKGLPVVVINPRQVRHFAISKGILAKTDKMDAKVIAQFAGSIRPEIRPLKDLEAQELDSLVTRRRQIIEMLTMEKNRLHSAPARRRNDIRMHIEWMEKRLEKVEKDLDGMIRKSSLWRVKEEILCSMKGVGPVLSRSLLSDVPELGTLSRQKIAALVGVAPLNRDSGKFRGRRGIWGGRAKVRCVLYMATVAAIRSNPVIGDFHEHLVKAGKPPKVAITACMRRMLIILNAMIKNQTPWQSPVAQKTA

SEQ ID NO: 371642 - protein, 332 aa, unidentified
MDNFYFIGVDVSKKKLDFCVLFEGKVLREEQVSNHQQAVARLIGELKNDLEMDNEQFLICAEHTGQYTFPLVCACKSVECKLWLENPSQIKYSSGMQRGKNDKVDAKRIAIYASRFGDKVKYYDRPTEEIERLKQLERERALYVTDLAKYKGQMYDQKDFMPAALYRKKTKRMKGLIQELQAAIDAITAEMEKIIGSTEVLALQMELLMSIDGVGKVVALNVIIETEAFSRFDNPRKFCCHAGVAPFSYTSGSSQHSKNKVSHRANKNIKKLLHMAAVSVTHRKEGELKAYYMRKVEEGKNKMSVINALRAKIVARMFAVIKRNEVYTPIYS

SEQ ID NO: 371643 - protein, 338 aa, unidentified
MDHYVGIDLHSTNSYIVIIDNDNKRVFKKKTKNDLRLVVEALKPYQEQIKGVVVESTYNWYWLVDGLIEEGYTIHLANPSAIKQYEGLKHSDDVTDAFHLADLLRLGILRTGYIYPKEERPVRDLLRKRLQLVQQRTLQILSFQNLAARNLGKSMNGNAVKKLSEDDVEHLFHDKHLVVSGKASISTILFLTEKIKQLEKTIHKVAKLKDEYTLLMTVPGIQKILALTIMYETGPIERFRKVGNYASYCRCVGSKRISNAKVKGKGNRRNGNKHLSRAYVEAAHHAMWHYEYVQRYYQKKMVKTNTLVARKTIAHKLARACYYIIRDQTVFDPKRVFV

SEQ ID NO: 371644 - protein, 344 aa, unidentified
MFCAGIDTHKDFHVLVIADELGREIYHESFSADEQGICSLTSALSNAGECIVCGIEGTGSYGATLAAHLLAEGFPIVEVSRPKRSRIKGARDKSDHRDAHRAALRALAGEGVSVKPRGGDAQAVQCLLAAYKRLRDTCTSLSNCICALIVSAPEPYRARFAGLKGTKLMDAIAHTRVGAGGKSEAQQATLTSLKTLERTWRTAHEQAEKILSQMEAIIVDHAPALLDIFGVATVTAAEFIALGGENPSRIKSESAFARAAGAAPIEASSGHVVRHRLDRGGARSANAALHTVVLCRMARDERTRAYVERRTKEGLSKREIMRCLKRYVCREIYRVLCAEERRRN

SEQ ID NO: 371645 - protein, 326 aa, unidentified
MTLSDSLDNTFVGIDVGSASLDVAWHRGDSAHYANRPDAIVALIERLQAEPKLTRIVLEPTGGYEKTLVRALRQARLPVEIIHTTRFKAYRQLVGVKAKSDTSDARILASYAAAPDEVRGRKPGHVELPEDAVREALSELASRRDQLKHMIHAETCRLGTVRMTELRLAIENHLETLKADDKQVHLMMMAMVRQRLDLQRDQRLLKTIKGIGVKSALAFLASVPELGRVDNKAAAALIGVAPFVRQSGTMNAPAHIHGGRAAVRSILYMAAVAASRHNPVLRPFYERLLAKGKPPKVALIAVLRRLVVFANAVLRSGQPWKGAIAA

SEQ ID NO: 371646 - protein, 416 aa, unidentified
MMKEENNKVKRYYLGVDWAEEFHQVWVSDPEGKKVIEMMVLQQPQAMSEFGAWLHQRKAEEIELWAAIEKPHGRIVDFLLDHGVVVYPVNPKALDRARDRFRMSQSKSDSFDAYVLAEFLRTDHAHLRALEPNSAQAQELKMLSRDHQRLMRQKTRLLNQIGITLKEYYPRPLEVFGDLESKIARDFLKAYPTPQALSKLNRQSWDRFAQRDHHLSEARSTELWDKLGKAQLPIPEHVIRAKAKLLLALVVQLEALLPEVESYSEEVERFFASMPAAELVKTLPGGKRGTTVAKLWAELGDANNRWQSFRHLQAEAGEVPVTQSSGKSRVVLFRFACNKHLRHAIYWFSFNSLRRCEWANKYYREQRAKGHSHPRALRALGAKWLKIIFVMWRDHKPYDDNYHLANIARQKMRQAT

SEQ ID NO: 371647 - protein, 391 aa, unidentified
MICVGIDVSKDKHDCCILSSDGQLLLKPFSVPNNRHGFDSLYSAILSFENDPDKVKVGLEATGHYSFNILGYLLEKGIHCFVFNPLHTNLYRKSLTLRKTKTDKVDSKIIAKMLLSEVDLKPYSKTLYHNEQLKSLSRYRFSKIRERGNLKQQLARLVNILFPELETLVPSLHLSSVYALLEEFPGASYVAKAHITRLSNLLCASSKGHYKKDKAVEIRNAASSSVGSVMPAKSLELKHTIQLIRILSEEIDEIETQIQEIMEKIQSPITSIPGLGFRMAAMILSEIGNFSKFDSPDKILAFAGISPSTYQSGKLDNAYAHMEKRGSRYLRYALYNAAIYVCHWDKTFSAYLQKKRAEGKHYYVALSHAIKKLVRVIYRLQLTGEPYRPAV

SEQ ID NO: 371648 - protein, 407 aa, unidentified
MEVVYRCSCGIDVHKKTIVACLCKGGKQEVREFGTTTGEIKVLANWLIEADCEMIAMESTGVYWKPLYNLFELMGLEAIIVNASHMKALPGRKTDIKDAEWIADLLRHGLLKASYIPDREQRELREIARYRKSLIEERSREINRLQKVLEGANIKLDSVVTNIIGKSARKLLDKIVMDEEPNIGEVARIIHHSLHPKLNQIMHAIEGITTPLQRRLIAQIVDHIDDMTKRISDMDDLIKNYMEQYEAAISAIDELPGIARRSAEVIIAEIGTDMSRFPSAAHLCSWAGVSPGNHKSAGKRAHGKTTKGNKALKSILTQCAKVAHNCKDSYFSAQYQRIAARRGKNRATIAVAHSMLIAIYHVLKNGVAFKDLGSDYYDSFNRDHKIKGYLKRLQALGWVPESSPVSA

SEQ ID NO: 371649 - protein, 442 aa, unidentified
MSNSPVTTTPEPAWAAFVALDWGSQKHAWILQPADGSKREQGFLDNTPEAVAIWAAELGRRFPGRPLAVALEQKRGSVVNLLLCHPHLVLFPVPASMSASYRKTFVPSGAKNDPGDAAWILDLLLRHRDRLRRLQPDDPKTRLLLMLVEDRRQLVDDKTRLALRLQDCLKQYFPQLVQWFDVDTALVADLLKQWPELQHLQRCHDGTLRMFFRRHHAGEELTASRIEAIRAAVPATDDPALLEAGSMKARHLTESIATLRDQITRLELRRDELVADHPDSAIFASFPGAGRATVPRLIAAFGTRRERYQSAFEVECDSGVAPVHVASGNTDRVSVRRACQKFTRQTFHEFAGQTIPRCAWAKAYYQAHCHKPQQHHAAVRALAFKWIRILFRCWKDRKPYDEQLYLTSLRRRSALIGPTLASATSVGWQTVAGFSKLSEKNS

SEQ ID NO: 371650 - protein, 399 aa, unidentified
MLFVGDDWAEAHHDVELVDQTGRVLVRRQLPEGVAGLAGLHALIADHLDDDGEPADVLVGIETDRGPWVTALIATGYTVYAVNPLQVARYRERHGVSGAKSDPGDAHTLAEMVRLDRAHHRPVAGDSELAEQVKVLARTHQGLIWSRQRQTNTLRSMLREFYPAALAAFGEDLAGRDALAVLAVAPDPTSGRALTVPKISSLLRRAGRQRNLAAAAERIQAALRTEQLTARAGVVQAYAASVQIQVLDGEVSSCFGRHPDAEIYLSQPGLGPILAARVLAEFGDDPVRYADARARKNYSGMSPITRASGTKRVVLARYTRNRRLADALYQQAFAALTASPGARAYYDRQRARGATHHQALRALGNRLVGVLHGCLRHHLTYNENTAWGAHNQTSTTAAA

SEQ ID NO: 371651 - protein, 342 aa, unidentified
MKSHVGVDLHQRFCYLTAVGARGEFLKQGQVVNEAAALRTWLRTVPGPRQVVVEASGFWPAFARAVAPEADRLVMVHPQRVKAIASAKLKNDRVDSETLAHLSRCDLLPEAWMADEQTQQLRLLVRLRISLGQQRARAKNHLQAVLHQEGFRKPVTDVFGKRGRVWLKELQLSAAGRVAVETWLAEVDHLDAQIALRTRELEELAKQDARARCLMTVPGIGAYSAMVILAEVGAMERFKNKRALASYAGLTPVVRESAGKRKRGGIGRQGSATLRWILLQVAQVAARHSPAAKAWYSRLRARKPAQVARIALAHKLLTAVWALLRNGVCFDEKIFAGGLDVS

SEQ ID NO: 371652 - protein, 323 aa, unidentified
MELSSKIYVGVDVSKARLDVALRPTGAGWSFPNDQAGIDALVSRLLLEEASPPTLVVLEATGGFERPLAAALAATGMPVAVLNPRQARDFARATGRLAKTDRIDAEILARFAEAVRPTVRPIPGKEAQEFAAVLARRRQIVGMLTAEKNRLGTTASKPLKKRIEAHIRWLEKELKRTDNDLDETIEGSATWRENEALLRGVPGVGPVLARTLLAELPELGGGELSPKQLAALVGVAPLNRDSGTLRGRRTVWGGRERVRDALYMGTLVATRFNPTIKEFYERLCAGGKPKKVALVACMRKLLLILDAILKNRTPWRSPHALAP

SEQ ID NO: 371653 - protein, 377 aa, unidentified
MKNTRFVGLDVHAATIAVAVAEPDGEVRSVGTIPNEPEAVRRVMRKLGPAEHLHACYEAGPCGYVLYWQLAQLGVACQVVAPTLVPVKAGDRVKTDRRDAERLARSLRSGDLTSVWVPDAAHEALRDLVRAREAAKKDQLRARHRLQKFLLRHGRRSPAGTKAWTEGYRRWIAALQFEQPAQEATRVDYLTEVDHARERIARLERAIDEAVETAPAPMRAVIEALQALRGIAKVAAVTIVAEVGKLSRFARARQLMGYSGAVASEHSSGPRVRRGGITKTGNAHLRRIVVEAAWSYRHRPRVGYALRQRHARQSELVRAIAWKAQHRLHSRYCRLLGRGKNKQQVVTAVARELLGFVWAIGVTVERQQGAPGSSQVA

SEQ ID NO: 371654 - protein, 481 aa, unidentified
MPRQKQQPNELGEGNTTTGKGKRGRKQKGMCLGDRPILEPNAAGIDIGAREILVAVPPDRDEDPVRIFSTFTEDLLKMAKWLMSCGITTVAMESTGVYWIPLYDVLEQNGVKPCLVDARGMKNVPGRRTDWHECQWLQFLHSVGLLRAAFRPDGDVCAVRSVMRHRSEQVLMANQHIQHMHKALTQMNVQLQHVISDITGVTGLAIVDAIIGGQRDPAALAKLRDPHVKASEETIRKSLEGSWRPEHLFTLEQSRKSYQHYQQQITACDEEIEKLVTAFAPRVNPEEKPLPPDRKRKQRGRKKKNVNPKTGFDLRTESYKLFGVDLTQIPGLMAMVLVLFSEVGRDMSRWSTAAHFASWLGLCPDNDISGGRVLWRGLRRVHNRAGDLFRLAAYSLHHDESPLGDYLRRMKSKLGPAGATTATAHKIAIIFYTMVKKQVEYDASLWAQRDAERTQRFEAKLKRQAQQMGYKLVPIEEMPAA

SEQ ID NO: 371655 - protein, 336 aa, unidentified
MKTLDKNSATFLGIDAHPTTHTALAINRFEEEKGILTFDNTKDGIATFLSWLPTIEADMDKVIIGLEGGGNSRHALVANLLKEYQNIYEVNPLYTKQRRMFGTKGDKTDPRDAKLIAEVLTRKLPELPKITKHDLSAHILVLKKTVWFYEQTTAQGVSIQNQLHQLKREADLSSDTTEKKALRMMIADLEKQLKSVRKTQKKCQEQLVILLEKQGKNLMTIKGIKTILSAKIVAHSGGIERFSNLDSFIQYAGIAPREKSSGKTKRHSKSKTGNRKLNHAFYLAAMVQLRWSSKSKEYFEKKIQEGKTKKHALKCLMKRIACITYGMLRSGEEYKG

SEQ ID NO: 371656 - protein, 415 aa, unidentified
MEVLHARCAGLDISKKDAKVCVRVAGAGRRKTVETVTTWSSMTSRVLALRDHLAAEQVTCVVMEATGDYWKPFYYLLEDLPGVEVVLVNARHVKNLPGRKTDVADATWLAQLGAHGLVRGSFVPPEPIRQLRDLTRTRTSITRERSREIQRLEKLLEDAGIKLSAVATDIVGVSGRAMIEALIAGDRDAGRMADLAQRRMRVKIPQLTEALVGRFNEHHAFLARVHLDLIDQHTAVIDQITERVELMMEPFRGFHDLICTIPGIGTRTADVVVAETGGDMSRFPTAKHLASWAGTTPGNNESAGKVKSSRTRPGNPYLQGALGASAMSIARTPGTFLNARYRRIATRRGPQKANVAIQHTLLVAIWHMGVTGTLYDDPGSDYYTRLRPDRARQRAIHQLETMGYHVTLDRPSQAS

SEQ ID NO: 371657 - protein, 347 aa, unidentified
MKRIAVDLAKSVYQVAESVRSGQVVQRKRLNREAFRRYIQEQAEPVEWVMEACGTAHYWGRVAQALGHQVRLLHPRYVRPYRRRNKTDRNDCDAMLEATRCTDIHPVPVKSHDQQQLQQLHGLRETWKKSRTQRINLLRGLLREAGIEAPASTAAFIRAASERVDQPELAPLSRLLHIVLAEINLYEQCMAECEQQLKRWHADDDIVRKLDEVSGIGLLTASALTAAVGRPERFASGRQLSAWLGMTPREFSSGERRKLGHISRQGNVYVRTLLIHGSRAALLAAQRCQARTPEKLTQLQRWAVATAARIGHNKAAVALANKLVRICWAVWCHERRFNGNWQSTKPA

SEQ ID NO: 371658 - protein, 434 aa, unidentified
MSKLQKVHGAAAGIDIGSCKFFVGTAESEVQNFDTFTSGCHQVVEYLQQKNITSVAMEATGVYWITLYDMLVAASIEVYVVNGRHVKHVPGRKTDVQDCLWIKELHSYGLLRSSFIPRAEILQMRHYMRIREKDIENKVAAVQRMDKALVMMNIRLSSVVSAIQLVSVMKIIEAILAGQRNAKTLAALCDVRIQKNKEEEILRSLEGFYKEEQLYALQHAYDEYKFYEGKIKECDAKMEVILKSSVKDKETPKIRPTGKRVYHHRPDIAELDKMMIQLYDGKDLTILPGLTCYSVLKLYSVIGNDFSAWRSEKAFTAYLGLAPTKYQTGKSRKYRKIKTNTEGGQILKECVQPLLRSKHNALGAFGKRISGRRGASVAIKAMARKLAVWIYNIVTKGMAFVNNGIEQYEEQLNRRKIKWLEKQAKDLNLMLTHC

SEQ ID NO: 371659 - protein, 337 aa, unidentified
MSYIGVDLHSNSFTVCCLNSNGRRRNETFDIRNIERFSRRLRSTDEVAVEATGNTAWFVERIQGRVKRVVVVDPHRFEVIRRSVKKTDKHDAETLACFLSKDMLPEARMKTKENAQLHSLAGTRDKLVKQRTALINKIHNVLNSYGIKFGKETLVTEKGLKSIWSYNWDVIVRVELEVLVEQIRSLTVSIKKLDEQMSEHGKNLDGHNNLTSIKGIGERSATVLLSVIGNVNDFADENKLAAYFGIVPRVSDSNETIHHGRITKNGSKIGRTTLVQCTLVAKRYSPYLNRYYERIKRHRGSGKAIIATARKFLGIIYQTLKNRWIFKDFPNFVIANT

SEQ ID NO: 371660 - protein, 340 aa, unidentified
MHKSSAEGFLGCGIDVSAAQLVVALEGEGGSWRQRSFANRASGHQALILWLQKSGGRVRICLEATGRYSLDLALALHAASGIEVAVLNPKVVHAFAATLCRSKTDPADAQVLAEYARRMPFQPWHPPSAVALELRTLTRHIAALTQQHTQQSNRLHALSASSVGSRWVQQDLKRSLRDLQRRKEKMRRAALALIAQDAELRPRFARLLSMPGIAEISALSLLGELALLAPGLSVRQWVAHSGLDPAHHDSGSSVHKRARISRAGNRYLRRALYMPALVAGRRDPHLRAFYQALLARHKAKLQALMAVARKMLHAIFGMFRGHADYDGSRLFPALELATAA

SEQ ID NO: 371661 - protein, 422 aa, unidentified
MLAESVDDEEIIARVAALDIGKAELVCCVRVPAEGGAKRRLQEVSTHSTMTRSLGDLANRLVDLRVERVVMEATSDYWRPVFYMLEAHGLQPWLVNARDVRHLPGRPKTDVLDAVWLCKVAERQMLRSSFVPPRPIRRLRDLTRYRIDLVGTRTAEKNRVEKLLEDACIKLSVVASDIFGVSGRAMMAALIAGERDPKVLAEMARTRMRVKIPQLVEAFTGHFDDHHRFLLAQMLARIDGIDADIAVLDAEIEAHLVPFKVAVERLDEIPGIGPVAAAVIIAEIGVDMTRFPTAGHLCSWAKFSPGIKSSAGKNKSNGSTGHGDRYLARVLGEAAPIAGRTDTFLGERYRRIARRRGKKKAIVAVGRSMLVIIWHLLADPETRFNDLGADYFTRHVNTETKKRQHVRQLEALGYRVTLEPAA

SEQ ID NO: 371662 - protein, 338 aa, unidentified
MAIVTVGIDLAKNVFALHGVDEAGAPRLKQPKVARGKLNALVAALPPCRIGIEACSGAHYWARQFQAHGHTVRLMAPKLVTPYRMTGKRGKNDAADAAAICEAVQRANMRFVPVKSEEQQSRLMVHRARQGFVAARTACINRIRGLLSEFGVVLPVKAEVVRREARNHLEELPGYANTVIGDLLSEVSHLDERIKQYDTHIRAMARDCTAAQQLMQLMGVGEITATALVAMVGNAREFHSGRQLSAWLGLVPGQYSSGGKARLGSITKAGDAYLRSLLVLGARAVLNAAKGKTDSLSRWALAVAERRGYWKAVVAIAAKNARMAWAVLTKGEAFKLPA

SEQ ID NO: 371663 - protein, 414 aa, unidentified
MSSTLPKKLASVKPGTLYAGVDLALDGNVVVVLDERAQQLARFRFPNDRDGYDFFYGRLERLRERHPAPEVLVGLEPTNYFWKLLAADMESHQCGYRLVNPYTVKKHREGDQLDRSKDDRRDAFIIGDLLRTGKYTQTQMLHGDYAELRQLATLYDRLQHDRRRQMTLVRSSAGQLFPELAREFKDFTGATASALLRRHAAASVVRQLSLTSFLAEVRADFHGQRLLVSKLRRIHTGAAQSVGLTDGVQGLQLSLRQQLDTLDLLQCQLKETETALTKVFLTLPEAPYLLSLHGLGLVTAAMILAEIGDPRHYRHGRQLIKLAGTQPVRDASGRKSRSQTPMSHKGRPRLRTALFFAVLRLVQVDDAFAQDYQQLQRRDKNPLTKMEALGVLMNKLLRILWALMLHRTFYHSNA

SEQ ID NO: 371664 - protein, 494 aa, unidentified
MRMASSSRASRRNAKNALKLKAQARKKGGAANSSVELDKLEPIHRRAAGIDIGSAENYAAVPQEAVGAGDSPVGVFGAFSQQQDALVEWLRSCQITTVAMEATGVYWLSLYDKLEAAGIEVYLVDPHGVKAVPGRKSDWMDCQWLQKLHTYGLLQRAFRPDAPIRRLRTLTRQRAELVCAAASQQQCMEKALVCLNLQLGLVISNLVGETGLSIIRAILAGERDPEVLVERYRSERCTKATKSEMKQALCGTYNDEDLFVLQQCVDTWDFLQKQIQECDGKIEVALVAIPTAQAVEAKAPPRPIPAAAEQPKKKANGTQGKNAPEKDFTPILRRICGVDLTQVMGLNLLSVLMLLGEIGTDMSRWRNEKAFCSWLGLCPGAKISGGKVLSRRTRKVTNRAATLLRMAAVAVGRTDTWVGLFYRRMKARKGGPKAVTATARKLACIVYHMLRFQEEFVALDMDKYVAHAQAHRLRYLRREAKKLGYELVEQEQVA

SEQ ID NO: 371665 - protein, 400 aa, unidentified
MLSIGIDVSKGKSTVCGMKPGGEIVYAPFEVQHTREGMSELVSLLRSSGEEVRAVLESTDSYHCPVVSALLENGIFVSVINSLRMKRFCSQSIRKVKTDRIDAMQIALYGLAYWQELQPARLPEDTYRELQLLARQYYQMTSMLIKAKVDFNAICDQVLPGMQELMNDHAGRHKLSDFVLRYHHTTHILEMGETRFRKDYCKWAEKKGYRNCERMAALIFATAQNGIPVLPNAPSTQIVITEAIRVLHTVEASRDAILTQMQALAKTLPEYSLVREMPCIGDTLAPRLIAEIGDVRRFHSKRALIAYAGIDAPPYQSGKFCANNRHISKRGNRYLRKTGYEVMQSYVMHKPANDPIFTFIEKKRNEGKSGKLAMVAGLNKFLRVYYGKVTELYRSLPAIE

SEQ ID NO: 371666 - protein, 368 aa, unidentified
MTSIIYVGIDVHSTSYTLCSYSVEKDECYAKVKIDPDCKKVLKYLEQVETRIGRKCEFVCGYEAGCMGYTLYHELSAYGIQCVILAPTTMLSDRRRIKTDSLDAEMISKCLAYHTYSAVYIPSEQDHAVKEYIRMRDDEKNTLKKVKQQINAFCLRHGFHYSGKSKWTQTHLEWLKKLTFGNVVLQEILNEYLGLYQQAADKLKIFDTRIAEFAVTTEYREKVKRLSCFIGISTHTALTLVVETSDFARFKTATQYSAYLGLVPGEYSSGNTQKRTGITKAGNSHLRTLLIEAGHCYGLGRVGIKSKVLQRKQAGNSARIIAYADRANDRLRRRFYKLSFRSNHNIAATAIAWELACFIWGMMTENIA

SEQ ID NO: 371667 - protein, 350 aa, unidentified
MEQNNEVILGVDTHLDAHVGAVISETGKLLGTLSVSTDTAGYLNLVSWANSFGHLRRAGVEGTGTYGAGLARVLRDHEIEVLEVNRPDRAMRRSRGKSDPTDAENAARAVLSGRATAVPKEQSGAAEAMRTVSVARRSAVKAKTQAINQLRALLVSAPQEIRERLLKTKTAQCVASCARLRSLGNTPMLQTLTTTLRLLAKRWLALAEELNTLDAMLDRLTSQHASRLRDRFGVGPQTAAVLVAVAGDNPERLKSEAALAALCGTSPLQASSGKTVRHRLNRGGDRSANNALWTIAMVRMRSEPRTRAYVERRTKEGMSNKEIHRCLKRYIVRELYPLILADLADSMRVP

SEQ ID NO: 371668 - protein, 375 aa, unidentified
MIPSPDSPALIAVVELSLSSWLVAGIVPGVERQPLKKLKTDENALLALLNRWRDEAARSGHKISRIAVAFEAGRDGFWLARWLKARGIEAHVIHASSVAVSREHRRAKTDRLDTELLKRAFVGWLRGERDHCKMASIPNLREEDAKRPSRERESLVGEQSRLVNRMKATLIRLGIRGFNPKLKHAEQRLETLRTPEGEPMPPNTLAELKRDMQRRRFICEQIRRIEQERLERLERTPDTEPHAMVRLLARVTGIGIETADLLVHELLLRNMRDRRAVARYGGLTGSPDRSGGTNREKGMARSGNARVRRGMIQLAWRFLLFQKNSALAQWYRRRTEHAPKARKTMIVALARKLLIALWRLVREGVVPEGVAMRPA

SEQ ID NO: 371669 - protein, 365 aa, unidentified
MPSVSRRGVTHLGLDVHKDSISVAVLEPEREGAEVDRIFNDEYSVRHLIARFPEPHDLRVCYEAGPTGYDLQRLLTSLGVPCDVVAPSLIPKAPGDRVKTDRRDARRLARLHRAGELVAIRVPTIEEEAMRDLCRARGDMVEDRTRARHRLSKFLLRHGHVYRDGKAWTARHEQWLLAQRFSDRALASTYDHYRGVLIARDAQIAAIEADLTPYFTADPFGEQVRRLAAYRGVTEMGALTLASEVCDWRRFARGSQFMGFCGLVPSEHSSGSSTRRGHITKAGNTHLRFQLVESAWAYQHRPGVGTQIRKRQDGLPPEVVARAWTAQLRLCGRFRRLAARKTSKNVVVTAVARELAGFLWAEMTA

SEQ ID NO: 371670 - protein, 359 aa, unidentified
MNYKQNEKINQVKESTLVVGIDIGSTTQYARAFDWRGIELGKVFTFSNSREGFEAFKAWMQRLQDKYRKSDVIVGIEPTGHYWFDLGAYLEDEGILLVMVNPYAVKQTKELDDNSQSKNDRKDPKVIAKLVTEGRYSAPYTPDGVYADLRIMVTNRKRLIREMTQIKNRFARWFAIYFPEYTDVFGDYEAQSSMLLLKKVCTPEAIVELGAEKINQIWRDAKLRAVGMKRATTLCETAKRSIGLKKGSSAAQYEMKLLLEDYEYKKAQLDAVIEEIEKLCRKIPESEQMLAIKGIGVITVAGFLAEVGDVRRFESPRQIQKLAGLSLRENSSGKHKGQTTIVKEGGVSCGQYCSMQRFR

SEQ ID NO: 371671 - protein, 370 aa, unidentified
MEQITRADGVGEARAGAIVRVGADLAKRVIQVHAVDAAGRVVCRRALARDKFIAWCARLPVGCTVAMEISSGAHHWARRLREHGLVPKLMSAQLVEPYRSQGATGKNDANDAAAICEAASRPSMRFVPVKSVEQQSMLCVHRLREGIKADRTACINRVRGLLAEFGLAFAQGPDALQHVLADVLEDASNEMNTLARLVIQRAAEQWRQLDAHLAWCNERIAQHVRDNADVRAAAQLMGIGPVGASAAVATVDDFRQFKNGAQFGAWCGIAPRQRSSGGKTQLGPITRRGDSYLRTLLIQGAKSAVLTAHKRQDPISRWAHALRERSGWQIAAVALANKNARILWAVMTKAARFDACHVSVKPAGAVPAAT

SEQ ID NO: 371672 - protein, 340 aa, unidentified
MEEISMYAVDTAKSVFQVHGEDAGRTVRVQKRLGRGQFLGFFSRQPPTVVVMEACGSSHHWARELIGLGHDVRLIPPQHVKPFLKRNKNDARDAEAIYEASLRPGIHFVPVKPVEQQCDRALHRGRDLLVRQRTQLGNAIRSMLSEVGIIAAQGAAGSAQIYTKIETADAAIPPKLLAVLRPLLAQWRGLQAEVQHLESQICTAARTDPRVRRLMKIDNVGPITAHAAIAAIGDGKQFRSARDFAAWVGLTPTHHASADKIRLGHISKAGDRGLRRLFVLGASSGLRQVRARPEKASPWLKGVLARRPVKVAVVAQAAKTARILWAVLTSGEEFRAPAKA

SEQ ID NO: 371673 - protein, 341 aa, unidentified
MNHYAGIDASLKSSSVCVVDANGKLVREGTVASEPEALIAWFSELGLEVARIGLEAGPQSQWLYAAVRQAGLAVELLETRHVRDAFKAMPVKTDRKDARGIAQLMRLGWFRPVHCKSIEAQETRAILGARKLVQSKLHDIEMSLRGTLRGFGLKVGKTTPNRFGARINELVEGHPTLQIIATSLLAAHAVLLREFKVFEKRVRVMARQDERTRLLMTTPGVGALVALTYVSGIDDPGRFTTSKRAGAHFGMTPKKYQSGETDITGRISKIGDKGVRTALYEAAHIILTKPVKGSALKSWAARLAKRAGMNKAKVALARKLAVIMHRMLVDKTPFNPAAAAA

SEQ ID NO: 371674 - protein, 403 aa, unidentified
MYIGIDWSEQNHHVVFLNDAAAVVASQLIPHSLEGFWTLDRIRQRLGVSPAECFVALETAHNLLVDFLWERGYTQVYVIPPHVTHSCRGRYRQSGAHTDQSDALLLANLLRTDRHRFAPWRPDSPLTRQMRALVSRYLFLTRSNVRLVNRLRAILMRYYPAAVDLFSSLDGVVTLEFLRAFPTPEAATGLKWEEFLAFACQHRYTRPRDLRKAFARLQEPRPQAAPEVVAAYQEETSLLATLLLEGVRARQETLKQLRSLFVEHPDRDIFASLPGTGEFLAPALLVKFGDDRERFPTPASVQALAGSCPVTEASGKGRRIRFRRGCDREFRYISQQWAWHSLRESVWASTYYEQALERGLSESHALRCLVNRWLVVTWRLWQDRVPYDEAYHLRQVVERRKPR

SEQ ID NO: 371675 - protein, 412 aa, unidentified
MDQIYDRVAGLDVHRDSVVACFRRLGPRGGVTFEKNRFRTTTAGLGELEAWLADRQVQLVAMEATGVYWKPVLYALESRFTVWLCNARAVKKVPGRKTDLTDAEWLSDVAAHGMVRPSFVPPPPIRELRELTRYRKTQSDVRAAEIQRLEKVLQDAGIKLTSVASRVLTQSGRAMIEALIAGERDGAKLADLAMGKMRPKVPALTEALTGHFGSHHAVACRRILGHLDFLDESIQALTEQIDQRTAAFAPVYTSLLPVPGFDRLSIDVIIAETGADMSRFPTPGDLASWVGVCPGSHESAGKRRRVGTTNGNPWLRRALIESARAAARTKGSYFGAQYRQIARRRGPNKAAMAVAHSLIELVWHLLSTGEIYQDLGDNYFVSRDDPERRARRLVAQLELLGFKVTLEAPAAA

SEQ ID NO: 371676 - protein, 344 aa, unidentified
MSEVITVGLDIAKHVFHAHGVDDRGRPIFSKRISRGKLLDFFAAQPSCMVALEACGGAHHWARQLMQLGHQVRLIPPAYVKPFVKRQKNDAIDAEAICEAALRPNMRFVAVKSEQQQAAGLVFRTRDLLVRQRTQLINAIRGHLTEYGWIAPKGPSHVAMLADLIEREAMASSLPEAARAMFRCMLDQLAGLNGKIADLDKEIARRAREDEVSRRLMTIPGIGPISATAIAALAPPAETFAKGRDFAAWLGLTPLQRSTGGKQKLGATSKMGERTLRRLLIIGSSAVVQQASKRGAPKGSWLEQMLARKPRMLVTVALANKMARIVWALLIKRENYKAPVAAKA

SEQ ID NO: 371677 - protein, 353 aa, unidentified
MKKLFIGIDFAKEKFDAAIIEACGLKEFGNREYGTFTNDKKGYRQFFKWVKTNADKSVENEWLFCGEDTGSCSLGLSKWLYGKGLDIWIENAYSIKHSSGIQRVKSDKTDSSMIAEYAWRHQDKAVLFEPLSESLSQLREVFLYRHKLVQQHIAMDVRKQDKEAAEPSKAISFIKRKSKHLMSEIDNAIKECDLMIDRIIESDAELKENYAIITSIKGVARQNGACLLIFTNNFRRFDLDARKIACYYGVAPFGKDSGTSIHSPAKTSHFANKLIKSLLGQAAHCAKKFNPEIREYYNRLIGRGKKPQVALNNVKNKLIRIIVALVRKKVYYDPKTYMFYNAKFTDVKQMLNS

SEQ ID NO: 371678 - protein, 403 aa, unidentified
MNNVAGIDVSKGKSMVSVLRPFGEVVAKPFSIGHTGSELKELADYLKSLDGETRVVMEHTGRYYEPVARFLHNEGVFVSAVNPKLIKDYGNNTLRKVKTDKADSRKIARYGIDNWAELRQHTPMDTIRMQLKTLNRQQSLYTKTKTMMKNNLIALLDQTYPGVNALFDSPVREDGSQKWVDFATTFWHVDCVRNMSLTAFAERYRKWCKRHGYNFSQSKAVEVHAGAQDLIAMLPRDALTKTMVRQAIDALNAISASMERLKAEMQALAAQLPEYPVVMAMHGVGDSLGPQLMAELGDVTRFTHRNAITAFAGVDPGADQSGTHEAKSTRVSKSGPPELRRALFLVMDCLLKTQPQDDPVYRFMDKKRAEGKPYLVYMTAGANKFLRIYYGRVKEYLASLEGN

SEQ ID NO: 371679 - protein, 415 aa, unidentified
MDTIYDRVAGLDVHQKFITVGVCCRLETGKLFAEVRTFGTMTRDLRALADYLEALGVTHVAMESTGVLWKPVWNILENRQFTLLLVNPRHVKQVPGRKSDVSDAEWIAQLLQCGLLQGSFVPKRELRELRDLTRYRAQLVSEQTRVANRVQKVLEDANIKLGAVASDVLGKSGRAMLWALNRGERDPDKLADLALGRLRAKIPELKLALEGHFSEHHQFLVEHLLRHLDDLEREIEQISQRIGERLPSILDDQRLRRLDAIAGVNRTTIENVVAEIGADMSQFPDEHHLSSWAGISPANEESAGKRLRNRTTKKNRWLRRAITEAAWAAARTKDSYLSAQYRRLAPRRGKKRALIAVGHSLLVIFYHRLKYDVEYQDLGVDFFDKREPERLRNYLVKRLQLLGYQVCLTPQTDAA

SEQ ID NO: 371680 - protein, 280 aa, unidentified
MNHTAIGVDIAKSVFQVHWVDPHTGEVVNKPVKRDRFLDYFANREPCLIGMEACGGAQHWARQLTKMGHLVKLMPPKFVKAFNIGNKNDPADARAIWMATPIPSKPVAVKTEAQQAVLALHRMRQQLVKFRTMQINSLRGMLTEYGEVMGKSRETLDKAIPGILAKLSDRLPAVLIDSLREQWSGLTGLDRQIAGIEQRLQAWMKDDVACQTIAAIPGVGLLSATAAVATMGDAKAFRSGREFAAWLGLVPKQTGSGGKVQLLGISKRGDTYSVEPLKLH

SEQ ID NO: 371681 - protein, 394 aa, unidentified
MCQHYQTEASMIKHNILFIGLDTHKTFTEVAYIEDQRGAKSTHLGKILSNKAAFKKLARQLQSKYPDATLHFVYEAGPCGYWIYRLFTSLNHCCYVIAPSLIPKKPGEKIKTDKRDALKLAKLLKSEDLTPIYVPEPEDEAVRDLSRARETGMKDLKDAKYQLKALLLRNNINSKIKDNWSLQYLRWLAELVLPHPCQQIVLQESVSTITERLKRLKRLDNELTHQVKNWRFYPVVKAIQALRGVRLLVATGVIAELGDLSRFDHPRKLMSYLGLVPSEHSSGDKRHLGAITKCGNSRARRLLVEGAHSYKHNANISKEMQLRQEGLSKEIIDMAWQAQLRLCRRYNRLMHKGKHRNVVVTAIAREMIAYIWAISREVVLPKIDVKLRISRVPA

SEQ ID NO: 371682 - protein, 391 aa, unidentified
MIYIGIDVAKDKHDCFITNSDSKVLFKAFTIFNNLDGFNDLYQKIESVMDDVTKVKVGLEATGHYSYNLLGYLIDKGLPTYVINPLHTNLYRKSLSLRQTKTDKVDARTIASMLMSDVNLKSYSDTSYHNEELKSLTRYRFDKVKERAKLKTSVSRLVCILFPELEKLVPTLHMASVYALLSEFPSAKHVATAHLTRLTNLLSESSKGRYGKDTAITFRDSARASIGSNMPAKSLELKHTIKLIQELDSEIDEIENEIKIIMDEINSPILSIPGINYRMGAMIIAEIGDFNRFDSPDKILAYAGFSPSTYQSGQLDGAYAHMEKRGSRYLRYALYNATKYVCHWDPTFAAYLAKKRAEGKHYNVAISHAVKKLVRMIYHLEKTKQQYIKAA

SEQ ID NO: 371683 - protein, 415 aa, unidentified
MKVVFPTCCGVDVHKTFVVATIITTPADSLQPHYQKKRFSTFNSDLNHFADWLLEHNCLDVCMESTGKYWVPVFNILEKRGIRIVIANPKWVKAVKGNKDDTKDSKWIGDLFRIGLVKSSFIPELNIRILREFLRYRYKLVSMKSSEKNRFQNAFTVCNVALDSVVSDMFGKSATAITDYLTSDESFDLDHCVSLLQRSLKKKAEKVLESIEGYSISDEQKARIKIIREHYDFVEKLIAKVDTCVNEMVEKYEGEIDLLCTIPGIDRNSAITIISEIGADMSQFGSSKRLCCWAGLTPGNNESAGKKKSVRISRAGVYLKPALVQVAHAAVKDKANPYYALKYERIAKRRGKKRAIIAIARMILTAIYKMLCTGEVWNPVDLYKVDMPEHLKEQQLAKAIKQATRFLEKQGLSVA

SEQ ID NO: 371684 - protein, 365 aa, unidentified
MPWSIRGPRACVYKVSRRRCRVGGPEPIVHQEDVLKKLCWVGVDISAKELVVVIERDGRKLPSIVLSNEPEGHRKLVALTTKRGWSARIVMESTGVYGLDLALALHRAKRIEVMVANPRAVSQFAGAYLQRSKNDALDAGVLLEFAKRMPFKPWSPPAPEVLDLRSISRRIESLTKTAAQEKNRRHASSQSDERSEVVHNDIEVNLRHLERRIDRLRQQALELIGRHADLALAFGLLTSIKGIAEAAGIQLLAELFVLPTDMTVRQWVAHAGLDPREFQSGSSVHKPARISKKGNTHLRRALFMPALVAIRWEPNVEAYYRKLLGRGKTKMQANVAVMRKLLHAIYGMLKNGEKFNGEKFFAIRA

SEQ ID NO: 371685 - protein, 320 aa, unidentified
MAQILNVLNKSCCGIDVHKRNVVACVLKADEYGEYISEIKTFSTMTCDLERLHDWLKEQNCEKVAMESTGIYWIPVFNILEQDFDIILSNARQIKNVPGRKTDPSDSRWIAKLLALGLVNGSFIPSKDIRELREMTGYRSKLISMRTSEKDRAHNILEVCNIKLSCVATDIFGVSGMAIIKGLIDQTEDADPSELAQLAKGVMRKKIPDLVKALNGKMDAHHANMLAMVLEHLAYINQMIEDLDQTIEEKCKPYQQEIELLDTIPGVDKVGAQAIVAEVGVDMSVFDTPERLASWAGLSPGNNESAGKKKVQEPGQATSI

SEQ ID NO: 371686 - protein, 355 aa, unidentified
MTMLAETIDAVIGIDTHRDSHEVEIADPAGRPIAVLRIGNDSAGFARLLAAIAEMAPGPRVAVCIEGTRGYGIGLVRALAAAGLLVLECEQPSRKQRRGKGKSDPIDAHLAVLAALRLDAGKLPVPRADGDREALRILLVARQEITEASTAQTGRLRALLLAGDDTDRRAARTTLTQAVLAALAGRDLPAHASREQAVRQAEIRRLALVLGQARRDLKDNRAQLLAIVEDIAPGLTSRFGVGPVSAAQAIVSFSHPGRCRGEAAYAALAGTSPLPASSGQTVRHRLNRGGDRALNRAIHAIALVRMRSCPRTRAYLARRTAEGKTRREIRRCIKRYIARELYRQLTHSMNPPVGP

SEQ ID NO: 371687 - protein, 339 aa, unidentified
MNYDYYLGIDMSKLSFDYCLMDGKGMVLKQGDLLNQEESIKDWIRELGYELGESNFWKKTLVCMEHSGYYGAPLLRQFSKETQTNIWIENALQIKRSMGLQRGKSDRVDANRIASYCLDFRRKARIWQPTRSNIERLGLLLSHRDRMVKNLMSLRNTVKEEEGYVSEKLHEEMKELNRRAIEAMEESVEEFDARIEELLQSDTELAELTKIIKSIPGFGPVIAPKIIEVTRGFTRLTDPRSFACYAGVAPFEHSSGTSIRGKTRVSHLANKDIKKMLHLAALVTIRKGNIMHEYFQRKVAEGKNKMSIINAVRNKLIHILFACVRNHTTYQKNYHHSLA

SEQ ID NO: 371688 - protein, 331 aa, unidentified
MSTICGVGIDVSARELTVSVAGKTTQSFENNAKGHRAISRLVRDCAKDEIQVCVEATGSYSLDLCFHLQGCGFRVMVANPRAVANFAKAMMSRSKTDPMDAEVLREFAERMPFVEWLPPSQGALELRAASRRLDSLSNMLTREKNRLHAARATKTTISIVCDDLKSSIKHFEGRIERLIKKIEAFIETQPSLDAHYRRLQTVRGIAARSAVRLLGELATMPADMSPRQCVAHAGLDPRQHQSGSSIDRPARISKRGNRYLRCALYMPAVVASQHDPVIKAFYERLLEKGKKPLQALVAIMRKLLHGIIGMFKSGTDFDAQKLFPNIRIGVA

SEQ ID NO: 371689 - protein, 387 aa, unidentified
MEYCTTIGVDVSDRTSKVCVMTKHPDGRREAIIETTCHTTRAGFIECFTNFDRTWPVAFETGTHCRWMDKCFRELGFKTIIANPCKVPSITKSNTKNDRNDARELARLAIADPEMLHPIKLRDEPYQQMLRLHHARNMLISQRTQTTNQIRGFAKSVGYRIESCSTDKFHLLNKSEWPKYLEEAAWPLMDTLETINLKIKAYDAMIKELAETPEFKDMVERVRVVYGVGLVGSTVFIAAIGGDPTRFDHARDVGAYFGLIPRQDQSGDCDKQLHMTKAGSEIVRTALVECACVAMQDNAKETDIKLKGLRIAMNGGKIAKRRAKVAVARSLAVTMLALLKNPEKEYVPLSEEGKKGFERYHAQMEYLFMSKEAKKEKRAKKDATVAC

SEQ ID NO: 371690 - protein, 391 aa, unidentified
MIYVGIDIASEKHDFFMIQAETGITFSKSSITIKNSDDGYKKLHESIQDFCGATGDSQIRIGLESTGIYHTNIISFLLSQNYQVMMINPILTNMARKASKVHCPKNDNLDSQTICKYMIDNSDKFLPYTLSLYHNEALKSLSRKRFYIVQDLRKAKLAVNSLVQQIFPEFKSFFSNIYGDSAIAILKEYGTPKNLAKAHTKKVASLIHGRCKCTAEQLIAAAKVSVGISEPHLAFQLTDAIEEMEHIQKRIKAYDAQIKEYVDMLCPNLLSIPGVGYTTAGLIAGEIKDIDRFHSAESLISYSGVDVTVYESGKYKAQHLMMSKKGSKYLRYALFQAARIIWQHDPVFQSYYNKKKAEGKHYYVILGHIQKKLCRVIYSVLKSGSLYSSAS

SEQ ID NO: 371691 - protein, 359 aa, unidentified
MLTQSNKIDFSGQHFYVGLDVHLKSWKVSIMAEKLTLKTFSQDPNPELLHHYLVKNFPNGIYHSAYEAGFCGYWIHNRLIALGISNIVVNPADIPTTDKEKVNKTDKRDSKKIARSLRNGDLKGIHVSSLKSLEDRCLLRIRGTLVKDLTRYKNRIKSFLYFHGIEMPEAFSKSATHWSKRFMNWLDSIELTEISAKKSLTLLIVESQHLRLTLLNALRGIQELSRSEAYANNVRLLQTIPGIGTLTAMIILTEMDTINRFANFDQLCSFIGLIPSTNSSGEKENIGEITHRGNNYLRSAIVESAWIAARWDLSLNKCFHDYCKRMESNKAIIRIARKLLNRIRFVLKNNQPYICSVIK

SEQ ID NO: 371692 - protein, 392 aa, unidentified
MVVSVGIDVSKDKHDCFILSSEGEVLVDGFTIPNTMDGFNCLLQRIQDCTTPQDKMKVGLEATGHYSYNLLGFLLDNGLPTYVLNPLRTNLYRKSLSLRKTKTDRVDARTIASMLLSDAGLKPYTDTAYHNEELKSLTRYRFDKVKERAKLKSSISRLVCILFPELEKLVPSLHIASVYALLAELPGAKQIAAAHLTRLKALLETASKGHYKRDMALKIRDAARNSIGSWMPAKSLELQHTIRLIRELDNEIVEIEEQIQAIMDELNSPITTIPGLGFRMAAMIFAEVGDFTRFDSPDKLLAYAGMSPSTYQSGQLKNCYPHMEKRGSRYLRYALYNATKYVCHWDPTFAAYLAKKRAEGKHYNVALSHAAKKLVRLIFVMEKSRRTYYLAA

SEQ ID NO: 371693 - protein, 382 aa, unidentified
MLADQVRYVIGVDTHKDAHTVAVVDRNGAALAHETVAANAAGYGRAVTFAARAAPVRLDQRVWAIEGTGSYGAGLSTFLLEQNERVVEIDRPARPARRTGAKSDELDAVRAAREAMSRDHLAQPRRRGDREAIRVLLHTRESAMEARTKAICRLRALISTAPEQIRARLHHLTYGKLLSAAARWRTPSSQSAEYRCTGIALRSVARRIMALEAEMESLEEELTSLVTAAAPRLLSEPGVGVLTAAEILLAWSHPGRIRNEAAFAALAGVAPIPASSGQTVRYRLNRSGDRRLNRALHTIVLSRLATHPESQAYADRRNAAGKSSREIRRCLKRHLARRIFKILDADSTEVHVSTSVGTAENLFVRHVDMEPNLAAEPTPVAV

SEQ ID NO: 371694 - protein, 320 aa, unidentified
MSQNTSAIMNDKPTPVYAGLDIAKASLQLQLQGKSYDLPNTVDGHAQLIKRLAAVPGAHLICEATGGYERAVLAALHAAALPVSVINPARVRQFARASGELAKTDPIDAAMLTAFGHAFAPEPTPPRTSTELKMTALVTRRVQLLELRVAEAQRADACADAALRRLFTPWLAQIEKQIAKVAALIEALLAEQAPLAARVQRLDDITGVGRITAVTVLATLPELGQLNRRQAAALAGLCPYNRDSGQWAGKRSISGGRAEVRRALYMAALSASRSNHLLKPFYDRLITAGKPAKVALTAVMRKLIVLMNHLLKNPNFSLAQ

SEQ ID NO: 371695 - protein, 319 aa, unidentified
MNTMSKPNIHRNGRHVGIDISKTTLDIHVLESDIHWQSDNSEAGIKPLVSRLARYKLSRIIVEATGGYERKLVELLASKGLPVVVVQPVQARQFAKAQGVLAKTDKIDARMLAQFGATMKPQVRPIQSIKIRHIRDLLARKRQLTESRTQELNRAQKAEKVIASSHRRLIRILDKEIEWVNARLEKCVSAIAEWKTTYDLLTSVPGVGDGVAFTLLGELPELGSLTSRQVAALTGLAPYNHDSGNMRGKRRIKGGRAPIRTMLYMAMMCAIQHNPVMKSFYVRLVEQGKHKKVALTACMRKLMTILNAMVRDGKAWQQA

SEQ ID NO: 371696 - protein, 423 aa, unidentified
MTKLTSTPAGAVLVAIDMSKNRQEVLIERPEGGRRRRLTVMATRKDYDGFAEQLAAIGRPIVVGFEATGNYHRTLAHRLLTAGFELRLISSVALARTREALHNGWDKNDPKDAQVILHMLRIGATQRYVDPLAAGINDLQELSKTHETISRMKTQTWHRILTHYLPLYFPEIARFAGNSRSDWFLALIEQFPTPATITALDREAFSAAAWPLIGRKVSKARLINDIYETASASTALPVPEDSAAITMFRMVIAQGRSLIHQRDEIERLAHARLTDDVDYQLLRNIPGIGPINALTILAEAGDLRRFNHHRQFLKFCGLDLATCQSGTFRGRTKLSKYGNARLRRTFWMAAQVAARQRDNSFRDKLGRYTAGHADDADRRRKAMTALTAKMARVAHAVVKTGTEYRPFLERSDARWKDPSLQVP

SEQ ID NO: 371697 - protein, 403 aa, unidentified
MEHGTTRFGSVDWASEGHAACIVDAEGTAIDEFEVAHTEAGLSELCRRFRDAGVSRVAIERPDGPVVDAVIAANLEVVVVSSRAVKGLRTRYGLAGNKDDRSDAFMLADCLRTDGHRWPSLQPDSSQTLALRAAVRARKDLVGTRVATANQLRAHLQLVFPAAVGLFAEIDTAISLDFLERFPTAAKAAWLSEKRLVAWLAANAYCGRTSAAELLRRLHTAPAGLHGTSAPAQAAVTLTLVRVLACLVAEIASLEAQIREQLALHPDGFIFQSLPRSGCVRAATLLAEIGDCRARFPSAESLAALAGTVPSTRRSGKHLAVTFRWACDKKLRNAIIDFAQDTPRANPWAAAIYRRHRARGHTHPHASRVLARAWVYVIWRCWQDRTAYDPAKHRALQSLNAAA

SEQ ID NO: 371698 - protein, 387 aa, unidentified
MIAVGIDIAKRTHEACFMGQDGRQIGKGRRFHNNRRGVRALLDDLQQLPEPVTIGLEATGHYWLAVHDELVRAGHTVQVLNPLQTHAYRKTTIRKLKTDRQDAWLIADVVRIGRGRAAYVPDETILQLRELTRFRWGLVDQIGDAKRRILTILDRVFPEYETLFSDVFIKSSRALLERATTAAEFADADLDELTAVLKQKSRGRLGRDKAEALQAAARESLGLTRLGGVASFELRALLDQITFLEHQVAAVEQQIEALLATIEQHVTDIKGISPVMAASLIAEIGDVQRFQRFESLVAYTGIDPSVVASGEFKATETHMSKRGSPHLRRALWLSAITASQSNPDLAEYLRRRLDEGKPWGTAMGAVARKLLSRIYVILRDNRPYEVR

SEQ ID NO: 371699 - protein, 370 aa, unidentified
MGWSPLPKTASECQSGECKFPLMREATTMKATTIGIDLAKHLFQLHGVDQHGKTVLKRQLKRDQMLSFFSNLPPSLIGMEACGSAHYWANKLQGLGHTVKLMAPQFVKPYVKTNKNDAADAEAICEAVTRPTMRFVPIKSSEQLAILALHRARQGFIKARTAQANQIRGLLAEYGFILPQGITHIGKHVPELLEDSENSLPGTFRHLLMRLHEHLKMLDKQVNELEDAIVRWHKDSAASQTLAQLPGIGPITASALIASIGNAKNFKNGRQLAAWLGLVPRQHSSGGKQNLLGISKRGDSYLRTLLIHGARAVLRVAERKESFSGSWLAGVMARRNPNVAAVAQANKTARIIWALLAHDRKYDAHYGMAA

SEQ ID NO: 371700 - protein, 343 aa, unidentified
MSIIRIGLDTAKHVFQLHGVDEEEQPVLRRRLGRKEVERFFAKLPATWIGLEACGAAHYWARVLRGLGHAVVLLPPQYIKPYLKRGKNDALDAEAICEEMSRPSMRFVVPGLDPGIKSAEQQAALTMPRTRELLVKQRAMLINAMRGHAAEFGVIAAKGLAKVSELLQRAHAAEADVPALALEMLGLLASQLDALELKLKTIDAKLMAWHKANPVSQCLATQPGIGPIGAVSFTLKVSDPKAFRSGRHFAAWLGLTPKENSTGGRSRQGRISRQGDESLRKLLVLGAATVIQFAKPGRASAWLIDLLARRPRKLAAVALANKMARILWAMMVSGELYRRAQPV

SEQ ID NO: 371701 - protein, 355 aa, unidentified
MNDAKYIGMDVHTATISAAVRDSSGNLVMEATLETKAETILEFVHGLRGSLHVSFEEGTCAAWLHDLLKPHVTEVLVCDSRKNALLRVGNKNDREDARKLSELLFLNKLHPVYHGETGIRTLKELARSYLTITRDLTRVMNRLKAIYRGWGIACAGQQVYAPRYRAEWLAKISEAGVRRRAEIYYQQFDALAALRQEVRRELLAESRKHPAMRLLRQIPSIGPIRAAQLIALMQTPHRFRTKRQLWAYCGLALRTYDSGEYRFVGGQLKRSKKAVTIRGLNKNHNHDLKNIFKGAATRAAATAGPLQNFYEARIANGMKPPMARLTLARKIAAITLLVWKKGVRFDAEQLKQQAA

SEQ ID NO: 371702 - protein, 474 aa, unidentified
MTGAREPDTKCDPGYPLAPQIVASLSADESTQRRIEQAGCPLGAPKGEGGMGKKKSSPGGLAALYGRVCGLDVHKKLVVACVRILDAKDGTVQSTLRKFGTMTADLLELRQWLAEHKVTHVAMESTGVYWQPVFNLLEGHFQVWVVNAQHIKKVPGRKTDMRDAEWIAQLMQCGLLKPSFVPDRQQRELRDLTRQQTKLVQQRNAVDNRIQKVLETANIKLGSVASDVLGASGRKMIEALIAGEKDVTMLADLAQRQLRGKIPELQRALEGELTEHHRYLLRQLLGQYDFLEKEIASVSERLGAVAPPSFRVAVEQLDVVAGVGERGARALLAETGTEMSRFPTHKHFASWAGQCPGNHESAGKRKSGKTPAANRHLDAVLTEMAHAAVRTKNSYFKSQYHRWAGRRGKKRAIGAVKHSLLITAYFMLRDNKPYQDLGVDYFDKLNPQQRIRYHVRKLQELGQEVELSPVADAA

SEQ ID NO: 371703 - protein, 337 aa, unidentified
MDTAATCNAEYTLERVLYMAIELADNRWKLGFTTGFGQRPRERNVAARDVAALQREIHSAKRRFHLPGDCQVLSCYEAGREGFWLHRYLIHHGIDSLIVDAGSMEARRKHRRPKTDRIDMEKMLRMLIRYHAGDEDVWSVIRIPSLGAEDRRQLHRERWALSGERNKHINRIKGLLASQGISLSVNSNLPEALDQVHAWDGSPLPLGLKTRLLREHERLQLVEQQMKAIEQEQRQAIRNPDHPSITMVRDLMRLKSIHIHTAWPLTMELFSWRQFQNSREIGALVGLEPVPYQSGETSREKGLEKCGNARLRSLAVEFACRLAPAAAGSRGTNGGSG

SEQ ID NO: 371704 - protein, 352 aa, unidentified
MSNPTRWVGIDLHRRRSQIAVIDEQGELVLSRRVVNDRDTFRELLGDPDGTHVALEATYGWGWLAELLEEVGYDVHLAHPLRTEAIAAARVKTDAVDAKTLAHLLRTGLLPEAYIAPPDLRDLRELLRHRAVLTRMRTAVKNRVHALLARQGIREEHTDLFGRGGREFLAALELPEGSRRRLDSLMSLIAAFDREITATTREIDARAKTDERVPVLCQIRGIGRYTAMLIIAEVGEVSRFPSARHLCAWAGLAPTVRSSDGKARLGHISRQGSPALRWALSEAAQKIPTGGGPLRATFERIAKRRGRNIAKVAVARQILTLCYYGLRDGEIRCLKHQPATDDHDNHELAEAA

SEQ ID NO: 371705 - protein, 384 aa, unidentified
MYKYNILFIGLDTHKVSTEVAHVEDQRGAKPVHYGKIKTTKAAITKLARQYQSKYPQATLHFVYEAGPCGYWIYRLLTSLSHCCYVVAPSLIPKKPGDKVKTDKRDALKLTKLLKDEELTPIYVPEPEDEAIRDLSRARETAMKDLKDAKYQLKALFLRNNISCKVNDNWSLQHLRWLTELILPHPSQQIVLQEMIQVITERIQREKRLANELFHQVKSWRFYPVVKALQAVRGVRLLIATGIVAELGDLRRFDHPKKLMSYLGLVSKEHSSGDKRRLGSITKCGNGRARRLLVQGAHTYKHKANISTELQKRQEGLPKEITDIAWQAQLRLCRRYNRLLSRGKHRNVVVIAIAREMAAYLWAIAREVVITPVDTRLRISRVPA

SEQ ID NO: 371706 - protein, 330 aa, unidentified
MLVWAQELYQERNMDTNEPRTFIGIDVSKATLETAVDGETTVQQHPNDAAGIAALTDWVGQQNVALVVVEASGGWEMDLVAALAAAGLPAAVVNPTRVRNFAKALGQYAKTDKIDARVLARFAAVIQPAVRPLKTGEQARLAAVISRRQQLVNMLTQEKNRRVSTRHEMRDQLERHISWLEAELADLNDQLETLVAHCADWQAKKKIMMSVKGVGPVTANALLADLPELGTLNRQQIVALVGLAPLNKDSGGRRGKRHIFGGRKAVRSKLYMAALSAAKHNPFIRSFYERLLAKGKLKKVALTACMRKLLVILNAMIRDMKPWQPQPNWD

SEQ ID NO: 371707 - protein, 314 aa, unidentified
MTARWVGIDVAKAELEVAVWPSSGEHLSVPYDEAGCDTLLAAVRAWQPAGIVVEATGGLEVRVGSVLAAAGLPVIVLNPRQVRDFARGLGHLAKTDRLDAQLLAEVGAKVQPVRRPLPDEATRELQALVARRRQLMEMLTAEKNRLGSAVRQIQPQIRKHIRWLEAQLQQSDRDLDGALRHSPVWQEHLELLQSVPGVGPVVSRTLLAYVPELGTLTRKTAAALVGVAPFNRDSGTWRGTRHIAGGRAPVRAQLYMATLAGLRCNPLLRAFYARLVAAGKPRRVAMVACMRKLITLLNAILKHRQKWVAPPAPC

SEQ ID NO: 371708 - protein, 403 aa, unidentified
MNSVGIDISKGRSTVAVMRPFGEVVISPFEVRHTDSELSELARQLKSLDGETRVVMEATGNYHASVAKLLHDAGLYVSVVNAKLVHDYGNNELRRVKTDRKDAVKLANYGLDRWLTLPRYIPEEDTRLLLKNCYRQYRQYSKVQTVLKNNLISLLDTVFPNANRLFSSPIRGDGSEKWVDFVAEFWHCRCVSEKSERAFTCKYLHWCRKHGYNFSEAKAHTIYAEASGHIGVMPKSETTRLLVEQAVSQLRATSTALAALKHEMQSLASMLPEYPAVMDMFGVGPTLGPQLIAEIGDVRRFYSKKALVAYAGLDAPPNDSGDVTGRHKSMSKIGASSLRRTLFLVMSVYLQTAPLDEPVYQFMDRKRAEGKPYRVYMMASANKFLRIYYATVKAYLESLEHTA

SEQ ID NO: 371709 - protein, 343 aa, unidentified
MEHYAGIDVSLERSSVCVVDATGKIIREAKVASEPEALAGFFAGLGLAVTRIGLEAGPLSQWLHAGLSETGFEAVLLETRHVKAALSAMIVKTDRKDARGIAQLLRMGWYRPVHCKSPLAQEVRALLVGRKLLQGKLLDVELGIRGLLRGFGLKLGEVSKGQFAARVRELIAGQPMLERVVEPMLRAREALRCEFHVLHRAVLAIVREDAVCRRLMSVPGVGALVAITFTSAVDDPARFRRSRSLGAYFGLTPKRYQSGETDVTGGISKAGDTMVRTALYEAANVMLTRAGKFSTLKRWALEVAKRRGPRRAKVALARKLATVLHRLWVDGREFRFGKEVAAT

SEQ ID NO: 371710 - protein, 360 aa, unidentified
MAQARTFVALDVHVSGTVAVMIDRDSGELRRRRLSGRASEVAEFVAELPGPVRATYEAGPSGFALARRLQAAGVDCLVCAPGLIPRGPSDRVKTDQRDAERLVRLLIAGELHAVAVPSVEAESLRDLVRAREDLRGDLMSARHRVAKLLLRHDVRFEGTERNWTQPHLRWLSTVRFDHAGTQAAFDDYLGAVEVLIVRREQLERAIAEQLPLSPWALTARRLMCLRGIDTLTAAGLCAEIGDFTRFRHPEQLMSYLGVVPSEHSSGARRRQGSITKSGSQHARRLLVEAAWHYRRPPRVSEPLRRRQADADPKIVALSWKTQRRLHHVWSRMEQRGKRRTIIAVAAARELAGFCWAIATD

SEQ ID NO: 371711 - protein, 406 aa, unidentified
MQIQSLYLCVAGLDVHLKLVVVTIIHALAPDAEPKVETREFGAFKRDRRAMAEWIASFHPDEVSMESTGIYWKSVYVALERVGIRAKVVNAFHVSKVPGRKTDYSDSLWLAMLTRAGLLKCSFIPDESVRHLRLVSRHHSCMTDDLVSYKNRLLKVLNDGGMRLTAAVSDAHGVACRAMIKAIVSGQTPEQAVQLAGRLKSDRDQLILALDHELTPHHIYMAQAIQRQIDFVEQEIAELERYLYHALTRYQPLMDLLQTLPGMDRLSIAKLLVEIGPDMSAFPNPDHLAVWSGTSPGNEQSADKRKKAKTQRGNHHVRRILVEVAHAAARTRCYFKGKFNGWRPRLGYRKAVVAVAHKIIKIVHIMLSRNVPYEDRSADFEALRVSRNRSRWIKALQKHGHLPETA

SEQ ID NO: 371712 - protein, 347 aa, unidentified
MRFYTKQPPFSCGIDLHARTMYGCILDHAGETLLHRTMTATPEALLKAIAPYREQIVLAAECMFTWYWLADLCAEHGIPFVLGHALSMKAIHGGKAKNDKIDAHKIAVLLRGGMLPQAYVYPAEMRATRDLLRRRMHLARKRGELLAHVQNTNSQYNLPAIGKKIAYKTNRDGVAERFADPAVHKSIEVDLALITYYDELLRDVELPIVKTAKHHDANTLYLLQTVPGIGKILSLVLLYEIHQIDRFPRVQDFASYCRLVKCAKESAGKRSGTSGTKIGNAHLKWAFSEAAVLFLRDNPAGQKFLARLEKKHSKGKALTILAHKLARAVYYMLQHKTAFDMPKFLHS

SEQ ID NO: 371713 - protein, 482 aa, unidentified
MKPKPQEKTSKDSCRPKPGHWNEMNRKQRRETMRKIQSDDLSLEVVHPDSAGIDIGNESHYVAVPPTRDSQPVRRFGCTTAELKEMAQWLKQCAIRTVAMQSTGVYWIAVYDVCEAAGFEVYLVNARETKNLPGRKSDVQESQWLMKLHTYGLLRNSFRPSQEIRTMRTYWRQRNDLVQAAGRHIQRMQKALTQMNIQLANVLSDVSGMTGQAIIQAILAGERDPHKLAEFRDPRVKASKHEIARSLEGNWQEDLLFVLKQEQDGYEFCQKQMLECDRQVEQYLQQREDRSKGTPLPEEKRKGRLKKKKGNAPVFDLRGELFRMTGADLTQIDSIDIMTATTILSEVGWDMGKWETEDHFVSWLRLCPDNRISGDKIVGKGRLPTKNRVSIALKMAASTLRRSNTYLGAQFRRFRTKLGSPIAIKAMAAKLARLVYRMLRYGMKYVDQGAKFYETQHRILQIKQLKWKAAKLGFQVVQAPAA

SEQ ID NO: 371714 - protein, 463 aa, unidentified
MQLRLGVDIACRSPHQASLADETGRFLWSGRRFRTSVDELEELWASLPPEAEITVVIEPTRNAWVPLAAWFARKGATVVMVPSEQSADLRDYYSKHTKSDRIDSKILATLPLLHPEGLFPLEHLGPGEPLRRATRLRSSLVKRRSEIVGRIDSMLELLGPAWHAALDGKLDQITPLRLLAAGYSDPYLLRRLGRARIARFLHRHSHGRWNTVHAASLLAAANESIVLWGEELDFGELADDLALEARLALALTEEIRSLEQRISVMHRALDPNDIMRSAPGVGSVNAAQILGRLGDPGRFRSLAGARSFSGLIPSLDASGRNGSQGGPTKSGDALLREALFTSADIARRIDPTLAQRYHRLMTECGKHHNSALCSIAPTLLSRLIACWRTQTPYVIRDVDGRPIDADEGRRIVTERYTVRPELRALRRSTKPSEWTSRRSKESQSAPSTGPSTADLRERLRSSA

SEQ ID NO: 371715 - protein, 362 aa, unidentified
MFRPHTLYIRIRIVRKVSEPVFAMKDQDVTDVVRRKQQTAMRYIGIDVSKATFVVAYSSDKGGEIRTFNNTTTGIKQFIGALPKDGSIHCVMEATGNYSALLLYMLNVAGITVSMENPLKVKNFAKALLSTVKTDKSDARLITLYGEKMNPRPFKVQGEAILRLRQKRTVIRQLTKQITAMSNLRGSLACLPVPDKGATHTVDETIKFLEKKRDRLQSELTDLVEVEFSRQLALLTTIKGIGITLATALIITTGGFTYFQNAKQVSRYLGICPTYEQSGTSVNIRGHINRNGDAYTRGLLYVAAWTASRFNTKCGETYTRLRQNGKPGKLAMIAVANKLVRQAFAVVTHDKEYVDGFVSNRP

SEQ ID NO: 371716 - protein, 423 aa, unidentified
MEVMHERVAGLDVHKATIVACVRLGAGRKVTRECRTFDTTTDGLRALLAWLEECRCSHVAMEATGVYWMPVWKILGEGDFTLIVANAAHIKNVPGRKTDLNDAMWIADLLACGLIKPSFVPEEDMQELRSLLRTRKQLGREQTRHVQRIQKTLAEANIKLDSVLSDIMGVSGRRIIEAMIAGVRDPRRLAGLANTRIKATPKQLYDALHGRLTDHHRFLLTLHLRQWDSLDATIREIDQEVEARVARIDKEVKAGEAPFRDLIGLVCTIPGVSTLSGTTILSEIGRDMSRFPTAGHLVAWAGLCPGQNESAGKRKPARLRKGAPWLKTMLVQCAWAAKRKKDSYYKAQFFRLQARRGPQKAICAVAASILTAIYHILKNGTEHHDLGADHFNRRSTEDQAKRLVAQLTRLGFEVQLQRTAEAA

SEQ ID NO: 371717 - protein, 334 aa, unidentified
MEQITTVGIDLAKSVFSLHGVDGAGRVVLRRTVRRDQLMQAVAGLPPCLLGMEACSGAHEWGRRFQDLGHTVKLMAPKFVAPYRKSGKNDGNDAEAICEAVTRPSMRFVPVKSEEQQALLVVHRVRQGFIVERTATINRLRGLLCEFGVVLPLRSKTVRRQAAQAAEAVPQLARRAIGDLLEQLRLLDERISAYDREIESQARLSEPAQRLMKIRGIGATTALALVATVGDAREFKNGRQFAAWIGLVPGQYSTGGKTRPGHISKRGDAYLRNLLVQGARSVLHSAAGHQDRMSRWILELQPRRGYYRTLVAIANKNARIAWALLAKNETLRTA

SEQ ID NO: 371718 - protein, 351 aa, unidentified
MPRTSTVHAVTAIGIDMGKNTLHMIGLDARGAIVLREKVSRGRIALRFANMPPCLIGIEAGLATHYVARELAALGHDVKQVPPAYAKPFRQVHKNDFRDAHAVAEAVQRPTTRFVPAKTDEQLDLQALHRVRSRLVSDRTAVINQIRGFLLERGIIVRQGLRFLRQALPDILAKRTDVLSPRMIRIVADLASDWRQLDERIEAVTDEIKTLAKSDDSCRRVMTVPGIGPIISSAMVAAIGSGAAFARGRDFSAWIGLVPKQMSTGDRTILGRISKRGNGYLRMLFMQAARVILLRPASWPKHGFGVWLARAAQRLHPNVLAAALANKLARIAWTVLAQERSYEARIMKAAA

SEQ ID NO: 371719 - protein, 387 aa, unidentified
MPQLDDLSRSLVGLEQDATLIAVIEMGQSSWLVAGIVPGIDRQPLKKLTADQDGLLQLLHRWRNEAVQAGRTIKRIAVAYEAGRDGFWLARWLRAREIEAYVIHASSVPVSREHRRAKTDRLDTELLKRAFLGWLRGEPKHCSMAAIPTLEDEDARRPSRERESLVKECTRIVNRVKANLARLGIRGFRPSLAKASRQLETLRTPEDAAVPANTLAELRRDINRLCFVRQQIKEIETTRAKRLERAARQGRDAMVQLLARVVGVGVETADMLVQEVFSRNLRDRKAVARYAGLTGAPDESGQKRRERGLAKAGNARVRRGMIQLAWGHLLHQRDSALADWYRKRTADARGGTRKTMIVALARKLLIALWRLATTGEAPAGLLLRPTE

SEQ ID NO: 371720 - protein, 351 aa, unidentified
MHMLADSVEVVIGVDTHKHTHTAAVMAAAAGQALASLTVPATPDGYRQLLELADQHDHRRVWAIEGTGGYGAGLTRFLHAHHEQVVELDRPKRAARRHGAKSDPLDAVRAAREVLGRDQLAQPRATGPRAALSVRLTARRSAVQAAGDAQRQLHALVIAAPDVLRERLRIRSTHQLVAACARLRVQASWDVETATTAATLRSLARRIRELTSEAADHRQAILVLVRAWRPDLLTRAGVGPIVAATVLCAWSHPGRCRSDAAFAMLGGAAPIPASSGQTVRVRLNRSGDRQLNQALYTVVLTRLRTDPTTRAYATRRRAQGKTNREIKRCLIRYVARQLYRLLETQPALDPT

SEQ ID NO: 371721 - protein, 423 aa, unidentified
MKPSIEPSFTALIGIDWSDRKHDFCLQAAGSPQREFGVLVHSPEAITLWAKALYRRFGGPIAVCLEIAKGPLVHALQRHEFIVLFPVNPATLAKYREAFVPSRAKDDPTDAQIALELLLFHREKLQPLQPQSADMRTLATLVEQRRLLVGDKTRITNRLSSTLKEYFPQALDWFEDRDTILFCDFLQRWPSLKHAKRARQATLRSFFSAHNLRRAPLIEERIHGIRSATALTDDAAVLRPHQLLVQALVVQLRVTLQAIDHFDVEIAAVAKRLPDYALFAALPGAGSILAPRLLVAFGEQRQRYACAAQLQQYAGVAPVLERSGNKCWVHWRLACPTFLRQTFVEWAGSTIPRSFWASVYYHRQRAKGCSHQAAVRALAYKWIRILYRCWQTRTPYDESVYLLALKRRGSPLIAAMAATPQNA

SEQ ID NO: 371722 - protein, 287 aa, unidentified
MAGKVTETAVVGGVDTHKDLHVAAVVDQNNKVLGTQFFSTTRQGYRQMLAWMTSFGALKRIGVECTGTYGSGLLRYLQNAGLDVLEVTAPDRMERRKRGKSDTIDAECAAHAAFSGIRTVTPKTRNGMIESLRVLKTCRKTAISARRVALQIIHSNIISAPDELREQLRNMTRMQLIRTLGSWRPDASEYRNVTNVYRISLKSLARRYLELHDEIADLDVMIAAIVDELAPELIKRNAIGYESASQLLITAGDNPQRLRSESGFAALCGVSPVPVSSGKTNRYRLNR

SEQ ID NO: 371723 - protein, 487 aa, unidentified
MHPRTTNIPTQAFDVFRFSFESAGVLALENEYSGFAVRPAHYIAFAERKRARPCSLIYHFGRYDVKPLCTQPFTAYVGIDWADTKHDICLQAAGNDRREFDCIPHKVPKIDEWAKSLHRRFGGSIAIALELAAGPIVYALQKYDFFVLFPINPSTLAKYREAFKPSRAKDDPTDAELALDLLMRHPERFTPLLPQSVAMRTLLSLTERRRESVGDKTRLTNRLTNTLKQYYPQALDWFEDPDTILFCDFLSRWPTLVQVKRARQTSLKAFFHAHNGRRPQVIGARLEAIKAAVALTEDPGVIVPCRLHALMLVEQLRVALHAIDQFDRAIAELAPTLPDYSLFQELPGAGPHLAPRLLVAFGEDRDRFCGADELQKYAGIAPVTERSGKKSWVHWRWQCPTFLRQTFVEWAGQTINKSFWAGAYYRQQREKGSSYQAAVRALAFKWIRILYRCWQTRTPYDEVTYLNALRKRGSPLLKNITLNAENA

SEQ ID NO: 371724 - protein, 339 aa, unidentified
MNYYIGIDLHSTNTYVGVIDQENRKVFSKKFPNQLDTIIQALEPFRSAVAGVVVESTYNWYWLVDGLKEKGYRVHLANPSAIKQYEGLKHADDVTDAFHLAKVLRLGILPEGYIYPPAERPVRDLLRKRLHLVQQRTAQILSVQNLLTRNLALRMTAAEVKKLNVWDAGQLFTERHLILSAAASIGTIGFLGARIKELEKAVRTAGNLKRDYHLLQTVPGIGVILALTIMYETGEISRFARVGNYVSYCRCVKSTRLSNGKSKGAGNRKNGNRHLSWAFVEAANIAVWNYGYVKSYYQRKAARTNTVVAIKAVAHKLARACYHIISQQQAFDPKRAFAY

SEQ ID NO: 371725 - protein, 343 aa, unidentified
MTISILGIDIAKKTFQLHGADSTGKAVMKKRLPRHKLAAYAATLPTCTIVMESCGGANYWARVFQRSGHAVKLISPQFVKPFVKTNKNDANDALAIVEAASRPSMNFVPIKQVEQQDIQSIHRIRTRVVKNRTALINEIRGLCLEYGVMLTTGAAKVKPSLCAAIASCDNELTTSSRESMQDLYEELVDVEARLKKLDSKVRQLCRQSESCQRILKVPGVGELTATAIVAAVPESHEFRNGRHMSAWLGLVPRQSSSGDKQVLLGISKRGDRYLRTLLIHGARAVLSHRKVLDNNYDRWVANKKATLSHNKAAVALANKNARIIWSMLNTGEEFNYGVQKTAA

SEQ ID NO: 371726 - protein, 454 aa, unidentified
MGQAKSKKRGRSKRLSTINSNAAGIDVGSQFHVVAVPTDRDDEPVRTFQSFTGDLHRLADWLVACRIDTVVMESTGVYWIPLYEILAARGLRVLVANARDVKHVPGRKTDVNDAQWLQQLHAYGLLRGSFHPPADIAALRAFLRQRERLLDYAASHIQHMQKALIQMNLQLHHVVSDITGKTGMRIIRAILDGVHDPATLAAHRDVRCKASVETIAQALEGNYRPEHLFALSQAVALYDTYQEHVAHCDQRLEALLVQLRAPEPPQAPLPAPRHKTRQPNALSFDVRAPLYAMIGVDLTQIHGIGPSLALKLVSECGTNMTKWPTAKHFTSWLCLSPGNKVSGGKVLSSRTRRSKNRTSALLRLAAVNVGKTDSALGAFYRRLAARVGKAKAVTATARKLAILFYNTLRYGADYSDPGASYYEERHRTRVLHNLERRAKQLGYTLEPAQVAEVS

SEQ ID NO: 371727 - protein, 355 aa, unidentified
MNSEKYIGLDVHQATISVAVLDSTGKLVMESILETKAATILEFFAGLRGTVSVTFEEGTWAAWLYDVLKPHVAKLVVCNPRKNALLKDGNKSDRIDAHKLAELLYLNKLSSVYHGETGVRMLRELARSYLTIVKDLTRVMCRLKAVYRSWAIPCAGRDVYYTRHRDEWLGKINEAGVRRRAERLYQQLDMLQYLRQQARRELLAESRKHAITVKLRQIPSLGPIRSALAVALIQTPHRLRTKRQLWAYSGLALETRTSAEYCYVKGGLRRSKKQISIRGLNKDHNHDLKGLFKGAATRASVLPGPFQDFYQRSLAKGIKQTMARLTLARKIAAITLTLWKKGENFDADKLKSQAA

SEQ ID NO: 371728 - protein, 355 aa, unidentified
MDRTKYIGMDVHQASISIAVRDASGKLVMESLIETKAATILEFLQGLKGTLWVTFEEGTSAAWLYDLLKPHVFKVIVCDPRKNALLKTGNKNDRVDARKLSHLLHAGLLTPVYHGESGVRTLRELARSYLTLTKDLTRVMNRLKALYRSWAIPCAGEKVYSPRHRSVWLEQLSEAGVRRRAEQLYQQLDILLQIRRDARRELLRESRKHPAHDLLRQIPQLGPIRVSLLIALVQTPHRFRTKRQLWAYCGLALQTRSSGEYRFTAGQLQHSNRLPALRGLNTNHNHDLKNVFKSAAMHVSTSPDALGDFYRSLLAKGMKPAMARLTLARKMAAIVLTVWKKGARFDPGELKRQAA

SEQ ID NO: 371729 - protein, 494 aa, unidentified
MSRRKHKASRPVRPSCRAAARPSQPATKPVMPAVATAPSAAPDCYRDSLPVRHRHAAGVDVGSRSHWVAAYGAQDTIDIEQFDTYTDSLFALAAWLRARNVTTVAMEATGIYGESLFDLLEAEGFEVLLVNPAYTSQIKGRPKTDRLDCQWIQRLHAHGLLPASFRPQADVAVLRTYLRQRAELVRAGARHIQHLQKALELMNIKLTEVVSDVAGLTGLKIIRAILAGERDPLTLAQLRDCRCQNSTDTFARALHGTWRDEHLLTLGQALASWQHYQGQQRELEEVIAKQLHRMKKTTELPPLPPLPRLRSRSANEPRFDVRTALYYVTGVDLTALDGIKAVTALVVISEIGLDMSRFPTVKHFCAWLGLCPRLKKSGVRVLSSRTRKGKGRAARALCQAARSLWRCKTPMGSFLRRLKARLGAPEATTATAHKLARQLYQTLKSGQLPTKETAAEYEARQRQHAVAALQKKALRLGLRVLTSGETIETETAPP

SEQ ID NO: 371730 - protein, 405 aa, unidentified
MSDEAAEVAVPQIWAGVDIGKEHHHCVVINPDGERLLSRRVLNDETALLELIGDVLALDTDVLWAVDLNHGGAALLIGLLLSHEQPMVYITGLTVHRASASYRGEGKTDAKDAFVIADQARMRCDLGLLRPGDEIAVDLRTLTGRRTDLMCDRTRQINRLRAQLLEIFPALERELELTNKGPVVLLTGYQTPAAIRRSGAKRIETWLRNRKVRSAAVLARTAVEAAEAQHTALPGEKLAAARVVRLAKGVMALDAEIAEVDALIEARFREHPHAEVIVSLPGMGKQLGAVFLAATGGDMDAFGSADRLAGFVGLAPAPRDSGRVSGNLRRPRRFHRGLLNAMYLSALSSLKSCPASKAYYARKRAEGKGHKQALLALARRRISVLWAMIRDGACYQATPAVTAAA

SEQ ID NO: 371731 - protein, 403 aa, unidentified
MGAVAGLDWAAEKHDVLIADGRGALLDARVVEHSEHGVRELVCLLVDHRVQRVALERPDGLLVARLLDAGIEVLAIHPNQVKAARERFRPAGGKSDPFDAFVLCELARTDHHRLPRLAPSGDETVALRALSRSREDLVAMRVELANRLRAELDAFWPGARAIFADVDSKIALAFLERYPSPLEAKALGPKRLGGFLARNGYCGRRSAQELLERLRRAPVGCAGEAELEARRAIVLALVAALRPLVEQIGLLTAQIRGALAAHPDAAIFGALFCDPKSAVTAAGLVAEIGDNRARYPSADALAADAGMSPVAVESGKRRSAAFRRGCDHRLRSHFACLANSTRHWHPWAGEVYRRARARGCDHPHAIRVLGRSWARVLWRCWQDEAPYDPARHGNLRRLQTQGG

SEQ ID NO: 371732 - protein, 363 aa, unidentified
MTMLAETIDAVIGGDTHRDTHALEMCSPTGATLSTLEVSNTDAGFAQAMRWANEYAPGPNIVVALEGTRSYGIGLARAMSAEGMRVIEAKAPRKSERRGMGKTDPIDAHMAAVNALNLDAGSLPVPRADGNREALRILSVARREMTSTQTRHINQLRTLLLGGDDSERELARGALANTRLGQIARRRSRDGEGVEQVVRRCEARRLALTIKASRVALVENKEQLAELVDQSVPTLTDGFGIGPVSAAQVIVSWSHLGRCRNEAAFASLAGVCPIPASSGRTIRHRLNRGGDRALNRALHDIVITRWRACTRTRDYIENRRVEGKTDREIRRCLKRYLARELHHTLTKIMTEPDLAQESSSAAR

SEQ ID NO: 371733 - protein, 295 aa, unidentified
MEYYVGLDVSLKHTSICVVNPTGSIVQEGVVDSDPEAIALFVRSRAPGTVRIGIETGPTTTWLWTELNRLGLPVICIDARHAKAVLKMQINKSDRNDAAGIARIMQTGWFKEVRVKDLDSHAVKALLASRALMVKIKRDLENQIRGLLKNFGLVIGRGKFNVFAVRAAELIENRPELIAAVRPLLEARKAIEQQVDDLDRKVHKLARHDVEVRRFMTVPGVGPITALCFKATIDDPTRFKRSRSVGAYIGLTTRRHASGEIDWSGRISKCGDAMLRMYLFEAAGVLLTRVPKWSG

SEQ ID NO: 371734 - protein, 347 aa, unidentified
MPHHAEEEVKVFAGIDVSARELSVALLRSKESEETAATFTNTRPGHKALLAYLLRGNQRVRVCLEVTGNYSLDLALTLQAHCQIEINVVNPRRARRFAESLGERSKTDPVDAHVLCEYARRMPWVPWQPPSSTALHLRAVMRAVEDLNSILTQEKNREHALAASEALPSLVLRELKRHQRYLQSRLERLRREALRLVARDPKLVRHFQLMQTTPGIGENSALQILGELAVLPDMLDARQWVAFSGLDPRRFKSGTSVEQRPRISRAGSRHLRRALYMPALVALRHDPYLGSFYQHLLKLGKARLQAVVAVMRKLLHAFFAMFRSDQPYDGSRLCAFELTNKPVASHG

SEQ ID NO: 371735 - protein, 427 aa, unidentified
MREEAVLEETQDEQEIIQRVAALDIGKAELVCCVRVPDPKGGSRRVQEVKTYSTMTRSLQVMADRLLDLGVTRVVMEATSDYWKPPFYLLEAHGFEAWVVNAKDVKNLPGRPKTDRLDAVWLCKVAERQMLRPSFIPPSPIRRLRDLTRYRVALVSDQTREKNRVEKLLEDAQIKLSVVATDIFGVSGRDMMAAMIAGERNPQVLAQMARARMRTKIPQLEEAFVGYFTDHHRFLLAKMLARIDALNADIADVETQIEAQIAPFASAVARLDEIPGVGATTAAVIIAEVGVDMTRFPTPAHLSSWARFAPGVRESAGRKKGTGSTGHGDRYLARALGEAAVGASKTNTFLGERYRRIARRRGKKKAIVAVGRSILVIIWHLLGDDTARFNDLGPGYYDSRINPEHKKRNHIRELEALGYKVTLQPAA

SEQ ID NO: 371736 - protein, 415 aa, unidentified
MKVVYPVCCGVDVHKSFLVATIISTTSGVEPYYLRKRFSTYNGDLRAFANWLISNNCNDVCMESTGKYWVPVFNILEDFKINATIANPKWVKAVKGNKDDKKDSKWIGDLFRLGLVPGSFIPPKPIRILREFTRYRYKLVSMKSSEKNRFQNAFTVCNIALDSVVSDMFGKSATLITDYLLSDIDTFDPDYCVSLLQRSLKKKSDAVLQSIEGYSIMPQQKLRMNMVRSHLAYIENSIAQIDKALDNMVAPYESALSLMCTIPGVDHASAITILSEIGDDVSHFNSSKQLCSWAGLTPGNNESAGKKKSVRITRAGVYLKPALVQVAHAAVKSTESPYYKIKYEKIAKRRGKKRAIIAIARMILTAVFSMLSTGETFNPPDLFKIDMPTELREKQEQKAVKQAIKFLEARGLAVS

SEQ ID NO: 371737 - protein, 341 aa, unidentified
MTEVSTIGLDLAKNVFQAHAASASGAILFRKKLRRDQVLAFFATQPRCLVAMEACASAHYWAREIAKLGHEVRLIAPTYVKPFVKRQKNNAADAEAICEAAQRPTMRFVAVKSEAKQASAVVFRTRDLLVGQRTQIINAIRGHLAEYGLIAPQGPSHVDQLIAQIEDPNSGIPDPARSCLAVLVETLRALQGKIAALDTEIAARAKRDDGARRLMSIPGIGPLIATAIEALAPPVETFRSGRDFAAWVGLTPLQRSTGAQERLGKISRMGERTLRRLLIIGASGVVRWARRKGVPAGSWLARMLARKPPMLVIVALANKMARIAWALIAKGGSYRAPAVAA

SEQ ID NO: 371738 - protein, 440 aa, unidentified
MKQIRNHAAGIDIGAKNIFTAIEGKEVRSFETFTESFQQATSYLLENRVETVAMEATGVYWIILYEMLESAGLDVWLVDGRQTRQVPGRKTDVKDCQWIQQLHSYGLLNRCFVPDDQVKAIRDYHRLREDHIRSTTMHVNHMQKALTEMNIRLKEVLSQLHGASGLAVIQAILNGERETHKLLSLCHHSVIKKKADQVLKALEGHYTESGLFALNQAYQGYRFYKEQIRECDHAIQKSMEQINNYLDDQDSKKQIDSVKGRKPIRHNKPEVEHLGGHLMKIFTGKDATVLPGITDYTWMQLYAETGNDLSRWQSEKHYTAWLGLAPGQHNSGKQKKTRNRKYRPKAGQIFRQIAQSLIESKKIALGAFGRRLKGKRGPGIAVKATARKLAVLYWRLMVKGLEYTENGIKFYEEKMKLQKERWLQKTVHELGYELVLKPVI

SEQ ID NO: 371739 - protein, 453 aa, unidentified
MKQKNKKRFKTIVPQPLRTINPDVAGIDIGSEEIYVAIPSDRTAESVRVFATFTADLHTLRDWLLEHRIKSVAMESTGVYWIPLYDVLEKAGITVCLVNARYVKNVPGRKTDVLDCQWLQQLHSYGLLKSSFRPSEEIRQLRAIARQQDMLKRYRAAHIQHMEKALHEMNIQIDNVLNDITGVTGLAILRAIVAGEHDPRVLAQYRDPRCRSTQEVIEKSLEGTYLDEHLFELKQALELYDFYSKKIADCESRLHSLYKNTTSSPDYPDSPLPPKKVQKQTETWNELYRMCGVDLTRIDGLNVSSVQTIITEVGTDMSKWPTFKHFASWLALCPNNKITGGRVVATTKKKTTNRATTVLRLAARSLHFSKSALGAYFRHMLARCGPKIAIKATAHKIARIIYTMLKNHIEFQAVDESQYEQQNTERSIRNLYSKAAKLGYKLVPKETLIPIPV

SEQ ID NO: 371740 - protein, 473 aa, unidentified
MGKGSGSGMTRGDVRRNARRERLRAVLPRGGAVVGIDLADEKQAIAVIDHDVRVLARKTVRVKAFRLGEALDWAVAQAAAKGLAAVTVACEPTGPRWLQVQRLCAERGLPLVCIQPLVSHIAREQQDYTTHKTDEADCVMIARLAVELHCYIPEELDETWAHLRHLGRRRAQLITAATASAQRIGDFLPVAWPTVTETCAQPLKSVTWLAALQVVTSQCGGQPGKLAAMGPEAFTALVRSAVPGWGGQRAWGTICGRIFAALTDTEGVVVSSRRGLLRRCADELGDLQRTRAQLRAVEADMVAVLAELGLSRLGDIPGLTAVGAAAILAETGDPRRYDSSSSVVKHAGLSPSENASGAFAGQAHISRRGRPGLRLTVWRAVWPMLQFNPVMAAKYQAMTADAGPAAAPADAGSRPAMAAAPGRARRAKARVACAASLLRWIYSMVVHDTSWDPAVASGAASSQQATRCPAEAA

SEQ ID NO: 371741 - protein, 343 aa, unidentified
MVEGTEGSHHKEGSTKMIKRTTICAGIDTGKRKLDIALDGSSERLQVDNTPEGYEALLDWLRRHRVKRIGIEASGGYERAVVTELRRQRFVVIVFQPAQVRAYARFRLQRAKNDKIDAALIAACTAAVKKIHAPPDARLLPFAEHLTMIDQIGEDIARLKNRLETCRNPRIGQTWKDDIARLTKREKIELKALVAAICEHRDLAQRLDLIKSVDGIGLPTAVAILVRLPEIGRITREQAAALAGVAPYDDDSGEQVGIRHIEGGRERLRRALYTAALPASFRWNPQLMALYRRLIAAGKEHKRALIACARKLLIFANTVVARGTPWDYEPAPITSMTAVPQTG

SEQ ID NO: 371742 - protein, 443 aa, unidentified
MKKTVKMEIVNAHAAGIDIGSKSHFVAIGQGKDEIREFNVSHSGHLAMVKYLTEAGTTTIAMESTGSYWQSLYLVLIESGFKVQLIPGSSLRNFKKTDVKDAQSIQRLHTLGMLSSCFLPENDQARLRELSRHRKNIIQQISKATLRMQKCLRMMNFRLDIAVNDIVGKSGLLILRAILGGVTNPQELAALANGRVKKSREEIADALHGNPREELMFELGQNLESFDFFQRQLEKVDQKVEDLLSKIKTENQDNQAPNLAKKQMKGKNQIRVPIQKMAYKLFGIDLLAIHGVSVNTVFTLISEVGMDIHKFETAKAFACWLRLSPNNKITGGKVVSSRTPKGKNPLSQALRDAANVIGNQKEGPLTHFFKKIGLRKGRCAAITATARKLAVIIYRMIKDKTSYNPVVPEYIQEKINRNKLKNASSFLSKIGYRIVDDQGLVIS

SEQ ID NO: 371743 - protein, 354 aa, unidentified
MNYVGIDYHKRYSVATAVDGAGAVVQSRRLDNRPEPFQAFFDSLDGPSQVVLEASRTWDVMYDLVEELDGVEAVTLAHPYKVRAIAEAQIKTDKIDSHILAQLLRVNLIPAAYIPGRETRSYRDMIRQRMFLVRLRTKVKNRLTVHLDRLHIPLPAVSDLFGKRGINYLKGLQLPGIDGEILRESMELLDTLNTLIKGAEKELQGGIGKDRRVEVLKTIPGFGPVLAAVAALEIDTIDRFQSPAKLAAYMGLVPTTYASGGRTYHGRLLPMCNKWLRWALIEATWVAARCSPYCRTFYESRKRHKGAHTAAVALARRLCEIVWHVLKENRPYQERPFRAFQKQQKSSPAALGCV

SEQ ID NO: 371744 - protein, 415 aa, unidentified
MGKKRKKKLQKVVELKSLTQINLDAAGIDIGADELFICVPEGRDEKSVRSFGTFTNDLHQVGKWLTKCRVTTVAMESTGVLWLPLYEHLADNGFDVYLINARHIKNVPGKKTDVLDCQWIQQLHTYGLLQNSFRPEAEMVALRSLVRHRGMLIRYRSAHIQHIHKALQQMNLKLDRVVTDVTGKTGMTILRAILSGERDVTRLAAHRDGRCHHSETEIAQALVGNYREEHLFALQQAVEFYDFYTQQIRKCDDEIEDRYAAFRPQVDIEKNPLPPPKRKKSHGNEPDFDLRSYLYQMAGVDLTAIEGISALTVQTVLSEIGLDMSAWPTVGHFTSWLGLCPQNQISGGRVLKRGTAKVVNRAAQALRMATQSLHRSRSMLGNYYRKMKSKHGPQVATTATAHKLARIIYTMLRLR

SEQ ID NO: 371745 - protein, 326 aa, unidentified
MLLPQTARFLREARVASEPEALIAWFRSCGFELERIGLEAGPLSQWLVAAMRKAGLAVELLETRHVRKAFEAMPVKSDRNDARGIAQLMRLGWFRPVHCKSMSAQETRTLLTARKLVQSKLRDVENSLRGILRGFGLKVGKTTEREFAGRIEELVVGHRHLQVIANALLAVRAVLRKEFAAFEKQARKMARSDTRARLLMSTPAVGPIVSLTYASAIDDPGRFKSSKQAAAHFGLTPKKYQSGETDYTGRISKIGDSSVRTALYEAAHVMLTKPLKGCSQLKSWAMRIARRAGMSKAKVALARRLAVIMHRMLADGTPFNAAAAAA

SEQ ID NO: 371746 - protein, 422 aa, unidentified
MFAESTDDEQIIARVAALDIGKAELVCCVRIPAAGGGKRRQQEVSTHSTMTRSLADLANHLVDLRIERVVMEATSDYWKPVFYLLEAHGLEPWLVNARDVKHLPGRPKTDVLDAVWLCKVAERQMLRPSFVPPRPIRKLRDLTRYRVDLIEVRTAEKNRVEKLLEDACIKLSVVASDIFGVSGREMMAALIAGERDPAVLAEMARTRMRTKIPALREAFTGHFDDHHRFLLTQMLGRIDGLDADIARLEEEIETMIAPFAQAVERLDEIPGIGVTSAAIIVAEVGLDMTRFPTPGHLCSWAKVAPGIKSSAGKTKGNGSTGHGNRYLARALGETAVVIGRSDTFLGERYRRIARRRGKKKAIVAVSRSILVIVWHLLADPDTHYDDLGSDFYARHVNTESKKRSHIRQLESLGYRVTLEPAA

SEQ ID NO: 371747 - protein, 453 aa, unidentified
MKPERKKKNQSKKVLMTVVNPNAAGIDCGSRSHFVCVSQDNVIEFGSHTQGLNEIKEHLKSHGIKTVALESTGFYWQQLFMILQSAGFEVFLVNARHIKNVKGHKTDVVDSKWLQLLHSIGLLENSFQPDAFTKEIRQYARHRRSLIETSSRYVNKMNKSLTLMNIQLKTVLSDLSGASGLKVIKAIVEGERSPEALEQLVGKGIKATRQEILLALKGDWRNEHLFELAQNYEGYLFTQKQIEQTDKQIEILLKDWESKNGNKELSQEYSKTKHRSSQKNDPKADIRPFAFQMAEGVDLSQIEGVSTNTIFTLMTETGFNLKEKFNTAKHFASWLGFAPNRKITGGKTISSHTTTVQNPLSYALRQAANAAGNGKGRLGDFFRKIAFKNGRMAAIVATARKIAVIIYKMLERKEAYAYNYSVIETQRAKQYQLKNIQKKIKQLNIKQEDLVFC

SEQ ID NO: 371748 - protein, 328 aa, unidentified
MPDSIVGIDISKTHLDAYMAPAGKAARFTNDAAGFNALIAWVDQPVRSVVYEPTGPWHRAFEEALLRAGLPLARANPLQARRFAQAMGQRAKTDAVDARVLAQMGAALPLRPTEASSPTRRALEELQMARDALVQDRTAARNRQKHLRHRLLRQQSKTRLSQIDRHLAAVDAEIGKRLAEDVVLARRTEILTSIPGVSSITAAGLLTQMPELGRLDAKAVASLAGLAPVTRQSGAWQGRSFIQGGRSRVRRLLYMPALAAIRCNPDLRAKYRQLRGQGKPPKVALTAVMRKLLLLANALLEQNRSWLPDRPGRGSAAAPTGSATPVAA

SEQ ID NO: 371749 - protein, 408 aa, unidentified
MQVTFGIDVSKSTSTVCELIGESKNELTITNNRPGFIQLLHELTAFSKHPQIIFEATGVYSRTLQSFLEDYGYDYVILNPLKAKKEMDMGLRHNKTDKTDAYHLALIQRLYHHPINQLQSQTYKQLNALSRFYDQLTADLVMAKNRLHQALQSTFPEIENLFSSAKGKNYWQIVVRYPHCDLVRREDKKQLINWLMSLKGIAFKHALRTADKLIELAYQAYPVVSCSSIEVEQVQYYAHRLLNLSDQRENLIARMVKLAKSLPNHDLENLESIPGFAQTTAVRVLAELGDLRRFSNPNKINAFIGIDPGRYQSGEMDSNLSITKHGNAVARKLLYRAIGQIDNAAKTNPCHIADYYESKKLSSQTKGFKKIAIASIHKLIRTIYALIINDQLYDYNVATHNQKDFSCN

SEQ ID NO: 371750 - protein, 487 aa, unidentified
MRSIFRKRNPDVEALFRAAEVASKVMCVAFDYAKKIHTAVVCDGTGRQLRGVFNVENNRAGLDFLLSVVAGLCRKHKIGREHVFFGGEDCGSYAFNFIHALISRGFLVVGMNTKQAKDEREGSRASTDLIDTVGVAGMMIKMRGRTIGLASEQVHGLKRLRRQRGAILKAHSASAHRMYRITDELFPGFLSCERSGIDPFSRASLWLMDERFSAADVHARHRPALTRKLREFGLKDPEGVVEKLRSLSETVLPPAEAMIPALQRSLSEEVGLYRLLSSSLHGLDTDIAQQLAGTPGAMLTTIPGIGLRWAPGLYAELGDPLRRRNVHSMAALGGIVPRIKQSGGPDSPAVVGHRGKACSSFLKHVLMSSAVSVSQYGHPEMREAYQTDKALGRDARTRLAQKLLRISLHIIDHQNFFRPPSLYQDGTLEAIGEYYRRMWPKVLIKWRDAGAIKEATAEGTPLRQWRDMAQELYGLDLDLRSPQTGRK

SEQ ID NO: 371751 - protein, 313 aa, unidentified
MMALQDVFVGIDVSKGRLDVHVRPLGVGFSVSNEAAGYAALIARLRPLRVKRIVLEATGGYERALWLALSEAGLVAAIVNPRQVREFARAAGRLAKTDRLDAAVIAHFAETFAPRIGKPDPVADRLGEHVLYRRSLQDEIVALEHQRRRLETSALRERAERRHAALRAEVKEIEAAMRAIVDSDPAKKALFACLTALKGVGLVLACTLIANMRELGSLTRHQAAALIGVAPLNHDSGARRGYRAIAGGRRRVRNVLYVATLSAVRCNGPIREFYRRLSAGGEPAKVALVACMRKMVVMLNGRVRDQLAATATP

SEQ ID NO: 371752 - protein, 462 aa, unidentified
MRYIGLDLAQTTSHKALVIDEGGQVITPVLSVKTSAISLELLFQRAREGAPADEPLIVVMEPTGMAWFPIAVFCQRHGVKVYLVNSQQVADLRRFYRKHAKSDRIDARVLARLPIVNPEKLHALQLIGARQMACQRGCKELDRLTDLMVAIQNRLRAIDRFAWPGLEQVLSENIAPLTRWFRENWYDPGAVLAAGAAGLLADWQENGPKSAEMPESDEWASALVQLADEVVALYGLESAFLSYDYLQAEVCREQALLATLEDEYQQLQLKTVRPLYRQLHPSRNLETLYGVGQDGAAVYFSFIGDPERFPDHASFRGWSGMIPRSSQSGGSEAKGLSISQAGPGLVKKFSFLGAETARQWDPQIAAIYYDQVANRGKHHTQAVCTCATHLLDRIWTILKEDRAYELRDVDGTPVTAEQARQIIATRYTVPKEVRQRNNQRTRRARREQLAEKNQKGKAIPIG

SEQ ID NO: 371753 - protein, 393 aa, unidentified
MKDVYASVRAIGMDVHAKFTTVSMRDANGDIVRRERLDHRDRAALRRRLLRWPGEASVVLEASFGWPWLGDLMQDCGLSPMLSNCYKIEQMRKARGMAKTNKKDADLLSLLAFEVDQWWRVWLAPPDVRDAREWMRHRASLVQIQTQTKNRIAALLHRHGILHEFSDLYGTGGRQFLADVCRQCGTAEVSLPPGAVATLADLLDLLAHIRGQLARIAQELRRQLQRSDLARRLDGIPGIALILSHTLIAEIGRIGRFRDHRALASYSLLAPIAHDSGEETGKPPLGRHLGRRGNRTLKWVFIEAAHGAVRKGGKWRRLFDSVTDGGKNNRSRGYIKVARELVKVVYVVWKKNVAYTDTPPTRPGRSPRQRSEAFLQDTRPGTGQPCRPMAAVQ

SEQ ID NO: 371754 - protein, 586 aa, unidentified
MPPVSDNVSNRTGRPAARIGVGIDTSRYGHYAAFLADDLQPAAAELSFAESADGYALLQKRLELLAQRHPAAAFVIRLDVAGQYADNLLHFLHGLADPSPPSATFLTGRAVAISCGDPQRNKNYRAALFGAKKSDAVEARACARFAVSERPAATAVLPVPLRVLRQVATRLQAAVRQRTRLINQLHHLLALSFPELALLVKDVSQGWLLELIHRYPTAPLLGAAKAEDLDAIAYLPVKQIEPLLSHARTSIASLTGPAVEELIRDQVRQLRDCNARQKRLESLLVTTYRALPEANHLDTIPGIGAVTAAVLTAFILDVGRFESPGKLVAYFGVLPIEMSSGIDREGQPRGSRRYVMSKRGNDLVRRYLWMAALSAVQVNPAVRALYRRVAAKHPEHKAIAIGHAMRKLLHLAFAVWKTGKPFDPEHHPWEGPGGEAGGAVSAGKPEAGQEQAAGHKPGSEPAQEVVTAACADKVAGQAPVGEGAYVDFAHVKRQLSMGRVLAHLGLLARLKGGGDRRRCACPIHRADGRGRTFSVNLKEDVFLCFDARCGKQGDVIDLWAALHQLDLRGAALDLVRTFGLEPAPGR

SEQ ID NO: 371755 - protein, 416 aa, unidentified
MDVVVARVAGLDVHKDTVVAAVRVPGPKGVRTELVKEFSTFTGDLLRLREWLTECAVTEVTMEATGVYWRPVWHVLEDEGSFELRLVNARHVKNLPGRKTDVSDACWIAQLAECGLLRGSFVPPKLIAELRDLTRYRKKLVEEHTREVQRLQKVLEDACVKLDSVVTDVTGKAARNMIEALIAGERDPVLLAEMALTRTRPKIPELRRALVGRFNEHHAFLARMHLDRMDSLDEAVAKLDAEVDRVIAPFSDALVRLQTIPGVGQRTAEVVVAECGIDMSRFPTAAHLASWAGLCPGNDESAGKRRSGRARKGNAALRAALCEAAWVGVRTRDTYINAQFRRFRRRFGAKSEGKALFAVAHTLVVIIWNVLATDGATYVDLGPDWFQQRDDTQAHVRRLVRQLERLGLSVNVKPAA

SEQ ID NO: 371756 - protein, 371 aa, unidentified
MNHVTSIGLDVHARSVTAVALDSITGEVRSQKFGYSPAEIAGWILQLDSPKAVYESGVTGFHLVRELREMGVDCIVGAVSKMHKPASDRRKKNDRNDAEFLARQLMAHNIVEVFVPDVETEGARNLSRALEDVRDDLTRAKHRLTHLLIRWGYVWNEFNEDGKRRGSWTHAHWEWIRGIELPDAAARESLDYYISEVRHIESQKKAIEKRVAQCASRPRWRDRVEALRCMKGIETVTAFALTVEAGVFSRFDSARAFASWLGLVPSEHSSGERASRGGITKAGNSHLRKLLVEASWHYTRATKERKRPLCDESVPASISNHAAVGVKRLVERRRHLSCELRKRPAVANVATARELACWIWALGRMSEGALA

SEQ ID NO: 371757 - protein, 339 aa, unidentified
MQIHSVGIDLGKTTFHLVALGASGKVLVKKKFTQRQLLAYTANMQTSLIGLEACSGAHFLGRALRKQGHDVRLIAAQFVKPFVKSNKNDFVDAEAIAEAVERKNMRFVPIKTDDQLDLQAIHRVRDRLISRRTAVINQLRAFLLERGMVFAQKPAKLKAAMADILENADADLTPLMRNLIDTLWGEWKLVEQQIEELNDELERISASDAGCTRIRKIPGIGPVVATAIVAAIGNGAAFRKGREFAAWLGIVPRQYSTGGKAKLLGISKRGNVYLRKILIHGARAAVLRIKRDRAPIGAWLDALDHRAPKNVVVVAMANKLARIAWAVLSSGNEYRPVVA

SEQ ID NO: 371758 - protein, 445 aa, unidentified
MAVSPQSVEPGEPFVRCFSAFTEGLDASVEWLKACGITTVAIESTGVYWIALCQKLEAAGIQVFLVNARHVRHVPGRKTDVKDCQWLQRLHSFGLLSASFRPEDAICRLRSLERHRLNLTWTAGAEIQHMQKALQQMNLHLHHVVSDITGLSGLRIIDAILAGQRDAVQLTKLRDYRVCKSTVAQMQAALVGDYRPEHLFVLGQNLQAYRFYQARIQECDVQIESHLQQLAQRFESSSALPAKLPEPEVLNDAQAQNPQPAKRKVKRKPQANEPKIDLADYLRRICGVDLTQVIGLNVLSVLLIVSEIGVDMSKWRSAKAFSAWLGLCPRNKISGRKVLDTRTCKVINRVATTLRLAAQSVGRTDTALGIFYRRKRAHLGPAKATTATARKLACLVYHLLKYKDQYREPDPTTYQLKVEKAILARIQKQAAALGYKLLPTALVPA

SEQ ID NO: 371759 - protein, 377 aa, unidentified
MNRILKIGMDVHSKNYTLCAMEPVIGAEDRVFANIQVTADYKNILMFLENLKQKLGMQDTYDIECGYEAGCLGYSLYNQLTAAGVKCVILAPTTMLTQQGQRIKTDARDAHMIAQCLSYGGYHPVYIPTEKDNAVKEYLRMREDHKKALKKIKQQINAFCLRQGKYYEGTKWTIAHLKWLKKLELAAMNQETLEEYLASYDEQTAKIERFDGRIEEIAGQTEYAEKVKKLGCFLGIKTYTALSLIVETGDYKRFQKGNIYAAYLGLAPGEHSSAEKVKRLGITKAGNGHLRLLLVEAAGGICKGAVGHKSKALRKRQEGNGAEIISYADKANSRMRSKYYRLIRHGKKRNVAVAAIARELACFVWGMMTGNINKEAA

SEQ ID NO: 371760 - protein, 388 aa, unidentified
MIYVGIDIAKLNHFASAISSDGEELIKPFKFTNDNDGFHLLISKLDPLDKDSLIIGLESTAHYGDNLVRYLVAKNYKVCVLNPIKTSTMRKNNIRKTKTDKVDTFIICKTLMMQESLRFVTFYDLDLMDLKALGRFRQKTIKQRTRLKIQLTSYVDEIFPELQYFFKSGLHQKSVYALLKEAPTPEAVASMHMTHLAHLLKVNSHGRFNKEMAQQLRVLAQKSVGASDSSLSIQVTHTIQQIELLDSQLERVEAEMTGIMKFNDSVIMTIPGIGYINGGMILGEIGDIHRFSCPNKLLAYAGLDPSVYQSGNFQAKKTRMSKRGSKVLRYALVNAAHNVVKNNATFKAYYEAKMAEGQTHYNALGHCAGKLVRIIWKMMTDNGEFNLD

SEQ ID NO: 371761 - protein, 405 aa, unidentified
MKQPATLHYAGVDWVTRTHAVCVVDPHGAVRARFEVPNTGKGFSGLCNRLVKLGVAGVAIERPDGPLVEAMLEAALRVVVVTPRQVKALRSRYAASGAKSDPADAYLLADVLRTDGHRLASLTPDSDPTKVLRALTRTRKDLQEARMALVNQLTSQLERCFPGAVGLVAELHSAVAVAFLRRYPTSHATAGLTQAKLAAFLRRLHYPARTPVTTLLGRIQAAPAAGISPAEATGRATCVLALLEAIQVTARQERELEAEIVERLEVHADQHRFTSLPRAGHGVRAAALLAELGDVRARFPDDDCLAALGGAAPVTITSGKRRVVKFRWACDKKLRTAIVDFADDSRHASPWAAHVYAQALARTGRHPHAVRILARAWIRVIWRIWQHGVAYDPAKHRGAVMLQAT

SEQ ID NO: 371762 - protein, 331 aa, unidentified
MGAFLYLFYPRKLLKHALSKAKFDVALIQGNAKIKSKVFANNPEGFAELQAWLNTQGVTNLHSCMEATSTYGNALARFLVGLGYKVSIVNPSRPKAFGKSELSRTKTDRADAKVIARFCAALKPAPWTPPALEIEQLQALVHRLDSLTAMQQQEQNRLATADQILVEAIIAHIDFLKEQIEMTKKLIRQHFDQHPHLKSQRDLLTSIPGIADLTATVLLAEIRDISAFDTADQLAAFAGLTPREFSSGSSVHGKPRLSKIGNSRLRKALFMPAIVARRYNSPIAAFCDRLTAKGKSKMSVIGAVMHKLLRQVFGVLKSQRSFDPNFVQIPS

SEQ ID NO: 371763 - protein, 327 aa, unidentified
MFYLAIDQHSTQLTVNLRNEQGDVVLRQQVSTKPGAVKGFFENLSSECAADGGYVAILEICGFNDWLLALLKSSWSGCREVLLIQPEKRSKRKTDRRDANQLGEILWVNRQRLLVGKRVQNVRRVLPATPEEAADRQLTAHRRRLTQRRTRGINQVWRIIHKHNLHHGRPTKGIQTKRVRQWLSKLELPEIDRLQMDQLLVEWDMLEKHLAEVDKQIDARHLKNEKAQLISTVPGLSKYSGLAIASRASEIERFPRGASLANFFGLAPGCRNSGNTQDRMGAITKQGSTMVRFLLGQAVIHVLRKDAWMRQWYRRNIDAVPRWPAWP

SEQ ID NO: 371764 - protein, 356 aa, unidentified
MQTQVTKKIDFSGKELYIGLDVHKKSWSVTILVDGTEHRTFTQPPDPESLLNYLQRMFPGGDYNSAYEAGFCGYGIHRRLNQLGIKNIVINAADIPTSQKDKLQKRDPVDSRKIARSLEKGSLHGIHIFDRELEELRSLNRTRFYLMRDLRRSKTRIKSFLQYYGEPIPMEFDNNQWTLKFVSWLKQVKMQTMSGQDAFSNLISSYEFHRSQLLTLSRQIRERVREYDRELYTLLKSVSGIGPLTASALITELGDINRFTNIDQLGSYVGLIPRIRESGETTHTGGITFRCNSFLRTLLIESSWQAIRMDPALMQYYHTHLINNKGHKVVIKVARKLLNRIRYVMKNRQPYITGVA

SEQ ID NO: 371765 - protein, 330 aa, unidentified
MILNKYTGLDVHKENFHATVMGDDGEILRRQRFPNSLEEVKSFFSDIGDGKVALEASYFWEPVYDELEEMGFDVKLAHPGKTRVIADEKIKTDLRASEALAQLLRMGWLPEAYVPPVDIRELRELLRRRVSLVESRTKYKNKIQAELTKRRIELDGTPWYGPWTSQLEELEIDPVEDYMVIIRSLNDRIDKVEKQIKERAEETEEAMLIESITGFSYFSAMTVYASIVDIGRFPRPKELSSYFGVVPSTEQSGGKKKHGPITKEGDSYVRRVLIQCAWSHINNSDSYITEFFDRLKRRKGKPVAIVAAARKLTVAIYWMLEREEKFRPGG

SEQ ID NO: 371766 - protein, 349 aa, unidentified
MIVVGIDPHKQTHTAVAVDRATGGVLAELTLRARTPGFERLVAWARGLDAERLFAVEDGRHVSGALERHLIARGERSVRVPPRMMGESRRVDRIRGKSDPIDATAVARAALAHPDLPEATLAGPEREIGLLVAHRESLVNERTDKICKLRWLLHDIDPELAPPPRSLNRFATLERLSRTLQARESSVDVEICLDLIDRCRQITRRANELERRIGGLVRTHAPALLEIPGCAALTSAKIVAETAQVGRFPSEGHFARYAGTAPIPASSGARHRQRFNRRGNRQLNTAVHRIAVTQIRMHAPARDYVEKKRAEGKSKTEAIRALKRHITRVVFKTMTSMDQPTDRLTAAAA

SEQ ID NO: 371767 - protein, 415 aa, unidentified
MALKIVYKICCGIDIHKNFVVACIAKTDMQGVTTYERHHFSTYTKGLKQLLKWLLDRNCKDVCMESTGKYWIPVYNVLEHDCSIVLAHPKYVKAIRGKKTDKKDAKWIADLFKHDLVAGSFMPPADIRQLRDLMRYRFKLTCFKSSEKNRYQNCLTVSNIQLASVVSDTFGKSSQKIIAKILENPDDTSFDIGSLIHGSMKDKLPELELAIDGYITPEQAAKLKIIKEHFDNLEARKAELEELTLALANPYQQEISIILTAPGFKNTFTAIGIISEIGTNMEAFPSAKHLCSWAGLTPANNESAGKKKSVRVSKAGCYIKPLLVQCANAAIKSKKHPEIRDRYLRIKKRRGHKKAIIAIARMLLTALYHMLKNGENYNSDLYQKSDILPTTREITVEQAILMAQFQGYRIKSATD

SEQ ID NO: 371768 - protein, 341 aa, unidentified
MKQYVALDCSLKQISVCVMTEQRRIAREAVITADAGSIAEFVWSHAPEAELIGLESGPSSAWLFHALRAEGLPVVVIDARHARAVLSLRINKTDRNDAVGLAELLVSGWYKLVTVKSLESHRVRTVLTNRALLVGIRQDLENQVRSVLKTFGFVLGKGRGSFTDRVSEILAGKRLLLRLVRPLLKAWAAIREQLLSVDKEALAIAAQDDTCRRLMSVPGVGAITALAFKTTIDNPWRFSSSDKVGAYLGLTPRRYASGETDRAGRISKCGDRLVRTYLVEAAGVLLTRSKATSDLKDWGLRLAKRASAAKARVGVARKLSVILLRLWTDNSMFQPRANVIG

SEQ ID NO: 371769 - protein, 308 aa, unidentified
MSCFVGIDVAKGHFDLYEDGAKRHLRFENNQTGIRKCVRQLVSLEPQLIVLENTGGYELDLALALNEASLPVAVVNPRQVRDFGRATGRLAKTDRIDAMLLAGYAAAIKPPRRAFPDRGMKALAARRRQLVRMRVAETNRREHLHDKAIARSIAAIIRSIDRELKKIEDQLARHINRQGELQKKMEALTSVPGIGSTTATMLLVEVPELGQLNRHQIAALIGVAPINRDSGNFRGKRMTGGGRHDVRMCLHMPTVVACHHNPVLKSFYERLIKNGKAKMIALIAAMRKLITIINSMLAKGESWNPKSA

SEQ ID NO: 371770 - protein, 341 aa, unidentified
MDAGYDGRQIVGIDLHRRRSVIVRMAAETGQRLETVRIDNDPVALAAQIAKAGEAPEVVLEATYGWYWAVDVLQDGGARVHLAHPLGVKGFAYRRVKNDERDAADLADLLRMGRLPEAWIAPPATRQLRELVRHRAKLVALRSGLKAQVHAVLAKQGVTVAVSDLFGVGGQQLLDQLRLDPAYNARVVSLRRLIDALTFEIDIVARRVAAQLAGHPGYRAVQAIDGVGPILAMVLVAEIGDVHRFPGPEQLCSWAGMTPKHRESDTKVHRGRITKQGNRLVRWAAVEAVQRLRGGVIGQTRVRIGERRGANIGKVAAARKLLTLVYYGLRDGHIRCLARPA

SEQ ID NO: 371771 - protein, 348 aa, unidentified
MDTIGVDLHKRETQLCIGQADGTITEQRIVTSRERFTAVLGDRPPARILVEASTESEWVACHLESLGHEVIVADPNYAPMYATRSRRVKTDRRDARTLMEACRAGTYRPAHRLSAARRHVRAELAVRDAVVRTRTRYVALAKALVRRDGLRVPSSAAERVGAHLAALVMSPPLAAELAPLLTLLPPLTATIAAADQRLAELEHTDPSVALLMTAPGIGAVTASALVATIDDVQRFASAHQFEAYLGLVPGERSSGELRRIGPITKAGNRRARWLLVEAAWRILRSTDAAGAPLRGWARPIVARRGSRIAVVAVARRLAGILYAMWRDQAPYDAGKIRRPRSARQNPAA

SEQ ID NO: 371772 - protein, 356 aa, unidentified
MSRILAIDLGKFTSVTCLLDTNTNQTEFWTMSTDRQYLLAVLKNYTPDLVVIESCGLAGWVHDICTAEGYKVLVCNPNQEAWKWKHIKRKTDRDDALKLAKLAALGQLVPVYIPSRQQREYRRLVKYRQVVLGRINRVQNNIRSIFAQRGMEMMRGQKAWALERYEEIAQHRQPLAECALDDLWRGELDLELIQLDQLRQQQHGIHQKLTALARADQRVQLLQTIPGVGRKTAEVVVAYLDDPHRFRNARQVSCYAGMVPRRYQSGEMDRQGRIHKRGPRQLRSALVEAAWLMLRYNPWAKSVYDRLTGGQKTRKKKAIVAVARKLLVRCWVMLLRKEPWNKETMIRQPADIAVAV

SEQ ID NO: 371773 - protein, 424 aa, unidentified
MSDQARWYAGVDWGSENHCVFLTDGEGRKIGERTFAHGGEGLAAMADFLMAASGAAEPGQIHVAIEVPHGPVVETLMERGFSVHAINPKQMDRFRDRFTVAGAKDDSRDAEVMASSLRTDPRCFRRLAATNPVVVELREFSRMAEELGDERVRLANRLRQQLWRYFPALLNLEDDMGAEWLLDLWQAAPTPQKAARLRETSIAAILKARRIRRLTAAKVRQALQKPPLSLAAGTVEAASAHIASLIPRIRLVNRQIRDAERRIDALIARLALPEESGRSGEDGEAGPGQAKQPDGAILASLPGVGRTVLAGLLTEAPDPLRRRDYSALRSLTGVAPVTRQSGKSRIVVRRQACNPRLANAVYHWSRVAIQHDPKSRSKYAELRRRGHSHGRALRSVADRLLNVACAMLKSGALFNPDKPCQKTA

SEQ ID NO: 371774 - protein, 388 aa, unidentified
MYNTQHPFYCGIDLHARAMYVCILNQAGETLLHRNMKTTPEAFLKAIAPYRPDIVVAVECLFTWYWLADLCADEEIPFVLGHALSMKAIHGGKAKNDKIDSQKIAVLLRGGLLPQAYVSPAEMRATRDLLRRRMHLAHKRGELLAHVQNTNSQYNLPAIGKNIAYKANRDGVAERFADPAVQKSIEVALSLVSYYDELLRDVALTIVKTAKQHDANTLYRLQTVPGIGKILSLVLLYEIHHIDRFPRVQEFASYCRLVKCAKESNGKRSGTSGAKIGNAHLTWAFSEAAVLFLRENPAGQKFLARLEKKHDKGKALTILAHKLARAVYYMFKRKVAFDMKRFLNDEGRGVGERDVSLDNHGMNLILATLSNASMTASLNAYERLGHYP

SEQ ID NO: 371775 - protein, 312 aa, unidentified
MNGEDISRVDDAIRMCVGLDVHKRCTEVAVLDDDGVVLRHERLGNDPGKVEGFSNSLSNATVVMESSCSWYWLYRILSAKHRVVLPNPVKTKAIASAKVKTDRIDAVMLADLLRGGYVAECYVPSRRVMELRLLVRYRANLVRIRGGVKNRIHAYLLMNNVRIEEAPFSKQFLERVRRIDDARVQGYLRIIEGLNLEVREASRVICGEALDDEEARLLMTIPGVSFYSALLMVSEVGDVSRFPDSSHLVAYAGLAPSTRSSGGVTYHGRMTKTGSAYLRWVLNQCTRAHMRAEPDGDVARFYNRLAGKKGAA

SEQ ID NO: 371776 - protein, 401 aa, unidentified
MDPQIRVGIDVGCKAHRVGIANPDGKVLEEFDISHTAAGFCDFFRRIDHHKQELDLPVAVAMEGFNGYARPLDRMIQEHGYTLYNVNNLKLARFKEVFPGAAKTDAIDARKILELFHLKDHLPLAKDALQKVVSAPLVNDKLKRLSRRRRQLVNEKVRVASRIQSDMQAVCPELLAITNNASNLKFLRFLTYRDDLTQLARLQSTTLLKIAGVGQNYARIIQEWQRKASFSAEVEYVGPMIITDARRILELLDQVHILDEAMAALADQSELARRIGSIQGFGKTCIAELAGEIGTTERFAGERSLALYVGMSPLSKDSGQHHGSKCPRSVNHRAKAAMMTAVAHHIRCVPESRAYYDKKRADGKKHNQAIRALGRQLVRVLWSMLKNERDYELREVIPSVT

SEQ ID NO: 371777 - protein, 346 aa, unidentified
MALAAISVLGVDLGKNVCSVVGLNSSGAVVMRRKMRRETLIGLAEKLPPCVVGMEACCGAHHLGRAFAAHGHDVRLMSPEYVRPYVKAHKNDDRDAEGIAEAATRPTMRFVELKSQDQLDMQTLHRSRDRLVGERTALINQLRAILLERGFVAPQGKRKLEKFLAVLMDEQGGAQLSPRMVQLVADARAQWAELDRRIAAFDAEFVRWAKDNEDARRLTTIPGFGALVASALVGAVGRAESFERGRDLAAWLGLVPRQFTTGGKPKLLGISKRGDKYLRRQLIHGARAALPYVAERDTPLGRWAKALLGRAHRNVAVVAFANKLARIAWAVLRRQERFSAQTTMTA

SEQ ID NO: 371778 - protein, 379 aa, unidentified
MLQVTDTADICCVALELSQSKWLCAFAPPDGAKASLHTVRAGDHAGLVEWLDRQRTRAKAALGRPLQLVLCYEVGYDGFWLARLLLKLGIRTIVFDPSTFLKPRRGRLAKTDRLDAEAMTRILRSWLAGDHSVAREVRVPTVEEEDAKRLCRERKALVNERTRLVGRIKGLCALHGIAVPGKRIAQRWIARLGEQRTGDGREIPPYLRREIDRLLRRYEVIEELIGKVDRDSQAAIAEPTSPFPAREKAQRLATLGGVGPTSALLLVAEIYHRSFATRRHLASFVGLAPSPYASGDVSRDRGIGKAGTKLGRQTLVELAWSWLRYQPGSALSVWWRERFGGAGMRGRKVGIVALARRLAIAFWQFLEDGLVPDGAVVKS

SEQ ID NO: 371779 - protein, 403 aa, unidentified
MNAVGIDVSKGKSMVTILRPFGEIVSSPFEIKHTSSDILSLIKLIHSIEGESRIVMEHTGHYYEVLAQQFSAAGLFVSAVNPKLVKNFNNDSLRKVKSDKADSIKIARYALDKWQNLKPYSIVDELRTQLKAMNRQFHFYVKQKTAMKNNLINLIDQTYPNANTYFNSPPRSDGSQKWVDFVYTYWHVDCVRKMSLNSFVKHYQNWCKQKKYIFNKSKAEEIYTQSTELVPVFPKNEITKRIIRQAIAQLNSTSATVETIRILMNETASKLPEYPIVMQFKGIGPSLCPQLMAEIGDITRFTHKGALTAFAGVDPGVNESGSYAQKSVPTSKRGSSNLRKTLFQVMDVLIKTMPQDDPVYQFMDRKRAQGKPYYVYMTAGANKFLRIYYGRVKEYLCILSESS

SEQ ID NO: 371780 - protein, 335 aa, unidentified
MALYCGIDLHSNNHMVVVIDERDTRVLERRLPNDLSATLALLEPLRGRLAAITVESTFNWYWLVDGLQAAGYRVKLANPAAIQQYEGLKHADDRHDAFWLAHLLRLGILPEGYIYPRAQRAVRDLLRRRMQLVQVRAQQLISVQSQIWRSTGVRVPSAQIRRPGFVPPLEDPHELRAAQGHLAVLRTLEQQIRALEHCALAAVEPLPGFELLKSIIGVGPILGLTILLETGNVRRFADAGRYSSYCRCVSSQRLSNGKSKGEANRKAGNKYLSWAFSEAAHFSVRFDPLAKRYYERKKAKTNGMVAIRACAHKLARAAYHVMREQVAFESRRVFA

SEQ ID NO: 371781 - protein, 393 aa, unidentified
MLFVGIDVAKSHHDAAILDHDGTIILRHLRIQNTRLGFELLITKLNELTNQLNQPVRIAMESTGHYSTNIMMFMQSHGYATFLYNPFLIKEFVKSSSLRKTKTDKADSLTIAKKLASDVTPEQFAISHEIQELKTLSRYRSRLTTRRADLKTQYIRLLDISFPELASFLGNHNLHTQYIYDLLIRYSSPHQIAHTRIDVLTKMLHGQGNHLESAKQLKNLARQSIGLKSTANELELKQTLTMIKMFSTQIDTVDQQVNQLMDSLEDARIMTSISGISNRIGSVILAEINNIRNFNSPEQLLAFAGLEPSIYQSGQLETTGKMVKRGSTALRWALYQAAEYASRWSPTIRAYRQKKLKEGKHFYVVMSHVAKKLVRIIYYLLKHHEYFDEIKLS

SEQ ID NO: 371782 - protein, 351 aa, unidentified
MTKEGPVSEDYDGRQVVGLDLHRRRTVMVRTTADGERLEAVRFSNDREMLERQIAKAGVEPQVVLEATYGWYWAVDALQAAGAQVHLAHPLGVKGFAYRRVKNDVRDAADLADLLRMGRLPEAWIAPPAVRELRELVRHRRKLAQLSASIKAQVHAVLAKCGLSVTVSDLFCVSGSRQLRGLPLPEVFRARVDSQLRVLAVLDREIERFDKQIRTVLRDDPGYKVIQQVPGVGPVLAAVFVAELGDVSRFAHPGQICSWAGLTPKHRESDATVHRGAITKQGSSLVRWAAVEAVQRAPKDSVMGRTYDRIVERRGGKAKNLAKVAAARKLLTLVYYGLRDRRIRCLAPRAA

SEQ ID NO: 371783 - protein, 352 aa, unidentified
MARSKLINRLDLTQPIFVGLDVHKNKWSVCIIHQDEVIENHTIPGEFKALRPLLSKYKSFQIFSAYEAGFLGYYLHRYLQKENINNIIVSPNKIPTEVGNYVKTDKRDAKKIAFSLSKGLIKSIFIPSEELIDLRQILRAREKVVRAKVQAINRIKMLLLKHEIKFSKSGITKQRIKELKELDLPENTKFALEQYIEQLELYNKQATQLASRSHSMVMKSKHVNAYKIINTIPGLGPIVSSMLCFEIGDFKRFSSGKKLASYIGITPREFSSGEHVYKGRITGQGNPVLRSYLIESSWFLIGKDPVMKEYYNRIKSNSGSGKKAIVAVARKLINRIHSIVINNRCYAIGEIE

SEQ ID NO: 371784 - protein, 372 aa, unidentified
MKKYIAFIGLDVHKNSIEIAIALSGRDGEVRSYGTIDGSLAALDKVVRKLVSLDYELHFVYEAGPCGYEIYRHLTAQGFDCAVVAPSRIPKQSGDRIKNDRRDAIKLARLHRAGELTPVYVPCAEDEAMRDLSRAREDAKEAEKKSKQRLSAFLLRQGHRFTGRTLWSTAHMRWIADIKMPHQAQQIALQEYVDTITECANRVERLVEQIRQLLPVWRLFPVVNALQALRGVSLIVATTTIAEIGDLKRFDNPSELMSYLGLVPSEHSSGEKTKRGKITKTGNGHVRRVLVEGAWAYRYPARVSRELRRRQEGLSQEICAISWKAQFRLCARYRRLLAKGKSKQVIVTAIARELCAFMWAIAHDVKIPAMGK

SEQ ID NO: 371785 - protein, 344 aa, unidentified
MDHFAGLDVSVKETSICIVDDAGKIVREVKVASEPEALLAVLKNLAYHFKRIGLEAGPLSQWLFSALAEAGLPVICVETRHMQAVLKAQINKTDRNDARGIAQMMRAGLYRPVHVKTIRSQKLRMLLTHRKLLQSKAIAIENDLRGTLRNFGLKVGMVGKVKFEARIRELVENLPDLVVLVEPMLIVRRTLREQIVILHRRLLAIVRDDEVCRRLMTTPGVGPVVALTYRATVDVPARFRKSKAVGAVFGLTCAKYQSGEVDRNGRISRCGDEMMRVMLYEAAQSMLRSKKWSWLKAWAMQIARRRGMKKAIVALARRLAVIMHRIWVDGTEFRWTREQATAAA

SEQ ID NO: 371786 - protein, 402 aa, unidentified
MEGVIIGVDPHKLSATIEVVDGHERRLGHGRFTADKAGYAAMLRYAKAWPARTWAVEGANGVGRPLALRLIEDGQAVVDVPAKLAARVRLFDTGHNRKTDAHDAHSIAMVAVRTRGLRVLRPDGELEALRMLVDRRESLSRRRVQTVDRLQALLAELLPGQAKKDLTTGQAKRMLASVRPRDIAGKTRRRIAAEELAELVAVEAKMKKANVELKAIVLARGSHLMGLHGVGPVVAARVLADVGDVSRFADRNRFASWSGTAPLDASSGEHSRHRLSRAGDRRMNHMIHIAAISQIRLDTDGRAYYRRKRAEGKWPLEAIRCLKRRISDAIYRQLLADAAAVDATARAAADASPGGHYGASQLSSAAGSNPLTSASDQPLPGPASTTLRRTGTARKTHLDATG

SEQ ID NO: 371787 - protein, 466 aa, unidentified
MTNRDAKQRRQRNFKQMLTVINTNAAGIDIGAKEHYVAVAPERDEQPVRRFSAFTQDLHKLAQWLKQCGVTSVAMESTGVYWIPLYQLLQDYGFTVKLVNARHVKHVPGRKSDVQDCQWLQQLESFGLLTASFRPEAQICVLRSYMRQREQLIRSAARPVQQMQKALAEMNLKLQHVLSDITGVTGMAIIRAILRGEREPLKLAALKDRRIKSDASTIAKSLEGDYRAEHLFVLRQALELYDYYQQQIVECDEQIYQEMKRLESNSEVVPSAGPRKRSCHNPFHFNAQSELQRVLGVDLTRINGISEATAQLILSELGPKLVTTWPSEAQFASWLGLCPNNEISGGKVLRRGTRKVVNRVANALRMCAESLLQSKSALGAYARRLRSRRDTRIAITATAHKLARLVYRTLKYGEEYMDQGQQLYEQKYQAAVLKSLNRTAQKLGYELVIRQPPPPRSSLGGLHRIF

SEQ ID NO: 371788 - protein, 402 aa, unidentified
MTNLQQRYVGLDVHKHYVMVGAVNAAQETVLPPRKVSLLEFEGWAKKHLRPTDEVVLEATTNAWYVYDLLVPLVARVVVGHPPLIKLIAAAVVKTDKKDTMTLAKLLAVNMIPAVWVPPAPVRELRALISHRQRLISQQTRLKNQLRSLLHRQHLVPPDGPLFGVANRPWWLGLSLSPSEKLRARQDLTLLDQLAPLIAEVEAELNRLSLAEPWAQDVPYLLQLPGIGLLTAMTILSAIGQIDRFPTAKKLVGYAGLGAKVHASGLTHRTGGITKQGRRELRRVLIEAAWTAVRYDQYWQSQFESLAYRIGPEKAIVAIARKLLVVIWHVLTARVADRRAVPQQVARYFIHWGRQLRVKSTLGLKASEFARQQLDRLGIGQDLEQVPYSTFTYRLPPSASSA

SEQ ID NO: 371789 - protein, 450 aa, unidentified
MGLQTINPHAAGIDVGSERLYVAVVDGAVKVFDAFTESLHALRDHLLAAEVQTVAMEATGVYWIPVCDVLEAAGIEVCVVNGAHVKSLPGRKSDMEDCQWLATLHSHGLLRGGFVPPPIIRRLRDYQRLRQDHVRMGSAHIQHMQKALDRMNVKIHDVLSDLTGMSGLAMVRAIVKGVRAPLMLLELCDVQVVKRKREPLLKALRGNWQREHVFALQQALAGWEFYQQQIEQCDAEIALVLQELAAAAPLPAPPASPRPDTATQQPLAPAKRIHHNAPHIGDLKTLLVRITGGHDLSALPALTDYTVLQLISEIGTDMSRWPTEKHFTAWLGLAPSSRRSGKRRRREKRFRGRAAQILCVGARSLARSKYLALGGFYRRLRATRGPQVANIATARKLAVLVYNTLVHGLDYVEQGLERYEAVYKAQCLKRLERNARNFGLTLVPLSHQNA

SEQ ID NO: 371790 - protein, 324 aa, unidentified
MLPTLGIDISKDSFHLELSINEKLRHRKFANRQEGFGELRAWLAKHKATQVHACLEATGPYSEALALYLHQQGHTVSVVNPVQIKAFGQSELRRNKDDRPDAGLIRRFCEKQRPAPWTPPPVHLRELQALTRHLENLIETRQQQINRLDATNTKNVAKSLRKLVAHLDAEIKRTEQQIDDQVDRHPDLKQQSELLESIPGVGKRTAAKLLAEITDISQYKSARQVAAYAGLTPRNNRSGTIRGKTRLSKTGNARVRKALFFPAIVAKRHNPIVRAFCERLARNGKNKMQVIGAAMRKLIHIVFGVLKSGKYFDPSHELLLNSVP

SEQ ID NO: 371791 - protein, 460 aa, unidentified
MSNHKKPKRQDLDGSLSPINPNAAGIDIGADRHWVSVPVGRDNENVRSFACFTADLYAMADWLKQCKIETVAMESTGVYWLPVFQILESRGFEVKLVNAHYVKTVPGRKTDVLDCQWLQQLHTYGLLSGSFRPEDQICVLRSYIRQRDNLVKSACVHVQRMQKALTEMNLQLHRVISDITGTTGLSIIRAIVAGERDPKVLAAKKDGRIKASCEQIAAALTGDYRPELVFVLHQELQLYEFYQVQILAVDAQIEQSLASFADKVDVTTKPLAKPKRRGKKQPGNAPQFDLRTHLYRISGVDFTQVDGFGALTVLVLLSELGLDPSRFPTVKHFTSWLGLCPGSRVTGGKVKSSKTRNVVNRAANAFRMAAQTLCRSHSALGAFYRRMQSRLGAPKAITAAAHKLARIFYRLWTSGDAYSDPGINAYEQQYRDRILKNLQKKAQAFGLELIPISNATECVS

SEQ ID NO: 371792 - protein, 367 aa, unidentified
MTVTIVDAARPVTGSGEMHPDLIVAPCPVTGGVDTHLDLNVAAALDGIGGLLAVAEFPTTSAGHRELLGWLSGFGPVARVGVEGTGSYGAGLARFLRRAGVEIVEVDRPNRQARRRAGKSDPLDAIEAARAALSGRARGAAKSRDGNVEAIRALVVAKRSARSAKIQTLNQIRHLSFTAPDELRQRLAGVSRQQLAAKAAALRPGSREGADPVVAATKTALRILGRRVLALDEEKAHIDALLTGLVTQTAPQLLAVFGVGVDTAAALLVTAGDNPGRLRSEAARAHLCGTAPIPASSGKVTRYRLYRGGDRQANRALRGIVITRLRNDPRTQAYMARRLAEGRSKSEVIRILKRYVAREACHRLPRA

SEQ ID NO: 371793 - protein, 369 aa, unidentified
MAYRIAGIDVHKKMLAVVVADVEGEGGYQFERRQVGTTPDHLRLLSEWFVAQEVEEVVMESTAQYWKPVWGALERYWKPNCQKWEGVGPMSGALHLAQAQSNRGPRGRKKDFPDAERLVKRLVSQELTLSFVPDTEQRLWRTVMRRKYQLTRDRVQLQNRLESLLEETHIKLSSLVSDLLGLSARRMLQALADGETNPTSLAALADKKLRATPAQLCDALSACTELNPVYRRLLKMVLEELQFLEQQIVMLEQEMASLLSQHQEAVQRLAEVPGLGVASAQQIIAEVGAQAATFASQKHLSSWVGACPGDEESAGVSTSHRSPKGNRQMRRILNQCANAAVKTIRKHLRDRVSPPRTTPGTQSDHRGNC

SEQ ID NO: 371794 - protein, 273 aa, unidentified
MTQIHAFGGVDVGKACLDAALFPGGARWHGGNHPEGRQELIAWLGAHGVRIVGLEATGGYERPLRNELRAAGASVHVLDPARVRHFAKAIGQRAKTDAIDAAMIAEFTAQLHSLPPQPTEPEREAIADLVRTRRLLVDKRADIEKALVRLPDEARALVYPAVEALRVAIADLDAQIAQRVQAHSGLARSVQVLESAPGVGPITAVAVATLLPELGLISGRQAAALLGVAPYPDDSGQRHGKRRIAGGRSDVRRVLYIGFAPARWTPSDLRRRC

SEQ ID NO: 371795 - protein, 376 aa, unidentified
MSKLLFVGLDVHADTIAVAVAEQAGEVRSHGIIPNRLESVRKLIHKLGPVQQLRACYEAGPTGYVLYWQLTQLGVACDVIAPSLVPTKAGDRVKTDRRDAEKLARCHRAGELTAVWVPDADHEALRDLVRAREAAKKDQLKARHRLGKFLLRHGRRPEGIKAWTKQYLEWIKAHVHFGQAALEATLADYVEEVDHVAARIVKLEKAIDEAVQQAPAEIRAVIEALQALRGVAQTTAATIVSELGSLSRFDSPRQLMGYSGLVAREHSSGNRVQRGGITKTGNGHLRRVVMESAWAYQHRPNVTGFLLRRQKNLKLSDEVKAIAWKAQQRLHKRYKAFTLRGKNKNQTVTAVGREMLGFIWAVARQAEKQHKLATAA

SEQ ID NO: 371796 - protein, 413 aa, unidentified
MRRLIDRCAGIDVGQALLVVCVRVVNEKGALAQEVRSFGATTPDLLQLRDWLAASGVTQVAMESTGVYWKAPYYMLEDAFEVLLVNATHLKHVPGRKTDVIDAQWIAEVLSYGLLRPSFVPPRPFRELRDLTRYRKALIRARTSEVNRLHKVLEDAGVKLATVATDVMGVSGREMMRALIGGVADPNMLADLAKARLRAKLPALRKALTARFREHHAFLLARMLAHVEALEGDIDVLSQRIAELMEPWAGHLAILDSITGVGMRAAEVILAEIGPDMSRFPTAGHLASWAGRCPGQRESAGRRGSAKPRKGSPWLADVLTECACAAVKTKDTYLSAYYRQVMRRRGKPKAIMAVTHKILVIAWHLLSDGALYDDPGAASLRRNTEEQQRRRAIRQLEALGLKVTVEPREGDVA

SEQ ID NO: 371797 - protein, 315 aa, unidentified
MVTSYQNFIGIDIGKFKNVVAIHKQKNAVEFDNNASGWQQLFQEFSDILPNALVTLENTGKYELGLSHFLTDKNIAVHRANTRKVKSFILSHGTLAKSDRSDARALAQYGFERHRTISLFVPTSTEQSTLAALCQRCDDITQMRTQEKCRLEAPENDHIKESCQKTIEFFDSQINELNDTIQKIIDESRELQQRQKILKTVPGIGKKLSQDFLCLMPELGYLNRKEVASLAGVAPHPKESGKAVGYRRITGGRSNVRSKLFTAAMAATRSKSILGAFYSKLVESGKKKMVAITALMRKIIVIANTRLKEAINLHT

SEQ ID NO: 371798 - protein, 380 aa, unidentified
MKDTTKFVGLDVSKDTIAVAVAEGGRGEIRFVGTYPHTVEAVHKVVKQLGGPSVRLEFCHEAGPTGYGLYRLLRAMGLSCIVVAPSLIPTRPGDRVKTDKRDAVRLAQLLRAGELTPVWVPGEVDEALRDLVRAREDAVQDRLRARHRLSKFLLRWNRRPPEGTRAWSKAHRNWLDHLSWSDVRLQTVFQEYLHALDEIEGRIQRVEAAIHEQATQSDRAPVIQALQTLRGVAEVTAVSLVAEVGEFSRFRNPRQLMAYAGLVPKEYSSGARRWQGGITKTGNAHLRRVLVEAAWSYRYKPAIKGQIRKRQEGQPAKITDIAWRAQDRLHRKYRKMVGKGKPIGVSVTAVARELLGFVWAIACEVERTCLKDGWREAIPS

SEQ ID NO: 371799 - protein, 338 aa, unidentified
MNYVGIDHHRQYSHMTMMDKEGQILRSGRVPNCQSEIEKFLEGGEAMEAVIETGRSSYTMVDVLEELGVAVKIAHPNEVKAIARAKIKTDKRDSEVLAHLLRMNMIPEVYRRSVENRQSQRVLRQRAFYVSAMTALKNRVYAFLAQQKEAVRESVARETNIFSEKGQKVLLGLDLAPGEKSLLTALLKTYRHLETRIEESTALVEKLYEESREAKLIRTIPGFGKYLSVLVAVEIADLNRFSDAAHLHAYAGVIPSIHSSGDKTHHGKIIRAGNRWLRWAAVEAVWPAIRADFDLRCFYERLSHAKGANKAKVATARRLLTIIFKVWKEQRNYIPYRR

SEQ ID NO: 371800 - protein, 464 aa, unidentified
MKLPPNQGHNQPVLTEKVSSTLEEINQNAAGIDLGGGEHWVCVPADRTDKNVRRFGCFTPDLIAMADWLIECRVDTVAMEATGVYWIPVFQILEAKGFEVKLVNAHHVKTVPGRKTDVLDCQWLQKLHTYGLLSGSFRPQDQVCVLRSYIRQRDSLIKSASTHVQRMHKALIQMNLHLHKVISDVTGLTGMKIIKAIVAGEQDPQVLATLKDPRIKSSTADIASALTGDYRREHLFVLQQELTLYEVYQQQISAIDAEIEKCLASFQPQTLDKPPTTPRKRRTKPTANHPNFDLHKYLYRMAGVDFTLINGLDALTVQTILSEVGLDPKRFPTVKHFTSWLGLCPGQKVTGGKVKSSKTRTVVNRAANAFRMAAFSLTHSRSALGGFYRRLRSRLGAPKAITATAHKLARLFYRMWITAGQYSDPGMDYYEQKYQELILKHLQQKAQAFGLELIPISDSTQCVS

SEQ ID NO: 371801 - protein, 453 aa, unidentified
MPRKKVSKKTRVTLPVLKPDAAGIDIGATEIYVAVPAGRDPEPVRMFATFTQDLIQLAEWLQQCGVRTVAMESTGVYWVPLMQILEARGLEVYLVNAKHVKNVPGRRTDVSDCQWLQYLHAVGLLRASFRPAPEICAIRTLLRHRDSLVEMATAHVQHMQKALDQMNLQIHHVISDITGTTGLAIMDAILAGNRDTQALAALRDPRVRASADTIAKSLVGDYRPEHLFTLRQSIDLYREYQRQLGTCEQEMQRLMKDLETNADPTVSLPVAKDSVRKCKVMLPAKALALREEAFRILGVDLTAIPGISVLHVQTILAELGGDVSKFRSASAFSSWMGLCPDNDISGGKVLWTGTRKVKNRVALTLRMAAQSLQKSESALGEFYRRMRTRLGAPKAITAAAHKLARIIYHMLKTREPYDEGVFAKAEIRHRQRAENRLRALAHTLGYALTPVQT

SEQ ID NO: 371802 - protein, 452 aa, unidentified
MKKHSNSRKKSEATTKRAKSRGPVQRDTKEVLAELVGKLKEKLDPKKAAAASAGDGHPRGELRPNLDRLTVGVDLGDQWSHYCILGLEGETLAEGQLRTTQEDFATFFQGLNAARVVVEVGTHSAWVQEVICGCGHEVLVANPRFMEGSKRRKRKNDRIDANKLARLGRVDPESLHPIQHRSREVRQDLVMLRARDALVAARTEIINTTRGLVKSMGTRLPKCSSRSFAHKGEEAVPVEMREALLPLVRLAAALSADIKEYDKKIESLGREKYGHTTLLRQVKGVGPITALAYVLTLENPQRFAKSRDVGPYLGLVPKQEDSGESQPQLGISKAGDGMLRKLLVGSAQYILGPFGPDTDIRRYGLRLCERGGKNAKKRAAVAVARKLAVLLHRLWVSGEVYEPLRPGMSATMTSHPRGRVGVTAGSRHKLIARKPRAIWKVWQTTTSTALFG

SEQ ID NO: 371803 - protein, 348 aa, unidentified
MTVYIGVDFHARQQTISYLTTEDGEIKRLQLDHGQPDEVRRFYHQFAGERVVVGFESSGRAAWFEELLEELGCEIWIGHATAIRLFARRRQKNDRRDADLILDLLVRGDFPRIHRYSAESRTLLQQLRYRQRLVKMRTMLLNSLVFLAATRGVVLRSQLKTKRGLERLRQIDLPPALGGQRDELCQLLLDLKPKIDKVERELAAKAESDIRVRRLRTQYGIGPLTGLCLAHTLEHPERFANPRKVTAYVGFDPVEDSSGERRRIGSISKQGSRLLRFLLVEAGQIAVRRDQELARVYKRVLVRRGHAKAKVAIGRRLLVRAFIMLRDEIDYAEFQRRGVAARSSREIA

SEQ ID NO: 371804 - protein, 411 aa, unidentified
MSQMLVGVDVSLRSHHVHFMNADGVTLADFSVSNDRIGADTLIKRMLETAEKSQCAQLKIGMEATDQYAWHIAHYLQDQLKGYEPDVETKVYVLNARKVARFKKGYDTLPKNDKIDAWVIADHLRFGRLPQEMKEAHHYEALQRLTRTRFHFMKEIGRNKTYFLNQLFLKFSGLRQDNPFSSTFGTTSLAVIEELDPETIAEMKLEELISFLQEKGKNRFAEPEELAKYLQKLARSSYRLHKTMEDPVNISLSVTLSTIQHMESQIKRLDKEIAKLMKGIPQTLTSVKGIGDVFAAGLIAEIGDVKRFKDHHALAKYAGLVWNQHQSGEYEAENTSRMRTGNKYLRYYLIQTAESIRKHDLEYKAFYTKKYNEVPKHKHKRALVMTARKLVRLVYSLLRTNQLYTPPEGRG

SEQ ID NO: 371805 - protein, 348 aa, unidentified
MQKDTVIAVDVAKAVFEIALSDRPGHVYRRERLPRGQVLTFFAQQPAATVVMEACGSAHFWGRELQGLGHRVVLLPPHQVRPYVCRDKTDRSDAKGILEAHRNADIKPVPVKTVAQQALTTLHRLRSGWVAERTARINTLRGVLRELGVFIPLGARQVLPAVWAQIEDADSALPDSLRHVVAAAAEEIRAIEARIKLVERQLAALAEQLPPTTLLLTIPGVGLLTATALVAFIGDIRRFPSGRHLASYLGLTPREHSSGLKRHLGTISKRGDGYLRTLLIHGARAVLVHAQKSQPDRLRSWAHALQRTHVHNKAAVAVANKLARVVWAVWSRQSPFQHITAVPEGNVA

SEQ ID NO: 371806 - protein, 353 aa, unidentified
MHVVGIDGHKKTHTLVAVDPLGRRVSEVTVAATPAGHAQAIKWFTQFGRVLLAIEDCRHLTRRFEADLLVAGHEVVRVHTRLMAGARRSARERGKSDPIDAEAVARVALREPDLPRASLAGPARDVKLLADHRRRLVRSRTAAANKLRWFLHEIDPELPVPSRGLRRLCVFDALAAALADHAGVVVEIARDLVVECRRLTEQINALEARLRKLVEVLAPSLLAIPGCGVLSAAVLIGETAGANRFKSKDAYARFTGTAPIPVWSSNKIRVRLNRGGNRAINHALHMIAVTQVRRGGEGADYFAKQLARGKTPKEAVRLLRRRISDRVFRALLADEGAAQPTTAPSDLPVRLAA

SEQ ID NO: 371807 - protein, 310 aa, unidentified
MDAIYVGIDVSKDRLDVHVRPAGETFAVARDGKGLNELIERLRGIAPRLIAIEATGGYETIAAAAIAGAHLPLAVVNPAQVRHFAQAIGKRAKTDPIDAGVIARFAEAVQPEARELPDEAARLLAELVARRVQLIEMIVAERQREKRADAVRVRRSIARHIASLEKELPIIDGDIDTMVRGSPVWREKEDLMVTFPGIGRGIARTMLADVPELGRLTRREIASLVGYAPFTRQSGQWKGKSMIAGGRPAARSAIFMAAMCAIRCNPVLRVFYQRLIARGKAKMVALVGVARKIVVMLNAMLRDKKQWQPA

SEQ ID NO: 371808 - protein, 416 aa, unidentified
MNAVGIDVSSRKSTVAVLRPLGEVVCLPFDVTHDIAGLASLVEKLKAIDGETRVVMEHTGRYYEAVAKALHEAGFFVCAVNPLLIKEYGANSLRRVKTDKADAIKIARYALDNWADLRDFTPMDAIRYDLKTLNRQFQLASKQRTASANNLIALLEQSFPGIRKCFDSPVRSDGTQKWVDFAHSFWHVDCVRKQPFPAFCERYRKWCKLHAYFFKLRNAEKVYALAKSAVVLTPKSKVVKVLVQEAANQLISISRSVEVYRAEMDRLAAMLPEYPVVMAMYGVGKSYGPQLMAEIGDVRRFERKQALVAFAGIDPMPNQSGDKNVRSNKSSKRGSPYLRKTLFNVIRTYLQCAPQDEPVFQFLNRKQAEGKPFYVYMLAAANKFLRRYYAKLRDYFASLNPLQPVAPIPTILKATL

SEQ ID NO: 371809 - protein, 339 aa, unidentified
MIQTQFFIGIDVSKPYFDASLLAIIDHFKNDPVHQRFDNTLAGIKVFYRWLKSNKVSFDQNTLVVMENTGIYHRLLWSFCSKNNLPLHIGNAAHIKWSFGITRGKNDKIDSVRLCKYAYKEAEALKATPTLNPVLMQLKDLMTARTRLLSQINSLRTYIGELRDVSEKGTQKKLEEAHQAAIKGIALSIKSLEEEISKIVMQNKAIKGNYDLLITVPGIGHLTAIYLICCTNNFIGKISGKQLACYAGVVPFEHSSGISIKGRNKVHPMANKELKKMLHLCALTAVKNYSEFKQYYNRKKQEGKHGRSILNAIRNKIVLRAVAVVNKQAAYVNNVKNAA

SEQ ID NO: 371810 - protein, 312 aa, unidentified
MANLFIGIDVSKDILDISCLESTNLKYLKYDNTTLGLNKMIEYFNKSKKKIYVGLEATSIYHKLAADYLSVAGYNVYELNPYTVFNYKKYKRTYAKTDKIDSLSIVQYLKENYEELPLYTVKTEDEKKLYVILTRINQLNKMKIQEINHKESSLLVDKDTQKHIDFLDKKIKELKKKLNEIIKLKKNKVLKEKINIISKVPGIGFYTAVVILINMSELGKMNRNQVVSLSGMAPFAEDSGKKRGKRRIRGGRKRVRDSLYMPSLTAIRINAHFREVYDRLKQKGKIHNVIRIVIMKKMLIQANTLMKEYYNK

SEQ ID NO: 371811 - protein, 346 aa, unidentified
MKINRVGVDLAKNVFQLHGVDRKGKALWKRRLTRGKWLAVLCDTVEPGTEIGMEACAGAHHWARQLMQRGYPVKIIPPQFVKPFIKSNKNDANDAAAICEAMGRPDMYPVKVKTVEQQDLQAMHRIRDEIKSHRIAKANQIRGLVTEYGLVAPQQLHALRKAIPDWLEDAENGLSFLFRQLLQGLWGDLYALDQRMTELDKQITVIAQEDPTARRLQQLRGVGPLIATALVATIGDGKQYRKGRDMAAALGLTPRQHSSGGKDRLLGISKRGDAYLRCLLVHGARSAVRTAKDKDDRLSHWIINLQARRHANVVAVAMANKMARMAWVIMTRDVDYDPDLAAASVS

SEQ ID NO: 371812 - protein, 424 aa, unidentified
MQNTAAKKRKQVPEGYLVIGVDPHKKRHAAVAITQDFTTQAKFKFDNTREGLEMILDRAKSEMVKSGCRGVIFAIETGGHYWRNIAYCLDERGIPFRFINQFTLKRRREGKDLNRKKNDYRDSEVAAQLLCTGEFVESVIPQGVYAELRTAHNAYQRLVKERTRITNLVKGLLDALFPEFTQVFKDPGGLTALSVLSTCPIPRVIAGMTEDEFVATIEARHKGRRLMRNKLRALHYSAKTSIGIDAGARSVSSEIAFLVDKLKLIRRHICIMDGSLVRLVDETEEGKYLLSITGLNYIAVAGLLAELGCFKAYRSAKQMIKMAGSNPTESESAGKKRSRTPMSKQGRPLLRYCAWTSVIPMLRFNTDFRAWAKQRRERPAHANPLNGREVVGAALNKLLRLAFALVKNQSYYHDIKPALIKVAV

SEQ ID NO: 371813 - protein, 430 aa, unidentified
MSAKTKPQQPMKEWNQFTHFAGFDWAHDHHDVVIVDASGKTVVDFRFEHTAKGWADFLEQIAAFPDLALAVETKCGAAIEKLMELQCSVFPVHPQSAKAYRQRKVPSGNKTDRVDAWSLADALRLDGAQWKQLAPQDPRIKELRLLCRDEVGLIRDRTALISQLRQALYEYYPAALEAFDDWTVPFAWAFVVAFPTPEALLKAGKRKWEKFLHLHKLGRPETYQRRLEIFANATQFAGSAPVANAKSRLAVTRAKQLQLLEKQLGEYRTEIQRLFAQHPDAPLFDSLPGAGEKIAPRLLAEIGDDRALFPDAQALQCLAGTAPVSFQSGQIHRVHVRRQCNKFLRHTLHLWANLSRDCCPWAATYYTALRAKGKSHASALRGLGQRWLKIVWKMWQTRTVYDADLHGRNQLRHGSWVLQLVTKADAAPKK

SEQ ID NO: 371814 - protein, 412 aa, unidentified
MAMEALVERCAGLDVHQASVVCCVLAGPPGCRPRKLLRTFGTTTHELGKLRAWLAEQGVTHVGMESTGIYWKPVYAALEGHFDLTVGNAHHIKNVPGRKTDVKDAEWIARLLRHGLIGKSFVPPPPIRDLRELVRFRRALVEARTAERNRLLKLLEGAGVKLAGVASDVFGVSGTAMLKALAEGAAEPAAMADLARGRMRRKLEALAAALDGQVREHHRFLIAVQLRRLEAIARDLGELDARIEAHLEPFRAQHRLLMQIPGVDRVVAAGIIAEVGVDMDVFATAQRLAAWAGVAPGNHESAGRRKGAATRKGNVFLKATLFAAASAAVRTKGSYYRDKYHRLRARRGPVRALVAVAHKLLIAAFHMLRTGSPFRELGEDFLDRVSRKRSTTKLVRRLAALGYDVLLVPKAA

SEQ ID NO: 371815 - protein, 456 aa, unidentified
MAKRKLKGNPNAAISMPVVNPNAAGIDAGSRSHFVCVSQDNVKEFPTHTAGLHEICKHLKSYGIKTVALESTGFYWQQLFAILQSYNIEAIVINARHLKNVKGHKTDVVDSKWIQLLHSIGLLNNSFQPDNFCKELRQYTRHRRSLIENSSRYIAKMNKSMVLMNIQLKTVLSDLTGESGIRVIEAIVKGERNPDMLEKLVGKNVKASRDAIKKAMVGDWRSEHLFELSQNFEFYKFTWEKIWETDQQIETILKNWQDENGDESKLQEYRKNEKYKKPRQKNDPKFDVKAFAYQMTGGVDLSQIEGVNINTILTMMTETGFDLKSKFKTEKHFTSWLGFAPNRKITGGKVMSSNTPKIKSPMVYAIRQAANAAGNSQGRLGDFFRRLSYRKGRTVAIVATARKIAVIIYKMLESGQEYCYEYSQNELDRVRKSQIKRIKKTIDRFSIEKVELMPSI

SEQ ID NO: 371816 - protein, 419 aa, unidentified
MSFKIFKFNCCGLDVHKTWIYACIGITDSNNRTEYKQARFSSFTKGLNELCDWLAKYNCKDVCMESTGKYWIPVFNILEQHSFWVTLSHPKYTKPMKGNKTDRKDAKWICDLYMCGMVKPSFIPPADIRELRDLVRYRFKLTCMITGEKNRAQNCLTVSNLKLDDVFSDVFGKSSRSITEHILQHPGEKFDIAPFVDSRCKTPITEIQAAVDGAISKEQVVKLRQCLDHIDELNKHISEVEQEILRLSDKYEAALNLIRTVPGFNKNPLTAIQVLSEIGGDMSVFPTAKHLVSWAGCCPRNDQSNQKIKSTRISRAGSYFKPVLVQVANALIKSKKHPEFTTRYRRIKARRGHKKAIIAICRMILTAIWHILTDLKPYTPEGFLESRPVNKEKVLTISQALNLIKQRGYIIKDDVGPVT

SEQ ID NO: 371817 - protein, 338 aa, unidentified
MLYTGIDLHKRTVVIATIDETGKVHSEVSLPASRAAVARYFHWLPEPTIATVEATSSWYWLRDLLEQQEVPLTLAHAKFVKAIAYAKVKTDAVDALTLAQLLRADLIPRAHMVSPELRPLRALLRTRLHLVEKRTSAKNSVQRLLEQFNVPEPLRLPDEATLQASLYAEQIELLGDQIHRIEQRLQPELIPDPDIQRLLWIPGVGKIVAFTLHLEIDGIERFPTVRQFFSYCRVVPGADNSAGKRRHGRRKDGNRYLKLALSHASVRAVQYFPEIKRFYQRKARQKNPAIARTLVQKEIARSVYIVLKEQVDFNHTFKGQPLSKRKASKWPRQANPDA

SEQ ID NO: 371818 - protein, 453 aa, unidentified
MAHRNAKVSLKPGKSRAALTITHPNAAGIDIGSASHFVAVPPDRDDQPVREFPSFTVDLNALADWLQACGVDTVAMESTGVYWIPLFELLESRGFTVLLVNARHVKNVSGRKSDVLDCQWLQQLMTYGLLSGAFRPADQVCVLRALWRQRGMLLRNQGRDVQHMQKALTQMNVQLANVISDVVGETGQKILRAIVAGERDGQVLGLMKNVRIRASVDEIAKSLQGNWRAEHLFALKQALGAFDFVGTQLTECDREIEQQLQSLQVHDGEPAKGKQRGRARNAPKFDLRTQLFKMCGVDLTRIDGIDVTTALAVISETGADMSRFATVGHFASWLGLCPGTKITGSKVMSGKTKRCANRAAQALRLAAAGLRTSKSALGAYFRRMCSRMDKPKAVTAAAHKLARLIYTMLTKGEEYTDQGQDYYEERYRERVLRQLSQRAQKMGMTLVPTQQPA

SEQ ID NO: 371819 - protein, 323 aa, unidentified
MFYLGVDVCKKTLDCMLFDTSTNKSKSKSIPNTSAGFVQLLEWLGKQKALDAHVVLEPTGVYHEPAALALSDAGLTLSLVNPAQARQFALSLGVKTKTDKADSMVLARYGAALKPQAWEPPSKSARRLKALLARRDAIADDIQREENRQGAVEFGESPEEVRASIIKSIDFLEAELQALDAIIRKHIDDDPDLRGNKKLLESIPGVGSRVSTHMTALFAAKSFTSAEQLAAYLGLVPVQWESGSSVRGKPRMSKAGPKHLRKLLYMPAVTARRWNPHISAMSDRLLAKGKTLMAVIGACMRKLAHLCYGVIKSGKPYERNFGM

SEQ ID NO: 371820 - protein, 341 aa, unidentified
MKNKSFIGIDISKNVIDASIFCEGTPIKDFPHAVFNNSRKGFGEMCTWLKKNHVVLSNCLFGMEFTGSYSMELEKFLNARKFQFCMLSTHVVKHHPMGPKDKSDKIDSAKIADFLYRYDGTECVKPYKMPDKTMQRLKALTNERKFLVEQRTCFMNRRQLCTTKEAAQLYDGYIKEFSHDIENIELKMQNLLETDDSLSTTYKNLLTIPGIGFVNAMNVIVITRNFTAFETARQYASYIGVAPHFHTSGTSVKWRPRPSARCDGQAKADLSMAASVAVQCDAELQSFYNRKLGGKQDSDTKRKALNAVKFKLILRMFAIGKQNRKWDPLNSKSSNEKLAIS

SEQ ID NO: 371821 - protein, 389 aa, unidentified
MKIYVGIDIAKLNHFAAAISSDGEIILEPFKFTNDADGFQLLVSKLESFDKNSIIIGLESTAHYGDNLVRYLVAEFYQVCVLNPIKTCQMRKNNVRKTKTDKVDTFVIAKTLMMQDDLRFITFFDLDMMDLKALGRFRQKTIKQRTRLKIQLTTYVDQVFPEIQYFFKSGLHQNAVYALLKEAPSPKEIASMHMTHLANLLKVNSHGHFTKEQAKELRVLAQKSVGANDSAISIQITQTIQQIELLDSQLEKIEAEMTDIMKFNDSVIMTIPGIGYINGGMILGEIGDIHRFSNPNKLLAFAGLDPSVYQSGNFQAKTTRMSKRGSRVLRYALVNAAWNVVRNNATFKAYYDAKRAEGRSHYNALGHCAGKLVRVIWKMLTDEVEFNLE

SEQ ID NO: 371822 - protein, 430 aa, unidentified
MPYRITGIDVHKKVLAVVVADVEVDGEHRFERRMFGSNPEQLRSLAAWLLEQEVEEVVMESTAQYWKPVWEALERYWKPIREKREGAGRRSGTLHLALAQSNRGRRGRKRDFPDAERLVKRLVARELTLSFVPDAEQRLWRTVTRRKYQLTRDHVRQENQLESLLEEAHIKLSSLVSDLLGASARRMLKALAEGETNPTALATLADERLRATPEQLCDALGACTDLKPVYRRLLKMALEQLQFLEQQIGQLDQEMASLLSQHQDAVERLAEVPGLGVDSAQQIIAEVGPTAATFPSEKCLASWVGACPGDDESAGVNYSHRSPKGNRHMRRVLNQTANAAARAKGSIFEIVYRRSVPRLGHNQAIGAIAHRQCRLIWLILHQGVRYEERGPAVTKQSKQRRTARMLRQLRSLGYRIEPPNPQHPSPAPVR

SEQ ID NO: 371823 - protein, 424 aa, unidentified
MKVTYKTCCGVDVHKSFLVATIITTTGGIEPSYQKKRYSTFNNSILEFKQWLLDNDCHDLCMESTGKYWIPVFNLLEDDINVTIANPKWVKAVKGNKDDTKDSKWIGDLFRLGLVKGSYIPCKKIRILREFTRYRYKIVSCRSSEKNRYQNALTVCNVALDSVVSDIFGKSSTSIIDYLLEQSGNSINHKEIASKLLKSLKSKEDAVIESIEGYQMTDSQKYRMHLVRAHMDYITAEINDVDREIEKLISSDPDFENAIQFLMTIPGVKRDSAITVISEIGIDMTQFSSSKRLCCWAGLTPGSNESGGKKKSVRVTRAGVYLKPALVQCAHAAVKSEKFPYYKKKYESLMKRRGKKRAIVAIARMILTAIYQMLSTGESWNPSDLYKIDIPEALLEKQKAKAIKQAMKLLQREGLYPPPEPIAS

SEQ ID NO: 371824 - protein, 417 aa, unidentified
MILPRRSIRQRYYIQMGRSFSFPVSHEGYSEKLWKEIGKILGDYGTEDLAFAVETSCALWKTLTDYLSQRGYTVLMVNPLTTYHSRPLMNHDFSKTDPKDALLIATNARNGNYTVYQNFTPEINKLHRLSITYDKLTKDRQKAIARLRAFMEEVFPEFLNCIPVDIETSLYLLDQYFLPEHFRSLSVHEEELNVRRISNGNHGTETLKKLKEYAQKSIGSSVHGEEDALRLTLDIWIMQVRQSGSGLAAIAKAIIELARKTEYFEILTSLKGISDISDARFIGECRDLSLYAHYKQIEKHAWANLRLMDSGKYHGARRISGIGNKRLLKLIYLMTTQTARFIPEVRIKFIKRQLKKKCYRKNIIASSSQLLKLLMALIKERRPYAFREEAAQELEKLEMKYSEIQNTQKKEAVRKAA

SEQ ID NO: 371825 - protein, 355 aa, unidentified
MLNTKYIGMDIHKETISIAVMNAAGKVVMECVIETKANTVLQFIHGLRGDLHVTFEEGTWAAWLYDLLKPHVTEVLVCDPRKNALLKQGSKSDKIDARKLVELLRLNHLKPVYHGEHGVRTLKELSRSYLTITQDLTRVRNRLKALYRSWAIPCSGTQVFAPRHRSEWLGKITEAGVRRRAEHFYQQFDALRPLRQEVRRDLLAEGQKHKAWKLLRQIPGIGAIRATLLIALIQTPHRFRTKRQLWNYSGLGLETHDSAQYCVVEGQLQRCKKPLMLRGLNQNHNHDLKAIFKGAALEASSGAGPFHDFYEALLTKGRKPSMARLTLARKIAAIALTVWKKEVSFDAKHLKQQAA

SEQ ID NO: 371826 - protein, 337 aa, unidentified
MKRYLGVDLHRTQFTVCTRLENGRTYLRQWPLRELKLFAAQLRKEDEVAVESTGNTRLFHDAVVEHVGRVAVVNPSQFKVISQSVKKTDKNDAELLALYLAKGLLPEVRMKERRQREMSHLAQTRDLLVKQRSALKAKINNLLSAEGINLKRESLSSNKALQRVLALPLTPLMLAEARVLVGQICSLNQSIAELEGLIEEEGPKLAGHENLMSIKGIGPVSAAVLLSVIGDIKDFSDPGKLAAYIGLVPRIQNSNETEHSGRITKQGNKLARTCLVQCALIAKRFSPFLQKFYQRIQRRRGGGKANIALARKFLGVIYHTLKNNWVFEDFPNFVLAS

SEQ ID NO: 371827 - protein, 349 aa, unidentified
MLADEVDYVVGVDTHCDQHVLAVVVAGTGVVVARRSVCSSAGGYAEALRFAQAAADGARVWAVEGAGHYGAGLARHLSGRGETVLEAGRGPRDQRRLQGKDDSLDAVRAARAALASETPALPRTGQQREALRLLLLARRSAVDVRRLALVQLRSVIVTCPDQLREELRGLPAGRLVERCSRLRRSRSRTPDELASTLVLRSLARRIQAATVEAAELEREILAHVRALAPHLLDEPGIGPIVAAQLIVSWSHHGRVRSEAAFARLAGVAPVPASSGQTTRHRLSRGGDRQLNRALHTVILHRRQHDPATKDYIARRVAEGKTRRDAVRLLKRYLARHLYRVLDNQGPLMT

SEQ ID NO: 371828 - protein, 370 aa, unidentified
MSQHTTDTIWVGMDVHQASITAAILHGDDVEPQVVRLPGDLNAARRLFRRLAEKGVPRACYEASGAGYVLQRTLSDDGFHCEVIAPSLIPSRPGDHRKTDRLDAVHLARQFRSGHLTAVAVPDVDQEAVRHLVRAHLFNRRQITRAKHRIAGILRTGGYHFTETKSGWTKQHRAWLAKLRHELTGPMQTVVTSELHHLEYLEASLSSLEAAISEISVQPPWRAPVEALCCFRGIKTLTAMTIISEIGDIKRFGSPRQLMGYVGLVPSERSSGERSHRGPITKAGNRYLRRVLIESSWHYSKRACSTLKLQRRRAGQDPAVIGIALKAQHRLERRYQHLSRTKHTNKATTAVARELCGFLWAMLWEVEGRR

SEQ ID NO: 371829 - protein, 410 aa, unidentified
MRIIALDVHRSFAQMAILENGKIRDAGRFDLERNRLLQFAKKLKPDDEIVLEATGNTSTIVRLLSPFVARVVIANPILVRAIAWAKVKTDKIDAAVLAKLYASGFLPEVWMPDEETETRRRVVAERTQLISQMTRLKNRIQSVLHANLIPPYKGTLFSKRGRAWLEAQPLAQDQRRVVLRHAGELDRLSAELADVDKSLAQKALSEPRIKRLMTITGVNVTVAMSVLAAIGDIDRFSSAKKLVSYFGLNPRVRQSGDKPAYHGRITKQGRAHARSMLVEAAWVISGVPGPLRAFFIRIRDKRGKHVAAVATARKLAVIVWHMLTKDEDYTWNRPALLDWKLRKLELKAGHPSRRGGKQKGSAAAYSDKSVRDSEREAIGDAEQAYTRFVANWKQHLSKGRSGAANEVRRS

SEQ ID NO: 371830 - protein, 410 aa, unidentified
MELQIQRGCGLDVHQATVVACLLTVLADGKVKKQIRAFGTTTRELLALSQWLQGEGCTHVAMESTGVYWKPVYAVLEGTFELIVANAQHIKNVPGRKTDVKDAEWIADLLLHGLLRPSFVPPKPIRELRDLTRYRRKLVESRSAERNRLLKVLETANIKLASVASDAFGVSGMQMLTALAEGKATPAEMAELAKGRLREKIPQLEPALEGRMEEHHRYLLKLQLRRMRDLDQDLAELEERIQQRLEPYREQLQLLEEIPGVDWTLAAVIIAELGVDMKVFPTASQLASWAGVSPGNNESAGKRRNARVTKGNFYLKTALVEAAQAATRAKGTYLRDKYYRLKARRGAKRAVVAIGHKILVAVYHMLSDQVSYNDLGDLYLDRLNKEHLTRNLVRRLERIGWRVTLEKAAA

SEQ ID NO: 371831 - protein, 344 aa, unidentified
MKPTTVAVDLAKSIFQVAISHRPGKTAETHRLRRQQLSAFFEQRPTSTVVMEACGSAHHWGRKFAAMGHEVVLLPPSQVHPYVRRNKTDSADAKALLEAVRNDVIRPVPVKTIEQQILAALHRVRAGWMAERTARINTLRGVLRELGMVIPVGAARVVPAVALLVEDADSEVPDGLRHTLWEVCCEIRELERRIRDVGHQLQALAKQFPDYERLLSIPGVGPLTATALLAFVGDVRRFPTGRHFASYLGLTPTEHSSGLTRHLGRISKRGDSYLRMLLIHGARSVLFASRRRTEPERLRAWAMTIEKRSGFNKAAVALANKLARIIWAVWRQPEAVYIARPKAA

SEQ ID NO: 371832 - protein, 380 aa, unidentified
MQTITLYIGLDVHKDSITIAIAEPGPKGEIRLFGTITNDMHALEKALSRIRKAHPNAQLEVGYEAGPCGFGIARRLEQLKVPCLVAAPSLIPKQPGSPFKTDKRDSRNLARLLRAGELTAVYVPEPTDEAIRDLCRARTDAVDDLRRCRLRLKSFLLRHDYRYQGKANWSQPHMRYLRELVLPHPAMKAILEEYLQGIDGAHQRVQRIEASMLTLLETWRLKPAVQALMAFRGFQLVAAMITVSELGDIHRFAHPRQLMTYLGLVSVEHSSGPKQHLGSISRCGNGHQRWLLTECAEHYLLPPKVSKELSHRQEGQPPEVRALSWKAQNRLHLRFTRLLARRLQRNKAKVAVARELCGFIWALLRTQACYTQPTNQSAPS

SEQ ID NO: 371833 - protein, 407 aa, unidentified
MKLLIGIDWSKDHHHVCFMAANGSQQASFEIPHTVEGFARLDAERAQFGVSAKECLVALETAHNLIVDYLWSRQYQVYVIAPTVVKGSRGRYGVSGAYTDASSALLLADLLRTDLTRFIPWCPDGELVRQMRAKLSLIDALQRDILRWSNRLLAVLLRVYPHPVGLFSELTTQISLHFLIAYPTPQAAQGLSYEDFESFGRQHGYPTGKLPELYARLQSPKPEPDPAALQAYQEEIPFLARTLLPLVQHRLQLIRQVKELFGQHPDHFIFESLPGAGDLLAPSLLVKFGDHRERFPSAAMAQALAGTCPYTKRSGKRRAILFRTACDHDFRRIAQQFAIESVKQSVWAATYWQEAYARCQSKSQAYRCLANRWLAIIWKMWQTRKPYDEAYHLKQRLLRRQPRPRKY

SEQ ID NO: 371834 - protein, 347 aa, unidentified
MTVYIGVDFHARKQTVSYLTTEDGEIEQVELEHEKDYVRTFYEQFRGQKVIVGFESSGYAAWFEELLEELEYETWVGHAAAIRQFARRRQKNDRRDADLILELMVRGDFPRLHRYSRESRERLQQLRYRQRLVKMRTMVINSLRFMVGSRGVTLRGTLQSRPGQARLRQVALPGPLGQQRDELLRLLVEIQQKVETVEGWLKKKAEADPRVQRLRTHPGIGLLTGLGLVATLESIERFSHSRKVTAYVGLDPVEDSSGERRRMGSISKQGSRLLRLLLVEAGQVAARRDQELGQVYRRVTLRRGHATAKVAVARRLLVRAFIMLRDEIDYAEFCRRGVAARSSRGNA

SEQ ID NO: 371835 - protein, 359 aa, unidentified
MKTTLSNKQKWFNKINLTADDELHVGIDVHKKSYHVALWLNNAHAINFVMPSDNKKVAQLLLKVRIALKCIVYEAGPTGYNLARALQKEKLPVHVIAPSITPRPAGKQTKTDTIDCRKLAKFAAKGLLRKIAIPTRQQEADRQLTRLRQQLVEKLRRVKIQIKSFLLQHGIEEPDGLTSWSGRATTKLKDIQLSNQLKYCLDMLLKELAFLSEKLKEIESKLKELFNKKRYTQKIKILKTHPGIGPIIAGQFVTEIFDPKRFKDKTEIGKYVGLCPQIIQSGQKLRDGPILKTGRPQLRCNLVEAAWIWIRKDSHAYKTYCRIKANTGHQNKAVTAMARKLAVNLWKMLCDHKPYIRQA

SEQ ID NO: 371836 - protein, 350 aa, unidentified
MKLHAIGIDLGKTVFHVVGLSQAREVVVRKKFSRTQLLRFTANVQVDLIGMEACAGSHFLGRALREQGHDVRLMPAQYVKPFVKTNKNDFIDAEAIAEAVSRPTMRFVPIKTDEQLDMQSLHRVRERWIMRRTAIVNQIRGLLLERGITVRTGRCHLDAALPNILEDGSTPLSGTLRFLLAELKQELEQLAGHIEQAEILIQRAAQQSEACRRLDAIPGIGPLTATALIAAIGNGGAFRKGREFAAWLGLVPRQHSTGGKQKLLGISKRGNGYLRKLFVQGARAVLQYRDKQCSGLRHWLAELSSRSHYNVVGVALANKLARMAWAVLASGGAYRPPVMTDMTGLRMTPV

SEQ ID NO: 371837 - protein, 485 aa, unidentified
MKQTKSSPCGRAIPAHGGQLSRKERRELARQVQSEQVTLQIVHSNAAGIDVGKNTHYVAVPPDRDAESVRYFDSCTDGLQQMVAWLKKCGITSVALQSTGVYWIALYDLLQEADFEVYLVNARYTKSLPGRKSDVQESQWLMKLHTYGLLPNSFRPPQEIRWLRSYGRQRQNQVRSAASCIHRMDKVLTEMNVRLSSAVTDLSGATGLAIIQAIVDGERDPHELAAYRDPRVKATQEEIARQLHGNWQADLLFRLKQELQGYRFYQTLIAECDQELAQLLRAFPDRSAGVALPEETRKNRRKKKRGNSPQFDLRQLLYLMSGVDLARIDGIDVITAMTVVAEAGYDMSPWPTADHFVSWLRLAPDNRISGDKIIGKGRTPTQNRLSQALKMAASSLKASKTYLGAQFRRLRARRGPAIAVKAMAAKLARLVYNMLRHGMEYVDRGTEFYEQQQRERRLHALTKNAAQLGFQLVPTELSLAGTGTI

SEQ ID NO: 371838 - protein, 326 aa, unidentified
MNTPPVLGIDVALRSLAVALWIDTARCAQAQFSNDNRGFRQLSRWLLQHFAGQVRVALEATNTYGEAVARWLHERGHRVYLLNPERVALFARTLGQRNKTDPADAVTIARFLVGREDLTPWQPPSPEQQTLRSLTRTRQQLLDQSLLVRNQLRTADPCARRHLLAILRPLVRQLAVILREIRAHLKAHLGLAEQVRRLMTCKGIGLVTAAVAVAELPPITRQSDPRAICAWTGLTPHRWQSGGTEWPARLCRKGNAYLRHALYMPALVAKRHNPLLRAFADRLAANGKRSGAILGAVSHKLLRIIVGLLRNETDFDPQWTQKHTRT

SEQ ID NO: 371839 - protein, 383 aa, unidentified
MPRPRAAYRSVEFDVVDGARSRHRCAIGCFVGSESHEGAVQMQISTIGLDIAKNVFQVHGINANETVVVRKRLRRSQVLAFFKALPPCLIGMEACATAHYWARELTKLGHRVRLMPAKDVKAYVKRNKNDAADAEAICEAVRRPTMRFVQVKSAEQQGQLMQHRTRDLLMRQRTQSINALRAHLAELGIVAAQGDKGVKELLSIVADEKDARLPIDARASVIVLAAQLQAVQTLIGSIEKRIKTQHRSNEASKRLETIPGIGVIGASAIAATVADPTVFRSGRNFAAWIGLVPRQDSTGGKQKLGPISKQGDRYLRRILVVGAHSVLRRAKQNPEKYFWLTQLLARRPFKVVAVALANKMARMAWALLAHGGTYRAPVLAAAA

SEQ ID NO: 371840 - protein, 407 aa, unidentified
MLWGGGVDIASIVRCEPMERPMQKLNDLSRSLTALEPNGTLIAVIEMSLSSWLVAGIVPGVERQPLKKLAVDESALLKLLHRWREEAEKAGRRIERIAVAFEAGRDGFWLARWLKARGIEAYVIHASSVAVSREHRRAKTDRLDTELLKRSFLGWLRGERDHCKMVEIPTMQDEDAKRPNREHDSLIGERSRIVNRMKAALVRLGIRGFNPKLKRATTRLDGLHTPEGEPIPPNALAELRRDMERRRLVNNQIRQIEEERLERIEQAPCDGAHVMVRLLARVMGVGIETADMLVHEVLSRNMRDRRAVARYAGLTGSPDESGRKRREKGLARSGNARVRRGMIQLAWRFLLHQKNSALTKWFRSRTENARGTRKPMIVALARKLLIALWRLMREGIVPDGVVLRPAQ

SEQ ID NO: 371841 - protein, 335 aa, unidentified
MKTRYFLGIDIGKNSFHAALTVEGQNYYDQEVSNNVTAIKKYFQELKAKFGFQSDQLIVCMEHTGIYCYPLLDYLTKQRVKVCIEPALRIKQSQGMQRGKNDKIDSKRIAKYAYKNVDELRFWQPKREVLQKLRALLVVRERLIRAKTQFEVPVKESREFIEESIRFLAIKNCKATISAINKDIKKVDAEISKVIKEDNQLHTQVKIATSVTGIGTIIAANMIITTNEFKDISDHKKFACYAGIAPFENSSGTSLRGRSQVSHMANKTIKTLLHLGARSAIQHSPELKQYYHRKLAEGKKSFSVLNAVCNKLISRVFVCIKNQRMYEKIYQQSLV

SEQ ID NO: 371842 - protein, 347 aa, unidentified
MKVTTLGFDLAKNEFQVHGVDAAGKTVVRKKLSRAQVLPFFTRLSPCAIGIEACGSAHHWARKLTELGHTAKLMAPHFVKPYVKANKTDAADAEAICEAVARPNMRFVPVKSVEQQTILAVHRVRSGLVAERTAQLNRLRALLAEFGLIAPRGRRALMERLPVLFADETLPGVARNLFERQSMRIRQLDAEIAAEEAVILAWHRNNELSKRLDAVAGVGPITATALVASFGEGREFANGRQMAACVGLVPRQHSSGGKTKLLGISKRGDGYLRMLLIHGARAVIRTLERRAKGAGNPTDQWLTKLLARRNPNVAAVALANKTVRVIWALLAHDRTYDRNWQAQRAAA

SEQ ID NO: 371843 - protein, 428 aa, unidentified
MSERDYNRQAAKRQRISKTTLIVGVDVGNAFNAVGFMNKDGNVLGSCTKLYNSREGFEQFVKMIEGLKARHRFRDVLIGMEPTGHYWRKLAYFAKEHGYEVRFVRTTALKHHRELDESSSAKSDQRDALTIANITREGKYIDTVIEDGVLRQLRTLSKARERLLRYSVSAKNSLHAALDDYFPELHEIFWSMGSRSLWVILEKCPFPEDVLSMKVSTLQELIARSSRKKAGSAQKVKALYEAAQNSIGVKQTGSADLYRLRMCLEEVKRTVLTLKDMDRQLKCMVKEIPSASYLMSIPGIGHLSAAVFLGELGDPAHFHNARQIVKYAGYDPQESDSGSWVGRKFISKKGRWLLRKYLFFMSMRVVVLSKYFQEYYHRKLETKNRVGQQPKRKEILCAVAIKLIKVIFALLRDKRGFEDLASATAAIA

SEQ ID NO: 371844 - protein, 323 aa, unidentified
MGAVVNQNQSSSVSPLFVGIDVSGEFLDVAFHESAEYFRLANSPVGIAELVGRLLPLQPQLVVLEATGKLEKAVLEALCQAGLPGVAVNPKWVRDFAKSTGRLAKTDRIDARVIAHYGAAVKPTVRALNDEQTQQLQALILRRTQLIDMLTAEHNRRKRAHKAALPSIDELIRFLQQRIKDADHDIDAFLQTSELWRRNADLLRSTPGIGRMTAAALIAFLPELGTLSGRQIASLVGLAPFNVDSGKYQGQRHIKGGRHIVRRALYMACVAAQRANPQIRAFCDQLRARGKKTKVAFVAGMRKLLTQLNAMMRDATPWNPPKA

SEQ ID NO: 371845 - protein, 339 aa, unidentified
MKHMAVGADIAKNVMQLHYIDAETGEIVNKPVKRAVFLEHFANRAPCLIGMEACGGSQYWARKLKAMGHEVKLMPGKFVKAFVMGNKNDAVDAKAIWLAVQHAERTVAVKTETQQAVLGLHRMREQLVKFRTMQINGLRGLLTEYGEVMGKGRAALDKAIPSVLERLVDRLPAILIDTLREQWNGLAELDKQIAGIERRLQMWMREDKACKAIVAIPGVGLLTATAAVATMGDAKTFRSGREFAAWIGLVPKQTGSGGKVQLLGISKRGDTYLRKLLIHGARAVLCLTKEPGPWAEGIRKRRLLNVAIVAQANRIARTIWAILAHDRPYEKGYVSVKLV

SEQ ID NO: 371846 - protein, 386 aa, unidentified
MRFIGLDVHRDFCEVAIAEGGGLRLAGRVRTEPEALALFAQSLAVDDEVALEATGNALGIARIIAPHVGRVVLANPKAVKGITRAGAKTDKIDARTLAKLLAGGFLPAVWLPDEQTRILRRRISARAQLVRQRTRAKNQVHATLIRNLKGKPPVSDLFGARGRRWLAEQELPADERETVAACLRQIEFLDREIALIERALAEQVLASAEMRRLLTLPGVNFVTAAALIAAIGDIGRFPTARQLVSYLGLDPRVLQSGSEPARHGRISKQGPGETRHVLVEAAWHATRTPGPLRAFHQRIAARRGGNVATVAVARKLAVIAWHMLNRGEDYAFARPSLTREKLRRLELMLGAERRKGKRIGVFATKEQHQLDRELAAQAELAYRRLV

SEQ ID NO: 371847 - protein, 375 aa, unidentified
MEQYGGIDVSLESASVCVVDATGRIVHEAKVASEPSALINWFDGHGSDLSRIGLEAGPLSQWLYAGMRDAGLAVELLETRHVRDAFKAMPVKTDRKDARGIAQLMRLGWFRSVHCKSLPAQETRALLTARKLVQSKRHDMEMRLRGILRGFGLKVGVTTGRTFEGRVHELVAGHPTLLAVTEALLVARAALSEQLSKLEKRVRSLARDDRRVRRLMSAPGVGAIVALTFVAAIDEPARFRSSKAVGAHFGLTPKKCQSGETDVTGRISKIGDADVRTVLYEAANVILTQAGESFVVEELGDAAGSTCRDAQGEGGIGAQAGGHPAPDAGGRNRVRRRQGRDRSGVAEGEIIGSGEHDTTSPGAGPVAGTMDQARP

SEQ ID NO: 371848 - protein, 397 aa, unidentified
MIAVGIDISKAKSTVAVIDSDGTVLASPFTMAHTQPEMEAFVTYLKGLGEPTTILMEYTGHYHYPVLKKLQDEGFPVCIVNPYQMKKYGDVEIHKAKTDKKDALRIAAYALEKSYKLVPYSSMEQKYEDLKFLSRQYSQRITYVAKLKVQLIALLDQTMPGITRILPLNSRNPEKCALLLFIKRFKSFDEIQRIGKARFLASYDVLAKKASERSASSKGLSIYELAVDSITTRGEDPYIWLSQNQCVDLLSATQNAADDIISQMRNIAETIPEYKILRAMHGVGDRLGPIILAEIGDVHRIHSGKALNSYAGNDAPPYQSGQFESRNHHISKRGSSTLRKACYEVMQALKLTKPQDDPVYLFMLKKEQEGKPFNVAKMAGVNKFLRIYYARAMELYK

SEQ ID NO: 371849 - protein, 340 aa, unidentified
MVHVGVDLHKRVSQIAVLTEDGELTQHRLANEPLRLERFFAELPADTPVAIEASGTWWWLVDLLEGLGHRPVLSHPKQTKAIAAARLKNDRVDAERLLLLLRGDLLPRVWIPPKALREARELLRHRVSLVWVRTGIKNRLLALLARRNVQPPRSKGWWTQRGRQDLQALPLSAIPSTIREDCLALLRLLDEQIRRLDLELIARWGADPRVQRLITIPGIGPFTAILLVLELGDIYRFPSAKHLASYVGLTPRVRASADRIRLGHISKEGNRLVRWALVGAATQAARRPGPLRAWVRLVQQRKGKKVARVALARRLAEIVYHVWKEEIDYFTVLRRSGVRG

SEQ ID NO: 371850 - protein, 322 aa, unidentified
MSCKGLRVIGIDVGKRMLDVAREGVRAGERYSNDVVEIARFVRSLDPEHDIVVFECSGGYERLLEGQLAEAGVRWAVVHSKRVPAFRIAKGIKAKTDTIDCRLLRDFGRDQLDSGELRLGRLGDVTMAALAARRRQLNDMLHAERCRQEAAAIELVRSSIDCTIATLEAELTAIEAAIATHIRTDPELHLKEDVMCRRIGVAETTARGLLAILPQLGRASAREIAALAGAAPRVHQSGTTQKRRGLEPGRIVVKVILFYPAQTAMRFDPEIKAFAQRLRNRGKPGKLIMVAVMRKMLVKLNAAVRDALASSNRLAPAGSAAD

SEQ ID NO: 371851 - protein, 349 aa, unidentified
MRYFQPPADTRFYAGVDLHARALFLVVLDHTGQLRYARNLPANPQPFRKAIAPFRDGLVVGCECMHCWYWLADTCRDDNIAFVLGHAWGMKAVHGSKTKCDRKDAEAIARLLKGGNFPLAYAYPKERRGLRDLLRARLRLVRQRAELYGHIHTARRQLNLPPLSNDVKYKSKRASATADIDDACVRRRVEADLSLLEPLDTTIRRLEKDIEVAARQHYATEMAVLQSTPGVGLVIALTILLEIDTVERFDTRQQFCSYARLCGARQESAGKKVGSGNAKQGNAWLKWAFSEAAVLSAQKNERIGKYLDKLSSRMGKAKALSALAHKLGRAFYHMLHKKEVFNIDQFLRH

SEQ ID NO: 371852 - protein, 513 aa, unidentified
MRRVGIDLALKAPHRAAVFDGAQAIGKSFAVQRTKGGVDELVRRATAGTSDDVCEFIMEPTGLAWLPLAAELARRGHQTYVPKPQKTHALRVFLSQFAKTDGVDAKAQALVRHVDPTGVHALHVPSAAETTLRLCAKQRARLVVDAARAKGRIQSWLVLANPHVGEAIDLFTDVGVAFLRRHLDPFRVRAMGRAELKRFWQRQVRGQVDEDQLAAVWTACETTCEFYEAQRAAGTLPFDYAVVQAMVVQELERIELLESQVAALEDTLQRAYRLVDPERVLEREVPGVAATIGATIEGFVGDVERFESAKRFAGFFGLVPRTRQTGGKDGAPRQRLTKGGQALLKKYMYLAAETARRCDPELAVMYATCIARGKHHYASVIAVAHKLVRKIYAMLKLRAAARRAVLEGRPAPEVAYRYVRPDTGEIIGAKEARAYVNEHFPSKAAKERAKGEKKKRAAEAAPRKEGSSKDVTNVDLGTPPIAFVTNVDACGKSVDNAVINPLIQQTKFSVDGT

SEQ ID NO: 371853 - protein, 345 aa, unidentified
MNREKLSYVGKKVFVGIDVHLRFYHVTCYYEEVRVHKFRCDAVPGELAYSLLKMFQGAEIESCYETGFSGFVLHRTLCEAGIKNRVVNAGDVETSSRKDKTDKRDSNKLAQQLMSKRLRGIAIPGETQELKRQLTRVREQLMRKRTSTKNQIRMRFHYFGLLGCCEKREMSFSLVQEMLEKVDALELILSTEVLVAVWRSLDEQLKRINTELKHQAENDVLEVLYRKLPGIGPLSSRVLSNELGDLRRFPSMKALYRFTGLTPGECSSGESCKLGHISREGSSRLRHVLVEAAWNALSKDQTLKKYFEELATRAGKKRAIVAVARKLVGRARAISISGEDYKMAA

SEQ ID NO: 371854 - protein, 352 aa, unidentified
MLTVGIDAHDRMYVMCVLDEHGKTLKEHTVRGGPGAVAAWVKGLGLPARVCYEASLGYGMLHDALTAVGVQAQVAHPAHLRSIWQSKKKNDRIDAHKLATMLYLDRVPRVHVPVLAVREWRVLIEHRRRLVDKRTATKNGLRALLRSHAIAAPKGRRLWFGPGKKWLAGVEFASPLAALRRDQLLEELEHFDRMIKTAEKTLDRIGERHPGVALLRTMPGVGPRTSEAVVAYVDDAHRFGSTRRAASYFGLVPCLDQSAGVRRLGHITRQGPATVRKLLVEAAWQGVRHSPSLKRMFERIRGGRKEQTGRALVAVARHMVEVMVAMLKSGQEWHEQENPPADTPAEPVGTAA

SEQ ID NO: 371855 - protein, 337 aa, unidentified
MEQYVGLDVSQEASSITVRQDGRRVWRGKCPTDPKALSEVIRKHAPHAVRIVFETGPLATWLYHALQAENLPVVCIDARHAKAALDMAPNKTDANDADGLAQIAEIGFYREVRVKGYGPMLTRTLVGARSQLLRISIQLSNQIRGIMKTFGLIVPKGAGRLFERNARALLETNEAVARVVLPLLETWRVVRARAAELDRQLIAAARTGPSYRLLMTIPGVGAITAVSFVAAIGVPENFKRSRAVGAWLGLTTRRYQSGETDFDGHISRRGDRHLRALVYEAAVAVLTRARTDCALRSWGLKLKAKVGFKRAAVAVARKLSVIMHTMLKTRAAFAAAA

SEQ ID NO: 371856 - protein, 356 aa, unidentified
MSYDVKYIGMDVHKEAIVIAVLNESGKLVMESVIETKASSILQFLHGLRGELHVTWEEGTWAAWLYDLLQPQVQHIVVCNPRRNALLKEGSKSDKVDAQKLANLLRTGMLRPVYHGENGLRTLRELGRSYQTISKDLTRVMNRLKALYRGWGIPCAGTQVYAARTREEWLGKLPQAGVRRRAELLYQQLDGLQALRREVRPEFLAESRKHQAAKLLRQIPCIGPIRAARLIALMQTPHRFRSKRQLWTYSGLGIETHDSAQYRFVRGQLQLSKKPQQIRGLNRNHNHEMKEIFKNAATRASCGRGPFYDFYAALLAKGMKPEMARLTLARKIAAITLTLWKKEERFDVEQLKTQAA

SEQ ID NO: 371857 - protein, 338 aa, unidentified
MKTYAGIDLHSSNNYLGIINDEDQRLYRKRLPNRLDGILAALEPFKETLKGVVVESTFNWYWLVDGLMEHGYKVHLANPSAIKQYEGLKHTDDTWDSFWLAHLLRLNILPEGYIYPKEERPVRDLLRRRLLFVKHRTSHILSLQSMISRNLGTQMSANAIKRLDQGAAETLFDSPHLVLAANSNIAVIHFLKERITLIEKAVKSHIALREEFGYLLTVPGIGDILALTIMVEVGDIARFPQVGDYSSYCRCVKSERLSNGKKKDENNRKNGNRYLSWAYVEAANFAIRFSPPAQAFYQKKMAKTNGIVAIKALGNKLARASYYIMRDQVSYDPKRLFS

SEQ ID NO: 371858 - protein, 429 aa, unidentified
MMHPKMQYTYVGIDSHKETHTAVFLDCFFEKLGSITFGNLPADFVGFLAQAQAFKQDGTAFMFGMEDVSAYGLALARFLRASDLPVKHVNAYLVARERNNLNADKSDEVDAECAARILISKFASLPDVEDDEKYFTLRTLVVRRDFLTRCNLALKTYLHSLLTVDFPNYHKFFAEIGGKTALAFFTKYPSPGSLKDTTVDELARFLWQHSGGSLGLKRANEILAAIDTTTHEAHSRCETNGKYETNGKYETSRKHEIRSKTIHGTIRQLQYNVDELDAVEVDLATVYRSFNTTLTSMSGLDIVSASQLLSCIGDVRKFSTPAKLARYAGIAPVSYSSGKRDTQFASQRGDRELNSLFYGLAVRLILTFGPGHKAHNPFFYEYYHRKISEGKTKRQALKCVQRRLVNIIWGMLTHGEDYVNPPMIAVANN

SEQ ID NO: 371859 - protein, 392 aa, unidentified
MIIIDIGKNKHEATLINEKGNIIGKSIKFENSTAGFNKLISSINNYNISNDKFVFSMEATGHYWLALFSKLVESDYNVQVINPIQTDACRKFYIRETKNDSKDSFLIAQVTRFNGYSKTTLPDEVMISLKELTRFRTFLVDDISDYKRKATVVLDKIFPEYTQIFSDTFGKTSKEILTKYPLPKDILNEDLESLAKVLSTSSKGRLGYSKAEQLQNLAKESFCIKFATEALVMEIKSILSTIEHLQNQVSKLDEKIAVLLRSLGTTIETIPGIGPVLGAIIVSEIGDINRFSHASKLVAYAGIDPTVKQSGEFNATKNRMSKRGTPYLRRALWTASIVAAFNDPNLHEYYLKKKNEGKHHGTIIGAIARKLIYRIFIVLKDNIPYQCNKCEA

SEQ ID NO: 371860 - protein, 462 aa, unidentified
MMNVQEQREMVEKANRILSEMKSFTWRDLETQGKFSKNDKLSFIDDDMLILGCDIGSETHYVRAIDIRGRELSRKALAFDNNAEGFQKAHDWAVQLAASNDKKQIVLGLEPTGHYWFCLAAWMVSNGISVVQVNPYAVKQTKELEDNSQQKDDRKDPKLIANLVKDGNYGMPYLPEKVYAELRRLSMFREQLTEDRNRSMNRLHREMKIYFPEYKDAFGKIDGAFCMAVLKEAPFPEDILKLGGEGIREIWHQAKLRGRGYSRAAEIVKYAETSIGLKDGTAAGRKAVRWFAEKIMELDEELAEIENRLNEKCREIPHAENVLEIPGIGGKILSGILAEMGDISRFDDAKELQKLSGLGLVSCSSGKHKGETRISHRGRKRLRYWLFQAARSAVAHGEEYRWIHTHYTTRAGNALQKMQSLMVIACKLLRVIYTMLKTGKPYDPEKLLKDIRYPENVQTAAA

SEQ ID NO: 371861 - protein, 456 aa, unidentified
MPNYYLGADISKGYSDFIMLDATKRPIEDSFQLDDTFEGHHQLYSFVSKFCNDHPRARIYAAVESTGGYENNWFDALIKFQSSLPLKTARLNPCGVHNNSKAGLERNITDPISAENVAKYMIAHPEKVTYQQQDPLYSLRKQWSFIKMLLKQKTQLLNQLESNLYAANPEILAYCKNSTPKWVLSLLGRYPTAAKLAKAKRSSLTLIPYVTQPKANALINSAKKSIASATDQISAQIIKATVKQIQHLTKAIEAQVKIITKNCSVPEVELLKTFAGISDISAIGLMLEIGSVKRFAKAKKISSFFGLHPIFKKSGDGAWGFHMSKKGRVVPRYILYMVAMSAIQCNPLIREIYLKHTAKGMKKKAALGVCMHKICRIIYGMLKHNMAFDPSVDRKNTHKSPQGKTKISRDKRRRYQSFDTKAPISGRQNKKRKERKQSQSVNNAQCGIIKAPVPIS

SEQ ID NO: 371862 - protein, 340 aa, unidentified
MEVNTIGLDLAKNVFQAHGADAVGAIVFRKQLRRDKVLAFLAGQPPCLVAMEACAGAHHWAREIGKLGHTVRLIPPSYVKPFVKRQKNDAADAEAICEAAQRPTMRFVAVKSEEEQASAAVFRARDLLVRQRTQTINALRGHLAEYGLVVAQGPSHIAKLMEKVEHPEGNLPEAAHLALTMLVDTLRSLEERIKQLDAEIARRAREDEDVRRLATIPGVGPITATALIALAPCAASFRKGRDFAAWLGLTPLQHSTGGKQKLGATSKMGERTLRRLLIIGASAVVRHARRRGVREGLWLGRMLARKPPMLVVVALANKMARIVWALMARGGTYRAPAVAA

SEQ ID NO: 371863 - protein, 400 aa, unidentified
MISVGIDVSKGKSTVCILKPYGEIVSKPFNITHTHKDLSELSSMLFRLNDEVKIVMEATGIYHLPILTYLQEKGFFVSVINPYLMKSYRNESLRKAKTDKIDSRIIANYGIDHWFKMKEFQISGVIYEELKLLGQQYRHYMKLHLLSLAELTHLLDLTMPGIKNLLASWNETNRKDKRSDFVERFWHYDIITSMSEQEFTEKYILWAKEKKYVPSQEKAKVIYTLAQESIPTLPSETSSVKMLVTEAVRVLKEVDATLGLILSRMQEIAKTLPEYSVVREMGGVGNTLAPKLIAEIGDVRRFRNGKALVAFAGIDPPPYESGQFVGCNRKISKRGSASLRKVGYETMRSLKMRSRPEDPVYRYVVKKESEGKSKKSAKIAGLNKFLRIYYARVTELYKNI

SEQ ID NO: 371864 - protein, 482 aa, unidentified
MKKKNIYLNQSQELLSLFEEAGSSGKVMCVPIDYAKKDHTVMFCNGHGDILRKPFSIKNSPEGLDYLVEQVTRSCLHRSIDLKHVFFGGEDVGSYADNFVSTLRSKGWLVAGVNAHDAKKQRTNMQASTDTLDLMGIAIMLINRRANCARPQSGIFLNLRNLVRHRSNLIKMTTQVQNQIHTIVDRLFPGFLNEKKSGITPFTESSLYLMEGRFSAPQIRRRRREKLIEILTRHGAHEPERRAAQLQGYAQKVLMSPNEYIATLQLTLFHHVQHMKCLQDNIEQLEKETAIWLAQTQGAFLTTVRGIGIVLAAGVTSEIGDPNEQKPVNNLVSYSGIIPKVKQTGGPEGKTSTGKVAKRCNHNLKNYVAQSGMHLGLHGPTDLMADHKRRDAAGQHADFGIARRYVRMAMCLMRNWQVYIPPHLRNNRVEPEERAGYYLTTWPKLREKWNKCGALEVAFAKENPLGRWRHMVQELYEISLKL

SEQ ID NO: 371865 - protein, 312 aa, unidentified
MAMLSFCGIDVSKDRLDVVVLPEGRFCSVSNDAAGWAELVARLHPLAVSAIGLEPSGGYERGIIRALLAAGLSVRRINPNKLRQFARARGVLAKNDRLDARLIAEYVAIMPTRVVQRDDAVERLAEIVTMRRQLCDEHVAVENQAAHLEDAMLRRLSKRRLIRLEADIRLLDKRLAEMVATNAAFAQLYELLTSMPGVGPVLAFTLIALLPELGKMSRKQIAALVGLAPYDFDSGKLRGHRSIYGGRMPIRNVLYMAALSASRYNPALKTFSNRLSDADKKSKVIIVAVMRKMITTLNAMLRDNTAWQPQSA

SEQ ID NO: 371866 - protein, 408 aa, unidentified
MTRFHVGIDVGRTHHVARVLDTNTAQISRSFKIPVGYEGFERFHRYLEGFSPDTQDFFVAIEATGAYHTALAGYLWDCGYTLALVNPARSKSFRKAEGHVAKTDRVDAGVLCRMISGVNLRPTIPKPEEQERLRILTRWYFRLQQDRTKVLNRVSAAVDVVFPEFWQVFSKITQVTPRMVLRTYATPDELVKADTEALACLMKSASHGRYRRKDAELLQTLASRTVGIHTLYTPVAFQVRQALAQVDLIDQQIRELMPQIEQEFHAMGFTTEEFPVGGVTTLATIIAHLPSPQSTPSLKSLHAFVGWCPRDRQSGQYKSSRPRMAKGCPPLRWALYGLALACMSYAAPYKVYITRRKAEGKIGGHILIIVGRKLLDRIWAIAKTKSVFLSQVPTPLSEPEREELVAIS

SEQ ID NO: 371867 - protein, 445 aa, unidentified
MHYKRLLALIDSVSSYLSVGLDVGADFTWMSIALPNGSFIGKPFKIVHSDPGSRDLAVAKIKEAQETYSLKSRCFLESTGIYHIPLLCFLRDKGFDCSVINPIITKNSTNISIRKLHNDKFDSKKAALVGLNVSLKTSIIPDDSVVDLRNLIRDYYYFKDLQSAVALKLTAELKVSFPAYAKIFSKVTTQSSLKLLSSYPLAEDMLAASKDDIVKIIRSTARFGEAYALRKYDAIIAAAQDAAVFGRALPSNAVRIRLYIDTYQEYQKHLDALLKALHETVEKLQDTLIYDQICLLQSLRGIGFLTAAVLIAEMGDFKLFSSPKKLYAYFGLDPAVKQSGKLNGDKVHMSKRGSSLARRVLHMVALNNIKIDKGSGTPVNPVVYNYYTRKCSGKKKPVAMGAVMHKICNIIFAMLRDNKPFEVITPEEHCRRFAAEHPDKIQKAA

SEQ ID NO: 371868 - protein, 414 aa, unidentified
MKVVYPVCCGVDVHKSFFVATIIKTDVITPKYMKKRFSTFNNSIKQFKQWLVENDCYDVCMESTGKYWVPIYNLLEDQIRVVVASPKWVKAVKGNKDDSKDSKWIGDLFRLGLVPGSYIPEKPIRILREYTRYRAKLVGNKSSEKNRFQNSFTVCNVALDSVVSDMFGKSATSITDYLIQTDSFNPEHCKSLLLRSLKKKGDEVVESIIGYEINPAQKERMLMVRAHLNFVEEAINTLDSKLNELVAPYEPYIALLLTIPGVDRKSAITIISEIGTDISQFSNSKRLCCWSGLSPSNNESAGKKKSVRISRAGVYLKPALVQVAHAAVKSNDFPYYRNKYERISKRRGKKRAVIAIARMILTAVYTMLKYGEIWNPTDLCKVDLPPVLLERQKQKAIDNAIKLLVSQGVIEQPA

SEQ ID NO: 371869 - protein, 327 aa, unidentified
MSDSKSPVPVLGIDISKGKFNAALLRVGKYRHKAFPNNSRGFEQLSKWLQGLGVMELHACMESTGVYGEELAEYLYDQGFSVSVVNPARIKGFAQSELIRSKTDKVDASLIARFCVAMKPSLWTPDPMEIRELRSLVRRVDALLNMRQQEQNRLEVSNDILKKSIRKHIHYIEKEIEELKDEINKHIDHNPELRDKRELLESIPGVGEATIHIILSHFASIEKFRDAKSLTSFLGIAPRHYQSGSSVTKRTRMSKVGRSSLRKAFYMPAIVALRYNPVIADLKVRLTKAGKHNMLIIGAAMRKLVHIIYGVLKNKIPFDPNFSLKSS

SEQ ID NO: 371870 - protein, 368 aa, unidentified
MNQRTRFLGLDVHKATIAVAICETAGAAQSYGTIPNQPAAVHKLTDRLGGVGVRLKAAYEAGPTGFATQRQLSALGVECVVVAPSLMPRRPGDRVKTDRRDALQLARLLCSGDLTQVWIPDEAHEALRNLVRARADARIDLMRARNRLGKYLLRQGLTPPLGIRAWSLKHAAWLRRLSFRHTADQVVFQDYWQVVTAAGDRVRRLELELHRAAEQSPQLPLIAALQAIRGIAFLTAVTIVAEVGDLRRFQQARQFMAYTGLVPSEHSSGGSTYRGRITRTGNALLRHVLGEAAHHARHQPRLSTLLRERQAGLPPALTDLAWRAQHRLNYRYRHLAARLGRPRALTAVARELAGFVWAIGQRSVIAPS

SEQ ID NO: 371871 - protein, 350 aa, unidentified
MLIIGCDFHSRFQQIAMLDPTTGEVVERRLEHENGEVKMFYATLPSPARVGMEATCDNPWFERVLREHHHELWIGDAAEIRAAMVRKQKTDSRDALHILDLLLTDRFPRIWVPSLAERDLRQMLRHRHKLIRFRTSSMNQLHALAIGQGLCRKKKLWTKVGRKELEGLVLDPWASLRRQELLQLLDQLDPWIKKLDEAVIQAAESRPPAVCLMQQAGVGPVTALAFVLIIGPVSRFANSKKLVSYLGLNPSEDSSAGRQRLGAISKQGNPMMRYLLVEAAQTASRLDPELRRDYQRLKFRRGSGVAKVAIARKLAVRLYWKLREAEQPVPSARMQGSPASPVVGESLSPN

SEQ ID NO: 371872 - protein, 405 aa, unidentified
MRYYIGVDWADTEHASWVEDDRGAKVAERAVPHTPEGFADWGRWLDECRAQGIELWAGIEKPEGRVVDFLLDHGVVVFPINPKALDRARDRFRMSRAKDDPFDARVAASFVRTDHAHLRPLQPSSAPAQELKLLTRDYARLVRQQTRLVNQLTATLKEYYPRALEVCEDLTTQRARAFLAAWPTPEAAAALTPQQWQPFAQAQRLSATQAAALWTTLRRPQLPVPAHVVRAKARLVQTLVAQLEVTVRGVAEYRKAVEAFFATLPAAECATTLPAGHGTTVPTIWAELGDAPGRWESFQHLQAQGGAVPVTIRSGKLVGVCFRYACNKHLRTAVHQLALLSLQRSEWARAYYDRQRARGHKHHHALRALGAKWLKIIFVMWSRHVPYDENHHLAMMARHQLRQAA

SEQ ID NO: 371873 - protein, 416 aa, unidentified
MKTLHLGIDVASQSFLAHLKTDEGLSLGKSRSFGNTPQGASELEQWLLTTLDSTATQRLLIGLEATAFYDWHLADWLAERSSLLAKAQVKVYRLNALRVSRFHKGTGEIHKTDSVDASVIADFLRMGRNLPAPHVAGDPYVPLKRLTRYRCHAVNTLNRETGHFLTHLFIQHSGFAQQNPLSHITGAAGLALIEEFMTSEEIAQKPPEDLARFLMEHGKNHFPDPQAIVRKIQRAARESFRLRPELARSEHFILDSLARNIRGLKVSLNAISRTIADQMNAFPNTLTSVPGIGPVFSAGIMAELGDIRRFPDDDAIAKMAGLVWPQHQSGDFDAQDRRLLRSANAYLRYYLVEAANALRMHDATYRAYYESKYAEVSKHKHKRAIVLTARKLVRLVFALLSKGQLYRPAAVQPAGR

SEQ ID NO: 371874 - protein, 367 aa, unidentified
MKKVSTVAGKQSRNFSKQKLTIGFDLGDRSSWYCVLDEAGRVLLEQKVSTTSKAMQEVFGGMPRSRIALETGMHSPWVSRLLSELGHEVIVAHARNVRLIGESRKKDDRMDAQTLARLARIDPQLLSPVKHRSAKAQADLTVIRARAGLVRARTALVNTARGLAKSYGERLRGCNVRNVNPEKAEGLSPELQKALGPLLAASAALSEQIAEYNERIEQMAKESYPQTALLQQVKGVGTLIALTFLLTLEDAHRFQKSRDVGCYLGLQPGRRNSGQSEPQMHISKEGDPYLRTLLVQGAQHILGPFGIDCDLRRWGLKLAERGARSGKKRAIIAVARKLAVLLHHLWVSGEVYEPLRSSNQRAIPAAA

SEQ ID NO: 371875 - protein, 412 aa, unidentified
MSIPEPVGVRATAGVDWAKDDHVVCVVGDQGDVIERFTVTDDAAGLKQLARRLLRAGVQEVGIERGDGPVVAALLRAGLTVFVIPPSQVKNLRSRYGSAGNKDDRFDAYVLADVVRTDARRLRPMVFDTEQTTTLRSSVRARRDLVVHRVAVGNQLRAHLQIVFPSAATLFSSIHAGVTLSFLERFTTQEQADWLSAKRLATWLHAVAYRGGVDPGVLHTRMLAASRGATGPHATTHAVTTRALVGVLRALNAQIQTLAASIGEQLDAHPDSAIFTSLPRSGTVRAARLLAEIGDARGRFPTADSLACLAGVAPSTRQSGKVKSVIFRWGADKQLRDALCDFAADSRHVHLWAARLYEQARARGHDHPHAVRVLARAWVHVIWRCWQDNVPYDPAVHGALQTLLHEDQQKVA

SEQ ID NO: 371876 - protein, 427 aa, unidentified
MAYRIAAIDVHNRMLAVVVTDAEGEGEYQFERRKFGATPGELHVLAQWLVQLEVEEVVMESTAQYWRPVWGTLELFWRPARQQREGAHKMSGTLHLCQAKSNHGPRGRKNDYLDAERMVKRLVAEELVLSFVPDEEQRLLRTVTRRKHQLTRAKIGFKNQLESLLEQGHIKLSSLVSDLLGVSARRMLKALAEGETDPVVLAAMADRGLRATPEQLRDALGASAHLSGAFRRLLKLSLEELQLIEVHIEQLGREAMELLKGHEDVVQRVAEVPGFGPDCAVQMIAEVGLEAAKFLTAKNLSSWVGVCPGNEESAGESQSTRSPKGNRQMRRLLNQAAQSAVKVKGSIFEVTFHRLLPRLGYQQAIWAIAHRLCRLLWLILHKGVRYQERGPAVSAKSKRTRAARMVRELKKLGYRVEGGPLPAVTRA

SEQ ID NO: 371877 - protein, 344 aa, unidentified
MNIATMGIDLAKNVFQLHGVDGHGKVLLRRQIHRGQVRGLFVNLPPCLIGMEACASAHYWARTLESYGHTVRLIAPHFVKPYVKTHKTDATDAEAICEAVNRPNMRFVPIKSIEQQSALSLHRVRQGFVRARTGQACQIRGLLAEFGIVMPRGIANIKQVPKLLQVAGKELPAPFCRLIERLLAHLKELDRQARELEEQIVDWHERSEPSRRLAKIPGIGPITASALVASISDVRCFKNGRELAAWLGLVPRQHSSGGKPIVLGISKRGDRYLRTLLVHGARSVIVRALKRDDDRGSWLKKLLDRRHVNIATVALAHKTVRTVWALLAHDREYCPNYQSRPVAA

SEQ ID NO: 371878 - protein, 364 aa, unidentified
MKRNSKLAPSGQYTIGIDVSDRISYYCMLDQAGEITGEGRLASTPQAYGQHFGGMAAALIALEAGTHSQWMSALLKECGHEVIVADPRRLRVLTLSDKKNDPQDARTLAEVAYSRPGLLCPVRHRSGEAQQDLNLVRARDLLVEERTKLINGVRCLAKSVGGRVRKCSSEQFTQQANVHLPEETRPAAAPLLEVIDELSQRIREYDEQLEHTALTKYPHTELLKQISGVGTLTAMAFVLTIEEPYRFERSRDVGCYLGLRPKQRDSGERSPQLRITKAGDSYLRRLLVGSAQYIIGPFGPDTDLRRWGLKLCERGGRNAKKRAVVAVARKLAVLLHRLWVTGEVYEPLRNSAARVTKVKAEIAA

SEQ ID NO: 371879 - protein, 339 aa, unidentified
MKVSTLGIDLAKNVFQLHGVGCNGQTVLKKKLTRDKFLPFLMQLEPCLIGMEACASSHHFARVLRQYGHEVKLIPPQYVKPYVKTNKTDAADAEAICEAVARPNMRFVQIKTAEQQAILVLHTERNILIRERTACANSMRAILAEFGIIMPRTLSQLYKKIPEILEEYDNELSPFVRCSVARQLEHFQGVEDQITLIEQELSRWAKTQPACQRVMKVPGVGLMTATYLVASVGNGQQFHSAKQFAAWLGLVPREFSSGGKQRLGRISKRGDRYFRYLLVHGARAVAAVIERHKDNMPWLYRLLNKKAYNVAVVAQANKTARILWSMLVHHTEYRTLSAV

SEQ ID NO: 371880 - protein, 321 aa, unidentified
MTKYTEIYGVDISKDVFDVMDSKGAYSQYPNGPKGFGQLSKKLPKGSLVVMEATGYYHYRLAQYLYGKGHCVSVLNPLSVKRFIQMKLSKVKTDKSDARAICEYACTNEVPLYTAKDRDQAECLQLLRLMDTYLKHSTAIKNKIHGERTLGMPSKTVFRSLKRSLSSLRKEIGTLEERLMELVKEEHQGQLTLLKSIPGMGSKTATVLLVLTDGFKKFENAGQLCCYAGITPTIRESGSSVRGRSRISKVGNKKLRNLLFLCAFSACKHNRACREIYERITAKGKSKKLALIAVSNKLLKQSFAIATSGLPYDEKYVSRLS

SEQ ID NO: 371881 - protein, 421 aa, unidentified
MTVYLERGYNCKEYQWFYKQYQNIYSKEIFMIYAGIDVAKDKHDCFITNSVGEVLFKSFTIPNNREGFETLFQKIQSVSDDLTKVKVGLEATGHYSYNLLRFLLDKGLPTYVINPLHTNLYRKSLSLRKTKTDKVDAHTIASMIMSDVNLKSYSDTSYHNEELKSLTRYRFDKVKARAKLKSSVSRLVCILFPELEKLVPTLHMVSVYSLLSEFPSAHVIASAHLTRLTNLLSESSRGRYGKDTAICFRDAARSSIGSHIPAKSLELKHTIRLILELTSEIDEIEAEIKTIMDKINSPILTIPGISYKMGAMIIAEIGDFSRFDSPDKILAYAGMSPSIYQSGQLDNCYAHMEKRGSRYLRYALYNATKYVCHWDESFGTYLAKKRAEGKHYNVALSHATKKLVRTIYAMEKSGQAYTNAA

SEQ ID NO: 371882 - protein, 310 aa, unidentified
MDCYIGIDVSKATLDIAALPDGESWTVTNDDQGLAELTPHLVALAPVLIVLEATGGYEMLPALTLAKAGLPIAVVNPRQVRDFAKAMGQLAKTDALDAGILAAFAQRVRPAPRPLPDEAAQLLDSLLTRRRQLIEMLTAEKNRLGVARGPVKRDIGQHIRWLEKRLADVDGDLQDAVAASPLYQAKADLLRSVPGIGPVTTLTLLASLPELGHLSRHQIAALVGVAPMNRDSGTLRGKRMVWGGRAPVRAVLYMAALVGLKHNPILRMFYDRLRAAGKPFKVAVTACMRKLLTILNAMLHQNRRWDPQHA

SEQ ID NO: 371883 - protein, 415 aa, unidentified
MKKVQNTRGYERYMAMDIHREYILVGAWNEEKEWILTPRRVSIERFPEWAKKDIGEGDIVVLETTTNVWATYDIVAPLASRVLVANAAEVEEIAKARVKTDKEDIKKLLKLLVGGIVPEVWVPPMHVRELRAFISYRGRLVKTSAMIRNRLQSLLHKHNLKISETGLLDQAWWEAQKDISPLEKMQIRQELALLREVEKLKLAVDEELQSQSTSVLWGKPALQLMQLPGVGYIVAMTVLSAIGDISRFESAKKLVGYAGIGAGVHDSGKTHKDKKITKKGRRELRWAMVEAAWRAVRMSPFWKAEYEKYLSRLRKKNQAIVVIARKLLVAIWHVLSKEETDIHASEDDLAYKMLLLSWSLKEDTRKGLTYKQFAKYALMKLGVEKDITRFVRKNVPRRLAPRDEVLARMKELGLA

SEQ ID NO: 371884 - protein, 341 aa, unidentified
MNHAAIDLGSKESQICIRDGSGAIVEERKVPTRKLVELVASWQPSRVVMEASAEAFRVADAALAAKHEVRVVPGKIIRLLGVGDRGVKNDQRDAQHLSQASWQTDVPSIHIPSAASRELKSICGARDILVEMQTKLVNNVRGWMRTQLWRIRSGQAATLPDRIRGHAESVGMSLPEHVERQLQLLSSVIEQVKAADKQLRTVANANPVCVRLMTIPGVGPVTAVRFVAAIDDPSRFSSAHRVQSYIGLTPGENSSAGRERRTGITKAGPRALRRNLVNAAWAATMSSTDHPMLAWMRQLADRRSRHVAIVALARKLAGIMFAIWRDGTTYESKRSAKAVHA

SEQ ID NO: 371885 - protein, 339 aa, unidentified
MRLYAAIDLHSNNSVLVILDENDKIVYERRHPNDLPTILAALEPHRESIQAIAVESTYNWYWLVDGLMAAGYTLKLVNTVAVKTYDGLKYSSDEHDARHLAHLMRLGLLPTGYIYPKEERAVRDLLRKRSLLVRNRTLHILSIQNLVSRNSGNGISATVIRKLDDEAMSRICGGNATLVLAIKSSLAVLFCLDAEIEGLEKVVLAKARLRPEFKKLLTVYGVWHIIGMTIMYETGDIGRFAKVGHFASYARCVGGGRFSNGKKKGEANNRNGNKYLSWAFIEAAHYAVMHNERIRKFYQRKKAKTNTVIALKAVAHKLARACYHIIKDQTDFNEERAFA

SEQ ID NO: 371886 - protein, 370 aa, unidentified
MTQCTKTQFVGLDVHKDSIVIAVAQLGREPARVIGTVPHEWNALRKVLDKLGPRCEVACCYEAGPTGYGLARALIAAGWACDVIAPSLIPKKRGERIKTDRRDAVKLAQNHRSGELVAVFIPDEQGEAIRDLERAREDAKKAERVVRHQLSKFLLRNNRRYPGRTTWNAAHQGWIAKQAFAEPAQQYVLSDGLAAVEAATLRVSQLTARLRELTVGWSQEPLVKALQAMRGVEFVTAVTLVAEVGDFRRFATAGDFMGYVGLIPSEQTSGPHRRQGPITKTGNAHVRHVLVESAWHYRRQPRMSKALRERSVGVAPQVCAIAWKAQKRLHGRLNRLIGRGKNKGEAVTAVARELAGFVWAISREEKLLAS

SEQ ID NO: 371887 - protein, 316 aa, unidentified
MNVIGFDISKDTIDVTLLRNSGQVDYIKIDNACEGFEKLNDWIRSKRIRKISISMEATGIYYEEAADYFSAIYQVFVINPLKIKDYSKSQFNHTKTDKADSRLIAEYTKRHLDKLTPFKPSENPTLYKLISLLQQLKQQQNESQNRLHAAKDTFIRATHEAIILLLAKQIDQTAKRIDLMIQQQDSLNMHYKNLQTIPGIGKDTAAILLHHLTDKQFKTANQFVSFAGLSPRIEQSGTSVNKKGRLSRYGHRRLKRALFMPALVAYRIKAFPKLVQNLSQKPKMVVIVALMRKLAKIAYYIHKTQKPFEKMRYQIA

SEQ ID NO: 371888 - protein, 344 aa, unidentified
MAEQIKHVLGIDIAKETFAARLVQRGESIAPVSEVKTFPNTTGGYQSCATWTQQLGAEPTHTNVVLEATGVYWEACAVDLHHRGYHVSVVNPAQIKHFIRSVLQRGKSDSIDAELIARFGALMKPRLWTPPPPFAEHLQLIVRQRDAYVGMLTQERNRLHALRHRVNCPASVMRMTEDHIQFLEQRVEELERSFKDTIKQLPEWSQLFTLLTSITGIGQITAAVLLTETQAFESFHSARQITAYAGIAPAPYSSGTSVFHAPRISKIGNARLRHALYLAALSASRFNPLMRPVYQRLVAKGKPSKVARVAIARKLLITAFAVVKSKCRFDPSYSHNNPVSAFAT

SEQ ID NO: 371889 - protein, 347 aa, unidentified
MDFYNATHKHYCGIDLHSRTMYVCILNQSGAVLLHRSLPCNRERFLLAIQPFREDLVVAVECIYSWYWLADLCVKEKIAFVLGHALYMRIIHGAKAKNDRIDSHKTAVLLRGGLMPRAYVYPAEMRATRDLMRRRLLFVRQRGSLLAHIQMTHHQYNLDAPGKRISYRCNREGLGEGFEDPSTRGSIAADLALADHYEAVIGELELAVLHQARVHDPNALRILTSVPGIGKVLALTILYEIHDIRRFPSVRDFASYSRLVKCERSSAGKSLGTSGNKIGNAYLKWAFSEAAVLFIAKSEQGRTVLQRLERKYGKPKALSVLAHKLGRAVYFMLARNQAFDPQRFIKS

SEQ ID NO: 371890 - protein, 462 aa, unidentified
MKLYLGGDVSKGYADWVILSEKKQAVLGNFQLDDTYAGHCKLYSMIEAYVEKHPGSELYAAVESTGGYENNWLNTLKSYQKVFNLKVARINPAGVTFNRKAGMKRNVTDAISALSIAEFMIDHPENITYDQDDKWKSLCRHWNFVEMQKQQRVQTINQLETILYSANPTLMRFKKDNLPNWLLELIIQCPTAETLAKARPEKLAKIPYLSLARAKTLVAEAKQSIASATDKNAEILVSQIARQIKSFDLNIKSQMQLIERDLTCPEIEILKTFKGIDTISAIGLLLEIETIERFPTVKGFSCYFGLHPKFKQSGDKVIGVRMSKQGSKNMRKILFNIAKGAITYNPLILAVYEKKLSHGMKKMAAIGVCMHKILRIIYGMLKHKQEYNPLIDKLNCEKSKDKQQEKQQQENANIEKSRRYQEFDVKAPISRKQTKKRRKHDLSQCEITSQSTGSTCSSKTKL

SEQ ID NO: 371891 - protein, 345 aa, unidentified
MSTVYVGMDVGSKVTAVAARSESGEVVERLSFKTSKENLISHISRYGVDAEVLLEEGELAGWVYRTLLAYTGEVIVCDPKRNAWIAKGKDKSDKVDADKLSELLRINSFATIYHPPDEDIAAFKVAVKHYEEATERAARQMVQIKAMFRTNGVFPEGKRVYGIQGRCEYLRMTENPTIRNILVQEYDMLDYLSKAKVGAGGLVVKVSLNFPVIEHFKRIPGVGPVLAARFVAYVLDPNRFNKRGLWKFSCLGIVNRSSDGVSLGRQHLDRAGVSAMKDLSRKAFDGAMRTKETNGVQVFFQRSYRNCGDRDHARLSTQRKVLSMMNAMWRDGTDYSDEMFLGPRA

SEQ ID NO: 371892 - protein, 371 aa, unidentified
MDAFTKTLYVGLDVHKESIAVAYAPEERGTDVVSLGAIGTRQCDIDKLIRKLQSKSATLVFVYEAGPCGYWLYRYLTRQGFSCRVVAPSLIPRRPGDRVKTDRRDAVTLARLMRSGDLSAIYVPTIEDEAIRDLSRGREDAMRDLKAAKYRLKAFLLRQDIRYEGRANWNAAHLRWLSELVCPTSAQQIVFQEYVRAVTEQHERVQRLDTELREHVTRWRLSPVVEAIQALRGVELTGAVILIAELGDLTRFDTPRQLMSYLGLTPSEYSSGDRRRQGGITKAGNSHARRALVEGAWAYRYPAKVSRHLQLRLERLPVEVQAIGWKAQVRLCKRYRQLIARGKHANQVVVAIAREMAAFAWAIARTVHVAS

SEQ ID NO: 371893 - protein, 341 aa, unidentified
MEKATIIGIDLAKRVFQVHGAAQDGRPVFRKKVSRAQFLGFLAKQSPAVVAMEACATAHGWGRAISGLGHEVRLIAPIYVKPFVRRQKNDAADAEAIAEAASRPTMRFVALKTEEQQARSMILRTRDLLVRQRTQLVNALRGHLAEHGIVAAQGLAKVKMLATAMRDTGSLHPLVHELGQRYLDHIARLDVEIAELDKRLRRPSKDDETAKRLQSMPGMGPITAAAIEAFAPPMATFKRGRDFAAWLGLVPRQHTTGGKPRLGRTSKMGQRDIRRLLIIGAMTVVRWAVRKGAAKGSWLARMLAQKPRLVVAIALANKMARSAWAMLSKGEEYRGSALAPA

SEQ ID NO: 371894 - protein, 345 aa, unidentified
MKITTVGIDLAKNIFQVHGVDERGKVAARKQLKRAEMLKYFAKLEPCLIGMEACGSAHYWARKLENYGHTVKLMAPQFVKPYVKTNKNDMADAEAICEAVSRPNMRFVAIKNVEQQAILSVHRARQGFVKARTAQGNQIRGLLSEFGIVIPQGISSITKQVPEILEDGENGLPGAMRNLIDRLTENLKEMDRQVKELEAQIQLWHRENEASRKLAEIPGVGPITASAIVATVGDAREFKNGRQLAAWMGLVPKQKSSGGKQNLLGISKRGDTYLRTLLIHGARSVINVAEKKAEPGSWLRKLMGRRHTNVATVALANKNARIIWALLAHGRSFHPDYKFAQTANV

SEQ ID NO: 371895 - protein, 374 aa, unidentified
MTMMQHRQIRYIGLDVHKVSITVAIAEESGAPTSYGSLPNDPSAMRKLMTRLGGPEVELRVAYEAGPTGYALHRQLAKMSIDCIVVAPSLIPKQPGNKVKTDRRDALKLARLLRSGDLTPVWVPDEAHEALRSLVRARADAKADQLRAKHRLSKLLLRQGCRPPSGVRTWSQRHVQWLRQLEFEHLPDRIVFADYLAEVTAAGERIKRLEAALYQCAQSSSQVAVIRALEAFRGIGFLSAVTLVAEAGDLRRFRTAPQFMAYAGLVPSESSSGGKQHRGPITKTGNSLLRHVLGETAHHARHAPRVSSKLKARQADVPREIVELAWRAQLRLHARYRHLSSRIGSLKALTAIARELAGFIWAAGQVLQEVPTAA

SEQ ID NO: 371896 - protein, 341 aa, unidentified
MKITTVGIDLAKNVFQVHGVDERGKAVLRKQIKRSQFLLFFSNLPPCLIGMEACGGAHHWARKLQGFGHTVKLIAPQYVKPYVKTNKNDAADAEAICEAVGRPNMRFVAVKTVEQQAVLSVHRARQALVQARTAQANQIRGLMGEFGLAIPKGIANLPKQVPLILEDPVYELPGAFRELITRLLAHFHALDRQVDELEGQIQAWHRNNPVSRKLAQIPGIGPLSASALTAAIGDAKTFKNGRQLAAWLGLVPRHRGTGGKQVLLGISKHGEAYLRTLVIHGSRSAILAAQRRAETDSWLARLMQRRHPNVAAVALANKNVRTVWALLAHDREYQADYAAAA

SEQ ID NO: 371897 - protein, 338 aa, unidentified
MRTAYIGMDIHKNFIQATAMNEQGNILKEQRIKSDINGIKKFIGDLNCDKIKAAIEATCTWYHIYEILSSLGVDTTLVNVRRTKVIAESKIKTDILDARSIANCLRTGFIATAYIPPKEIIEQRDILRHSISLRKDINRYKNKIHAILLRNGIKHKFSDLFGTEGMKILRNLKLKNSEQYRLNSYLTIVETLLQERRQTQKKIETLCKINEQAMMLTSIPGISYYSAMVILTEIGEFSRFSNSKKLCNYAGLAPRTIQSGSQVFHGKILKECNQNIKWVLVQCAHVHIRYCQNTSITRLYNRVMKKKGKAKATVAASRKMLTIMWHMLMKGERFKYST

SEQ ID NO: 371898 - protein, 422 aa, unidentified
MKKHVYRSTEITKVNIAQLGEKVKGKKVVFGVDIAKQDNFGALLIEEQKEPVITIKWRHPERSREMVQVLKSLGAAKVEVALEPSGTYGDPVRNLFWDEGIEVYRVSAKRSHDAVEVYDGVPSWHDAKSGSVIGKLHVDGASSLWKMEGEYERDLAAVVNTMDMVQQQYQQNANRLEAIMARHWPEAEEILDRGGATFLELLGLFGSAQEVSRQAGEARKLMRKVGRGFLEQEKIEQLIGSAQKTIGIPMTAIEAEEIGFLARRTRQLQQELHEAKKRVERQGAQKKSIVNMSKVTGKATAAVLVKGGGDPTEYPSAAQWVKGLGLNLKERSSGKHKGKLKITKRGSGQARRWLYYVVLRLIQKDAVVKAWYGRKVTRDGGVKMKALIAIMRKVAAGLWHVAQGKEFDTKKLFDAHRLGEIC

SEQ ID NO: 371899 - protein, 520 aa, unidentified
MATTRSRSRPSRRRTPTSVGKPRGVLHPRVQQVGPEHFGIVCFDCHKASSKFLLADFYGHPLIPPTVVAHTRPALDASVAQIRNAFTQHQLRDGLVAIERTGRYHRVVQRTFGAAGFETRILHPFVTKQYRQPVDPGNKTDDADLAAIHRATITGCALLEATRDEAWTTLQLLIRHRRDLVCKGAALNCQIRDHLEAALPGYAACFDKLWESPIPWHLLRHYPTAKQLHETGVTTICHSLREAGIRFQQRTVQAVVDWAQQAAAGDIAASQHHRIALALYEDRQRKTQEIQALEREIASRLVQTPYVLLLSFPGINVVSAADFGGEAGPIEHYANAKSITGRAGLRPSRYQSAQVDHARGPLLRHCNHALRAAILGIADNLIVCNHHFGVLATRWAAQGKDPRHTRVKVGLRFCRIGFQMVAGRHVFRHPSIQGRHYILDKLTAFHREHGTGMVDVLRDLQAAIGQLPPREYAAEAKPLAEELQRIQDGRRRGPQLLGDILPIVLARLGVGVVQSPESGE

SEQ ID NO: 371900 - protein, 356 aa, unidentified
MLYLGIDQHARQITISLRDENGDVVMARQVSTRPEKIQEFFQRLTHERLQSGESFVAVLEVCGFNDWLIRMLRDYRCHKVILIQPDGRKICKTDRRDAAALSELLWINRDRLLHGKPVRGLRQVDIASATDQEERRLTMLRKNAGRDLTRVINRVRQILRRHNLQWEMPTKTFPTVAAVAWLKQIVLPEIDCLEMNHLLADLEHVQQRIKELEKVIGQRSGASKEVAILSSIPGMGRGFTAMSLACRIGRVERFPRAHSLANYWGLTPGCRNSGESDQRLGRITKAGSPTARWLLAQLVYKVLRRDGRLREWFKRIKRRRGATIARVAVMRKLTTIIWHMLRKEKTYAECRAAAAA

SEQ ID NO: 371901 - protein, 366 aa, unidentified
MKKITTVATNRKKIFQEPKLTIGLDLGDRSSHYCILDQAGNVILEANLPTTPKGIQQVFSKIPRCRIALETGTHSPWVSRQLTQMGHEVIVAHARNVRLIGESSRKDDQLDARTLARLARIDPGLLGPVRHRSAQAQIHLTVIRARAALVSTRTALVNAARGLTKSYGERLKKCGTEQMKRESSQGLSQELRDALDPLLGEIESLNERIAEYDRRIEKIAKEVHPEVALLKQVKGVGTLIALTYILTLDDPQRFRRSRDAGCFLGLRPGRRNSGQSEPQLHISKEGDRYLRTLLVQGAHYILGPFGQDSDLRHWGLKLAERGGKNAKKRAVVAVARKLAVLLHKLWVSGEVYEPLRNNHKELNEVA

SEQ ID NO: 371902 - protein, 340 aa, unidentified
MNATTYGLDVAKHVFQMYWVDGQTGEIANRRFRRDELIAFLAQRPTGRVALEACGSAHWWARKIKALGHEVVLLHAKFIRPFVQTNKTDAADARAIWTAVQQPGMRTVAAKTEDQQAMLGLHRMRSLLIKFRTMQVNQLRGLLYEFGVSFRAGRVAGLTEMRARMAELEDALPGTMFSSLHDQLRRIDGIEQDIDQLEKQISGWHKQEAACRAIAEVPGIGRLTATALVATIGDAKTFRSGREFASFLGLVPRQSGTGGKIRLGSISRRGDPYLRTLLIHGARSVMCHAKVPTTWQKAIQERRPANVAAVALANKMARTAWAILAHGRTYEKNHVSVKPA

SEQ ID NO: 371903 - protein, 316 aa, unidentified
MSEKQIESFVGIDVSKNTLDIRLEPAGENLHLAYHDEGIAEICQRLAAASPTLIVMEATGGLETRLASELTACGLPVAVINPRQARDFAKATGQLAKTDRVDAAVLCAFARAIRPAVRPIKDADMRDLDDLVTRRRQLIAMRIQETLRLGSAGSKALQKSLKTHIAWLDKRITGLDDELAKRLRTSDVWRIKDDLLCSIPGVGAVTSVTMLAKCPELGQLNRREIAKLTGVAPLANDSGKHRGKRFIWGGRADVRAVLYMATVSAIRCNPAIKAFAERLKKTGKPAKVVIVACMRKLLTIMNAMLKNNASWTLKTT

SEQ ID NO: 371904 - protein, 341 aa, unidentified
MSIMILGIDLGKISCSVVGLDANGLVVVRRRMRREGVIAFAAKLAPCTMAMEACCGAHHMGRTLAALGHEVRLMSPEYVRPYVKAQKNDDRDAEAIAEAATRPTMRFVELKSEEQLDVQTLHRVRDRLVGERTSLTNQIRSLLLERGHVVAQGHARLRLRLGELLDSGADALSPRMAFLLGDMRTRWEELDRRIAAFDAEFTAMARTDDRTRRLTGIPGIGALNATALVAAVGSAATFDKGRDLAAWLGLVPRQATTGGRPKLLGITKRGSRYLRKMLIQGARSAMPSLAKSNTTIGSWLRALLARAHPNVAVVALAAKMARTVWALLRHGRAYQAASIPA

SEQ ID NO: 371905 - protein, 362 aa, unidentified
MFTERTSVGLDVHARSVVAAAIDGVTGEVFEARLTPSHEDVRRWIGGLPGPVAVTYEAGPTGFGLCRALIAAGIRCEVAAPSKLQRPSGDRVKTDARDAMHLARLLRMDEITAVSIPSVGQEAARDVVRAREDCRGDLMRARHRLSKLLLRHGLVYSGGQAWTGVHDVWLRQQRSELTGHATRIAFDTAYETVLMVKARRDRLDQAIEELAADSEFTPLVRRLGCLRGVSTLTGFALAVEIGDWHRFTGNTIGAFVGLTPTEYSSGNSRVQGSITKTGNGHARRLLVEAAWHHRPQYTVGKTMRDRWERATPAARARGDEGNRRLHRRWVTFIARRKRHTIATVAIARELAGWCWSLAVLEE

SEQ ID NO: 371906 - protein, 356 aa, unidentified
MSKVTASFENHTVYVGLDVHKRSWNAAVYLNDQFVRNVHQPPTPQALHHYLTHTYPGASYVCAYESGKFGYLIQRRFHQFGISCLVVNPADIPSTHKDEVNKTDSRDARGIGHALVCNQLKGIFVPAEDQEADRHLVRQRKKIWRDLVRCKNRIKGFLDYTGVIVPPQYDNSNWSKNFINWLAALEFEHYSSRVTLNYQLKQMELLRKELLSICNDIRKLMRSKKYNKLYYLLRSVTGIGPLTAASLLTEIGDMNRFSSFYHLNSFIGLMPMEHSSGEKELKGRITVRKHRQLRSDLVECAWTAKRTDPALALYYSEQIKRGKNGKTVIVKVARKLLSRIRYVWLSGQPYQRAIVK

SEQ ID NO: 371907 - protein, 343 aa, unidentified
MKITTVGVDIAKTVFQVHGVNEQGAPVLRKQLKRGQVLSLFANLTPCVIGMEACRGAHHWARQLQKLGHTVRLMAPQFVKPYVKTNKNDMADAEAICEAVSRPTMRFVPMKNGEQQAVLALHRARQGFVRARTAQANQIRGLLEEYGIVIPQGICQISKRLPAVLEDGENDLPGLFRQLLQRLGEHLKQLDLQVRELDSQILLWHRQHEGSCRLAQIPGIGPLTASALVASIGDAGSFENSRQLAAWMGLVPRQHSSGGKTLLLGISKRGDGYLRMLLVHGARSVLRVAERKPDYGTSWIAGLVKRRHPNIAAVALANKNARVVWALLRHERNYDARYQAAAA

SEQ ID NO: 371908 - protein, 286 aa, unidentified
MIPTPVFVGLDVAKATLDVALRPSGERWSVSNDEAGVAALVDRLRPLPPTLVVCEATGGFERAAIAMLAAAGLPVVVANPRQIRDFARATGQLAKTDQIDAAILALFAERVRPTPRPLPDEAAQLLDALLTRRRQLLEMLVAEKNRLGFAPRPLHKGIQQHIRWLERQLDDVTKDLADQIERSPVWRAKDDLLQSVPGVGPIVSAVLLAELPELGALTHKQLATLAGVAPLPATAARSGASGWCGAAGLGCVPRSIWRRSVAAAGTLSCGSSTSGCSLPESRRRWC

SEQ ID NO: 371909 - protein, 372 aa, unidentified
MSETIVAYQSFIGVDLHKTTVTLVAVAPDGAVIARLTINTKCREKITAWLLALPRPSRLAVEAVGFVEWFIECFRPCVDRIDIADATELANRRGKRRKNDPNDARDIAQRLARNECPVGYIADDELMQLRKLGRHWRQLSTVQARAKQCMKSMLLAANLRGPKFDGASAQRWLLAHGHLLKPAQRRAFANFVQIVQLIELQRGPLRYAIIMASRSERFAPITKLLQSVPGIGEIWSCIIAAEIGPFDRFPNANALEFWAGLTADLKESAGRTQSGHITKAGSRTLRWALCNAALTLCHSDAKQEAIRQRLIRKTGGIKGKANVAMGRRLLRTLYAMIRDGEPYRGGPRRNRTAAANKARASKRARKNRKEAA

SEQ ID NO: 371910 - protein, 309 aa, unidentified
MSALYLGLDVAKDAVVLASEPAGLAGTFPTDAAGLAALVAQCQAQAVTLIVLEATGGYEAPIAAALAAAGLPLAVVNPRQVRDFAKATGRLAKTDAIDAAVLALFGARLQPAPRPLSDAATQELDAWLRRRRQLQDMLHAERLRHAPSRGRVRESLRRHIRWLERSLADTDAGLRELIEASPLWRVQDALLQSVPGVGPTLAMTLLGGVPELGGLDRRQIAALVGVAPLARDSGTLRGRRTCWGGRADVRQVLYMGALVAARWNPVLKAVYLRLRAAGKPAKVALIAVARKLLVLLNAIIRDQRPWQYA

SEQ ID NO: 371911 - protein, 334 aa, unidentified
MKKRYFMGIDLAKASFDFCLLSSHGAVLWRGHLSNDANGIKEFLGQLKAGRWKVSLIHFGLESTGVYGNRLISGLHQAGLALSVLNPAQVKFFAISLLRRTKNDRLDAQIIARFCLERKPLATRPLRPIEEQLKLLVHERESRVCEQTRERNRAKKDPFQIQLPLLISHQRQDHLKQLQKELTQLDRAIHKLMASDLDLKTQSKRLCSIPGIAETTAAKLLSELAGKEFHSARQLAAYAGLTPSQFLSGGSCYGKTHLSKIGNAFLRKALYLPAAVARRWCKPLKPWVTLLERRKLSDLAIRGAIRRKLLHIAFGVLKHQTTFDPSLVFLPKTI

SEQ ID NO: 371912 - protein, 405 aa, unidentified
MRVYIGIDWSTQKHDIVYLNEEGGIILYQTIPHSPAGFEAFDEQRMKLGVSVQDCLVGIETEHNLLIDFLTSQQYQQIYVIPPSMIRDSRGRFGASKANNDRSDAHLIADMLRTDRARLHAWHADMLLTQQIASLVSLESFLTRTIIQTTNRLRNVLWRYYPNAARVFSSLDQQIALEFISAYPTPEAAAGLTIEEFKGFAKRHHYPRPSKLPACFARLQKPQPDARQQTVLTYQSEAVRLAHLALQAVQDKAATLKEIQELFVDHPDYPVFSSLPGAGAILAPALLAKFGDDRQRYPTPQVLQCVAGTCPVTKASGKHKYVSFRYACDHEFRRIVQQWAKSSTDSSVWANTYFQTIRPHCDSLSHAYRRLANRWLEIAWRLWQDRVPYDEERHLRQHALRVKPN

SEQ ID NO: 371913 - protein, 347 aa, unidentified
MKYYCALDVSLKNTAVCILNQEGAIVREGETLSEPTAIDQWLKATELPLERVGLEAGSLSFWLCEGLLAMGWPMICIETRHAKAAMKAQQVKTDRNDARGLAHIMRTGWYKEVHIKSQTSQELRMLLNNRRFLQDKRVDTDNEIRGSLRAFGIKLGRVSPKTYERRIREIVGDNEKFRACIFPMLEVRRALREQCEKLEKLILDYVREDQTCQLFMTIPGVGPLTALTYKTFVDRPERFKKSKAVGAALGLTPRKYASGEVDYDGHITKCGDAFVRMHLFQAANVLLSRAAKSSELKSWGLRLSKRTSKKKARVAVARRLAVIMHAMWRDGTVFESTQVKAELAAAA

SEQ ID NO: 371914 - protein, 369 aa, unidentified
MKNTIVHHEGAASLEAARTKVKRCGSIIKIGLDVHARIYVAVAQYDQLLPKPARRLAPSEFVPWVRQLVRAGHVVYVVYEACGFGFGLYRNLQAAGAHCYVIAPRKLDEQCTRVKTDPRDATTLCQRLSRYVEGNTRELAVIRVPSEAEEQARHVSRQREQLVRHRQKLEAQGRSLLVGHSLPSPAHWWKNQTWSRLTKLLPSWICLRLEVHRPALLTLEQQISALSAELEAAAPADVPAGVGKLTTVVMTREICSWERFRNRRAISCYTGLCPGEHSSGTKRVPGSVTKRGNPRLRAALVECAWRMVRFQPNYPPVKQRLSVLAKGARATGAQRKKAIVAVARHLAVDLWRVHTGRNTAAQLGLTIND

SEQ ID NO: 371915 - protein, 416 aa, unidentified
MSLALPPAEFFVGVDWAAEVHAVCVINIEGKVLSQFTVKHSADGIALLVHRLAKFGEPIDIPIGIERPDGRLVDLLLEAGHPVVPVSPNAIKTWREGEVLSGAKSDAADAAVIAEYLRLRRHRLTAAAPYSSETKAVRTVVRTRDDLVHMRVAAVNQLAALLEAYWPGANAIFADLESKIALEFLSRYPTPTAAAHLGEKRIAAFCAARGYSGKRPAAELLTRLRAAPAGTTDPHLSVALHDAVLALVEVVKAVNTAVKDLDKSVAARLGEHPDGKIFTSLPRSGQINAAQMLAEWGECRQAYETPDSIAALAGCTPVTKASGKRKAVHFRWACNKRFRVAITTFADNSRHASPWAAKIYNDARTAGKDHPHAVRILARAWIRVIWRCWHNNTPYDPTKHRAAHALTAQSWVDLAA

SEQ ID NO: 371916 - protein, 317 aa, unidentified
METTSLYVGIDVAQGHLDIAVRPSGEQWRIAHDPDGITALVERLTSLAPALVVLEATGGLEILLAGELLDAALPVAVVNPRQVRDFARATGKLAKTDILDAQVLAHFAEGTKPQPRPLPNAQTQELKSLVTRRRQLVEMTTAEKNRLRRATPRLRPQIQEHIDWLRRQSQGVDKDLGELIRSSPAWRAKEKLLDSVPGVGPVLCTTLLAQLPELGALSRRQVSALVGVAPFNRDSGTLRGRRTVWGGRSQVRAALYMGTLVASRFNPVIKAFYGHLCSAGKAKKVALTACMRKLLTILNSMLKHGNTWNPDQALQTP

SEQ ID NO: 371917 - protein, 350 aa, unidentified
MKFVGLDYHTKSSYVSILGEDNEEIWDGQVKSDFELAEFLECIDNARVLFEAGYGWPRLAKIAEGTGVVLQMCHPEHNRRIARDRRKSDRRDARNLAVYLKTGGYKPAYMPGADIRDERQLIRTHINLTRQLTAVKNQIHSLLAYAGMPKEGFNIFTRKSRQYLETVELPGYTRKVLDASIELLDFLTDLLKRIDDMVAGLNRRDPRARLLKTIPGVGDITARVLLSEIGDIDRFETDKSLSCYAGLTQRQRQSSDSRRMGGITKEGSSHMRWTLVQAAWIAIRLDPALKEFYEKIKAKKNACVAVCAVARKLTVAAWHILKKQIPYKAGRPEAMGKPGVARGKTEAVSG

SEQ ID NO: 371918 - protein, 386 aa, unidentified
MSRPSNILLPAINYDHTLVLSVELSNKSWVLAAQVPGLPRTKAQRTIEPNKNALLAAIDGYRARAAAVGYTVDRVITTYEAGWSGFWLARWLVAQGVEVHVVQPSSVPVDRRLRRAKSDGIDAELLLRTLLAWLRGEPRVCSMVPIPDEADEDARRCVRERTELLSDRVGLTNRIGAVLATLGVNDYNPLLQSRRRRLAELRTGLDEPIPPNALAKIERLLARLELVLAQIAELERERDEVAAADAPDRAGKMIQQLASLRGIGVQSATVLVREAFVRHFPNGKALGSYAGLTSTPYSSGGIDREQGIGKAGNRRLRTVMVELAWLWQRYQPGAAQVAWFRDRVGSIGRRIRKVMVVALARKLLIALWRFVIDGVVPEGAVMKPSI

SEQ ID NO: 371919 - protein, 339 aa, unidentified
MELYAGMDLHSSNTYVGILDGGFKRVFKKRVPNDLGLILETFEPFRKDLQGIVVESTYNWYWLVDGLMDAGYRCVHLANPSAIQQYEGLKYSDDKHDAFWLAQLLGLGILPEGYIYPKEDRPVRDLLRKRSFMVRQRTEHIHSLQSMIERHTARRLNGNEVKKVYSEDLEEMFEHKYSTLAADADSCAIRFLTERIKQIEKAVLEKVKLKEPFKRLLTVPGIGEILALTIMLEVGDIGRFPKVGNFTSYARCAPSGRISNGKKKGEGNRKNGNHYLGWAFVEACNFARRFYPKFRSYHQRKASKSHPFVATKAICNKLARICYYVMRDGVCFREEAIFY

SEQ ID NO: 371920 - protein, 277 aa, unidentified
MKYIGIDISKASFVAAFPQERGYRTETFSNDAKGIRKFISKLDPQTHHCVMEATGNYCFLLLYLLDRCGIKASLINPKKIKNYSRVMMSVTKTDAKDACLIADFGERFKPEPYKLPSEQIMILKQKKTVLCQLQKQLTATRNLLSSLDPLPVRDKKCVNSLKQTVTFLEKQIKYMQQEMEAVVTDVFDKQLKLLTSIKGIGVTLATALIIATGGFTYFDNAKQLSRFIGICPTIEQSGTSINIRGHINRNGDETLRSILYVAAWSASRHNAACKECY

SEQ ID NO: 371921 - protein, 425 aa, unidentified
MNYKQNEKINQVKESTLVVGIDIGSTTQYARAFDWRGIELGKVFTFSNSREGFEAFKAWMQHLQDKYRKSDVIVGIEPTGHYWFDLGAYLEDEGILLVMVNPYAVKQTKELDDNSQSKNDRKDPKVIAKLVTEGRYSAPYTPDGVYADLRIMVTNRKRLIREMTQIKNRFARWFAIYFPEYTDVFGDYEAQSSMLLLKKVCTPEAIVELGAEKINKIWRDAKLRAVGMKRATTLCETAKRSIGLKKGSSAARYEMKLLLEDYEYKKAQLDAVMEEIEKLCRKIPESEQMLAIKGIGVITVAGFLAEVGDVRRFESPRQIQKLAGLSLRENSSGKHKGQTTISKRGRSNLRAVLFNAAIPLIAKNPEFKSLHEYYTTRANNPLKKKQSVIAISCKLIRVFYAVLANGVTYDAQKMLSDIHRQPQAA

SEQ ID NO: 371922 - protein, 379 aa, unidentified
MIVQGTTVGLDVHALSVVAHAVDEETGKVARARLCPDHGEVLGWLHQLRAPVRVAYEAGPTGFGLARAITEAGMECLVAAPSKLQRPAGDRVKTDARDAAHLARLLRLGEITAVRVPNREIEAVRDLVRAREDARADLMRVRHRLSKLLLRQGIVYSGGTPWTYAHEERLRRHRFDDIHLKAAFDHGFDAVLAATAARDRLDDQIMVVAASPRFADPVNRLGCLRGISALTGLALTVEIGDWSRFTGSSIGAYVGLVPSEYSSGNSRVQGSITKAGNTHVRRLLIESAWHHRKSYSTSGPTLRPAGPRSTRRFGLAATQVTGALTSGGAVSPNAARTLWSPTSRSPANSPAGAGHWQPCNNLVGTQTWLIQVIRRRRGE

SEQ ID NO: 371923 - protein, 357 aa, unidentified
MGKSIIDTSSVTRVGLDLAKRVFRIHAVDATGSVVIARPVNRRTLLKFFDALPRCVVAMEACASAHYWGRQLLELGFAVRLIPPAHVKPYVRRNKNDAADAAAICEAAGRPGQRFVPVRSVENQAALMRHRARELMVGQRTAALNALRGHLSEIGVVAAQGVQNAYALKRLACDGVDDDGEIVVPDCVRLALLPLVRQIDALDEAIETIDKELQASAKADETARRLMTIPGVGPVTASALLATVQNFGAFSSGREFAAFLGLTPREHSSGGKPRLGRITKMGDRYLRKLLVVGACSALAARKGHNDALRRWASGLLERKTVQYKFKLTAVALANKLARIVYALATKGGHYDDRPVAA

SEQ ID NO: 371924 - protein, 389 aa, unidentified
MPTIADRHDAPTAIQTNLAAIFISLELSRSIWLITSLSPGFAGKMSKHSVQAGDVAALLARVSELKRKASERTGKSFPIVVIQEAGLDGFWLHRVLQSEGIESHVVDPASIATSRRRRRAKTDRIDGEALLRALLAFKRGEPRVCAMVKAPTPEEEDRRRLSRERKVLVAERVKHVNRVKGLLFSQGVSGYEPLRRDRRQRLEDLTTGDGRSLPMHLKTQIGRELDRLELLLDQIKQAETERDALLASQQAAAPASAGRMLLEFKGIGAEFAASLWLEALFRSFDNRRQLASYAGLAPTPWQSGSVDHEQGVSKAGNPRLRTTLIQLAWLWLRHQPQSALALWFKERVNRNGGRLKKTTIVALARKLLVALWKYVTAGVVIEGAVMKDA

SEQ ID NO: 371925 - protein, 422 aa, unidentified
MEAMRECCCGLDIHQATIVACLLKGPLDRKPKKEIREFGTTTLELFKLQDWLETEGCRAVAFESTGIYWRPVYNILYDTCEMTLANACDIKNKPGRKTDRKDAEWIAELHRCGMISKSFIAPPPIQELRDVTRYRKKLIGQATSERNRISKLLECSNIKISSVLTDIFGVSGRKLLEALIAGEAITTDRLIGLVDRKIRKKIPELIDALNGCVTPHLREMINCSYEHLNYLETQIEKMNQKIEEKLKPFSKEIELLDTIPGVGPTVAASILAELGPDMSVFPTAAQASSWAGLSPGNNESAGKKKRSKTSNGHKWIRGALLEAAWSASHTRTYLGAKFWNLVKHTGKKKAAVAIAHKILIIAYYILKTGESYQDLGYDYLESRSKVNREKQSVRNLEKLGYKVILEKLDDQQDSEGLATAAS

SEQ ID NO: 371926 - protein, 418 aa, unidentified
MADVMIGIDPHKGSHTAVAIGAGEEPLGELRVDACPLQAEQLQAWAQAWPQRAWAIEGAAGLGNLLAQQLVAAGEQVLDVPPKLAARVRLLQAGDTNKNDPNDALSVAVAALRSKLARPVLADGHAVVLKVWAKRHRDLARLRNQACCRLHAVLCDLVPGGVRREISAGRAARILEQVRPADAVTMARCELAGEFLGDIRRLDAQLRDTNRKLAAAVKASGTSLTGLFGVGPVIAGTVIGDVRHVFRFPGRDHFAAWNGTAPVEVSSGDRKNVYRLSLRGNRRVNHAIHMAAVTQIRHKHSQGRAFYEKKLAEGKTHKEALRALKRRISDAIYAALVADARRAAGGCSKSPGGQPGNHSVSRAAGSHPAHRHFGQATPGPATTIRPGNTAGAIPPHPNRTRRLPAHSPASSKKPRTSS

SEQ ID NO: 371927 - protein, 336 aa, unidentified
MDTACALVGIDVSKKKLDVAMLVSGKIKVKVVENTAEGHKSLLAWLSKSSVPMSSIHVCMEATGVYSEPVALALHQEGLIVSVVNPACIKGFGASENIRNKNDAIDAALIARYCAAMRPAAWLPPPLEQRQLRAWTLRVQALKDIRQQEENRLEANAFIGMEDVAAHVHQHIAWLSAEIAKLESDINDHIDRHPRLKHDAQLLVSIPGVGMATAARILGQLGDIRRFCNAKAFAAFLGVTPRQRNSGTSVKGRTMISRTGNTSLRAALYMPSLVARRYNPILCRFAERLSATGMAKKAVIGAIMHKLAHLIYGVIHNDRPFDAHYLAKGLVIQDGI

SEQ ID NO: 371928 - protein, 311 aa, unidentified
MTKAVVGIDVGKGQLDVSLNGQKRVQAWANDEAGQVEVSDWVEAQGATLVVVEASGGYEAALVSELVARGQAVAVVNPTRVRAFARAEGILAKTDKIDARVIARFGLTMNPAARARRDEAQVVLNEQISRRRQLVLMQTAEKNRRDTASPATRDHIDRHINWLQAEIKVLEEQISQAIEANPTWAETAKRVDSVPGIGFITAATLVADLPELGQLNRQKIAALVGVAPFNHDSGKHRGKRRIFGGRTAVRSVLYMATLSAIRHNPVIKAFYQRLLAKGKVKKVALTACMRKLLVILNTMIKTGQDWNPSIS

SEQ ID NO: 371929 - protein, 310 aa, unidentified
MGQVNAAIEVGKHKLEVAVGSDGELSSEPNQSRAVTRLAKRLIEIGCERVLIEGGSYQNVLVGALRAVKLPVVIINPRRVRAFARSIGRLAKTDHIDAKVLALYGERIQPPLRELPDEQNQQLRALWIRREQLIEMLVMEENRLEHTPKALHRRLGSHINYLRKQIKHADKDLDRAVRNSALWDKYELLSSVPGVGPVLSFALLADLPELGRLNRCEIAALVGVAPFNYDSGTLRGQRKIQGGRKRLRRVLYSATVASVRCNPILRPYYQRLRANGKPTKVALVAAMRKMILILNAMLKTQTTWRPPCPT

SEQ ID NO: 371930 - protein, 340 aa, unidentified
MNIKRIGLDLAKNVFQIHAVDHREHVVLRKTLRRDRMAAFFTQLSPCLIGIEACGSAHYWARELTRMGHTVRIIPPRLVKPYLKGQKNDANDAEAICEAVSRPGMRFVAVRTERQQTLQAEHRVRARLIRARTALSNEIRGLLGEFGVVLPAGIAQLRKALPEIVSQQVQWDESFIRLLCELSEELQELDERVARHDRRLQQSARDDIRIKRLLAIEGMGPVVASALVAAVGDGRQFRSGREMAAYLGLVPRQHSSGGKARLGHISKRGDRYVRTLIIHGARAVLNACQNKTDRRSQWLQGVSERRNRNIATVALANKNARIAWALLSREEDYHGIQVIG

SEQ ID NO: 371931 - protein, 343 aa, unidentified
MNEVITIGVDLAKNVFQVHGIDAEGGVIFRRQLRRGQMLPFFNRQPACLVGMEACATSHHWGREIEALGHRVRLMPPSYVKPYVKRNKNDMADAEAICEAVTRPTMRFVEIKTPQQQSVLMLHRTRHLFVRQRTTLINALRAHLAEFGIVAGVGRNGLERLLTVIENGEDDRVPPTARECLLALRDQLEMVKGQILDADRRILAWHRSSEVSQRLDDIPGIGPLIATALVASVPDPHAFKSGRDLAAWIGLVPRQTSTGGKERLGHISKAGNRYLRMLLVVGALSVIRRAQQVGYTRRPWLTKLLERRSTKVAAIALANKNARTAWAMMAHGTYYREPVSQAA

SEQ ID NO: 371932 - protein, 386 aa, unidentified
MQRSTVDTPTAAHCGTIFVAIELSQRSWLVTLHSPDKDKISRHQLESGDHAGLLALIDRMRERVVRALGREPAVVSCYEAGYDGFWLHRRLLAAGITNYVFDPASIAVDQRARSAKTDRIDGERILRTLMAYLRGEPRVVRIVRVPAAEQEDARRATRERDRLITEQTAHTNRIKALLRLVGMAVGNPRRRDYLAWLAAQRDWQGQALPPRMLTEIKHEHARLMLLREQLAELAQPQAETDLSPAAAQMAERSERLQRLKCLGPAFSTRLTNEVLYKDFRNRREVGSYVGLAPSPWKSGGIDREQGISKAGNPRARCATIELAWLWLRHQPDSKLTQEYRRRTLGASKRIRRIAIVALARRLIVALWRYLTTGLVPEGAKLKAVEM

SEQ ID NO: 371933 - protein, 323 aa, unidentified
MNKDIKYFGIDISALVFDVTDSDGNYYQFKNNEFGFKKFTKLLSCKSHCVMEATGYYHYQLAYHLLETGIKVSVENPLSVKRFIQMGLSKVKTDKSDSKLICAYASQVELKLWQGNTKEEIECLQIVRALSVYTKQSTMLKNKLHGEAVLGNPSKVVLTSLKRSLRQLQKEIKTLEDKLLILVKQTHQDLFTRLKTIPGIGPKTAIMLVVLTGGFDRFNSASELCSYAGLTPVIRQSGSSVKGRPRISKIGNQKLRNLLFMCSFNACKYNKACRDLYERIVAKGKSKKLALIAVCNKLLKQAFAIAKSGLIYDDAYRSTLVKN

SEQ ID NO: 371934 - protein, 427 aa, unidentified
MAYRIAGVDVHKKMLAVVVADVTVDGAFQFERRKVGTSPSQLRWLAAWLAEREVEEVVMESTAQYWRPVWEALERGWQPSRQRREGAGPMSGALHLAQAQSNRGAGGRKKDFPDAERLVKRLIAQELTLSFVPDAEQRLWRTVMRRKCQLTRNRVQLQNRLECLLEEAHIKLSSLVSDLLGVSARRMLQAIADGETDAPAIAALGSDRLRATRAQFIDALDACRELHPVYRRLLTLTLEELRVLEEHIVQLDVEMARLLRQNQPAVQRLAEVPGLGVDSAQQIIAEVGPAAATFPSAKHLASWVGVCPGAEESAGVNYSRRSPNGNRQMRRVLNQAANAAAKAKGSIFELVYRRLVPRLGHAQAIGAIAHRLCRLIWKLLHDGVSYEERGPAVTRQRAQRRAAKMVRELRSLGYRVQAERSPFTSPA

SEQ ID NO: 371935 - protein, 357 aa, unidentified
MTPITPQAAPIAEVAGGVDTHQDSHTAAVIDGIGRVLGTEQFPATPAGYTTLLAWMRTFGQLSRVGVEGTGVYGAGLTRLLQAEHIDVIEIDRPDRKRRRFQGKSDPIDAIAAAKAALAGDRTGTPKQRDGRIEALRTLRIARRSAIDQRADTQRQIKALIVTAPDALRQRLRGLTTTKLIATCAASTPDRDHTADPATATQIALRSLARRHQQLSTEIADLDELLDTLVTAINPRLTAAHGVGTDTAGQLLVTAGENHDRIPSEAAFAMLCGVAPIPASSGKTTRHRLNRGGDRQANAALYRVVLCRLRWDPRTRAYMQRRTQDGLSKKEIIRCLKRYIARELYGLITSKDQERSA

SEQ ID NO: 371936 - protein, 346 aa, unidentified
MTKPQPAVEVFAGVDVSAREISVARMLAKEGKPTLVAFANNASGHKALLAFLLEKTERVRVCLEASGNYSLDLALVLHAHRQVEVSVINPRRARKFAESLGERSKSDPVDARVLGQYAARMPWEPWQPPSAIALRLRAITRAIESLGVMHTQESNRAHALASSQALPLLVLRERQRHQHYLENRMRQLRREARRLIARDADLERRYRLMLTVPGIGETSALQILGELVVLSDTADARQWVAFSGLDPAIFTSGSSVEKRPRISRGGSRHLRRALYMPALVALRREPHLRGFYERLLSHGKARLQAVVAVMRKLLHALFAMFRSNQPYDGSKLCASEPMVSRTMQCA

SEQ ID NO: 371937 - protein, 341 aa, unidentified
MKNLFIGVDFSKEKVDVTIIFADGLTETAARVFNEFKTTVSGYKQLVKWVEQNSYGIDSSLWLFCGENTGDYSKGLCNFLYGKGYDMWLENAKSIKDASGLRRLKSDRADASMIAEYAMINYDKAVMYEPLSESLAQLRELFLYRQMVVRYRCSFQVRRGEKRLTMEKSPIKTMISQSGRHIVSELNKEVEKIDKRIAELIKSDEELTEVFTIVTSVPGIGTQNAVCLMVYTDNFRRFNYDSRKIACYYGIAPFGKDSGTSVHSDPHVHYMANRQIKAMLTQAALAAVKFNPVMARYYMRLVERGKKKPVALNNVKNKLVHLVTAMVRNRQTFTPEYKISA

SEQ ID NO: 371938 - protein, 393 aa, unidentified
MSMYFIGIDISKYKHDCCIISAADQKVVSKVTIKNNKAGFNELLTIIHSLANPADIRIGFESTAHYALNLELFLENSLLTFMEVNPVLISEYKKSKTLRRTKTDSVDCESIARWLMTVEYKPHSKGFYHAYSLKSLTRLRDKLIRQRSFYLIKITNVLDHTFPEFKPFFNERLSKTALYLLENYGSAEKMARMNSASYEKLRSLSRGRVSPQQFLRLKELAANTVGVNNSIFDVELNSLLSLYKSLVKEINTIEKEINKLIEEVHPHYMSVPGIGPLSAAVIYSEYGDISNFTNPGQMLAFAGIEPGINESGTESHGGKMVKRGSSQLRYTLINCCLPLIRFDMTFATYYAKKRGEGKPHRVAITHVAKKLLESSMHWRGKISTLMHRNFVNL

SEQ ID NO: 371939 - protein, 329 aa, unidentified
MPALAPTDAGKIVREARVASEPEALLQVLTNTIDLKRIGLEAGPLSQWLYSVLAEAGLPVICVETRHMRAMLKAQINKTDRNDARGIAQMMRVGLYRPVHVKTLRSQKLRMLLTHRKLLQSKAIAIENDLRGSLRNFGLKVGMVGTVKFEARIKELVENLPDLAELVEPLLIVRRVVREQLGILHRRLLAIVRDDDVCRRLMTVPGVGPVVALTYRVTVDVPARFRNSKAVGAVFGLTPAKYQSGEIDRTGAISRCGDEMMRMMLYEAAQSMLVRAAKWSWLKAWAMKIARHRGMKKAIVALARRLAVIMHRIWVDGTEFRSTREVAAA

SEQ ID NO: 371940 - protein, 235 aa, unidentified
MFVSHRKFDNNKKGFDTLIQWLKTKGVDTGYACMEATGSYGLKLARYLYENNFKVSVVNPVRIKGFAQSKLCRVKTDKADSDLIAHFCQTMKPDLWKPTSLHIQELQQLVNRLDALISIKNQETNRLEGLSDLVATNIKDHIIFLNKQIKEVEQLIANHIKTHQDLSEKSTLLASIPGVGEKTISQVLTFLSNIDNFNSPKQVIAFLGLNPKQRQSGTSVRGTSRISRVIVKCCV

SEQ ID NO: 371941 - protein, 344 aa, unidentified
MEITTIGLDLAKRVLQVHAVDAAGRVVVRKALRRAQVLPFFAKVPPCLVGMEACGTSHHWARELAGLGHEVRLMPPAYVKPYVKRGKTDAADAEAICEAVTRPTMRFVPVKSRGQQAALSMHRARDLLVRQRTQLVNMMRGLLAEFGIDIPEGLERALVMARQVVEGAAPDVPVEAAKVVGMLAQQALGTHAQLREIDRALAAAARTDAMARRLATIPGIGPVGATAMAASVADPGQFRSGRQFAAWLGLTPLQNSSGGKERLGRISKMGDRYLRKLLVIGATSLVRRARRSPETVDPRLADLLARKPVRLATVAMANKMARVVWAVMTRGEVYLRAHAPMLAA

SEQ ID NO: 371942 - protein, 358 aa, unidentified
MNNIKSSRLDFRGQPIYIGLDVHKKSWSVSIFSNYGEYKTFNQPPEVDKLLHYLRHHFPGGDYRSVYEAGYCGFWIHDQLREKGIQCLVANPSDIPTKNKERRTKRDRIDCRKLGRGLRNGEIEGIYVPCRSKLEDRTLTRTRQGMVRKQTRCKNQIKGMLLFYGVVIPEETEMGHWSRRFIQWIEGIRMERASGDIALKAHLEELDHLRQLIASLNRAILRLARTEEYRPLVRLLKTVPGISTLTAMILLTELGEITRFPSLDELSCYVGLIPDTQESGEKEYVGAITQRRHAQLRWLLIEASWVAVRKDPALLMAFQEYCKRMRKTKAIVKIARKLLNRIRYVLKNQAEYVPCVIE

SEQ ID NO: 371943 - protein, 400 aa, unidentified
MNDTHYIGLDVHKKSVNYCVKTGDGEIVREGRVAALRDDLRLWARAQPKPWQGAMEATLFSAWIYDTLKPFAQELDMAHPARMKAITAAKKKSDRLDARTIADLLRCNLLPKCYVLSPEMRDLRRLLRYRQLVVAESVRLQNKMAGLLMETGTPFVKARLHGKKYFAQLLAGLQEVPESVKDLLQMSRGAMEMFESTQKRLVKRLLAEPPLERRVERLCTIPGVGPITALTWALEVADPQRFSSLGDAVSYCGLTAAFRSSAGKEQRGPISKQRNAWLQTALIEAAKLAPRWNSQLAAVHAHELTRGHRNRATLQVARKLVAYLMAVDKSGNRFNSARGRMRRGAPGRKRRRSAPTPCSRRRSQTCRPAPRSARRRGWRRSTRRPPRRPGGGSAATRAAS

SEQ ID NO: 371944 - protein, 356 aa, unidentified
MKQVKSLSFAGQDIYCGIDVHQKDWSVCIRDEERELKQYTQPPDPGKMAELLNRTYPQANFHIVYEAGFCGYWIQQALSGYGFDCKIVHAADVPTTDRERRQKTDKVDCRKLAKGLAEGLLTGIHIPDQKTLDDRNLVRGRKQLVKEQTRWKNRILSSLHFSGLAIPEGYKNSSHFSRRFIKWLEQLTIGESAKIALQLKLAALKPVREQLLQANRSLRQLAQTEKYINTTKLMRSVPGIGMINSMILITELDCLDRFKSFDHLCGYAGFKPDIYSSSEKTIIKGITPRCNYRVREALVESAWKAIAIDPALLLAYKQYKKRMHYNKAIIRIAKKLLSRIRYVLINQKEYVPGVVQ

SEQ ID NO: 371945 - protein, 414 aa, unidentified
MALKIVYQICCGIDVHKTFVVACIASTNKGITTYKRHRFSTYTKGLKELSQWLCENNCKDVCMESTGKYWIPVFNVLEDTCNITLAHPKYVKAIRGKKTDKKDAKWIADLFKHDLVAGSFMPPLTIRQLRDLMRYRFKLTNFMSSEKNRLQNSLTVSNIQLGNVVSDTFGKSSMNIINRLLENPLDNSFDIEPLIHGSMKNKLPELELAIDGFITPEQAEKLKVIKQHYEDLESRKADLEKIILSLSVPYTEEINLILTVPSFKNIFSAIAVVSEIGVNMDVFPTAKHLCSWAGLTPTNNESAGKKKSVRISRAGCYIKPLLVQCATAVVKSEKHPEIRNRYLRLKKRRGHKRAIIAIARMLLTAIYNILKKKEPYNAELYKKSDFLPVNRELTVEQAILLAKAQGYRILATAT

SEQ ID NO: 371946 - protein, 282 aa, unidentified
MIKDVTTIAVNLAKDIFQVAYGDGQGRVLSQQRITSRRAFALQLGQWRDVVVVMESCATAHYWGRQCQRLGLRVRLLPAQHVGAYRRRNKTDAADADALLEANRNAQIKDVPVKNETQQLVLAVHSLREGWKAARTARINALRGHLLGFGQAMPLGADKAITLAPACIENVPVALHGLLHQLLDEIHQLSQRMTDAERQIIALNTQNPAATHLQQITGIGPLTASAVDAKYFKSGRQLSAWLGLTPREHSSGGSRHLGSISKRGDVYVRMAFGPAKTDSMSV

SEQ ID NO: 371947 - protein, 394 aa, unidentified
MAKVRSWAGLDVHASKVVACVVDGESGEVTVRRLPGATEAAVAFCSALPRPVRVAYEAGPTGFNLARALAAAGIECVLAAPGKIERPAQDRIKTDVRDSERLVRLLMIGGLHAVRVPTPEEEALRDLVRARDDLRGDLMRARHRLSKLLLRHDVRYEDTTGRWGRRHRDWLAKVDLGHAGAQLTLSEYVGAIDALEIRRRTLEAMIAEMITVSPWAADVARLRCLRGIDTLSAVGLAVEVGDFARFEHPSRLMSYLGLVPSEYSSGETRRQGAITKSGSRHARRLLVEAAWHYRRPPRLGTTLERRQDGQDQAVIAIAWKAQQHLHRTWRRLETQRRKRRTIIAVAVARQLAGFCWAIVNHNPSVAVPPASMPAGDTPSRTQPQPPKHREHQPA

SEQ ID NO: 371948 - protein, 360 aa, unidentified
MCRVGKPVNSLLSFLTSQINIMTIQSKKNVTETKSLFAGIDVGAEELVLLVRKNGISYKPQKFANTPADRARLVKKLVDLPGITVCLEATGVYHFDLSIALHDAGVALMVVNPKSSHNFAKALMKNSKTDAVDADTLAQYAERMDFVAWTRPSDEKISLRGFARRIDALTRQKAAAKNQLHALSASKENPKAVLRDAELSISQLEKRIACLSKEALALIGKHPDLERAFLLLTGIKGIAQTSAIALMGELLLLPKGLSHREWVKSAGLDPRAFDSGKSVHKQARISKAGNRHIRSALYMPALSAKQHDPYVKAYFQHLVDNGKKPLQALCAVMRKLLHAIHGMLKYDKQFDNTRFYAIPA

SEQ ID NO: 371949 - protein, 438 aa, unidentified
MSNKVIFNLDELFISVGIDVGADFSWMSIALPNQQFVGKPYKILHNSIDSLTTAVSKIKEAEELYSLESRIFLESTGIYHYPLFCYLRDKGFNCSVINPIITKNSTNINIRKVHNDRFDSKKAALVGLKPDLKVSLMPSDLALNCRNLCREYYDLMDNRSAYVNKLQGELRMAFPQYLGIFSKVTINTSLTLLETYTSPSAFLKADKQEIIDIIKSTARFGLTYAQNKYNAIIQAATDANQFGYIIDSNIKRIRLYISFIRKYDEEINSILESLHELVDANEDSDFVKQIHLIETFKGAGFLSSVSIMGEIGDFSAFSKPKQLFAYFGLDPSVKQSGKFEGTKVQMSKRGSAIARRVIHTLTLQSISISRNREAKNPVLREYYLKKCDSKPKLVAMGAVSHKVCNMIFAILRDNKPFKIIAPQEHIKQYNSAKCDIAA

SEQ ID NO: 371950 - protein, 351 aa, unidentified
MITQITAVPKLYIGIDIHKRSWKVHCATDLFSGKSFSMNPNPEQLKDYVNKHFADYEVSTAYEAGCCGYSAHRCFESYGWFSLVVNPADIHRKGKEKNTKTDKIDAQLISRELKDGRLDGIHIPDVDREELRSLFRRRNDLVKDFRRIKSYIKMQLLYFGIKEPEEFDNDHWSHKYRKWLDDIVFKNQTAKATLESRMRFFRFVDQELRDVSTQLRRYCKTYHKKDYMLLRSIPGIGGIVACGILCELGDLRRFNSVKHLAGYVGLAPGVHQSGSNYKTLGITPRAHRLIRSYFVEASWQAIRADPVMQAYYRKHQGRNVKSIIIKVARKLLSRTLAVIKTETPYCIGVLE

SEQ ID NO: 371951 - protein, 404 aa, unidentified
MNAVGIDVSKGKSMIAIMRPLGEVVAAPFEVGHTAAELNELAKFILKISGETRVVMEYTGVYFEPIARALYDAGLCVCVVHAQLIHNYGNNTIRKVKTDKADAIKIANYALDNWNKLKPYTPIDEVRRQLKAYSRQYRKFNKLKTMLKNNFISLTDSTFPGVNELFSSPPRKSDGHEKWLDFAMKFWHAECVCSLSQKAFTERYRKWCHKAGYYFLESNAEDIYAASCGHICLLPKDENTKQLVQQTIIQLTSICSSLSVIESKMTELAGLLPEYPIVMEFRGVGRILGPQIMAEVGDVLRFEKKESLVCFAGLEAPPYESGKFESHNRTISKKGSPHLRAALFQVMDCLIKTQPVNDPVFQFIDRKRSEGKHYYSYMCAGSAKFLRIYYARVKEYLTTFEQNT

SEQ ID NO: 371952 - protein, 346 aa, unidentified
MNITQVGIDLAKLVFQVHGVDARGKVALRKQLKRQQIGTFFARLAPCLIGLEACSGAHFWARKLTELGHTVKLIAPQFVKPYVKTNKNDAADAEAICEAVGRPNMRFVPIKNTEQQALLGLHRARQGFVIERTAQANQIRGLLTEFGLVIPVGIRSLERKLPDILEDAENGLSGVSRALFARLFEHFRALDRQVAELEREINAWHREDAASQRLQAIPGIGPLTASALVASVGDAKVFHNGRQFAAWLGLVPRQNSSGGKTNLLSISKRGDTYLRTMLIHGARSVLLHLKSHPDQADGWLARVATRRNPNIAAVALANKNARTVWALLAHGRDYQAGYRSVNPMAA

SEQ ID NO: 371953 - protein, 341 aa, unidentified
MSDYSYFCGIDLAKNHFSLHAVDQNGKVILHKSVTRSKLLTTIANMPLMRIGVEACGGAHYWARTLNKLGHDARIMAVKYVVPYRTKGKNDLNDAVAICEAVQRPSTRFVPVKSPEQQAILSVHRMREHWVRERTALMNRMRALLSEFGLIIPVGRSSLMKHVPLMLEDAENELPHLARTVIADAYHHLDELNQRIADTEQVFDSFAKVSTNVQRVMKVRGIGPQTATAILASIGNGSQFDKSRDFSAWLGLVPKQYSTGGKPRLGRITKHGDKYLRTLLVHGARTVIANLGDKQDKLNQWCRGVLERRGMNRAIVALAAKNARIIWSLLHNQTEYENYAA

SEQ ID NO: 371954 - protein, 398 aa, unidentified
MIGIDPHKASHTAVAIDQAEVPLGELRVRASAGQAGRLVEWAAGWPERTWAVEGAGGLGYLLAQQLVAAGERVLDVQPKLGARVRLLASGATGKTDPNDARSVAIAALRSAAVRPVEAEDHPVVLKVWSKRHKDLGQARSRVAGRLHAVLCELVPGGAARDITAARARRLVAAVTAQDAAVRARCELAGELIEDMTRLDQQLREVRKRLTAAVAASRTSVTEVFGVGPVVAGIIVGDVRVATRFASGDHFAAWNGTAPVEASSGPRKVHRLSLRGNRRVNHALHIAAVTQVRHRHSAGRAYYDKKLAEGKTPKEALRALKRQVSDAVFACLQADARQAAAAGPGGQPGNDSSSSAAGSHPARQLFGQATPEPAPTLRPPRRGSQARPGSAPRKTRRRT

SEQ ID NO: 371955 - protein, 332 aa, unidentified
MEKNHYIGVDISKKTIDVAIYKKEKVGKAVLCEKFHNSPNGFKDMKRWLRKCGVTLAESLFCMEATGHYTYELCLFLEQQKVVYSVQSPLHLKRSFGLAHGKSDKVDAYRIAYYAYLHREDIKPSQLATNSIRKLKALMAERKSLVVEIARCKAQLNESGSHSSSPGTIKRTKELLEFLETQVIELENEMVESINSEEELKSNYQLLLSISGIGIVNAVNTIIATHNFKMFDNARQYASYIGVAPFEHTSGTSVRGKTRVEPGAKMLKADLTGAVRTCINHDNEIRKYYGRKIAEGKPYGVVANAIKFKLLLRMFAVIKRGTPFVKKADHLI

SEQ ID NO: 371956 - protein, 351 aa, unidentified
MDSTKYIGLDVHKETISIAVLNSSGKLVMETIIETKASTLLQFVQGLRGSLHVTFEEGTWAAWLYDLLRPHVTKVVVCDPRKNALLKTGNKSDRIDARKLAELLYLNKLKPVYHGEHGVRALQELSRSYLTISGDLARVMTRLKAMYRSWAIPCAGKQVYAPRYRSEWLGKISEAGVRRRAEFYCQQLDALRALRQQVRRELLAESGKHKASKLPCQIPSIGPIRAALLIAILQTPHRFRTKRQLWAYGGLGIETHSSADHRYVEGQLRPSKRPVSLRGLNRNHNHELKNIFKGAAIIAATKAGPFQEFYAALVAKGIRPEMARLTLARKIAAITLLVWKKGATAAPLGWL

SEQ ID NO: 371957 - protein, 344 aa, unidentified
MSKITVVGLDLAKNVFQVHGVDDVGQVICRKQLRRAQVLPFFARLGPCLVGMEACGGMHYWSRKLSELGHTVRPMAARFIKPYLKSNKNDALDAEAICEAVQRPSMRFVTPKSPDQQAALHLHHSRRLLVGQRTALINHVRGLLMEFGITVPVGPNALRRRLPEILEDGDNELPMMARNLLATLAEQFRMLDERIESLEHQIEAWHRNSEASRRLAEIPGIGLMTATALAAAIGDGRAFRNGRELAAYLGLVPRQDSSGGRQRLLGISKRGDGYLRTLLIHGARTVVRHLRARTAAGRPPGNPWLARLLERRHPNVAAVALANHNARVAWALLTRSERYGGMAF

SEQ ID NO: 371958 - protein, 385 aa, unidentified
MGTQTFIPRDYDVFAGLDVDKKSISVTFTDHQGFLKSLNMPYKVEHLVNYVRKHYPDKKVVFAYEAGPTGYGLYDGLEAQAYPCLIASPSMIPKAPGQRVKTNRLDSRGISENLRGGQLKGIHVPTPLYRELRHLTQLRDTLVSEMVRMKQRIKSLLLMEGLEFPPAPAGSQWSFLVKKKLRELPCSTTVRFKLDRLLDSLEFDEKQVLKATREIRRFCQTDPELSQCIEYLRTLPGIGWIVASQLLARVGDWRQIKNIRQLPAFLGLVPTENSTGERTERGSITHSGDGRLRSKLIQASWSALRQDGELREFFRTVAKKHPRHLGSRVAIVAVAHKLSVRASVVLMKQRPYEVRQKVQSAPLTQEETVPQGTTRRLAVPGETNS

SEQ ID NO: 371959 - protein, 417 aa, unidentified
MLGVGIDWAEDTNQVALGRPGDGIIEELSIAHRPEAVARLIERISSLEADPAEVRVALETKHGHLVEALMEAGYAVVPVNPDLVARRRGPARKKDDGEDARILCLMAMDRHSVLRPLIPHGEQAAELRAIARDDERASRDERRLLNRLRADLIAAFPEAFAFGGEDLGAPTFLQVLAHYPTAEAVRTAADAELDALFRRAKHGWPDRAVARLREALGSSQFTPKPSLVRAKADTIRLAATQLLTIGAQRRAWERRMGELLAELPATGGGESGQAVPDGEIYRSFPGLGARLAARVAGEIGDHPEQFSSPNSLQCYGGKAPVTRRSGKSEFVVSCRLACNRHLANAAQQWAFCSLSRSGWAREFYDAHRARGKTHHAALRALGNRWLEVLWHCLHKGVRYDEEIHAENRRRALEPIAA

SEQ ID NO: 371960 - protein, 329 aa, unidentified
MILGFDVSKHDLVGILIDKRGKIKNNWVIENKKQKINEFLCEIVSKHPHIVIGSEATNEYHNVLAKLCLSMNIPFYLLNPIVTKQFTRATVRKKKTDLTDAHIIAKCILQGEGSLIDNSIFDSNKFVLRTISRLTRLSVTLNQMKRRFNEHYPEVDNIQEEIDKMYLSVKQGIKVLQDKMVKETDNELIKLLCSIPGIGKTLSCVFIAEIGDVNRFKSVKSLVAYAGLDPKISQSGLTLRRNTRLTKRGSPYLRRAAYLSASIAQRHDIELKEYYLKKRGEGKRYKEATVANARHILARIYAVMKRRTPYVKREVLQIKSCFPQVEVLT

SEQ ID NO: 371961 - protein, 335 aa, unidentified
MSLYCGIDLHSNNQVIVVIDDNDKRLLERRVPNELGATLSVLEPFREELLGVAVESTYNWYWLVDGLNDHGYSTRLVNTAAVQQYSGLKYSGDRHDAFWLAHLMRLGILPTGYICPREIRDVRDLLRKRLGLVRERARNLTSVQNILARELGHRVATAKVRGILNGDDKFRPAVRTAIAANLAVIETLDTVISGIQGQALEVVKPTSRHRRLKTISGVGDVLAPTIMLETGEIERFKSVGNYSSYCRVVESRRESNERKKGEGNKKCGNRYLAWAFSEAAHFAVRYNDRARRFFDRKAAKRNRMVAIRAVAHKLARAAYFIQRDKVPFDEMKLFG

SEQ ID NO: 371962 - protein, 387 aa, unidentified
MLLDHPSDGLAAIRTQFGAIFVSLELSRSTWLVTSLSPGKGEKMSRHSVGAGDVAELLKLVAELKRKAQARTGESYPIITIQEAGLDGFWLHRALQQDGVESHVVDPASIATPRRRRRAKTDRLDGETLLRTLLAYKRGEPRVCAMVVAPSPEEEDRRRLCRERRSLIAERIEHVNRIKGLLFAQGISDYAPLRRDRRARLAALRTGDGRALLPHLTAQLGRELDRLELLLGQIAAVEREQDALLAASKPAGETAAPDPVTMLLALKSLGPNFAAVLWSEAFYRQFANRRQIAAYAGLAATPWRSGGLAREQGVSKAGNPRLRTTMIQLAWLWVRHQPQSALTQWFKAHSPRGRKRAIVALARKLLVALWKYLTAGVVIEGAVMKAA

SEQ ID NO: 371963 - protein, 343 aa, unidentified
MDHFAGLDVSVKETSICIVDDTGRIVREVKVASEPEALLAVLANPTYHFKRIGLEAGPLSQWLFSALAEAGLPVICVETRHMRAVLQAQINKTDRNDARGMAQMMRAGLYRPVHVKTLRSQKLRMLLTHRKLLQSKAVAIENDLRGTLRNFGLKVGVVGKVRFEARIRELVENLPDLAVLVEPLLIVRRVLREQIGILHRRLLAIVRDDDVCRRLMTIPGVGPVVALTYRATVDVPARFKNSKAVGAVLGLTPSKYQSGEINRSGAISKCGDEMMRVMLYEAAQVMLTRTNKWSWLKAWAMKIARHRGMKKAIVALARRLAVIMHRIWVDGTEFRWTRDVATA

SEQ ID NO: 371964 - protein, 364 aa, unidentified
MKKSSKKQYRSAVVESKPEKVVGLDLGDRHSHYCILTSSGEVMEEGRIQTTAASLEKHFGSEARMRIALEAGTHSPWVSRLLKGYGHQVIVANPRKIPSLRRSKSKNDRNDAMQLARMAAFDPELLHPIEHRSAERQQDLNLIHTRSVLVRARTMLINSMRGLVKSTGGRLPACSSEAFPEKVPAAVPPALKAACAPLLEQIAQINQTIAAMDKQIDGLEKKYPEIAILRTVPGVGPVVAACYALTLDSPQTMPTNRQAGAYLGLRPGQQQSGDSNPQCGITRTGNTYLRSLLVQSAQYILGRLGPNSELRCWGLKLAASGGKRGKKRAIVAVARKLAVILLSMWRNRKKFEPFPQSATQLATA

SEQ ID NO: 371965 - protein, 391 aa, unidentified
MTKPKTKTVNDFSRCLDPLDMDATLIAVIEMSKSSWLVAGIVPGVERQPLKKLAIDEDALLSLLKRWRAEAEKNGHRITRIAVAFEAGHDGFWLARWLTAQGVEAHVIHASSVAVTREHRRAKTDRLDTELLKRGFLGWLRGERGHCKMVAVPTLAEEDAKRPSRERETLVGEASRIITRIKSAFVRLGIRGFNPKLKAAATRLETLRTPEGEPIPPNTLAALKRDLERHQIVKKQIRELEQTRLESLTQAPAKGPNVMVLLLARVIGIGVETADMLVREVLSRTMRDRRAVARYAGLTGSPDESGAKRRDKGLARSGNARVRHGMIQLAWRFLLFQKDSALAQWYRQRTANAPSTRKPLIVALARKLLIALWRFARDGVVPEGVRLRPAA

SEQ ID NO: 371966 - protein, 320 aa, unidentified
MEKVLFDQVVKVGCGIDVHKDIIVATIRKSENKYETKEFTSFTSSLTELREWCKSESVTHVAMESTGVYWKPIFNILEEGDFEIVLVNARHVRNVPGHKTDKQDSQWLSKLLVSGLLKPSFIPPVEIRDLRDLVRYKKKVVAQASSEKNRIIKILEDANIKLSSVLTNVDGAVGTKIIDDLIAGKADINELMKHYHGKIKASKTEFRLALEGRLTKHHQFMLRVIQESITDKEKLIAKIETQIDELAKQYSIEIDLLQTIPGVAYDSAVSIISEIGADMSQFSSEQHLSSWAGMSPGNNESGGKKKAQPPSTETNTYNQP

SEQ ID NO: 371967 - protein, 330 aa, unidentified
MQKFQHVVGADLSKKTIDLFCHQTNQHLQIDNTAKGFKAMLGWFKQQNIHPSNTLLAMEHTGLYSFCFELFLQQQSIAFVKSSALAIKRSIGLVRGKTDRIDARRIAQYAFEKQASLKQEVPAGKSVQRLQMLQATRDRLVKHKTALLNSIKEYSNIGLAKLDVVIQSQTKLVKQFEHEVEKIEAAMEQLIAGDTELQTNCRLLLTIKGVGKVVAVAALVKTRNFSRFSNPRKFACYCGTAPFEHSSGSSVRGKTKVSPLADKKMKTLLDLAAKSAIQYDKELREYYLKRVEMGKSKMSTINIVRNKIIYRMFAVIKRQTPFVENYLKTA

SEQ ID NO: 371968 - protein, 412 aa, unidentified
MDVLVERCAGLDVHRDSVMATVRVPAERRRQREQHTRGFRTTIAELEALGDWLAGFGVSRLGMEATGVYWRPVFQVLEGRFDCWLLNAQHLHNVPGRKTDVIDSAWICRLVEHGLVRPSFVPPPEIRRLRDLTRLRTAQVEERTRAIARLEKVLQDAGIKLTSVASKSYSVSARRMLEALLAGTTDAEALAELARGRLRAKIPQLREALRNRFRLEHHGVLVTSLLAHLDALDRAISDLDERIAQETEPMAELIELLSTIPGVRRRTAEVLIAECGIDTSVFPSVRHFVSWAGICPGNNQSGGKRRPSKTRHGSRWLRKALTESAKAAARSKGSYLASHHAQIRGRRGEAKAIGATRHDILVAYYHIVRDRVPFRELGPDWLARRHSPEHRAHRLTRQLEALGLKVTVEAPA

SEQ ID NO: 371969 - protein, 448 aa, unidentified
MRTRKPARAKKMKLPKHLQHINPHAAGIDVGSRSHFVAVPEGSCEQPVREFTSFTDDLHRMADWLLACEVTTVAMESTGIYWIPVFEILESRGLEVRLVNARHVKNVPGRKSDVLDCQWLQRLHSYGLLEGAFRPTEQVCTLRAYVRQRMNLVRYAAAHIQHMQKALSQMNLQLANVVADITGVTGMRIIKAVLAGERNPLVLARLRDRRCKSSESTIARSLHGNFRPEHLFSLKQAVDLYEFYQGQIAECDRQILDQLASFDGADASGNGPPESVDEALQRMAGVDLTQIDGIDTNSALKIIAEIGTDMNRWRSAKHFASWLGLCPGTKISGGKVLNARSKPVANRAAATLRMAAFALFNSKSALGAYLRRQRARLGAPKAITATAHKLARLVYSMLKHGTAYVDEGQKRYEERYRTRVVQNLKRKAKELGFALVEAVEKQPKLETT

SEQ ID NO: 371970 - protein, 349 aa, unidentified
MHSTTVAVDLAKNVFELAVADAEGKIGERLRLNRARFSSFFVHRAPCRVLMEACGSAHYWARRIGAHGHAVQLLPAQYVRQYVRRNKTDRADAAALIEAARCAGIRTVPAKSLEQQQVLVLHRLRSQWMNTRQRYLNTLRGLLREFGIAVPLGARIARTRIAHYLAQPPQELPAASRPLLAQMLSEVKELEHRIEQIERELIALTRADPVVQQLRQIPGIGLLGSTAIRAAVGDVERFPCGRCFASWLGLTPREYSSGERRRLGGISKRGDVYLRTLLVHGARSALLAAHRQQRGGRPLDHLRQWALECERQRGHNVATVALANRLARIVWATWKHGRPFDGNWARAAH

SEQ ID NO: 371971 - protein, 343 aa, unidentified
MGEISMIGLDLAKNVFQVHGVDASGSVVLRRQLRRGAVEKFFAQLPPCTVGIEACGSAHHWARVIGRYGHQVRLMPPSYVKPYVKRNKNDGRDAEAIYEAVGRPTMRFVPVKSVEQQATLAVHTTRALLVRQRTMAANALRAALSELGIVAAQGIKGLRELMAKLETANEEIPEMMRGALLLLANHWQALDADERALERQIAKAARADREARRLMEVPCVGPIIASTVLAKVPDATVFRSGRDFAAWIGLTGRDHGTGGKHRPGRISKQGDRMLRALLISGASAYLRHQKTRGVSDPWLRDLLARRPYKVVMVALAAKTARILWAMLVKGEPYRDRASASAAA

SEQ ID NO: 371972 - protein, 315 aa, unidentified
MATVQFTQIISRGCGIDVHKDSITATIRGDGIRMETRQFTTFTSSLIELKQWLHENKITHVAMESTGIYWKPLFNILEETFEIMIVNARHVRNIPGRKTDKRDSRWLSKLLIAGFLRASFIPPKQIRELRDLSRYKTKLIGDRTREKNRILKFLEDSNIKLSSVLSDVFGASGRAILKALTEGQTDPKKLCELGRGSVKLKKEALFLATDNRINEHQIFMLKMILEDLERIQTMIDKVEQEIDKKVKVFEPEIKLLDTIPGVDRDGAIGIISEIGADMNHFPAAKNLASWAGMSPGNNESAGKKKVAKPLMAINI

SEQ ID NO: 371973 - protein, 411 aa, unidentified
MQVINERCCGLDVHKRTITACGLKWLGSEWQKEIRQFGTMTKDLLALLDWLVKQGCTHVAMESTGVYWKPVYNILEGQVELLVVNARHLKAVPGRKTDVRDAEWIAELLAHGLLRGSFVPPPSVRELRELTRYRSSVVRDRARTVNRLQKVLEAANIKLASVVSDIDGVSARLMLEGLVAGQRDTEQLASLAKGRLKEKHGQLVEALSCRLQPHQSFLIAEHLAQIDYLEGAIERLSLQIEEKLRPFEQQIGWLDTIPGINRRTAEVLWAETGGDMSRFASARHLASWAGMCPGNNESAGKRRSGRTRKGSPWLRHCLVEAAHGAAHTKNKYLRSQYHRIAARRGKKKALLAVGHSILVIAYHLLTRQQAYADLGANYFDERDRQAVTKRCVNRLQKLGYQITLEKLQMAA

SEQ ID NO: 371974 - protein, 410 aa, unidentified
METVIERCAGLDVHKDTVVACVRVSGPGGVREQQTHTFGTTTAQLLTLRDWLTGHGVTVVGMESTGVYWKPVYYVLEDALECWLLNARHLRNVPGRKTDVADAAWICQLVAHGLVRPSFVPPKPIRELRNLTRYRKAQIEERTREAQRLDKILQDAGIKLSSVASDVLGVSGRAMLRALVAGSRDPDALAALARGTLRKKLPALREALRGRFGPHHALLVGTILTKLDFLDEALAQLSAAIEQVLAPFAAAAALLRTIPGVDRRTAEALIAEIGVDMTRFGSAPRLASWAGMCPGNNESAGRHGTGKTRKGSKWLRTHLTEAAKAAAGAKGTYFAAQYARLRGRRGAARATVAVGHSILTAAYHILARREPYRELGADFFRRRHSREQQTRRLVRQIEALGYQVTVVEAA

SEQ ID NO: 371975 - protein, 381 aa, unidentified
MKTVHTKRTGQAARPSVGADRSVARVVPSLLPKSSNSCRGYPSPHFSQGRARLEQIKSIKEDSLLEVPLIFVGIDVSKAQLDVAIRPSAQSLSVSNDRAGIKSLIKQLKKLGPQLVVLEATGGLERQVLSALMAGEIPVVMANPRHIRDFAKSTGQLAKTDRLDAAVIAHYAEAVRPKPRPLPDEVSLELRALSARRRQVVGMIIAEKNRLATASKAVKKRITAHIAYLEQELNDADQNLDRFIEKNAAWKENQQILCSTPSIGPVSSRTLLVELPELGALDRKKISALVGVAPFPRDSGTLKGRRTIWGGRASVRSALFMATVAGTRFNPVIRDFYKRLKAKGKPSKVCLIACMHKLLTILNAMIKNKIRWSGNFAHQTT

SEQ ID NO: 371976 - protein, 351 aa, unidentified
MQTQSKRIDFSGQNFYCGIDTHKKSWAVTIDTDDIVLKTFSQEADPELLVKHLRKNYPGGNFIAGYEAGYFGYGIQRQFESLGVNCVVLHPADIPTSDKDRDQKRDPRDSRKIAKAIKNHEVSSIWIPPVSLEQDRQLLRTREKLSKDKTRIKNRIKAFLQIYGIKYPLTFSQPGSHWSARFIKWLETIQLNEPTGTEALRSLVRCLRFQRGEILTVSKQIRKLSQDDKYEQHYLRLMKKPGIGMITAMTILTETGDINRFRTADNFRAFLGLVPRSHDSGDKEHPGRITKRANTHLRYLVVEITWTAIRYNPYYLNIYKNYLKRMKGNNALIRTAGKLTNEIFYCLKKEA

SEQ ID NO: 371977 - protein, 404 aa, unidentified
MFDTEDVGVFLGLDVGKTTHHGHALTPAGKKVLDKQLPNSEPKLRAVFDKLAAKFGTVLVIVDQPASIGALPLTVARDAGCTVAYLPGLAMRRIADLYPGEAKTDAKDAAVIADAARTMPHTLRSLELTDEITAELTVLVGFDQDLAAEATRTSNRIRGLLTQFHPSLERVLGPRLDHQAVTWLLERYGSPAALRKAGRRRLVELIRPKAPRMAQRLIDDVFEALDEQTVVVPGTGTLDIVVPSLARSLAAVHEQRRALEAQINALLEAHPLSKVLTSMPGVGVRTAAVLLVTVGDGTSFPTAAHLASYAGLAPVTKSSGTSIHGEHAPRGGNRQLKRAMFLSAFAALHDPASRTYYDKQRDRNKTHTQALLRLARQRISVLFAMLRDGTFYEPRDPKDVELAA

SEQ ID NO: 371978 - protein, 366 aa, unidentified
MNILAIDLGKFNSMCCFFDTETQKYRFQTAATTRQYLTAVLKHHAIDLVVMEACGPSGWINDLCQEHGIKTLVCSTNDDAWKWKNVKRKTDKDDALKLARLAMMRQLTPVHVPKQEVREHRTLIKYRKKLVGRINQIRNSIRGLFVCRGIEIDRGQKAWRSGRELIDSFRKSLGECSMKELWRGQLDLELTQLDALGEQMADVEQRLEAIAKGDERIQRVQTIPGVGRRTAEAIVTTLDDVDRFDNARQVSSYIGLVPRQYQSGETDRNGRITKRGSRLLRTLLLECAWVSIRYNDWSRATYDRIHGGQKTRKKKAAIALARKILVVAWAMLKNKTDWDPERAGIAAQPTVEEGPSRRTDQAAVIA

SEQ ID NO: 371979 - protein, 377 aa, unidentified
MKRIKFVGLDVHAETITVAVAEQEGEVRALGVIPNRVESIRKLVKKLGPVGQLRFCYEAGPTGYAVYWQLTALGAKCEVIAPTLVPVKTGDRVKTDRRDSLKLARNYRAGELTSVWVPDAAHEALRDLVRAREVAKKDQLRARHRLIKFLLRHGRRPPTGVKPWTLNYLSWVKHEVHFEPMAQEATLLDYLNEVEHAELRIARLNLAIEEAVKLTPPKMRAVIAALQALRGVAQVTAVTIVAEVGEVSRFTGARQLMGYGGIVASEHSSGESTWRGGITKTGNAHLRRVVVEAAWAYRHRPSVGETLRKRQAVVSEEIREIAWKAQHRLHTRYQKLMARGKEKEKVVTAIGRELLGFIWAIGVKAEAAQEKTERRAA

SEQ ID NO: 371980 - protein, 378 aa, unidentified
MPSESTVHIAIELGVSSWLIAARLPGTEKPRLHRIEGGDTAALLALFAELRSRASAKLAGEVNVACCFEAGRDGFWLHRLLTAHGVTAYVLEPTSILVNRRARRAKTDRLDAEGMLRVLAAWLGGDRQVCSMVRVPTPDEEDAKRSHREREHLVQEKLRIENRIQALLFTQGIRARPSLRSWARDMAELRTGDGRALLPLLRTELNRLRRRLVLILELIRELEAERAEALAAAANDAMVRKIIALQRIRGIGSNFAAVLVREVLYRSFANRRQLASYVGITPMPYQSGGMDRDRSISRAGNPRARTTLIQLAWLWLRYQPGSALAAWFRERVGTLQGRTRRIAIVAMARRLLIALWRYVETGVLPEGVDIRAEAAPMA

SEQ ID NO: 371981 - protein, 337 aa, unidentified
METTTIGIDIAKSVFQFHGVDAAGQTVLQKKLRRSAVLDTLAKLPPCLIGMEACATSHHWAREITALGHDVRLIPPAYVKPYVKRQKNDAADAEAICEAVTRPNMHFVAIKSVDQQAAMMLHRVRDLLVRQRTMLINALRAHMAELGIIAPQRPQNVLGLIQQLEEDSIGGITDVARSALLSLADQLTSLTQEIRALDRKILEWHRSSETSQRLATIPGVGVLTATAMAASVTDPSLFRSGRQFAAFLGLVPRQNSSGGKERLGRITKMGDGYLRKLLVVGATAILRRVADTQTRTANWIRSLLERKASRLVSVAMANKTARIIWALLVRGGTYRAA

SEQ ID NO: 371982 - protein, 397 aa, unidentified
MDGLHQAPESGVGIIESQPQARKLAKICDTNTWLGNNTAFSRRIEQPISGGEEEATVLKFIRIGVDLAKNFFQVHALEADDGRAVTKKLSRSKVLGFFKSVEPCQVGMEACGSAHYWARELTSMGHQVFLIPPIYIKAYVKRGKNDAVDAEAICEAMSRPGMRFVPIKTKDQQAVLMLHKSRDLLIKQRTMSTNALRSHLLEFGVITAQGVNRIDGLIEMAKSDRDVPEMAKELIDILAQNLDEIDAAIVAVDKKIAAVCANDARMQLLDLVPGVGKIIASVVAASVPEPAIFNSGRDFAAWLGLTPRQNSSGGKAKLGKITKKGNRYIRKLLVLSSTSLLRSVAKRTGALRDWIAALLLKKPARLVTVAIANKLARIMWAMLNTGEGFREEIFMKA

SEQ ID NO: 371983 - protein, 362 aa, unidentified
MAKCTTKTGKVTIGLDLGDRYAHFCVLDAEGSIVEEGRIQMTEEHLRRRFDSCARARIAIEAGTHSPWVSRLLTECGHEVLVANPRKLRMIYENDTKNDRVDAQWLARVARLDPKLLSPLKHRGAETQADLAMLRARETLVAARTQMVNHVRGAVKSVGGRLAKCSTESFHKKVPDQIPQQLQPWLTPLLEMIQRMTEQIHQYDKTIDQMGKTKYPETNRLQQVAGVGPLTSLAYVLTIEDPKRFQKSREVGPYLGLVPRQKESGKSAPQMRITKAGDTSLRKLLVGSANYILGPFGPETDLRGWGLTLAKRGGKNAKKRAVVAVARKLSVLLHRLWITGEVYEPKRKTNRGAKKEKCLVRA

SEQ ID NO: 371984 - protein, 330 aa, unidentified
MGVVGVDVAAESVEVVARQGGRNGKAKRFAQNPKGHRRLISYLQRLAPERVVLEATGVYFLDLALALHYAGLPVCVINPRSFKHFAELKLTGSKTDPIDAALLAEYGECLPPPLWQPPREAALALRELGRQVNRLVGERTAAKNRLHALSATKTTPALVIDDERQGITALEQRIDRLRAAALEQIHNDAVLQAQFRALIAAKGVGEVSAIAILAELCALPEYLKAKQLARHAGLDVRLTHSGSSVSRPGRLSKAGNAYLRAALFLPAMSAIRHDPYARAFYEALVARGKKRLQAICAVMRKYLTGLWACFRTQQPFDSSQLFSDIHMQKT

SEQ ID NO: 371985 - protein, 386 aa, unidentified
MQKLNDLSRSLTALEPDGTLIAVIEMSLSSWLVAGIVPGVERQPLKKLAVDESALLKLLHRWREEAEKAGRRIERIAVAFEAGRDGFWLARWLKARGIEAYVIHASSVAVSREHRRAKTDRLDTELLKRSFLGWLRGERDHCKMVEIPTMKDEDAKRPNREHDSLIGERSRIVNRMKAALVRLGIRGFNPKLKRASTRLDGLRTPEGEPIPPNALAELRRDMERRRLVNNQIRQIEEERLKRIEQAPCDGPHVMVRLLARVMGVGIETADMLVHEVLSRNMRDRRAVARYAGLTGSPDESGRKRREKGLARSGNVRVRRGMIQLAWRFLLHQKNSALTKWFRSRTENARGTRKPMIVALARKLLIALWRLVREGIVPDGVVLRAAQ

SEQ ID NO: 371986 - protein, 380 aa, unidentified
MPEAVIGLDVGKSSHWACVATRDGEVLLSAPVANREGDLDSLFGRFPDALVVVDQSRNIGALALARARAAGMSAAYLPGLAAHGAARLFAGDAKTDERDAMVIAKTALGIPDALLPVGDPGPTIAAARALAAQRNFLTCENTRNKNRLRSILLESCPAFEALVDLSDGPQLRLMASLGGAWSVADAGPRRAAALTRGAARGKIEALVRSTTSSTRPDASVVAAEDRAVKLLARRISENSAEIEAITAEISALLEGDDTYRCLLTVPGIGPKTASELAISIDIEDFPSHDRLASYCGLAPRNRQSGTSISSVTASRQGNKRLKNLLIFSCNCLTRTEGRWGDYYTRCRERGMSHGKALKALARKRLKVIYAVMRDRVPYAA

SEQ ID NO: 371987 - protein, 444 aa, unidentified
MEVTFTHCAGLDVHKKTIVACSITANAQGEKSVETRTFGTMTEDLLVLSDWLMGQGVTHVAMEATGEFWKPAFNVLEGSVEVWLVNAQHVKNVPGRKTDVQDAEWLAELLRHGLVRASFIPPLPQRDLRDLTRQRAILVQDRATVVNRLQKVLEWANLKLSCVATDITGVSARAMLEAIVQGQSDPQLLAALAKGRLRHKHAELQRALSGRVREHHRFLIANHLGHLDYLEEQIALFDEQIKQHIRQQSVSVDSSDDATPDKEGAHQPAPSTPLPPVAWVEAVILLDTIPGVGSASAEQLLAEFGADMSRFPDEAHMASWCKICPGNRASAGKRYSGKTGRGSRWIRPLLVQLALAAKKVKGSYPALLYRRLVGRRGHKRAIIAVAHHIVKAMYHVLLHHEPYREPAATHLDQQLKERKKARACRELVELGYRVTIEPIPAPAA

SEQ ID NO: 371988 - protein, 341 aa, unidentified
MPIVTIGLDLAKSVFQLHAIDEQGAVIVRKRLTRGQVLPTLEKIPPCLIGMEACGSAHHWAREIQVLGHEVRLMPAQYVKPYVKQNKTDAADAEAICEAVRRPTMRFVAVKSIEQQAVMLNHRGRELLVKQRTMLANAIRAHFAEFGIITAQGTQNLCKLKTAAEQAALPKNAMDVLDLLFDQLDALNKSIKALEMRIHAWHKSNKTSLRLASIPGVGPLTASAIVASVGTAGCFGSARSFAAWLGLTPREHSSGGKQMLGGISKRGDGYIRKLLVHGARAVVRMRSRKSAEPMPWLDGLLERKHRNAATVALAHKNARVVWALLNTGKVFEKGASQVQMA

SEQ ID NO: 371989 - protein, 407 aa, unidentified
MPIFVGDDWAEDHHDVCLEDEAGGVLQRRRVPEGVAGVAQFHSMVAEHVEDPSEVIIGIETDRGLFVDALVNAGYEVYAINPFSASRYRDRHSSSGAKSDPGDAKVLADLVRTDRHNHRQIAGDSELADAVKILARTHQNLIWSRSRQANNLRSTLREFYPAALDAFGEDLTSSDCLAILRVAPSPEQGLALSISNMQGALKHAGRKRNIASKADEIYEQLRSQHLQPRPLIATAFAVSVSASVEIITALNVQIAALEKELTAHFEKHPDAEILKSLPGLGMTLGARVLGEFGDDPSRYSDAKCRRNYAGTSPITRASGTKRAVLARVARNRRLSDACYLWAFASLQRSPGARALYDAHRAKGDSHHQALRALANRLVGILHGCLRHHCLYNESIAWPTKQERGKAA

SEQ ID NO: 371990 - protein, 342 aa, unidentified
MKQYVGLDVSQKETSVCVVNEAGQLLFEGKVKSDPGALTALLRERAPRAERIGFETGAMASWLWHELRRVDLPVVCIDARHAHAALSVRMNKSDQNDARGLAELVRVGWYREVKVKSEESQKVRAILVARSRLVAIRRDIENQVRSLIREYGLLFPRAIGKQFRNQVDELLGEDHQLLGVIAPLLLIHEHICEQQSKFDDEVRRLAKSDETTRRLMTVPGVGVVTALTFRHTIDDPSRFRSASTVGAYLGLTPRRNQSGETDITGKISRWGDRLLRSYLFEAATVLPYRTKKWSALKAWGMKLAKRIGVKKAKVAIARKIAVILHCIWVDGTSFDWGQAKPA

SEQ ID NO: 371991 - protein, 411 aa, unidentified
METMIARCCGLDVHKARLTACVRLLVDGAVSELVETFGTTSSDLLALRDWLLAHEVTHVAMESTGVYWKCVYYLLEDDFELLLVNARHLKHVPGRKTDTIDAAWIAQLLACGLLRASLVPPRPIRELRDLTRYRKALIYERSRSVNRLHKLLEDAGLKLSCVATDVMGVSGRQMLRALIEGQADAEALAELAKGKLRKKLPALRKALEGRFRAHHAFLLERMLAHIEELEDDIEAISARVEEQIAPFEPAVQLLRTIPGVERRSAEVIIAETGADMSRFPSAGHLASWAGVCPGQNESAGKRKSTRTRKGSPWLRATLIESSRAASRSKGTYLGERYHRLARRRGDKKAIIAIAHEILTATWQMLTTGELYREQGAIIISQREAENARRRAIRQLERLGHRVILEPLPEAA

SEQ ID NO: 371992 - protein, 345 aa, unidentified
MTIVEDARAITGGVDTHADTHVAAALDPRGGLLGVKEFPATAAGYAGLLSWLAGFGTVALAGIEGTGSYGAGLARHVAATGIRVVEAVRADRQDRRRNGKSDPLDAVGAARAAQSGRAAGAPRGRDGAVEAIRALTGDGRSARNERTQAINQAGSLILTGPDDLRARFARHSAAALAEAIAALRPRPGDAAGYAVRVALRELGRRVEFPDGQLERLDELIVPLVTARAPGLLALHGVGPDTAALLLVAAGDHPERLRSEAAWAHLCGTAPIPASGKVRRHRLNPGGNREASHALWRIVITRMSSRPATRAYVERRTKEGLSKKEIIRCLKRYAAREVYRHLRAGG

SEQ ID NO: 371993 - protein, 295 aa, unidentified
MDIHKKVVVATVQGEGICKETRSFDTFTRSLTQLREWLVSLGITHVAMESTGVYWKPIYNVFEGFIPHIWIVNARHIKNVPGHKTDKNDSEWICQLLMAGLLKPSFIPPKAQRELRDLTRYRRKLIQSVSANKNRIIRILEDGNIKLSSVLSDTSGATAVKLIDMLCDGKQITLSDIESVRHGRCQHTKEEMLEACAGCLDEHKVYMLGKIRECNASLKEDILDFDKRIKDVLSSYHDAIERMCEIPGIQNRVCEDLVAEIGLDMSNFPTSAHLCSWAGMCPGNNESAGKKKSSR

SEQ ID NO: 371994 - protein, 394 aa, unidentified
MRLWVGFDVGKAFHWVCILDDEGEVLLSRRVEAKEWDIENCCEEIAALGSHGERRVATDLVGGSATLLEAILLERGERVFHLPGIAVNRARDGYRGENKSDAKDAHVIADQLRTRWQSLHEVRPRSDEAAELRALVAHRRGLVEDQARLITRLRALLLEVFPGLEAALDLRTDRALLAVTRVTTPSAARRLGVSRLARWLRERGVRRSEDLAEKVVGAAKAQRRELPAAQAKAALVSEMAEEVLRARSRVAAVDDRLEEFMAARPEAEIVQSLPGMGPLFTAEFLSEVGDSSRFGSADALAAAAGLVPATRQSGGASFQRRARRGNRTLKNLFYRSAFSSTVHHTPSRAYYLKKRAEGKAHHRAVIALARRRVNVLWAMLRDGELYRDPVAEAA

SEQ ID NO: 371995 - protein, 492 aa, unidentified
MGTCELESGDVALAAIPIRKMTIGIAQTLLLIIDWRIAMPKRTTGRPELKPVNVGAAAIDIGSKMHMAAVNPASTDVPVRSFGTFTQDLHDLADWFKACGVTSVAMESTGVYWIPVYEILEQRGFDVILVNARYAKNVPGRKTDVSDAAWLRQLHSYGLLRGSFRPDAEIAKLRAHLRQRERLVEYAAAHIQHMQKALMEMNLQLHHVVSDITGATGMRIIRAIVAGERNPDVLATYRDVRCHSSIETIRAALVGNNRDEHVFALTQSLELYDTYQAKMLDCDRKLESLIATLTDKGAKPVGKLPKPRIKTKQVNTPTFDVRTALYGVLGVDLTEIHGLGPSLALKLVGECGTDLRAWPSAKHFTSWLCLAPGNKISGGKVLSSRTRRSSSRAAALLRLAAATVGRSDTALGAFYRRLSSRAGKSKAVTATARKIAVLFYNTLRHGMSYKDPGADHYEQQYRSRVLANLQRRAKSLGFVLQAIPGDAEPAVS

SEQ ID NO: 371996 - protein, 344 aa, unidentified
MIYIGLDVHKDNITACVLTARGKVKFEHDYKRQSQSWDCLSELLGYRDRDGSCFLMESGTYAYPPYRFLTDHGAEAHVVHARSLKVITDSDRKTDRVDAMAIAKMLRLWKRGEIELSMAFTPTRDQCELKDICRYREQISKEIGDETRRIKSHMARNCQAMPPETDNFQTRKARRFVAETYRDDMTLSRRMARLDELFIERDRVQREVESRLPEDSRVALLEQIPGIGRQSAVQIMSMIVDVDRFPDAEHMCAYFGMVPRVRDSGGKEHHGRMTKNGDRMMREIMERATESHVRNCESSVTEFYRRMLPRMGQKKALITASRKMLSVIFAVLKRGTPFRPHLDG

SEQ ID NO: 371997 - protein, 403 aa, unidentified
MNSVGIDISKGRSTIAVMRPFGEVVISPFEVRHTDSERSELARQLKSLDGETRVVMEATGNYHASVAKLLHNAGLYVSVINAKLVHGYGNNELRRVKTDRKDAVKLANYGLDRWLTLPRYIPEEDTRLLLKNCYRQYRQYSKVQTVLKNNLISLLDTVFPNANRLFSSPIRGDGSEKWVDFVAEFWHCRCVSEKSQKAFTNKYQRWCRKHGYNFSEAKAHTIHAEACGHIDVIPKSETTKLLVEQAVAQLRATSAALAALKHEMQALASMLPEYPVVMDMFGVGPTLGPQLMAEIGDVRRFYSKKALVAYAGLDAPPNDSGDVTGRHKSMSKIGASSLRRTLFLVMTVYLQNAPLDEPVYQFMDRKRAEGKPYRVYMMASANKFLRIYYATVKAYLESLEHTA

SEQ ID NO: 371998 - protein, 334 aa, unidentified
MNFKNFIGIDISKGTFDIALIKDNDQSAIGSDNFSNSSNGIIKLEEFLKKQSLNMVETLFCMEHTGIYCRLLSHYLTENKYNVWLEMPVNIIRSLGMQRGKNDVIDAKRIAEYACLRKEKTVLWQPPREVVIQINDLLTLRDRLVESRKSLKQPIKELFDAGLKDAAKLIESKCIITLNAIDKEIKQIEKDLDNKINKDSNLKRLFKLATSVPGIGKITAMYMLYCTNEFTLYLNPKKLACYCGIAPFEHTSGTSIRGKTRVSHFANKKLKKLLHLVALSTLKKNKDLSAYYVRKLSEGKGKMLVINAIRNKIIHRLCAVMRRGTPYQADYLLA

SEQ ID NO: 371999 - protein, 404 aa, unidentified
MDVLYERCAGCDVHKKTVTVHAVVPDSSEIRTFGTTTRELLMLIEWLQTLKITHVAMESTGVYWKPLYNLLEATGMTVYVVNAAHMKAVPGRKTDVHDAEWICDLMRHGLLRASFIPPRPQRELRELIRYRITLVGERADEANRIQKVLEGGNIKLGTVVTDILGKSGRAMLGALAAGHSSPEEIAALADRHLQATREQLVDALQGRLTHHQRLMLQLQLDHVRYLDQQIAVLDTEVTACVAPFDAQMTQLDTIPGVNQRVAEVIVAEIGTDMTRFPNTRHLSSWAGMCPGNNESAGKRRKTRTRKGNPTLRRTLTEAGQAAGRTKSTYLGAIYRRIAARRGRKKAAIALGRHILEIAYHVLRDGVAYEELGINHYDERKKDAVVRNAIQRLERLGYKVMVEAA

SEQ ID NO: 372000 - protein, 417 aa, unidentified
MPEYAALVAIDWADQKHAVCLYDPSTGAREQTIVKHTPQALQEWALGLRQRFAGQPIAVCLEQSRGPLIYFLLQYEFFVLFPINPATLAKYRQAFSTAGGKDDPSDADYLLDLLQHHRDRLRVWRPDDEKTRTLSLLMEQRRRLVNDRTRLSNRLTALLKGYFPQVLDWFEDIRTQLVCDFLARWPQLSLLQRARPATINQFLRSHHSTSKATNARRLAEIKSALPLTNDAAVITSSVLNVKVLVAQMKIVIAAISEYDRHIEALCLTHEDYQLFAALPGAGLIHAARLTAALGSDRSRWQSADELLCFSGIAPIIERSGKQFRVRWRYFCPKFFRQTFHEFAAQSTQDSFWARAYYYSQRAKGKDHHAAVRALAFKWIRIIWKCWQTRTPYNEFIYLETLRKKGSSLLKFAADYQP

SEQ ID NO: 372001 - protein, 336 aa, unidentified
MYNVGEVRTKQRRRCSMRYYGCDAHKRYCVFSYMDKDGDHGPSLRVSNEREHFINFLETLPPGSCIAIETVGNYYWMVDEMEKAGHDPKLTNAGKAKLMMGQLNKTDKLDAEGLALLLRNGTLPEVWIPPGELRDQRELPRMRMTFVGVRTKLKNRIHSYLSKYAIEIKEVRDIFGSKGRKILGKRIEELPQQTKRSVQAHLELLDQVGAQIKSCEEQIKAVVKETAEINLLKTIPGVGDVLAIVIAMEVGDVSRFPRAQNLASYAGTVPRVKDSGGRRYYGRVRPDVNRYLNLFRLPVSKRVIRMSENSFIGCGAFGGDAHAAKTAYTCIRRKGA

SEQ ID NO: 372002 - protein, 370 aa, unidentified
MEKRSMFVGLDVHKESIDVSVAEEGRQGEVRHYGAIPGDLEAVAKVVKTLRAADRRLRFVYEAGPCGFGIHRYLTAQGEECVVVNPSSMPKRSGDRIKTDRRDGEALARLHRAGELTAIYIPTREDEALRDLVRAREDAVGLCTQARHRLKAFLLRQGRRYPGRAGWTRPYRRWLADLSFPLAPQHIALQEYRDTIDETERRVERLTDQLQQLTPAWRWAPVVDALQALRGVSFVTAVGLVAELGDIRRFTRPRELMAYLGLVPSEYSSGPSVRRGGITKAGNPHTRRLLAEAAWAYQGVPRIGRQMLYRQEALPKSICEIAWKAQLRLTSRFRKLVARGKARPKVATAVARELTGFIWAIAREVPPPSA

SEQ ID NO: 372003 - protein, 415 aa, unidentified
MELEEVFYDRACGLDVHFSFVTACLIKPGPGKRLKLEEQTFPTHLEGLKRLRSWLKEQSCQAVAMEATGVYWMPVYAALEGACKLVVANPQRIKALQGQKTDRKDARWIAQLVRHGRIKPSFVPPPEFRAARKLARCRRQLIHARTTIRNEVQRTLAESGITLAALVSDVFGMSGMAILEALAQGKSIQEHLPSCLRGKLKSKLKPLAAALEAPLDEVSRSILNMQLERLESIEQHIGTTERDLFRVLAPHADKLRLLETIPGIARISAAIILAEIGVDMAVWPTEKHFSVWAGVAPGCRETGGKAKRAPVRKGNPYLCTILMECAGPAAKARACHLNPKYHKLCSQLGSKKKARMAIAHKLALIIYRNLGTDRKYQEPEPKPPSERTKRRILQTRVRDLERLGFQVNLVPVDAA

SEQ ID NO: 372004 - protein, 356 aa, unidentified
MQTQFTKKIDFTGKQLFIGLDVHKKSWSVTILVDGTEHRTFTQPPDPESLMSYLQRMFPGGAYNSAYEAGFCGYAIHRRLNELGINNIVINAADTPTSQKDKLQKRDPVDSRKIARSLEKGSLHGIHIFDRELEELRSLNRTRFYLMRDLRRSKTRIKSFLQYYGEPIPVEFDNNQWTLKFVSWLKQVKMQTMSGQDAFSNLISSYEYHRSQLLTLSRQIRERIREYDRELYTLLKSVSGIGPLTASALITELGDINRFTNIDQLGSYVGLVPRVRESGETTHTGGITFRCNTFLRTLLIESSWQAIRMDPAMMQYYHSHLTGNKGHKVVIKVARKLLNRIRYVMKNRKPYITGVV

SEQ ID NO: 372005 - protein, 482 aa, unidentified
MKKKNIYVNQSQELLSMFEKAGNNEKIMCVPIDYAKKDHIVMFCNGYGRILRKPFSVKNSPEGIKYLTEQVTRSCSRRCIDSKHVFFGGEDVGSYAENFANTLRAGGWIVAGVNAHDAKEQRSNIQASTDRLDLMGIASMLLNRRANCSPAQSGIYRNLRTLVRHRRNLVSMSTEEKNRIHTVVDRLFPGFLDEKKTGILPFSKSSLYLMENRFSPLQIHRRKRHKLIEVLHRYGTSKPENAAAKLQEYAVRVLNTPNEYIFTLQLSLVQHVKHFRCLQDSINQLENEIALWLAQTQGAFLTTFRGIGIVLAAGVSAEIGNPYEQKPLNNLVSYSGIIPRVKQTGGPQGKTRTGKVAKRCNRILKDYVVQSALHMGLHGPEDLMADYKRREAAGQHADFGIGRRYLRKAMCLMRTSQIYMPQRLRNTEVKPEERAGYYLMSWPSLRDKWNKAGGLEAAFEKNRPLGQWRNMVQELYEIKLKL

SEQ ID NO: 372006 - protein, 346 aa, unidentified
MLHLGLDLSRKRLDTCLMTDAGEVVATSQEGVDGYSLGRFADRLTGFGEPVRGVIESMTGARFIHDMLEDHGIDIEVADAAKVKGFAPVTAKTDRIDAAVLADLSRRDLIPAIWLPDPATRAARELSRFRIGLVKHRTMFKNRIHSVLMTHGIANPTTDLFGVEGRRLLNDLEVAEPWASNVAEAIEIIEDLNRRIERYRRRIIEMGLSYHYVEQLITIPGVGAVLGLTIAAEIGDIARFGSPQHLVSYTGLAPRVYQSGAVDRRGPLTKHGPKHLRWALIEATTHAARHRAYAERYLAIRQRLGPQRGPKIARIDVARRIAVAAWWMCTRNQPFAPASPVSPLAA

SEQ ID NO: 372007 - protein, 392 aa, unidentified
MYIVGIDIGKNHHEASIVSPEGKQIGHSLRFATTHKGADSLMSFIFNNIGNSSCIFGMEATGHYWYPIYSFLKARGYTIYVINPIQSDSLRKMYIRQTKNDSIDSFLIAEVIRFGQFTTTSMADENILAMRQLCRYRDSVISSRTEIKLRISTIMEQIFPEYEKQFSSLWLSTSMGILEKYLTPENIENAPIDELFEIIKDKSHNKLTMKKAISIREAAADTFGIKIAQDAFSFQLKQLIDRMNFLDKQIEALDCQILEYYEKFDCYLHTIPGIGMIAAATILAEIGDINRFKSSSALVAFACIDPTVRQSGEFSNTHNHMSKRGSPYLRHAIFLAATTCSFHNSPLNAYYKKKREQGKHHLTATGAVARKLTTVIYAVLRDGKPYEPKSFC

SEQ ID NO: 372008 - protein, 355 aa, unidentified
MNQEKYIGMDVHQATISVAVLDSSGKLIMECILETKAATILEFIAGLRGTLSITFEEGTSAAWLHDLLKPHVSHLVVCDPRRNALLKDGSKSDRIDARKLAELLHANKLHAVYHGEHGVRTLKELGRSYLTITKDLTRVMSRIKALYRSWAIPCSGATVYAPRHRDEWLAKIPHPGVRLRAERLYQQLDLLQPVRQEARRDLLVESHKHHAVELLRQIPAIGPIRAALLVALLQTPHRFRTKRQLWAYSGFAVESHDSGEYRFARGKLVRNRERITVRGLNHNHNHDLKNLFKGAALSASTRPGPLCDFYVALVEKGMRPTMARLTLARKMAAITLTIWKKGVEFDAKQLNRQAA

SEQ ID NO: 372009 - protein, 385 aa, unidentified
MNTFIGIDVAKSKSSFCILDPEKGKKPVKEFQMSRDGFNSLLEQTKGFDHPAFFMESTGRYHLTLLQYLLNHEQETFIVNPVLIKNYSKAHTLRKTKTDIVDARLIADFSHHNSGKLRKAEFGLIEEVRSLARRREQLAEEVAKAKTQLKGDLSVAFPELLTVDVFTKGILSLLSLYPSPQFVLSASIEDISSALNDGSKGRGSTITADKIIHMAQDSIAIEAYGPMVKDSAKNLIFIQEREKAITKTFLELIKKDHKSESDILESIPGIGKITAAHFLAEVGDIANFSRYQKLIAFCGTDPGIYQSGTILKQGRITKHGNKSLRKYVYLMAFGTLKYSPFFRAYYDKKRNEGFSHRKAMVALMNKLLKTIFALLTKGETFVVPQ

SEQ ID NO: 372010 - protein, 397 aa, unidentified
MVVVAVDVGKNTVACSVTAEKRHRLLGPVDFAMTRAGLAATLRRIGEVIGSEVSVTVGIEAAGHYHQPLMAPVSWPAGWQLLELNPAHVTEQRRVQGRRRVKTDAIDLEAITELVLAGQGSPVTDRAVVLGELAAWVHHRTRRVEARTAVKNQLLGQLDRAFPGLTLALPDVLATKVGRLVVEHFTDPGRLASLGEARFIRFAATRDLTVQRRVAGRLIAAAHDALPTPDAAVARAMVANDLQMLKVLDQQVAAAEGELGALLPVTPFAVLTTVPGWGIVRASGYGAAVGDPGRWPGPAQIYRASGLSPVQYESAGKRRDGRISREGSVTLRRALIDLGIGLWLNEPNAKTYGAGLRARGKKGGVIACALAHRANRIAYALVRDQRPYDATRWTPEA

SEQ ID NO: 372011 - protein, 418 aa, unidentified
MKVVFPTCCGVDVHKSFLVATIIKTPENSLQPSYQKRRFSTFNSNLNRFADWLHENDCLDVCMESTGKYWVPVFNILEKRGIRVVIANPKWVKAVKGNKDDTKDSKWIGDLFRIGLVKSSFIPDKDIRILRELTRYRYKLTSMKSSEKNRFQNAFTVCNVALDSVVSDMFGKSATAITDYLTSDKNFNAKHCVSLLQGSLKKKADDVLLSIEGYEITAEQKTRIGIIRDHLRYIDTLIDRVDACINTLVDKYEGYIVLLCTIPGVDRSSAITILSEIGVDMTQFGSSKRLCCWAGLTPGNNESAGKKKSVRISRAGVYLKPALVQIAHAAVKDKSSAYYALKYERIAKRRGKKRAIIAIARMILTAAFVMLSNLEEWNPVDLYKVDMPEHLKEKQLAKAVKQAVRFLETLGITVLDST

SEQ ID NO: 372012 - protein, 349 aa, unidentified
MAIVGGFDIHRRQVTFDYLDTATGQVRRGRIEPACRQVLRDWLAERFAGRDDVTFAVEGCTGWQFVVKELHRAGIAALLAEPAGTAGLRGSKKRAKTDKTDARHLRMLVAEGRVPASWIPPAQVLELRALLQLYRDLREEHTAWTQRVHATLFHQGVPSLAGRLGDPKARARLATAPAEMGLSAAGAQAVVVALRRMEDLEAELAPLHAQIPAFARRQIGCKTLAAELYGVGSLVAAIVWAFLGDTRRFSSSAQAVRHTGLDVTVHSSDAKGPPGRLSHQGPPILRWALFEAGHQGSRLTSPDHRYYADVAARIDPNRAALPVARKLARRSHHILRRLGDQACAPVPGW

SEQ ID NO: 372013 - protein, 318 aa, unidentified
MKKAFFCGVDVSKDKIDVCFLTSIASEKAKFETLPNNYDLIKVYFNSFKNDEILVVFEATSNYHLALQKALSDLNIRYNVTNPYKTSLFLKHLNTIKTDVSDSYGLAVYARFFKSEILPDKYNAEYLQIKSYNSTLNLLQKLNTQLKNFKQSQKNVKNSVIDDVIENLIKEIAKLQSMLQKLAFDLVKKTIPETEEIIKSNKGFGIDLALNLFPQLHFNRDKSEKQFISFLGLSPRIFQSGSSVHKSQKINKMGSSNIRRILFMSALCAIRFNEKFKARYDRLIANGKKKMVAIVAVMCAIVRYLKSLFPFNAEIRAI

SEQ ID NO: 372014 - protein, 387 aa, unidentified
MIYCGIDVAKHKHAVSLLDEQGEQVKPVFMIENTRPGFDRLNQELGGVAGPITVGLEATGHYWLALYDELSKRGHALIVLNPMQVAAYRRSGVRKVKNDRHDALWIADFIRIANLPATSRNVPTILQMRELSRFRFWLSEQVGDCKRKMLTILDRVFPEYERLFSNVFIKSSRQVLKTAVSAQEFADYDLSELALLLHSASRGRFGDQQAERVLTAASQSVGIGFLANAARVEMGCLLDQIDLLEDQRSRVDQAIELLMQQIPQFITSIPGIGPVTGAAILSEIGDIQRFDAPEKLVAYAGLDASVYQTGQFEASVAHISKRGSPYLRHALWQSAIVAARYDPDLLAFYQAKRKEGKHHNVVIGAVSRKLVARVFIVLKEQRPYLIR

SEQ ID NO: 372015 - protein, 407 aa, unidentified
MRITCGIDWAEGHHDIALVDREGTVVAKQRIDTGVAGFTELLGLVAEHADEVADVPVAIEMDKNLIVVALQAAGFPVYAINPRAVARYRERHHQAGGKSDPGDAIVLANIVRTDLPCHRMLPAISEIGLAVKALARQHQEAVWARQLTVNRLRSVLLEFFPQALAAFPNLTHKAALEVLHAAPTPAHGLKLTHKRVVTLLRRSGRGDRPGLADAIMAHLHAPALRQSPRVEAALGQAVVGLLTIVQAMQTAIAALEAAMTAEFDHHPSAGVLRAAPGLGPVLAARVLAEVGDDPSRFVTANNLRAFAGTAPITRASGRSKVVNARQVKNKRLSDACHWWAFAAISKSPGARAHYDRRKAAGDSNNAALRNVANKLLGRLWWCLTNNQPWDEDAAWPSLANGRQQTAA

SEQ ID NO: 372016 - protein, 320 aa, unidentified
MTAFTPIGIDIASKKFDAAIWIEGKKYKNKVFANTPTGFHAFLLWLAPYGPCHICMEATGAYSLPLATYLYDAGYPVSVENAARIHAFGQSELIRNKTDKGDAKMIARYCHLHKPPEWKPVPVNERKLQVLINRLNTLKEMKRMEENRALTSETIVQDSIQKVIAALDEEIKEIEQAIKKHIDNDPDLKKNQALLESIPGVGEILSTTLLGYVGDMSRFSSNKALVAYAGLNPMLKESGCWKGSTKLSKKGNALLRKALYMPAITALKYNPVVAALCNRLKEKGKWGKCLVCAAMKKLLQLAYGVLKSGKPFAAEIPLAR

SEQ ID NO: 372017 - protein, 370 aa, unidentified
MGHKSSSSKLYVGMDVHKESIDLAVAEEGGEVRHHGQIGGDMNALWRAVRKLESLGRELVFVYEAGPCGFGIYRGLAARGHACWVVAPSNTPRRARDRIKTDRRDSLKLAGLARAGELTSIYVPDVRDEAMRDLIRAREDAVMMQRQARQRLAALLLRNDVRYAGKTAWTAAHRRWIADLKLPQSAQRLAFEEYVQAVEEASARVQRLSQCIEQELAHWRWRPVVAALQACRGIQLIHAARMVAELGDLSRFSHPRQLMGYLGLIPGEDSSGEHRHQGAITKAGNSSARRALVEAAWAYQYSAKVSALIARRQVDVPKAALDIAWKAQVRLCARFRRLAARGIHRNKIVVAIARELAGFVWAIAQHVKPI

SEQ ID NO: 372018 - protein, 358 aa, unidentified
MAAASIAESKADVIVGVDTHKHSHFAKAKDQLGRDLDQLEIPTGTSGYADLLSWAQGLGRVIVFGVEGTSSYGAGLARFLIERNETVIEVLRPTKRDRRLNGKSDSVDADAAASAVLSGKARAIPKAGDQSVEMIRAIRIAKVTAIKARTQAVNAIKAMVVIAPEPIREVLRHLTIARLMATCSRYRVDQVSDPITATKLALRSMSHRYLALHLEIRTLEKQLSNLTQLVAPQLTELPGVGQDVASALLLTAGNGGSRLRSEAAFSMLCGSSPIQASSGLVQRHRLNRGGDRQANAALHRVVMVRLKYHQPTKEYMARRRAEGKSKADVIRCLKRYIAREIYRVITTPRVEQVEANAA

SEQ ID NO: 372019 - protein, 344 aa, unidentified
MDISVLGIDLGKNVCSVVGLDASGAVVMRRRMRRETLIGLAERLPACIVGMEACCGSHHLGRVFASHGHDVRLMSPEYVRPYVKAQKNDDRDAEGIAEAATRPTMRFVELKSPDQLDMQTLHRSRDRLVGERTALINQLRAILLERGLVAPQGKWKLKQFLNVLMDEQGGASLSPRMILLVEDARAQWAELDRRIAAFDAEFVRWAKENEEAHRLTTIPGFGPIVASALVAAVGRAESFNHGRDLAAWLGLVPRQFTTGVKPKLLGISKRGNKYLRKQLIHGARAALPHIAERDTPLGRWAKELMRRAHLNVAVVALANKLARIAWAVLQRRKAFDANAVSVAA

SEQ ID NO: 372020 - protein, 359 aa, unidentified
MRGQRNEISFRGQKIYIGIDVHLKSWSVTVLSETSVLKKFSQHPSPEALHGFLARSYPGAEYHSVYEAGFCGFWIHERLTALGIDNIVVNPGDVPTKSSEKLRKSDAVDSNKLARSLRANELKGIYTPDSASLEMRSLIRLKNSITKDTTRQKNRIKSQLRYLGIGIPQEFLEPFSNWSKRFIAWLKEVETLTPSGRQALDIQIRHLEELRRQKLEMTRALRTLAKTDRFREPLRLIMTVPGFGQATGMAFLSEICDIARFRNAEQLAAYIGMIPMCHSSGEKDGTGDITVRRNAVMRCNLIEAAWVAVRQDPAMNLFFTEQCKRMPKSKAIVKVARKLVNRLYFVLKHQTDYVNSVMS

SEQ ID NO: 372021 - protein, 402 aa, unidentified
MNAVGIDVSKGKSMVAIMRPFGEIVSAPFEIKHTASDINSLVELINSVEGESQIVMEHTGRYYEVLAHQLSEANLFVSAINPKLIKDFDNDSLRKVKSDKADAVKIARYALDKWQNLKQYSVMDELRNQLKTMNRQFGFYIKHKTAMKNNLIGILDQTYPGVNTYFDSPARSDGSQKWVDFASTYWHVDCVRKMSLNAFIDHYQNWCKRKKYNFSQSKAEEIYGKAKELVPVLPKDAITKLIIKQAVDQLNSVSTTVESLRTLMNETASKLPEYPVVMAMKGVGTSLGSQLMAEIGDVSRFTHKSAITAFAGVDPGVNESGTYEQKSVPTSKRGSADLRKTLFQVMDVLIKTHPQDDPVYQFLDKKRTQGKPYYVYMTAGANKFLRIYYGRVKEYLSSLPES

SEQ ID NO: 372022 - protein, 368 aa, unidentified
MGWTDRVLHSSSNTGAMNTERNMIMIKQTSPAAISTIGIDIGKNSFHVIGFDDKGAIVLRQKLSRGQIAVRFANLPRCLIGMEACVGAHHLSRRLQALGHDVRIMPALYVKPYLKGQKNDFRDAEAIAEAVQRPTMRFVATKTMEQLDLQALHRLRTRLVRQRTAVINQIRAFLLERGFAVRQGLNPLRQALPDILAKPGDELSPRMVQMIEGLCEDWHHFDRRVDDLTNEIEALVKADDGCQRLMTIPGVGPLTASAMVAAVGDGAAFRRGRDFGAWLGLVPRQMSTGDRTILGGISKRGNKHLRTLFIQGAWAVLMRSKNWANYSFGPWLEAASKRLHRCVLVVALANKLARIAWSVLNHRQAYQA

SEQ ID NO: 372023 - protein, 358 aa, unidentified
MVDKVTEAAVVGGVDTHKDLHVAAVVDQNNKVLGTQYFSTTRQGYRQMLAWMTSFGTLKRIGVECTGTYGSGLLRYFQNAGLEVLEVTAPDRMERRKRGKSDTIDAECAAHAAFSGIRTVTPKTRDGMIESLRVLKTCRKTAISARRVALQIIHSNIISAPDELREQLRNMTRMQLIRTLGSWRPDASEYRNVTNVYRISLKSLARRYLELHDEIADLDVMIVAIVDELAPELIKRNAIGYESASQLLITAGDNPQRLRSESGFAALCGVSPVPVSSGKTNRYRLNRGGDRAANSALHIIAIGRLRTDDKTKEYAARRVAAGHTKMGAIRCLKRYISREVYTLLRNQNRQVNSIPITA

SEQ ID NO: 372024 - protein, 367 aa, unidentified
MALKIVYKICCGIDVHKTFVVACVASTSDKGITSYESHRFSTYTSGLKTLLQWLIDRNCKDVCMESTSKYWIPVYNILEKGCSIVLAHPKYVKAIRGKKTDKKDAKWIADLFKHDLVAGSFMPPSDIRQLRDLMRYRFKLTCFKSSEKNRLQNCLTVSNIQLGNVVSDTFGKSAQAILDKILENPADTSFDLEPLVYKSLKKKLPELRDAIDGFITPEQAGKLKIIKDHYDNLESRKAELEELILALAAPYQQELAILQTAPGISSNFTAIGIISEIGTNMEAFPSAKHLCSWAGLTPTNNESAGKKKSVRVSKAGCYIKPLLVQCANAVVKSTKHPEMRNRYLRLKKRRGHKKAILPENRSSSSRA

SEQ ID NO: 372025 - protein, 365 aa, unidentified
MDLLAERVCGLDVHQLTVVACTLISGESKRTRVERREFSAMTEGLRELSAWLVEHRVTHVAMEGTGSYWVPVYAALEANASLDLAVVNAHHIKQVPGRKTDWNDARWIAQLLQWGLLRKSFVPPAEFRALRDLTRARRGLVHDRTRQLNRLQKVLVTANVKLSAVITDIVGVSGLEMVHALLEGTKTPQQIAQLARGAMRKKIPTLARALEGTLLDHHKLLLRVVLSLVESLDQQIAKLDDEIVRRFEPYQEELDLLDTIPGVDQQGARAILSEIGVDMTCFKEPGNLAAWAGVLPGNSLSAGKRLGARRRTGNVHLTTTLVEIAFGASRTKGTYFRDKFHRLRARRGGKRAAIAIANKIICAVH

SEQ ID NO: 372026 - protein, 345 aa, unidentified
MEPMYYIGLDVHKRKISYCVKDGAGKVYSEGSLAATRLDLDVWMKTLPQPWSAAMEATMFTGWIYDHLKPHAAALKVAHPLMLRAIAAAKKKNDRIDAGKICDCLRCDFLPECYMAPTAIRERRRTLRYRNLLVRQMVQMKIKISSLLMEAGVSYNKQRLHKAGYFRELLATNPDINEGLKPLLQLCRETVVRLQKTESAMVRSLERDSLLTDRVERLMTIPAVGPITALTWTLEVGDVQRFSSIKKAISYCGLCGAEKSSGSTVQRTPLSKQRNKHLQTTLIEAAKMAPRNSPELAMLYDKEKQKGNANRATLAVARKLVAYLVAVDRRQKEFLTVERENRTAA

SEQ ID NO: 372027 - protein, 325 aa, unidentified
MLGVDVGKAELHGTWRDAETERIRWQGAVPNTADGIRQLLRRAPEAAVVVEPTGRYGEPLIRAAQAAGRAVLLAPPKKARAFLQSEQSRAKTDRLDSAGLALYGLTGRLRPYQLPSPAVDQVQQLLAARRGLSESLAKLRLQQASLPLAAEALAPAIAGLAAQVKALDARIKQAAQAEELAQAVAVLQTVPGIGPTIAPALAACLVTKQFSHPDQFVAYVGLDIRVHQSGKRRGQFGLSKQGDGELRRLLYLAARSAANSTHDPTFARRYQAALAKGLPTTGALNVVARKLAKVAWSLVAHGTTYDPHRVGTQPPPTPTAVPDRG

SEQ ID NO: 372028 - protein, 394 aa, unidentified
MKLVGIDVGKNSHHFCVMDKETGELNVTPSSFPNNKEGFDFLINSLKPYSKKSILLGMEDTGHYHVALLKFLLSNGYTVALINPKTTDLTRKMEGGITKNDKLDTITICDVLDTPERKKQYRITKVDRFDLYEQRQLTRHHHNLKEELNLYCNRLQKSIDLVFPEFNTLFSSKYGVVYMNLLKTFGSAEAIASTDIRTIRKCFEIKGRGGRISLTAEKLKEYAKNSIGISSEVETIQIKHLVRQITLIKEQIAEIDKKIEEFSITNNSPILSIPGISHFSGTSILAELGDIGNYSKPSQIIKFAGVAPYHYESSQYNAQHTAITKKGSKYLRKTLYQIILPVINNNPVFKKYYRLKISQGKGHRCAQGHCIRKLLRIIYHLLETGQSFDPALLR

SEQ ID NO: 372029 - protein, 465 aa, unidentified
MTPQKGKKFRTSEITERLVVTHPYAAGIDVHSAVHFVAVNPGDVPAGFVGDEPQLPKGVRKFGAFTCDLEAIAAWLKACGVKTIAMESTGVYWIPLYELLAGQGFDVILVDPRQTRHAPGRPKSDVLDCQWIQRLHSYGLLTASFRPADEIVVWRGYQRQREMLIRYASQHIHHIQKALEEMNVKLTEVVSDIMGLTGMKIIKDIVRGVRDPAKLAKNRHDQCKASEGEIARSLAGNWREEHLFSLKQAVHMYEFYHRQLRECDEKIEACLGNFADKSGGEILTAKPLRKQRANAVSFDARALLFRMAGVDLTVIEGISELTALTILSEIGTDMSRFPSEKHFVSWLGLCPNHRGSAGKIFNRRVRKGANRAARVLRLAGQACHHAKNALGAFYRRIQARCGGPKAVVATARKIAERVYRLLKHGAEYVRQGEKAYEEAYRVRTLKGMAKKAESLGYKLVPITAE

SEQ ID NO: 372030 - protein, 405 aa, unidentified
MGKVFVGHDWAETHHDVYVEDGAGQRLGKARLDEGVSGVARFHELVSSFVVDPGEVTVATETDRGLFVGALVAAGYRVLAVNPMSAARYRERHSTSGAKSDPGDAFVLAELARTDGHHHRPVAADSELAEAVKVLARAHQSMIWTRQRQVNQLRSTLRDFYPAALSAFDDLASSDALAVLALASTPSLGRGLSRSKIASALRRGGRQRRIDERAAEIQTILRADTLQAPGLIAEAMGASVRALVAVISEQVAQTARLEAELADHFELHPDAKIIRSLPGLGMILGARALGEFGDDPNRYTDAKSRKNYAGTSPITRASGKHHVVLARHARNRRLADVCYQWAFAALTASAGARAFYDQHRAAGDTHHQALRALANRLVGILHGCLRHRTPYDEHTAWGHRTAAAA

SEQ ID NO: 372031 - protein, 488 aa, unidentified
MMHGREKSDSAIVAGKPTNKAGQPAAEPVEPRVEAKGNASQQSTRRTQSRVSVSHALERIRQSVRKKKKLRRQIPEVGEAMGRAAEVVAPSSSIRTDGGCPVVQINDLSRSLAAFDPISTLVVVVEMSKASWLVSGVVPGVERQPLKKLEPDATALLRLIERWRNEAVRAGRPIRRIALAYEAGRDGFWLARWLIARGIEAHVIHSASVAVSRERKRAKTDRLDAAMLMRVFLGWLRGERGHCGMVAIPTMEEEDARRPNRERESLVNERSRIVNRMKSALARLGIRGFKPHLRKAPERLAGLRTAEGTGLPANIIEEFRRDMARLALVREQISSIEKTRAERLERAPDTGPHAMVRLLARVIGIGIETADMLVREILSRKLRDRRALARYAGLTGSPDESGLKSREKGLAKAGNARVRRGLIQLAWRFLMFQKDSALARWYRTRTEGPSGARKTTMIVALARKLLIALWRLVTTGEVPDGVELRPAA

SEQ ID NO: 372032 - protein, 376 aa, unidentified
MPGTQDLCCVALELSQSKWLCAFDPPEGGKMSLHTFKASDHARLVEWLGRQRVRAELALGRPLQLTVCYEVGYDGFWLARLLLKAGIRTVVFDPATFLKPRRGRWAKTDRLDAEGMTRILRSWLGGDSSVAREVRVPTVEEEDAKRLCRERKTLVNERTRLVGRIKGLCALHGILVPGKRIGKRWAAHLDEYRTGDGRPIPPYLRREIGRLLRRYAVIEELITEVELDCQTAAVEPASPFPGKDKVQRLSTLGGVGPTSALLLVAEVYHRSFESRRHLASYIGLAPTPHASGDVSRDRGIGKAGTKLARQTLVELAWSWLRYQSESALSIWWRQRFAGAGMRGRKVGIVALARRLAIAFWQFLEDGLVPEGAVIKG

SEQ ID NO: 372033 - protein, 457 aa, unidentified
MTKRKSKAKSKTFKVPKLPPNLQHLNLSAAGIDIGSEQHLVAVPEGRDKVSVREFGTFTTDLEALATWLKQCGVTTVAMESTGVYWIPLFELLERRGFEVKLVDARHVKNVSGRKSDVLDCQWIQQLHTYGLLAGAFRPADEVCVLRSYLRQREMLTQSSSRHIQHMQKALQQMNLLLHNVVSDITGVTGMRIIKAILAGERDPRVLASNRDERCHHTTATIAKSLVGNYREEHLFALRQAVDLYEMYQAKIADCNQAIIKQVEKQPDISDDEPPTPDKQVRDRDRIREGVDVRDLLFKKSGVDLFAIPGLAADTLLVLASEVGFDMTPWKTEKHFAAWLGVCPGTRKSGGKVLQNKTKHNPNRATQAFRMAAASLSRSQTALGAFHRRIKSRSGGKQAVTATAHKLARIYYAMLTQGTSYVELGQKAYEQRFKERRIDHLKLQAKSLGFQLVPCAT

SEQ ID NO: 372034 - protein, 398 aa, unidentified
MTESSDYESVQVFIGVDVGKDTHHAVAINRSGKRLFDKALPNDENKLRSLISDLKQHGQILLVVDQPATIGALPVAVARSEGVLVGYLPGLAMRRIADLHAGEAKTDARDAAIIAEAARTLPHALRTLKLADEQIAELSMLCGFDDDLAAQTTQASNRIRGLLTQIHPALERVLGPRLDHPAVLDLLQRYPSPEKLASLGEKKLAAQLCKLAPRLGKRLAADIAQALAEQTVVVPGTNAAAVVLPRLALQLITLRKQRDEVALAVEQRVLAHPLYPVLTSMPGVGVRTAARLLTEVACRSFASVAHLAAYAGLAPVTRRSGSSIRGEHPSRRGNKALKRALFLSAFAALRDPLSRAYYTRKMSQGKRHNQALIALARRRCDVLFAMMRDGTFYTPQAS

SEQ ID NO: 372035 - protein, 464 aa, unidentified
MIRSVGIDLHQGRHRARCLDDRAQPCDSFSFQTTPEGLATLEERVFRDGANPIIVLEPAGLPWLMVAVYLRSRHPDCRLVKAKTQKVAALRRYLRGPVKTDRLDALTLAKMPFIDPEQLDEIYLPPAEIHALQRLGRQRKRIEQDITGRKVRISAIVDGYLPGVRKAFNDVWSSPVRAFLGFRLNPFAVVRDGEEALHAFLSKASARSKWSRAETQLVFLACQSVASVCELSRPAGTVNEEFFLDLQDEIARELRLMEVEEAESESLARRIAELYQKLHPSDNLRTIPGVGEHTAPIFLATVGDPARFHNQSAFANWEGVVPGARQSSDVQAKGLRMTKAGPSIMRMALYQAGDVGRRWDPQLAAVYHREMVYHGKNHKQAMGAVMSHLGARVLRVLKEDSPYELRDIEGNPISKDEARKLVLSKYHVSEDIRRERRRRNRKVGKDRETATYRTNEADKAPQPV

SEQ ID NO: 372036 - protein, 423 aa, unidentified
MMKLKYSICCGLDVHKNVIVATIVTTNKDGISEYLQKSFSTINSDIQRFHNWLIENNCYHVCMESTGKYWIPIFNYLENDIDVCLTHPKYVKAIKGKKTDKKDSKWIADLYKFDLVRCSFIPPKDFRQLRELARYRFKLVCMKSSEKNRIQNCMTISNVGIASVLSDPFGKTATEIMSYLLEHTADSMDEKAVRKLIKKGAKAKSDEIIEAIKGYNIETDQAKKLELAQGHLEYLDDMITQTEVELYVRIKPYYEFVEFVSTMPGMTELSSTIVLAETGVDMDIFDDAKHLCSWCGLSPANNESAGKKKSVRIAKAGDYLKPMMIQCALAAIKSKKQPYFAIKYGRIKKRRGHKKAIIAIARMMMVCIYHMVSEKKPFTPTDYEELMNPQNHVERVVLNENNVFAYLESLGYDSSKLVKRNDN

SEQ ID NO: 372037 - protein, 407 aa, unidentified
MDLLKTVFGIDVSSRKSNVCIMVNGQKVNDYAISNDMVGFNRLLGDLKQVTKPQIIFEATGVYSRRLQAFLDMHELRYVMMNPLEAKRKTKDDLHQNKTDKLDALYLAKLQSEHPQRLAYVQSKEYQELMANNRIYEQASHDLITNKNRLHKAVQLTFPEIEHLLANPRGKNYWSIALRFPHPDIVLETKEADIIDFLKGLSGIGKKRANDITQSLIRLAKVACPAVKKNSAHIRGLKMAINNILSAEEECQTALQEMAKLAPKRDLEILTSIPGIGENTALRIISELGDIRRFNNPSQLNAFVGVDPQVYESGNLTAHLSISKRGTAIGRKVLYLAINQIQSAKKVGNPCHIADYYEKRKRSSETASHKKAAIASIHKLLRTIFALIKNDQLYSYDVAKHNQRLLS

SEQ ID NO: 372038 - protein, 317 aa, unidentified
MTQTSMTTAGIDTSKGKLDIALHGRAEQWQVANALPGWRILTNRLTKAGVSRVGIEATGGYECGVVQYLRAAGFAVQVLQPVQVKAFGRMHLRRAKNDALDAVMIAACTAALDQVRDAPDPRLAELAEQLTFLEQIEEDIKRFKTRLEHTSEPRLRRMVLGEITRMTARRLAQLRYIAKQLRAHRDLAARLDLVLSIPGIGERTALAILIRMPELGRISREEAAALAGLAPFDNDSGQQKGQRRIAGGRARLRRSLYAAALPAAFRWNRALIALYQRLIAAGKAHNAALIACARKLLIYANTVVQRGTPWTERPLGA

SEQ ID NO: 372039 - protein, 391 aa, unidentified
MSIMTNTSPSHPRGRIEAPGLIVGVDTHKDNHVAVAIDGFGGRLGDIVVPTTIAGFEELLAFCLAFVGSAGRLIGFGVEGTGSYGVGLARYLRNHGHDVHEIARPARAAERRLAGKNDTIDAEHAARQLLAGHGLSTPKTADGAVETIRLVKIAYDGAVQARTTAMITLKATLATGSEALRAELETLTDHKLILACAALEGPTPLPPVRRGAPAVVVPGDPDVAMRHVLSSMAKRWLALHEEAKAHAASLKALTAAAAPQLVEAVGVGYDTAAQMLITAGDNANRIKSEAAFAKMCGACPIPAGSGKTNSRHRLYRGGNRQANAALYRVVIVRMRWHQPTIDYVARRTAEGMSKREIIRCLKRYLARELFRLLPAPDAIAKPVNGELEIAA

SEQ ID NO: 372040 - protein, 463 aa, unidentified
MAARKPKRMGAQTVEDEDYQLRYERVAGIDVAKGSAMVCLRLPPGPGKVRRTCRTWEVMARVPDIEALAAELKAARVERVSMESTSDYWRIWVVVLEGAGLDVQLVNSSQARNLPGRPKTDKADAQWIARLTEMGLLRGSFVPPPEIRALRQYTRQLVHLSQDRTRYWQRLEKLLESALCKLTSVVSGLAGSASCLAMLEAMIAGERDPQVLAGYARGPMRSKHAALVKAFTGMQFGPEHVFSASSDLRMIKMLDAEITGLEQQVRDHLAAIPAAWGTDADGVTGPGAGTGPDAAVLPAVDRLTEIPGVGPAIAAGLIAEIGLDMSRFPTPHALVSRVGMAPVPNQSGPRKGRGKKGHGSSYARRLAGQAGNGAARTDTFLGQRHRRIRSRPAGGGWKKANVAVGRSIIIIVWHLLKDPAARFTDLGPDHYAKHTDTNRKARNHKRQLEALGYDVILTPREAA

SEQ ID NO: 372041 - protein, 382 aa, unidentified
MDLIYACCAGLDVHKKTVVACVRRVAADGQVRREVRTYRTMTADLIALADWLDAEGVGHVAMESTGVYWKPVFHLLEGRFEVLLVNAHHIKQVPGRKTDVKDAEWIAQLLQHGLLKASFLPPPPIRELRDLTRGRTQLVRERATVARRIHKVLEDANIKLASVATDVLGASGRAMLEALVEGRDDPAELAGLARGKLRAKSPELKLALRGLVTDHHRFLLRALLKQVDQLEALIAEYGGRIEAVAIPFAEAAARLETIPGLGGRAAEVIVAEIGTDMAKFPTAGHLASWAGLCPGNNESAGKRRSGKTTKGSQWLRATLVQVAWSASHAKQTVFQATYRRWAKRLGKKKALVALGHKILNVIYKLLKDGIDYREPGTTPGVA

SEQ ID NO: 372042 - protein, 424 aa, unidentified
MSERDYSKQVARRQRIGSRTLVVGVDVGKAYNAVGFMNKEGKVLGSCGKVDNSREGFEQFLKMVEDLKTRYGLKDVLMGMEPTGHYWRKLAYFAKEQGYEVRFIRTTALKHHRELDESASAKSDQRDALTITNIIREGKYIDTVVEDGGMRHLRTLVKVREKIQKRNASAENSLHAALDDYFPELKEIFWSMHSRGLWALLQRYPFPTDVVPIKVSVLQEIIGRASRRRAEASQKAMAVSRAAKRSIGLKQIGSADRYRLKMCLDEVKRTELMIKDMEREIKRMLKDIPEAEYLLSIPGIGAISAAVFLGELGNPSYFQGARQIVKYAGYDPQESDSGNRVSRRFISKKGRWLLRKHLFLMSMRVVVLSRYFQEYYQRKLQTKNRFGQLPRKKEILCAVAIKLIKVIFALLRDKRNFEDTVACE

SEQ ID NO: 372043 - protein, 350 aa, unidentified
MRREKMIAVFVGLDYHDSMVQVCVMNAQGEILLNHPYANDWRTVVEAAARVGPRGRVYAALEACTGAANLADELVARAGWSVDLAHPGYMARIKQGPDKHDWGDARLLADLERIGYLPRVWLAPPAVRELRRLVRYRQPLVNEARNAKLRIRSLLREHRLRTPQRAWTRGWLTWLKTSNELPEQSRWLVDQHLANIERLRPAIKETEDRLATFTAGDPLVERLLQEASIGPVTAWTIRAEIGRFDRFRSGKQLARFCAVSPRNASSGCRQADAGLIQAGNRQLRATLIEAAHRLARYHPRWSTLAAALRGRGKPLTSNVKGKPGSVVATAIANRWMRWLYHQMQPVARVA

SEQ ID NO: 372044 - protein, 367 aa, unidentified
MKKISTVVARQSKNFREQKLTIGLDLGDRSSWYCVLDEGGEVLLEQRLGTTPKAMKEVFGEMPRSRIGLETGMHSPWVSRLLSELGHEVIVAHARNVRLIGESRRKDDRFDARTLARLARIDPQLLAPVQHRSAQAQAHLMVIRARAGLVRTRTSLINTARGLTKSYGERLRGCSPRNMNAEKAQSLSPELQAALEPLLAAIESLSERIYEYNQQIGKIARESYPQVARLQQVKGVGTLIALTYMLTLEDPQRFRKSRDVGCYVGLQPGRRNSGQSEPQLHISKEGDAYLRTLLVQGAHHILGPFGADSDLRRWGLKLAERGGKNGKKRAVIATARKLAVLLHRLWVSGEAYEPLRHSRAMPLPAAA

SEQ ID NO: 372045 - protein, 350 aa, unidentified
MMIIGCDLHTRYQQIAMLDTETGEEVERRLEHETGGARAFYSGLQGRVRVGIEATGHTHWFEAMLAELGHELWMGDAAKIRASVIRKQKTDARDAAHLLDLLRQDGFPQIWRPSPAERDLRQLVWHRQKLVWMRGAVKNQLHALAMGEGVCRKKKLFTAKGRKELEGLALGPWASYRRQELLRMFDELAAATTQLDAAVEQAAKNQPLAVRRMTHPGVGPVTSLAFLLIIGPVERFERSKQVVSYLGLNPQEHSSGGKQRLGAISKQGNPMMRWLLVEAGHTAARFDPALQRMYQRLKFRRGASVAKVAVARKLAVRMYWMLRSTADYAQLVRMQGSPWATLVENSPSLG

SEQ ID NO: 372046 - protein, 354 aa, unidentified
MSNKSNSLVATIGIDIGKNAFHVVGLDRRGAIVLRQRWSRGQVQARLANMPPCLIGMEACVGAHHLSRGLHLQGHDARLMPAKYVRPYSKGQKNDFRDAEAIAEAVQRPTMKFVATKTAEQLDLQALHRVRERLVSQRTGIINQIRAFLLERGIAVRQGLRFLRTELPIILATRSDLLSPRMLRVIEELMADWRRLDERIEGLSEEIEAVARQDPACERLMTVPGIGPIISSAMVAAIGNGAVFTKGRDFGAWLGLVPKQISTGDRTILGPISRRGNRYLRALFVQAARVVLVRTKDSDRYGLKAWIDAAKKRLHHNVLAIALANKLARIAWAVLNKERAFECVSTRATSSQPT

SEQ ID NO: 372047 - protein, 318 aa, unidentified
MSEPVFVGLDVAKGVVDVAIRPSGECWNVPNTDAGAGELVARLKPLAPSLIVCEATGGFERSAIAALAAAGLPVVVANPRQVRDFARATGQLAKTDQLDAGILALFAERVRPTPRPLPDAAAQLLDAVLTRRRQLLEMLTAEKNRLGFAPKPLHRGIRKHIQWLERQLDDVTGELTTLVEQSPIWRAKDDLLQSVPGIGRIVSYTLLGDLPELGTLTHKQIAALVGVAPLARDSGTLRGKRMVWGGRASVRTVLFLAALCGRRWNPALKVFYERLIVAGKPKKVALIACARKLLTIINAMVRNNTTWMAPAVKLQHSC

SEQ ID NO: 372048 - protein, 331 aa, unidentified
MKNVTQTIGIDVSKLTLDACIRTSAAHKQFSNDIKGFKQLISWAMKQKSDLEETLFCFEHTGWYCLMLSYFLYANKHGYCCINPIEIKRSMGLRRGKSDKADAWEIANYAWLRRDELIPSIPPAKNLLELQRMMALRDQLVKQLTACKNLNSGIQEITVNRSKDISLGILSKSMRHLDKQIKAVEKAMDGLISQDESMVANYKLSKTVKGVGRVLAVQMLLHTHNYSRFASPRQFSAYCGLVPYPYQSGTSIHGRNKTHPSSDRKMKSLLSMSAISAIQHDNELKLYYRKRVEEGKPKMVVLNIIRNKIVSRVFATVNRGTPYVEINKFLA

SEQ ID NO: 372049 - protein, 280 aa, unidentified
MNIIGCDYHLGFQQIAWLNTQTGEVVECRLGHREEAEEFYRDLKVRGMTVRVGMEASGHARWFERLLTELQFELWIGDAAAVRTKRVRKQKTDRQDAQSLLHLLMENRFSRIWVPDAENRDLRQLLWHRHRLVQMRTRIMNQLHVVALNEGVRRKKALWRPAGRSQLESLVLAPWASRRRQDLLHLLDQLTPKIQELTRTLEEVVEKRPVARRLRTHPGVGPLTALAFELVIGTPERFPCAKQVASYVGLVPAEESSMESREMNKLGSHAGAPGNRHGVL

SEQ ID NO: 372050 - protein, 341 aa, unidentified
MELFVGLDVSIRTTSVCVMEASGKLIRESKVESEPDAIGALLHAIGGPYKRVGLEAGPLSQWLYSGLAAAGYPVICVETRHMKAALSAQINKTDRNDARGIAQMMRVGLFKPVHVKTVRSQEIRMLLTARKFVQTKILDAENNLRGLLRNFGLKVGAVTRLQFERRIIELLEQSPNLRLVIDPLLEVRRVLRKQFQHLQKAMERLAESDDTCKLLMTAPGVGPLVALSFRAGVDEPARFGRSRSVPAHFGLTPSRYQSGEIDRDRGISKCGDAGIRWALVEAAGILLRISKRSSPLKAWGLSVARRRGMAKATVAVARRLAIILHRMWVDNTPYRWEAKAA

SEQ ID NO: 372051 - protein, 342 aa, unidentified
MEQYVALDVSLKEICVCIVDSNGDVIFEGKTAAEPATLVALIRSKAPQVTRVGLETGATSPWLFHALAAAGLPVVCMDARHAHAALSMRPTKSDRSDARGLADMLRMGWYREVHAKSITSHERRTILGARHQLVTMRSELDAQIRGILKTFGLILGTGNKDTLIQRAEKLTAEHPVLSGLVAKLAEVRRHVTSQIAAIDRDIRHLVHTQPTLKRLISVPGVGPITALAFLCAVDDPSRFKHARDVGPYLGLTPTRYQSGETDRQGRISKCGDTFTRTCLYEAAHVLLTRVQRFSPLKAWGMRLAKRIGGRKARIAVARKIAVILHCIWTDGTEFWWTREKAA

SEQ ID NO: 372052 - protein, 340 aa, unidentified
MNKSLDFDPCGIEVSARTLVVERRRPGQPDAVREFANTAAGHQALLRWLESAGRAVRVCLEATGLYGLDLALTLEAAGVALMVANPRAVRHFAQALMRRSKTDRLDAAVLTEYAARLPFQPWRPPSASALKLLAVARRLEALTDIMAAEKNRLHAASLSEALPAIIRRDIQRSIQTQQRAVQRLTRAAQEFIAADPSLAERYQLLLSIPGLGPTSALHVLAELLLLGPDLDVRQWVAYAGLDPRQYTSGSSVHKKARISKAGNKHLRRALYMPALVAVRHDPHLRAFYEHLVERGKTKLQALVAVMRKLLHAIYGIFKHHQPYDGAQLFALPSPQEVICP

SEQ ID NO: 372053 - protein, 438 aa, unidentified
MDIVHPRVAGIDVHKKVVWVAVRLPGQAPGERTVVIKRFQTFWRPLQKMAAWLAELGVTDAAMESTGVYWWPVYHALAGARIEVCVCNAAHMRNVPGRKTDLKDCQWIAELHEYGLLRPSFIPAAEVAALRARTRYRKRLIEQRTAESQRLSKVLEDAGIKIDSVASRLLGKSGREMIEALIAGERNPGRLADLARGVLRRKTDDLQMACDGRFTDGHGQMCRLHLDAYDHLTAKIAELDALIAEAVAPFAAVIARLVTIPGIGQRTAEVIVAETGGDMTRFATSARLAAWAGLAPGDNESAGKRKYAAARPGNRYLRAAMTESAWATARTRTRPGARFRRLARRFGKGHEKKAAIAVAHTLICIAWAVMARGQDYADAGEDYYDQRDQRNREHLIRHHQQALARLGCQVTLVRRCRAPSWGPQVSLQRLSICAPTGA

SEQ ID NO: 372054 - protein, 448 aa, unidentified
MDWDSLPPLNVNAAGLDIGATEIYACVPVGRDPQPVRRFDAFTVDLQSLAAWLAACQIDTVAMEATGVYWIPVYEILEASGFEVYLVNARHVKNVAARKSDVSDCQWIQRLHTYGLLRASFRPPEEIAALRSLVRHRDTLIHYRAAHIQHMQKALQLMNVKLTHVISDITGVTGMTIIRAIVAGERNPKLLAQYRDPACKKSQAEITKALEGHYKAEHVFVLRQALELYDFYDQQIQACDREIESRYQASAPRDPEGQPPTTAPNPRQRRPRKGQAHFDLTSSLYQMVGVDLTRIDGIDALTAQTLISEIGLDMGKWRTVKHFTSWLGLAPNPKKSGGKVLATHIRRTQNRAAQALRIAAQTLARNKSALGGFYRRMRAKHGAAQAVVATAHKLARIVYHMLKYRQDYHDLGTDYYEQQYKERVVRTLKRKAADLGFRLEPVLTPQVS

SEQ ID NO: 372055 - protein, 327 aa, unidentified
MTVKTVGLDLAKDVFQVHGISENGRVIFNKPIKRAKLLAFFETLPPCVVGMEACGSSHHWGRQLRTLGHDVKLMPAGYVKPYVKRGKNDAVDAEAICEAVRRPTMRFVEIKTEDQQAILSIHRTRDLAVRQRTQLANMIRSLLREFGHILPIGIEAVTAFAKRHLAGDHPDMPEIATGMLGIQCYQFIGLNERIDGYSKMIEQHALLNADARRLMRMPGIGPITASAIVATIGDAHQFRTGRDLAAWLGLTPLNKSSGGKEKLGKITKQGDRYIRKLLVVGMTSRAVMQNGRQRKSISGQPRLLPTNRFGWQQSRWQTRQRVPSGRC

SEQ ID NO: 372056 - protein, 503 aa, unidentified
MNNKVINKKNRQKKLLKTLPPLCYNNIKWSTSGRELTVSNPERISQRSVPPEVNRSKSTNRVSSYKDLYKAASERTRYAKAKARRARPQNLNQKEVPVMFYVGIDWADDHHDVYIVDEQGTKVDSFSIKHNSEGMCFLRDKVRELASLKEQVLFAIETPKNLLVDFLLDEGYTVYAINPMSVARYRERYRTSGARDDSFDAMVLSNIIRTDRNQHRAIIPNSVLARELKILTQDEQKLIRLKTKLLNQIQSCLKDYYPTALDLFCKLDQGVTLDFLLKYPRPQKISIAELKKFLKKCGYPGADEKAKEIFEKLSGSQIFVEEFTVRAKSRFLITLVEQLKALISQLDEYQKEIERLFEQHPDCKVFQSLPGAGEKNAPRLLAEIGDNRERYTDKKNLQCDAGTAPVTDKSGNTEFVRMRFACRKIFRNVVYQFSFSTLTQSAWARKFYDCQRAKGNTNTEALRSLGNKWLKIIFRMWKDGVAYDENRHLADIMRYQLNAPSVA

SEQ ID NO: 372057 - protein, 386 aa, unidentified
MQSFDANKSLVVLDQDSTLVAVIELSLSSWLVAGLVPGLKRQPHKKLDPDPDALLALLQRWRSEAIKAGRTIARIALAYEAGRDGFWLARWLKARAVEAYVIHPSSIPVPREHRRRKTDRLDTELLMRAFLGWLRGEVKHCTMAAIATLEEEDAKRPNREHQTLTGERTRLINRLKSCLIRLGIRNFKPTLGKAAERLAELRTPEGVPLPDNTLAELYRDMARLDLVKEQIKAIERQRLQRIAKAPNHRPNVMVRLIAQVIGIGIETADMLVSELLSRNLRDRRAVARYGGLTGSPDESGSRRREKGLPRAGNARVRRGMIEFAWRFLKFQKDSPLAEWYRNQTASGRKDVRKRTIAALARKLLIALWRLATQGVVPAGIALRKAG

SEQ ID NO: 372058 - protein, 361 aa, unidentified
MKQIVSVGIDVSKGKSTVCAMIHPNTIIKESFEVLHTVEEMSMLADYIGSLDGEIRIVMESTGHYHLPVAQFLYQKGFFVCVENAYIIRQFSRIMLHGAKTDPLDAKKLAKYGLAYWSELKPYKFHPSCYTELSLLSKQYQTYIKLLIAAKQNVIHLMDEMLPGFKEALDTASSVQFSKVKYVDFAKEFYHVDMIKSMGKEIFRENYKQWCKEKGYRFQSEKADELFHLAEDGIPTLPTEFPSTRLCMEVATEQVSQLGYALEQILSQMQNLAKTLPEYQTIRQMGGMGEKLCVRFIADIGDVRRFHNGKSLVAYAGIDAPPYQSGQYTGTKRRISKRGNSALRKTGYEVMKSLKSHPPCM

SEQ ID NO: 372059 - protein, 326 aa, unidentified
MQGQEALEQEIKVKSSVGIDVCKSWLDAHVLPAGMSMRVPNTAAGIRTLKRRLAPFDVGLVAVEATGKWHRVLCRSLHASGLAVAVVDPLRVRLFAKAHGILAKTDRLDAGVLALFAAVMAPPARPPAPTAMEELKELVGARESAVAEEIMLNNQLAAAEGKFLKRQLARRIARIGQDIKALEGEIQKRIRADGELARRYAILVSIPGFGPVVASTLITRLAELGACTAKQIGSLAGLAPRANESGQHKGVRVIGGGRPSVRHVLYLAAVTAARCNADLKAFYERHLAANKPAKAVLTAIARKLAVLANTLIAQDRPWQPHAPHPA

SEQ ID NO: 372060 - protein, 347 aa, unidentified
MDRYIGIDAHTTSCTIAVVGPSGRKLGSHVVETNGQALVEQIRAIARPRHVCLEEGTQSAWLHEVLSSHVDELVVAGIERSQGPKSDRRDAFSLAQALRTGAIETSVFKAPTRFALLRALARSHTTLTRDMVRTQCRLKSLFRSRGIPTSGCSIYSPDDRDTWLGKLPASSRPSALLLGYQLDELRALKKDAEKQLVAESHRHPISRILESCPGMGPVRVAMTIPVVVTPERFRTSRQFWSYSGLGIVMRSSSDYVQADGGWKWAPVLKTRGLSRRFNHTLKYVFKGAATTVITKPAGCPLRDDYHRLLEAGTKPNLAKLTLARKLAATLLAMWKHEEVYDPARHRK

SEQ ID NO: 372061 - protein, 457 aa, unidentified
MRKKNKRTKGIEEAHPFSGMSRIHPHAAGVDIGAIEIVACVPGDENTQIVKAFGNYTVDLQELAQWMKSYHIKTVAMESTGVYWIPLFEELERQGFECLLISSRSLRRVAGRKSDISDAQWIQTLHTYGLLEGSFRPQGDLVALRTLLRHRSQLVEHRSPHIQHMQKALLQMNVQLSQAVTDITGMTGQKIIRAILVGERDPQTLAAMREPGCKKSAEEIGKALTGTWREEHLFILTQSMMLYDFYTEQIQACDLEIERLYGLTRPDWESGEVQPLTKRKKNSHSKNLPHNAEEVRKHLKRISGVDLSSVDGFGVSLAQTVIMEVGTDMTKFPDEKHFCSWLGLAPKHEISGGKVLKNNTLKTKNRAGQAFRMAAQSVKQAECVFGVFYRRLKARLGPSQATVATAHAIARVVYRMLKYQVEYEPLNVNEYQKHYEEQQIKYLKKRAAKFGFQLLPT

SEQ ID NO: 372062 - protein, 341 aa, unidentified
MKLTTIGIDLAKNVFQIHGADERGKAVLKKQLKRDQVVPFFANLVPCKIGMEACGSAHYWARKLQALGHSVQLIAPQYVKPFVKRNKNDAADAEAICEAVTRPNMPAVPIKNASQQAILSVHRARQGFVKARTAQANQIRGLLAEFGIIIPQGISHIAKRVPEIIEDGENELPGSFRLLIQRLVDHLKVLDQQVGELEREIQAWHRENEASKKLAKIPGIGPMTASALVASVGNARSFRNGRQLAAWLGIVPKQHSTGGKATLLGISKRGDTYLRTLLIHGARAVIRVAERKPQPDAWLGKLLTRRNKNVAAVALANKNARTIWALLAHDRAYESDYRMAA

SEQ ID NO: 372063 - protein, 346 aa, unidentified
MHYIGMDCHISTLDFAVVNEAGRLVKAHRVATSVNGFMEFVKKVPPPRTIYMEEGTLAAWALETCVHFKERLVISDAKNNHWIGSCGQKDDSIDALKLAQLARGGYIKEVHHPVGQRRRFRELMIAYHDTVRSTTRIKNKIKAKFRQNGIRCTGTTVYSETYREEWRGKLPQEGTLLLILDGLWRQLEQSERTEKELLAAAKAQGKQYPEIKRFEALPGIGFVHGATVSAILETPHRFSDKRKVWMYAGLGLMKRSSGGKLYSEKLTADYNRLLKYALKQAAEAAIQAKDNPFRRKYLDMTLLHGIAPHRAKLTIARDMLAVMWAMWRKGEKYNPQIREKTAYKQG

SEQ ID NO: 372064 - protein, 406 aa, unidentified
MSAYRFYVGLDWATEAHRVVVQDAERQGVAERTVPHEGGALEAFAAWLSELAAGVPRDVAVALESPRGAVVDILLANGFHVFALNPKQLDRFRDRYTVAGAKDDRRDATVLATALATDQPAFRRLAPEHPLVIELRELSRLEDELQQELQRLTNRLREQLHRYFPQLLQLVPAANEPWLWALLERAPTPSAAQHLSRAALRTLLTRHRIRRVDADAVRALLQHPALPVAPGTVQAAQRHLAVLLPRLRLAHQQRAECATLIEDVLERLGEQQEHRDVPILRSLPGVGRVVAATMLAEASRLLAARDYHGLRTHTGVAPVTKQSGKHCVVIRRSACNRRLRDAAHYWGQSVVRHDPRSRAHYDRLRARGHSHGRALRGVVDRLLRVLIAMLTTQTLYDSNRRLPIAA

SEQ ID NO: 372065 - protein, 353 aa, unidentified
MKPNTETTAAPLAVIGVDIGKDVFHLVGFGTDGKIAFRKKIRRLDLKGAFEQLPRCIVGMEACLSAHFVSRTLRALGHEPRIIPAIYVKPFLKGQKNDYNDAEAIAEAALRPNLRLVKEKSQDQLDLQACHRVRSRLVSRRTATINQIRAFLIEQGIAVRAGARALRNSLFAILENRKDEISPRTAKLILGLYEDWCHLDERIESVTEEIESLGKAEAKCQRLISVPGVGPLISTGIVAAIGSGEAFERGRDFAAWLGLVPRQHSTGGRSILGRISKRGSKYLRTLLIQAARVLLMRPHNWPRFSFGAWLKTASERLHRNKLAVALANKLARIAWSVLRHDKAFDTHLEVAAI

SEQ ID NO: 372066 - protein, 366 aa, unidentified
MKKVSTVQTFGNEILKKQKLTVGMDLGDRWSCYCILDEAGEILLEQKVAMTPEAMKQTFSKIPRSLIAMETGTHSPWTSRLLTELGYRVIVAHAQKVELITKSNRKDDRHDARTLARLARIDPDLLGPVRHRSAQAQIHLTVIRARAELVRARTALVNAARGLVKSYGQRLPKCGTQQVSRELAAGLKAELREVLEPLLKEIESLNERIKEYEVRVEKIAKESYPQVELLKQVKGVGTQIALTYILTLEDPHRFPKSREVGCFLGLRPGRRDSGQSHPQMHISKEGDRYLRTMLVQGAHYILGPFGADSDLRRWGLRLAARGGKNAKKRAVVAVARKLAVLLHRLWVSGEVYEPLRNSQKTVSAAA

SEQ ID NO: 372067 - protein, 322 aa, unidentified
MFVGIDVSKNSLDVALLKEQGKPRHKVFANTWAGHRQLLAWLSDNGAAKVHACLEATGTWADAVALALHESGHQVSLVNPVLIRAFGQSQLKRTKTDKADAQLIARFCEMHQPPLWSPPAPEIRHLQALVRRLESLEEMRVMEENRLGSGVSSAEVQASLEEHIAYLQAQIDKTRRQIKDHIDGHPDLKDKATLLDSIPGIGEATAALLLAELGDLTQFSNARQVAAFAGLVPRIRESGSSVRSKSRLSKVGSSRLRKSLYFPAITALRFNPLIKALGVRLSAQGKSKMLIIGAAMRKLLHLAYGVLKSGKPFDPNFAPQTP

SEQ ID NO: 372068 - protein, 369 aa, unidentified
MEQDSTVVGLDVHKDTITVAVLPVGADRIAETTRIENHPRAIETLVQRLRARYGLMTFVYEAGPCGYDVQRQLTALGQCGVVIAPALTPRRPGDRVKTDRRDAEKLARLYRAGELTPIYVPTRAEEAARDLVRAREDAVADRLRARHRLAKFLLRQGRVYRETKSWGVAHRQWLTAQRFEWPALQQTFEAYVRTIDETQARLTHLEQTLQSLAQQEPYQQPVQALRCLKGVETLTALTLVVETQDFRRFSTAAAFMSFTGLVPSEASSGSTVRRGSITKTGNAHLRRVLVEAAWCSRHGQIVSRELAARRQAAPTAVVQLARKAQARLHRRYWRLLHRGKVPGVTVTAVARELAGFVWAIGQHVSATSP

SEQ ID NO: 372069 - protein, 331 aa, unidentified
MAIDLAKGSFQVCGVKADGAVVFNKSMSRPRLYQLLADHAHCAVAMEACATSHHWGRVAQSYGHEVRLIPAAYVKPFVKRQKNDRADAEAIAEAASRPSMRFVAVKSAEKQGRAVAFRTHQCFVRQRTQLINALRGHLAEFGLVAPKGPASLKLLERALAQPDVDLPSPVREMAALYLDQICRLTELIEQMADELDRASKTDEELRRLCTVPGIGPVTAGAIAAFAPDLSTFDSGRNFAAWLGLVPRQRSTGGKARLGAVSKMGQCDIRRLLIVGAMSVIRWVVRKGGSANRWLAELVARKPRMVAAVALANKMARMIWAMTTKQENYRMA

SEQ ID NO: 372070 - protein, 314 aa, unidentified
MNTNTLQNINVGVDTGKTQLDIYIRPLDIYFNVTNDEKGIKQAVRTIAKYHPERIVIEATGRLEMPFILACEHANLPYVIANPLHIKKFSGALGNKAKNDRLDAALIAHYAEAIKPKLTQLKSENIRLMSDLVTRRNQLLSMQTMEKNRHQILPQSLASSIKPILTALKNQIAKVENRIEKLIETCPDYQAKNEILQSVPGIGKIAAASLISNVPELGYITNKQAASLIGVAPITRESGSFKGKRMIKGGRMQVRTVLYMAMMSAMQCNPVFKETYQRLLAAGKPKKVALIACVRKMVVILNSMLRDGCMWNGR

SEQ ID NO: 372071 - protein, 343 aa, unidentified
MGEVSTIGLNIAKSVFQIHGVDTDGAVVIRKRITRAKLLEFFAALPPCLVGIEACPSAHYWSRQLQALGHTARLLPPSYVKAYLKRSKNDANDAAAICEAVMRPSMRFVPAKSEEQQSGLMLHRSRQLLVCQRTMLSNAIRGHMAELGIISAKGRNGTAELLEIIADEQDGRIPAAARFSLEVLARQYSAVRVEIAAIEKRIHAWHRSSEESRRLEEIPGVGPIVATALVAEVGDWKVFSSGRSLAAWIGLVPRQYSTGGKERLGGISKQGNRHLRWLLVAGAMAVIRYARQHGTKRLWLVRLMNRRPIKVAAVALANKIARMAWAMMVRGERFKEPKSLLAA

SEQ ID NO: 372072 - protein, 408 aa, unidentified
MNTLYVGIDVSSKSNVVFLMLPNGDKHSNFSVANSQEGSTQLVKRIYSALTSHSLDTVLIGLEATSVYGDNLVYFLREDATLAPFNRKIHVLNPKQVKKFHDSYNDLPKNDYVDSFVIADCLRFGRINKEVYMEDYRYKALQNLTRARFFAVQNLVKEKQRFMNVLFKKYSTMTQEKVFSDTFSSTALAVYDEFESAEALANMDLHELTDFIIEKGKNRFPDPDAVAKAIQKAARSSYRLPKTVNDSVNQVLSISITSMKALEVQIKEFDKAIKAQMELLPNVLVSIPGIGPVYSAGIMAEIGDINRFDNQAALAKYAGLAWKQHQSGGFEAEVTKLIPSGNRFLKYYLCEAAFSLVRCDKEYSDFYRLKYKEVNRCQHKRALALTARKFVRLVFRLLKDNRLYSPAK

SEQ ID NO: 372073 - protein, 313 aa, unidentified
MNTSEINVGIDTSSKQLDIYVRPNGQFFSVSNDDAGIKEAVKSLQKLKPTRVLIESTGRLELAFVCAAHQAGLPIVICNPGHVRHFAKSAGRVAKTDKLDAMDIAHFGEAMKPRLSSIKPEKLRAISDLLVVRGQCLEMSTMQKNRLKRMPKSVQKPIQSILKAIKKELDMIDRQLDKLVDSVAEWRQKRDLLLSAKGVGKVLAYTLMSELPELGTLNRKQIAALVGIAPMNRDSGSFQGKRYIRGGRHRVRTVLFVSMMSAIQCHPKLKPMYQRMVAAGKPKKVALVACMRKQLTILNTMVKNHTYWDEKMA

SEQ ID NO: 372074 - protein, 352 aa, unidentified
MEQFIGCDAHKKFSVFVAVNEKGQAGEALRVMHDRQLYREFLARLPPQSAIAVEATGHYSWIVDEMESAGHRPKLANALEAKRRMALTKKTDKLDARGLAVLLRNGTLPEVWIPPRELRDQRELLRLRIFLVHLRTRVKNRIHGTLARHNVQVPGADLFGVAARLQLGARLPELPLHSREAIEQELATLDFLETQIEGAEQRLERIMAVSAEADLLKTLPCVGKILSMVLMLEIGKVDRFPTAAHLASYAGLVPRVHSSGGHTRMGQVCSNVNRNLKWAFVETGNLVVINQRGLAGTHAVRLYHRIKRAKNHQKAVVAVARHLAEAAWWVLTKQEVYREPQGPRQVLSSTHG

SEQ ID NO: 372075 - protein, 380 aa, unidentified
MKNVRFIGLDVHAETIAVAVAEPGGEVRSLGTIPNRAESVGRLIRKLGKPEQLRVCYEAGPTGYVLYWQLSELGVRCEVVAPTLVPVKAGDRVKTDRRDAEKLARCYRAGDLTAVWVPDAAHEALRDLVRARLAGKRDQLRARNRLGKFLLRHGRRAPEGTAPWSLKHLAWVRRQLFEQAAQQATLADYLHEVEHEAERIVRLERSIDTAIETLPVKMRAVIEALQSLRGIAKISAVSIMAEVGELSRFAQARQLMGYSGIASREHSSGPRIQRGAISKTGNAHLRRIVVEAAWAYRHRPGIGATLRARQRYQSEEIKAITWKAQHRLHARYAKLLARGKPKQQVITAVGRELLGFIWAIGVTAERTASDAPARTLQRAA

SEQ ID NO: 372076 - protein, 417 aa, unidentified
MKKNSNSPMKKEPRAKRAKAQRPVQREPKEVLAELVEKLRGKLEGRATPASLGEARQRPELSPNLDRLTVGVDLGDQWSRYCILGLHGETLSEGALQTRQAEVTEFFQALTPARVVIEVGTHSPWMQEIIAGKGHEVLVANPRLMEGSKRRKRKNDRIDANKLARLGRVDPQSLHPIRHRSREVRQDLVLLRAREALVGARTELINATRGLVKSMGTRLPKCSSRSFAHKVEDAIPAEARQALLPLLQLADGLTHVIKEYGRKIEEMANQKYGHTKLLRQVKGVGPITALAYVLTLENPERFAKSRDVGPYLGLVPKQEDSGESQPQLGISKTGDTMVRKLLVGSAQYILGPFGPDSDLRCYGLRLCERGGKNAKKRAAVAVARKLAVLLHRLWVSGEVYEPLGYTSSGAMVQKAAA

SEQ ID NO: 372077 - protein, 378 aa, unidentified
MKRILKIGMDVHTTNYTLCAMEPIIGEDDRVFATIKVTPDYKNILLFIENLKTKLGLNDEYDIQCGYEAGCLGYSLYKQLTAAGVKCVILAPTTMLTPQGVRIKTDMRDAYMIAQCLSYGGYHAVYIPTEDDDSVKEYLRMRNDHKLALKKIKQQINAFCIRHGFCYDGTKWTQAHLKWLKKLEITNQLYRETLDEYMASYEEQEAKIERYDKRIEEIAEQTRYHDKVKKLECFLGIKTHTALSLIVETGDFERFAKGNQYASYLGLAPGENSSSDSIHRLGITKAGNSHLRQLLIEASGGICKGAVGHKSKDLRARQNGNTAEVIAYADKANTRLRSRYYKFIRHGKKRNVAVAAIARELACFVWGMMTDNIEMKAA

SEQ ID NO: 372078 - protein, 365 aa, unidentified
MDAIYIGVDFHARQQTICYLKTETGELVITELRHQDKEQVCAFYQQFQGQVIVGFEASGYSPWFETLLEQLGHEVWVGHATEIRRRARWRQKNDRRDAELIWDLMVHHEFPRLHRPAFPSREVLRMLRYRQKLIKLRTMAKNSLQAIALQAGLAKGPQLFTAAGQKQFRTATLSPVLHWQREHWFELLQPLNQQVLETMVWFKAQSKGDASVTRLRTHPGLGLLTAVCLVHTLQPISRFRNARKVAAYAGFDPVERSSAERQRFLGISKAGSRLLRYLLVEAAQTAVRNDEDLKRFYKRLAQRRGRPKAKVAAARKLLIRAFIMLRDEIDYAEFRRRAVAARLARTGQRPNVPEVLIGQPASSEQ

SEQ ID NO: 372079 - protein, 422 aa, unidentified
MVKYSNIALLLHCATSKSVIFDEWKSEVAKNCALIDQHKNQLTVNIRNEQGDVIQKGQVSTNHTDIDEFFTAFVKKARKHRGYMAIVEVCGFNDWLLEKLKKTQCSEIVVIQPDNSAVNKTDKRDANALCELLWNNRNRLRGGQRPNGIRRIFPADSADAQVRQLANFRQHLIKQRTRVINKIKGIINKHNMAQDAASEDCSTKKFRQWVVVVQLPVIDRLEIDMNIQSWELYDKQIVEVEAELVKRSETRMKDVLRLKAIPGISAMGAITLLSRIGDIKRFNNPDSLANYFGLTPGCHNTAGKQRVGGITKRGNAVARQVLNFAVIHVVRKDPAMKEWHKRIKNRRGAKTARVAVMRRMATIIWHILRWEKPYQFRYDPPKVSRKKDDLRSSREVLKGIGNKNHSRKKGKPPLKCRNKTKA

SEQ ID NO: 372080 - protein, 350 aa, unidentified
MAMTIVDTRVVCGGVDTHLDFHVAAALDGIGGLLGIESFEVSEAGYRKLLSWLEGFGAVIRIGVEGTGSYGAGLARFLFDHRIEVVEVDRPNRQLRHRAGKSDPTDAVAAARAALSGQATGIPKTRNGPVEQMRILLVARRSARDQRIQTLNQIRHLVFTAPGPIRERFLGRPPTAMLTEMAKMRPRPGSSDPVGYVTLVTIRDLARRIKGLDAETKTIRSQLRVLVQEVAPSLLELRGVGAETAAMLLVAAGDNPQRIRSEPAWAHLCGVAPIPASSGKTIRHRLNRGGNRQANSALHRIVISRLSCDDRTKHYLERRLEEGRSRKETIRMLKRYVAREIYKHLPRGDD

SEQ ID NO: 372081 - protein, 367 aa, unidentified
MKKVSTAAAKQRRNFSQPKLSIGLDLGDRNSWYCVVDEGGQIQLEQRVRTSAKALQEVFGGMPRCRIALEIGTHSPWVSRLLGELGHEVIVANARKVRLIGESRKKDDRLDAQTLARLARIDPELLYPVKHRSAQAQADLMMIRARAGLVRARTGLVNTARGLAKSYGERLRGCNVRNMDPEKAEKLSPELQRALEPLLATIEELSERIVEYNDRIEALAQTTYPQVELLKQIKGVGTLIALTFLLTLEDPHRFHKSRDVGGYLGLQPGRRNSGKSEPQLHISKEGDPYLRTLLVQGAQHILGPFGIDCDLRRWGLKLAERGGRNAKKRAIVATARKLAVLLHHLWVSGEVYEPLHNSHRMAVAVAA

SEQ ID NO: 372082 - protein, 366 aa, unidentified
MKKISTVAIETMEIFKEHQLTIGLDLGDRWSFYCILDEAGKIILEQKVSTTPEAIPQTFGKIPRSLIAMETGTHSPWISRLLTELGHKVIVAHAQKVELITKSNRKDDRHDARTLARLARIDPELLGPVRHRSAKAQIHLTVIRARAELVSARTALVNAARGLVKSYGQRLPKCGTQQVSRELAAGLSTELREVLEPLLKEIESLNERIQEYDQRMEKIAREVYPEVSLLKQVKGVGTQIALTYVLTIEDPYRFAKSREVGCFLGLKPGRRNSGESEPQKRISKEGDRYLRTMMVQGAHYILGPFGEDSDLRRWGRKLGERGGKNAKKRAVVAVARKLAVLLHRLWVSGEVYEPLRNSQAAMRAVA

SEQ ID NO: 372083 - protein, 390 aa, unidentified
MVTAENSQKGGGKREDNGMVAPSPNGIEVPKWELKLIHSTKEATNMKIKTIGLDLAKNVFQVHGVDEQGKTVLKKTLKRSQVLPFFANLPACLIGLEACASAHYWARKLSEFGHTVKLMAPQFVKPYVKTNKHDAADAEGICEAVGRPNMRFVPVKTVDQQGLLALHRGREGMVEARTAQANQIRGLLAEYGIVIPKGLRHLGKRIPEILEDGENGLPGVFRQLLQRLGDHLKELDRQVNELEREIHLWHRASEASRRLAEIPGIGPITASALVASVGDARSFANGRQLAAWLGLVPKQHSTGGKPTLLGISKRGDRYLRKLLIHGARAVVRVAEHQVDQTGRWLNRLLDRRNKNIAAVALANKNARIVWALLAQDRKFQLDYAPAVPGV

SEQ ID NO: 372084 - protein, 359 aa, unidentified
MREYIALDSHKHYSLLERWNAETGQAQQQRIEHQRGAIREHLQPWVAGVAVAVEATGNWYWIVTEIEQAGGLPRLVHPRKAKLMMGLINKTDQLDVHGLSRLQQAGTLPCVWIPPGPLRDLRELTRTRMVLAGQRTRLKNRIGATLSKHGVPLSGFSDPYGAKARPALQQALAALPAQTCWVTGQLLAQLELVGEQIGQHEQRLKELLAVTPAMQWLLTLPGVGLILAAVIALEVGEVSRFASAEHLASYAGTTPRVAASGGRVRYGSLRADVNRYLKWAFIEAANVVSVHQAHWPQRHVSQLYRRLRQRKGHAKAVGAVARHLAESAFHVLSRQEPYRDPAAREVAPKRCERETLHEP

SEQ ID NO: 372085 - protein, 338 aa, unidentified
MTTKINMLAIDLAKGSFQVCAVGPEGTVLYNRALSRTRLAALVADQPACIVAMEACATSHHWGRVAERHGHEVRLVPAAYVKPFVKRQKNDRADAEAIAEAALRPNMRFVAVKSAETQGRAVAFRTHQCLVRQRTQLINALRGHLAEFGLVAPKGPASLKVLEIALAEETTAVPGAVREMGAIYLEQIAQLTEIIERLADELEAASRTDAQLRRLCTIPGIGPVTAGAVAAFAPDLDTFDSGRNFAAWLGLVPRQRSTGGKTRLGSVSKMGQTDIRRLLIVGAMSVIRWVVRKGGSTNRWLAALVARKPRMVAAVALANKMARMIWAMTTKQEDYRMA

SEQ ID NO: 372086 - protein, 321 aa, unidentified
MQAPTRFIGMDIHRQFVMVAAVDEQQHILFDPIKVPLDTFEFWAENHLQTTDQVALEATTNAWTVYDHMRPLVAEVTVADAHKISLISRSPRKTDQHDALVLAKLLAAHLLPAVWVPPQPVRELRDLIAHRRHLVRDRTATKNRLHSVLHRHNLYLPEGDPFSEANRAWWQALALSRSEQLRVRHELVHIQHLTQLIEEVEAEIAYLSTQEPWCEQLAFLIQLPGVSWLSGMTILSAIGDITRFPGSRQLVGYSGLGASVHASIGPGASPNKVVASCVPCSSNVPGQRCGTLHFGKLVLNACGLKSVNKKPLSRLLASSWW

SEQ ID NO: 372087 - protein, 300 aa, unidentified
MKDMMIGVDLAKNVFQIHGALRTREVQFRKKLTRQQFTAFMARQAPCLIIFEACGGAHYWAREMEALGHEVKLIAPQYVRPFVKRQKNDAADAEAIVIAARQAEMRFVGPKTVEQQSRAAVFRGRERLVHQRTADVNALRALLYEHGYVFPVGMRYLDRMTALVDDDTSDLPALIREECQDLLAQIAEKTAHITERTAKLKALASQSDRARRLQTMPGVGPLTAIAVPAFGSDMAHFKTGRNFAAWLGLVPRQHSSGGKERLGRMTKAGQADIRRLLIIGAMSRLGWLGRHTIAQGNCPA

SEQ ID NO: 372088 - protein, 394 aa, unidentified
MCQQYKTEASMTKHNILFIGLDTHKTFTEVAYIEDQRGAKPTHIGKILSNKAAFKKLTRQLQSKYPDATLHFVYEAGPCGYWIYRLLTSLHHCCYVIAPSLIPKKPGERIKTDKRDALKLAKLLKSEDLTPIYVPEPEDEAVRDLSRARETSMKDLKDAKYQLKALLLRNNINSKVKDNWSLQHLRWLAELVLPHPCQQIVLQEAVSTITERLKRLKRLDNELTHQVKNWRYYPVVKAVQALRGVRLLVATGVIAELGDLTRFDHPRKLMSYLGLVPSEHSSGGKRRLGAITKCGNSRARRLLVEGAHAYKHNANISKEMQLRQEGLSKEIIDTAWQAQLRLCKRYNRLMHKGKHRNVVVTAIAREMIAYIWAISREVVLPVVDVKLRLARMPA

SEQ ID NO: 372089 - protein, 410 aa, unidentified
MLFIGDDWAEAYHDIEIEDAAGRVLARRRLPEGLAGVTVLHELVAEHLDPSAEADQVLVGIETERGPWVQALLAAGYLVYAINPMQVARYRERHSTSGAKSDAADAHLLAEIVRLDRTHHRLIAGDTEIAEHVKVAARAHQTMIWSRVRQVNTLRSLLREYYPAALAAFGTDLASPDALAVLAAAPTPEQGQRLSQARIEMFLRRAGRQRNVAATAAKIRAALNSEQLTSRPGVVPAYAASASALVAVLTVMASQIEVLAGQVEQGFGQHPDAEIYRSQPGLGVILGARVLAEFGDDPDRYTDAKARKNYSGMSPITKASGTKRVVLARHARNRRLGDALFLQAYSALRASPGARAFYDQHRARGATHYQALRTLANRLVGILHGCLSHHTLYDESLAWHTDQDKHDIAA

SEQ ID NO: 372090 - protein, 342 aa, unidentified
MSEYVGFDVSEEETSFCVKDVSGKILARGKVATDPVALFEVLRAHCVCPERIVLETGTLSGWLSRELGKLGIAVEVIDARQAHAVMKLQHNKTDANDAALLAEIARTGFCRPVCVKSDAAQADRILLKARAHLVGQRRATQNTIRGLLGSLGIRFAKGSGKLAGLVREALEGRDELRATIDPLLRAAAALEREIARLDKAVSGRAKDDPAVRLLMTVPGIGPVTALAFAATIGDAERFAKSRTVGAYIGLTSRRWQSGEMDYSGRISKYGDAMLRALLYEAANSLLTVMRKAHPLKDWARRIRKRTSHKKACVTLARKLAVILHRMMITGEPFRWPQKEAAA

SEQ ID NO: 372091 - protein, 355 aa, unidentified
MESTKYVGLDVHKEATTIAVMNSAGKLIMESIVETKAITIRQFIQGLHGDLHVTFEEGTWAAWLYDLLKPYVTKVIVCDPRKNTLLKVGNKSDRIDPKKLAELLRNGALSEVYHGENGVRTLKELARSYLTISKDLGRVMNRVKAVYRSWAIPCAGTQVYALCHRSEWLSKITEAGVRRRAEHYYQQLDALQSLRREVRKDLLLESRKHNATKLLRQVPCIGPIRAAQLVALMQTPHRFRTKRQLWTYSGLGLETRDSAQYCYVEGQLQRSKKPQQLRGLNSNHNHDLKNIFKGAATMASVSAGPFHDFYQALLTKGMRPTMARLTLARKIAAITLIVWKKGARFDPQHLKQQAA

SEQ ID NO: 372092 - protein, 483 aa, unidentified
MKPKQQEQTKKASCRPTPGRWHEMNRKQRREMMRKMESEDLSLEVVHPHAAGVDIGNESHYVAVPPTRDSQPVRRFGCTTAELKAMADWLKQCGIHTIAMQSTGVYWIAVYDILEQAGLEVYLVNARETKNLPGRKSDVQESQWLMKLHTYGLLRNSFRPSQEVRTLRTYWRQRNDLVRAAGRHIQRIQKALTQMNIQLANVLSDVSGMTGQAIVKAILAGQRDPHQLAAFRDWRVKASEEEIAQSLEGNWQEDLLFVLKQEQDGYEFCQKQMVECDQRLAKYLQQREDRSQGASLPEETRKERRRKKKKGNAPQFALRAELFRMTGADLTQIDGIDVTTGMTILSEAGWDMSKWKTEDHFVSWLRLCPDNRISGDKIIGKGRLPTHNRISIALRMAASTLRVSNTYLGAQFRRFRTKLGAPVAIKAMAAKLARLVYRTLRYGMQFIDRGAEFYEAQHRKLQISYLKRKAANLGFKIIEAPAA

SEQ ID NO: 372093 - protein, 407 aa, unidentified
MVAVMIGVDPHKGSHTAVAIGVAEEPLGGLRVRASAVQAQRLVAWAAGWPERTWAVEGAGGLGHLLAQQLVAAGERVLDVQPKLGARVRLLTAGDTNKNDPNDARSVAIAALRSAAPREVAADDHATVLKVWSKRQRDLGRARTQVACRLHAVLCELVPGGISKEITAAHAARILESAKPSGAVGAARCELAAEFLGDLRRIDAQMLGTKKKLAAAVRASGTTTTEIFGVGPVVAATVAGYVADVSRFASRDHFAACNGTAPIEVSSGNRKIYRLSRRGNRRLNHVIHMAAITQIRYRHSDGRAYYDRKLAEGKTHKEALRSLKRRVSDAIYSRLQTDARRAATRPAAAGPGGQPGNDSVASAAGLHPGHRLFGKATPGPEPTLRPATPRIRTIAPQRASRNARKTS

SEQ ID NO: 372094 - protein, 331 aa, unidentified
MSVHVGLDVGSRTTAMGWREKGRPAGSWDIAQTPKGRKAAVKKLLALKPLSIVMEATGIYYLDLAMELSAAGLPVSVINPKSSRNFAKLMLQHSKTDALDAQLLAEYGERMTPRLWVPPSPAQLELKAIGRHINRLTCHRTRAKNELHALQATETTSALLIEDEEEAIATFDKRIERFRQAGRELIANCPTLNAQFSHMVAAPGMGDVSTFAVLAELTTLPVTLKSSQVSRHAGLDVRLTQSGTSIDKPGRLSKCGNAYLRSAMFMPAMSAIRCDPYVKAFYEALVGRGKRKMQAICAVMRKYLTGLWACMHAGEDFDTAKLFSKTHLLKA

SEQ ID NO: 372095 - protein, 354 aa, unidentified
MLYVGLDVHQKRSSLCILNEEGKTVKQEQVLGRWPKLIERLGQIDQPMSVCYEASCGYGYLYDQIRPLASHVAVAHPGHLRLIFRSKKKYDRVDAAKIAKLLYLGEVPAVHVPGIDVRSWRKLIEFRQKLLGKRTAVKNQMRAILRGNGIECVRWPWTKKGLKTLKTLPIPTEGEQLAMELACEELEELSDKIKRVEKELAKIAAGHPGVQLLMTIPGVGIRTAEAFVAYVDDVKRFARNRQVGCYFGLVPCLDSSAGKDRFGHITRDGPSTVRKMLCEAAWIGIRCDAGLRARFERIVNNDPDRKKIAIVAMAHHLCRVMAAMLRTGEAWRDQGEAWRDQAVPKIEGRPSAGG

SEQ ID NO: 372096 - protein, 314 aa, unidentified
MANSAEVFIGIDVHKDTLEVCIDGRGEHWECRNDTAGLEELLTTLVALSPTLVVVEASGGYERRLVAEGHAAGLPVVVVNPTRVRRMAEAFGIIAKTDSIDGYVIARFAERVRPPVREPQSAEQQHLNALVTRRRQLLEIRTAEKNRLSTCPDLMRADIEEHLTWLDSRIELLEEEINDMLVNNPSWRELTALVSSVPGIGPVTAATLVAELPELGTLNRQKIAALAGLAPYNRDSGPRTRRRRIFGGRASVRCVLYMAALSATRCNPVIRRFYQRLIDNGKLPKVALTACMRKLLVIVNAMVRKQEPWSYAPA

SEQ ID NO: 372097 - protein, 369 aa, unidentified
MPHVTSIGLDVHARSVAAAAFNPFTGEVVHRSFGTDASEIAEWALGFEEPRACYESGPTGFHMARELRALGLDCAVAAVSKMQRPAADARRKNDRRDAEFIARMLATHNIVEVPLPDMAVEAARDLDRALDDATRELRRSRQRLNMFLIRLGHVWDERNADGARKKAWTRAHWRWVSEIRLEGPQRDALEYYVTAARCAESDRRQLERRVVALAGTDRWRATVEALSCIKGVDTLTAFRLAAEAGSFSRFRSAPAFASWCGLTPSEHSSGESERRGGITKAGNALARTALIESAWHYSTCSPRPKAPAPGTDVPPAIRSRADDCTARLHRRREALAAAGKSACKANAAVARELACWVWEIGCRSEGTVL

SEQ ID NO: 372098 - protein, 343 aa, unidentified
MSEISTIGLDLAKNVFQVHAVDPLGGVVLRRQLRRGAVEKFFAQLAPCTVGMEACGSAHHWARVIGRYGHQVRLMPPAYVKPYVKRNKNDGRDAEAICEAVGRPTMRFVPVKSVEQQATLAVHGTRALLVRQRTMAANALRAALSEIGIVAAQGLKGLRELMARLEAPSGEIPEMMRGALLVLARHWQTLDADERALERQIAKAARADHEARRLMEVPGVGPIIASTVLAKVPDAKVFRSGRDFAAWIGLTGRDHGTGGKHRPGRISKQGDRILRALFISGASAHLRQQKARGVSDPWLRELLARRPYKVAMVAFAAKTARIIWAMLVKGEVYRDRASASAAA

SEQ ID NO: 372099 - protein, 346 aa, unidentified
MSKHTVISLDLAKRVIQVAKISRAGELLFNKTMSPNKLREFLAKQKPSLVVMEGCGSCHYWARLTESCGHQAKIIAPKAVKPYVSGQKTDANDAIGIAVASQQLGMTFCPIKNIEQQTLQSVETSRKFLDKSKTALSNHIRGLLYEFGIVVKLGEKGLRESVSQHIDPDNVALPIILKQVVTHLWDHYIATVTQLKHLSQLLSCLVKQHEPARRLMALEGVGEKSAAGLIASLGDGSAHKNGRHAAVYVGATPKQHSSGGKVRMTGICKRGDYSLRSTLYIGALSVISRLPVEPKTLKQAWLIQLVRRVGIKRACIALVNKTVRTAWAMLRHGSEYQPMTLSSNPI

SEQ ID NO: 372100 - protein, 339 aa, unidentified
MALYGGIDLHANNSVIALLDVHDQVVMEKRLPNDLSTILAYLAPYHAELVGLVVESTYNWYWLVDGLREADYRVHLAHTAAIKQYEGLKFSNDQVDARWLAHLLRLGILPEGFIYPKDERAVRDLLRKRAQLVRQKVTQMLSIRSLFARYKGHALGANRIRQLCEHDLERQFADVHVALAVTSNLRILRCLESQIQCLERVVLRHMRSRPELHWLKTVPGIGDILALTILLETGPMARFPSAGDFASYCRCVKSQRLSNGKVKGQGNTKNGNKYLSWAFVEAAHFAIRFDPGIKRFYQRKQVKRHKLVALKTVTHKLARACYYIMRDQVPFERSKAFGL

SEQ ID NO: 372101 - protein, 390 aa, unidentified
MIYVGIDVASWKHDCTIVTDQGEILIDGQSIGNDKEGFEELCAIIRAHDATGRQTEIGMEETGIYHERLRSHLLAQGYRVYTINPQLTAHSRRAGSLRRTKTDKVDALAIARYVMMYRGSLHSYTPSLYHLDALKASTRTYHGKRAQISRTKTELKRLLQTVFPEFSRFYDPLSAWALRLFKSYPTPVMIGRMHLATLARIIRVRGDRMRAARHLRQLAKDSVGRSDGLGAHLVRFAVADLEHYQAQLDTIKAELREAMADFPHITTIPGVGSVTGAIILAEIGDVHRFAHKSKLVAYAGIDAVIYESGKFRATHTGLSKRGSKYLRSAIFMAARAACIGKVRSNKFRTKYEAKLAQGKHHYTAVFAAAKNMVHTIYAILKSGQPFDYGK

SEQ ID NO: 372102 - protein, 342 aa, unidentified
MIYHTGIDTHHRYSFFQHMNADGAIGISERVATNRDAINELLAQLDDPTTITIEAGRNYWWLHELFAQHPMVSQVNVVDPRRSRKLASELSVLSGYGRAKNDYIDAEMLAEQTRRDLAPTIHVPSAEQLEQRTLCRHRFNSVMQRTRAKNLIHAILELHGHSATIADLVTPSATRDQFLALLPGYVAFIVEQFVARIKLLDQQIASSETRLAQLLPESHPQMKIVMSAPGFGPVLSRMVLTEMFDIAYFKEPKYLISYAGLAPIANESAGRKGSIKLNKQCNHYLKYAFVEAAHNARDNLNYRRKYELDVKKQGKIIAKLNLARRLAKTIYWMLTRQQLYRR

SEQ ID NO: 372103 - protein, 342 aa, unidentified
MEISTLGIDLSKTSYHVIGLNRRGEIVLRRKLSRKQLLHFTSNKQQMLIGMEACGGAHFLGRALRTQGHDARLMPAQFVKAFRKSNKNDYLDAEAIAEAVQRPTMRFVPIKTDDQLDLQAMHRVRDRWVARRTAVMNQIRGFLMERGITVRKGPSHLTTRLQEILEDVDSPLSYRLRLLIHELKHEWDELDVRIEAVNTELQEIAKQDDACHRLMHIPGFGPLVSTALVAAIGNGITFRKGRDLSAWLGLVPRQHSTGGKTRLLGISKRGNEYLRRLFLHGARSVVAQADRNPSALGHWLAGLSSRTHRNVVVVALANKMARTARALLSKGTSYCAPTLAVV

SEQ ID NO: 372104 - protein, 488 aa, unidentified
MAKRKLSTFERLTSGKLNRTQRKELTRRICSDDPGLEVVHQHVAGIDVGNESHYVAVAPGSDAEPVREFGSWTADLIRMAEWLKSCGIQHVVMQSTGVYWIAVYDVLEKAGFQVCLANARDTKNLPGRKTDVQESQWLLKLHTYGLLRNSFRPAEEIRMLRTTWRLRERHVREAGREIQHMQKALTTMNVQLSNVISDLSGVTGLAIVRAILKGERDPHRLAQLRNYRIQASEEEIARSLEGAWQEDVLFELQQAVEAYDFCQKQIGECDVELQKHLAALPDRVIGPPESAGGAGDPNQGNPNQNRKQKKSKGRKSQRNHPPFDLEVEFTRICGVNLKSIDGVDVMTIATFLSELGTDMTRWRTEDHLVSWLKLAPRRQISGGRVIKHERTKTKNRVAGALRMAASSLIHSQSYLGARFRHLRSRLGPGKAIQAMAAQLARLIYRMLTHGRAWVDRGEQAHETKRAEREKRMLQRKAAELGFRLEPAA

SEQ ID NO: 372105 - protein, 420 aa, unidentified
MKAWTEITHYAGFDWARDHHDVVVVDPQGNITTEFRIAHTLAGWQQFREKIQGYGAVAVAIETSQGAAIDQLLQSNVTVYPVHPLSAKRYRERKAPSGNKTDHLDAWALADALRVDGQGWSMLQPLDPLTQTLRLFCRDEMVLIEHRTALVNQLQQALSEYYPAALEAFDDWTRPSCWEFIIHFPTPHQLVKAGKRRREQFLHVHRLWRPETVNKRLEIFARAEQFCGSEPVTAAKSFLALSLAKLLCTLEHQLQEYRKQIQALFEQHPDHDLFGSLPGAADKLAPRLLGEIGGDPDRFESVAVLQMLAGTAPVSFQSGQIHKVRIRYQCQKVLRYVVHLWANSCRKSCSWAQVYYRQKRAEGKSHACALRCLGQRLLKILHAMIRTRTRYNAELHARNQQAHGSWVLKLVTKQAPLGSE

SEQ ID NO: 372106 - protein, 461 aa, unidentified
MRKARRWRRKPGKKIVDVTAGLEVLRPHAAGIDVGNAEHYVAVPPGRSDPSVQTFGSFTADLHRLAQWLQACHIESVVMQATGVYWMGLYQVLESHGFQVYVVNAKYTQTLPGRKTDVLECQWLQKLHTYGLLNNSFLPPEEIRVLRTYLRQRENLVAAAGTCIQQMQKVLTEMNVQLANVLSDLSGTTGMAIVQAILEGQRDPQRLADLADPRVQASRKEIAQSLEGHWREDLLFVLQQVHDLYFTYLESITACDRRIEAHLKTLEAKADLAAQPLPPMPRLPRRKHIPQTQLREELYRVTGVDLTRIDGIHVQTAQVVISEVGVDMTRWPDEHHLASWLGLCPNNRITGGKVIGRGTKKVLNRAATALRLAAQSLHRSKSYLGAKYRRLRARLDGPVAITAMAHLLARLIYRLLRYGTQYHDKGVEHYERKYRETQIKSLKKQAALLNMQLIPAPGVSK

SEQ ID NO: 372107 - protein, 356 aa, unidentified
MNKIIRVGIDLAKHVIQVHAVDAAGKVVTNRALKREKFLLWCADLPVGCLIAMEACSGAHHWCRKLTERGFDARMIPASSVVPYRIQGRTGKNDANDAAAVCEAASRPHINFVPPKTLAQQGMLCVHRLREGFKEERTSCINRIRGLLAEFGVVLPQSPDVLRHHLSDVIEDASNDIASISRLVLQRAQDHWRELDAHIKWCDQRIADHQKTDEQVQRAAELMGVGSITASAVVATVGDFRQFKNGAQFAAWLGLTPKQNSSGGKSSLGSITKRGSIYLRTLLIQGSKAIALTRQYDNPIFLWVQKLRERAGWQKAVVALANKNARILWAVMTREKRYDAHHISSYPAPVPVMTPA

SEQ ID NO: 372108 - protein, 411 aa, unidentified
MQYFIRKEGMPMLSIGIDVSKGKSTVCGMKPGGEIVYAPFEVQHTREGMSELVSLLRGSGEEVRVVLESTGSYHCPVVAALLENGIFVSVVNSLRMKRFCSQSIRRVKTDQIDAMQIALYGLAYWQELQPTRLPENTYRELQLLARQYYQMTSLLIKAKVDFNALCDQVLPGMQELMSDHAGRHKLSDFVLRYHHTTHILEMGETRFRKDYCKWAEKKGYRNCERMAALIFATAQNGIPVLPNAPSTQIVITEAIRVLHTVEASRDAILTQMQALAKTLPEYSLVREMPCIGDTLAPRLIAEIGDVRRFHSKRALIAYAGIDAPPYQSGKFCANNRHISKRGNRYLRKTGYEVMQSYVMHKPANDPIFTFIEKKRGEGKSGKLAMVAGLNKFLRVYYGKVTELYRSLPAIE

SEQ ID NO: 372109 - protein, 535 aa, unidentified
MPADMSGREGRSLNGARCPFHSVVSEDGDDIIGDRLPVGRDPVWKNVQPRPSAPGMSLTHRLCEEDAMPTARPHPHPHGRRAAPPPSDLHRINANAAGVDIGAASHYVAVPPGRDPDGCDVRAFGAFTADLYVLAEWLTRCGIQTVAMESTGVYWIPLFELLSARSFEVRLVDPRQLKRVPGRKTDVLDCQWIQQLHTFGLLAAAFRPDDQICVLRSYLRQRAMLVTYAAQHIQHMQKALELMNLKLAHVVSDIAGRTGLAIIRAILDGQRDPRALATLRDPHCKADAATIARALEGSWRAEHLFELRQAVELLEFYQKQIAACDREIEAQLTRFADKPGAPPVADAARRRKARRTALRFDARQHLHRLTGVDLTRIDGIDAPTALTVVGEIGLDMTRWPTEKHFASWLGLAPGSHLSGGKQRSSRTKPSSSRAAAALRLAASSLYHSHSALGAFHRRLKARLGAPKAITATAHKLACLIYRMLRFGTDYVDRGQDYYERRYQGRVVSNLMRRAQELGYTLTMNHSPATPSPAAP

SEQ ID NO: 372110 - protein, 309 aa, unidentified
MRIHPGFIGIDVSKHHLDIFDGLYDTHRRVDNTAEAIEAWLAGLGERQLFVVFEATGRFDRTLARALAGHALRFARVNPSRARDFARSLGLIAKTDAIDARMLAAMGQCLDPQATPAADEARDRLSGVHKRRDQLVAIRQQEKLRLAEAHECERSSLERHLAWLNEEIAAVEAERAALIRANATFAGMERLLRSIPGIGPVAATTLIALMRELGTTSPKAIAALAGLAPFNVDSGRFRGHRAIKGGRKRVRDALYMAAVTAARSNSRFKAYARALVDRGKPFKVTMIALARKILVTANAILRDGVPFHA

SEQ ID NO: 372111 - protein, 392 aa, unidentified
MVISVGIDVSKDKHDCFIVNSEGEVLADVFTIQNTRDGFNFLLQKIQDCTTPQDKIKVGLEATGHYSYNLLGFLLDNGLPTYVLNPLRTNLYRKSLSLRKTKTDRVDARTIATMLLSDAGLKPYTDTAYHNEELKSLTRYRFDKVKERAKLKSSVSRLVCILFPELEKLVPSLHTASVYTLLEEFSGAKQIAAAHLTKLKALLETASKGRYKRDMALEIRDAARNSIGSWMPAKSLELQHTIRLIRELDVEIAEIEEQIQSIMDELCSPITTIPGLGFRMAAMILAEVGDFTRFDSPDKLLAYAGMSPSTYQSGQLKNCYPHMEKRGSRYLRYALYNATKYVCHWNPTFAAYLAKKRAEGKHYNIALSHAAKKLVRLIFAMEKSRQPYCSAA

SEQ ID NO: 372112 - protein, 339 aa, unidentified
MGTLYGGIDLHASNCYCGIIDETDQWVKQKRLKNRIEEVKEFFGAHKEELKGIVMESTYNGYWLMDGLTEAGYNVRLANPSKMGDYNGLKNSNDETDTRWLAKMLRLGILPEGYIYPKSYRPMRDLLRRRTLFVSTRTRILNSMGHQFQTWLCTKIGKRYLVELTTEELYRLFDEKNLCLSVQSGVEIIKTIDLQVATIEKELFEQLKETDAVTKLRALPGIDKIIGMTIMLELGDVSRFKSVKNYLSYCRLVEAKKTSNNKIKGSGNRKCGNAILRWAYAEAAVHALRYDRIRDYYQRMKRRKGSAKALAIIASKIARISFKAITDETFCYQEEKLFQ

SEQ ID NO: 372113 - protein, 358 aa, unidentified
MSLNTEVANKVYFIGMDLHQKTSTFSVKEKEGNVIEAKMVPTTKESIATFLSPFAGSTLTLEPVSQWYCYADFIESLGLSVKIANPMKVKAIASARIKTDSIDAGVLADLLRANLLPESYHAPADVRAWKEEVRLRMSLVRLRVQVKNKIHALVWKNGMRSPYSLFTKKGLVWLDQQTLSKEATVALGVYRETLALLDRQISDAERRMIEDNKHREDVGLLITIPGISYLSALTIMAEIGDIARFGSAKKLMGYAGVVPSTYASGGKMWHGRITKTGSSWLRYVLVEAAHHQLLCTRRKGLADYYNGIKERKGSKAAAVATARKLCAVIFRVLTNKQPFMSPEEWDARRAHHCGIATQ

SEQ ID NO: 372114 - protein, 352 aa, unidentified
MDEAITYRIGFDVAKNVFQVHGVKNEAGEPVALVRRLKRAQVAAFFAGLPRSLIGMEACGSAHYWARLAQSCGHEVRLMPPAYVKAYVKRNKTDAHDAAAICEAVARPHMRFVAVKSEQDQAMVMLHRVRASFVEKRTAAANQLRAVFAEVGIVAPVGARGLSALLALVETQAEPFVRLPAALRLVLAELARQWRSVDATVRQMEVEIAASVKRSARAMRLTAVPGIGPMGASAIDCLLPDPHAFKSGRDFAAWNGLTPREDSSGKSVRRGPITKKGDGYLRRLLVLGATAYLARVRRGRIKAASAWVLKMAAHPRRKLAAVALANKMARIAWAMLARNQDYRAPAAVLQAA

SEQ ID NO: 372115 - protein, 354 aa, unidentified
MTQHLDFTGHTLFIGLDIGKKSWKVSIFTEVLEHKVFTQPPSVVVLVNYLQRNFPGARYECVYEAGYCGFWIHDELEQRGINCIVVNPADVPTTHKETTYKTDRVDARKLARSLRNRELHSIYVPLRPSLEDRTLVRLRERTVSKLTRCKNQIKGLLQFYGIALPDDIADHHWSNKFLQWLQTCSLERASGNQSLHCLLDELDHLRQTVAALTKHIRSLALQEPYRLPVAYLVSIPGISTLTAMTLLTELVTIDRFPRLDHLASFVGLVPGEHSSGDTELTTGITTRRNATLRMLLIESAWIAARKDPALTLAFTQLSHRMPKNQAIIRIARKLLNRIRFVLKHQQPYVIAVVQ

SEQ ID NO: 372116 - protein, 465 aa, unidentified
MKLRLGIDVACRADHQASLADETGTFLFTGRRFRTTVDDLEALWSSLPEADEVLVVMEPTRNAWVPLASWLRARGARVVLVPPEQSADLRAYYSKHAKTDRLDSKVLAKVPLLHPEGLREQTDDGPADPLRRAVRRRSSLVKRRTGTFQRIDALLEIAGPAWADVLGAGDCSKTALTVLARTGADPAALRRLGRTRLAALLVKTSRGRWGEEKADAILAAAAETVALWAGGGLGFAELAADLAGEARHALALTAEIETLEERIETLYTQADPGGIFLSGPGLGATLAAGILGRLGDANRFASLAGIRAFTGLVPSIAQSGTAEKHGGPTKAGDAGLREALFHAADNARRVDPILAARYRDLVVGKQKHHNAALCTIAAILITRLAACWRHGTRYELRDTDGRVITEAAGRQICATRYQVTAADRAKVRSTRRAQRLKNGTGRRSKESPGAPATGPSSRHATAGAA

SEQ ID NO: 372117 - protein, 346 aa, unidentified
MIVIGCDYHPSWQQICFLDTVTGETDEKKLDHASGEAEKFYRGLAGPALIGMESTGNCQWFVEMATTAGHDVWVGDAAKIRACEVRQQKTDRRDAALILKLLIEGRFPRIWTPSGQEKDLRQLLIHRHKLVRIRTQVKNELQHLAMNQGVTKKRKLWSKAGEKVLRELSLKPWAGRRREDLFKLREMLNGQIDLLDRSVVEAAEKNEKARLLMTQPGVGPITSMAFVLTMGDVSRFQRGKQVASYLGLIPREYSSGGHQRFGSISKQGNRFMRMLLVEAAQSAVRYDPGFRNEYLHRCHRKAKGIAKVAAARKLAVRLYWMLRTNRGYPEVVRVESSSRVPLVSAS

SEQ ID NO: 372118 - protein, 388 aa, unidentified
MKAQIVDTLPPVAADHDPVRCLLAIELSKKSWIVAITTALSDKISRYTLDGCDWKGLLELMERVRTRVARETGRPVEMISCYEAGYDGFWLHRLLERQGVRSHVIDPASVQVDRRARRAKTDHIDAKRLLRSLMAYLRGEPKVWSVLRVPCVAEEDDRRLHRERDRLIAERGQHVNRIKGLCATHGIYDYEPMRRDRMLRLEQLHTGDGRELPPRLKAEIARELQRLELILGMLKEIEAERDAIALTENVSAHTNAKKIQNLVKLKAIGAEIATVLTGEVFYRPFNNRHQVASYVGLTPSPFQSGPRCRDQGISKAGNPKARSTMIELAWLWLRHQPDSPLSVWFRERVGTLKGRIRRITIVAVARKLLIALWRYLETGMVPTGAVLN

SEQ ID NO: 372119 - protein, 391 aa, unidentified
MFYIGVDIAKNNHEASIIDSDGKLVSESFSFSNSIRGLEKFQKFISSFSIDSNNCIIGMEATGHYWLSLYSFLIDLGFSCIVINPIQSDAFRKMYIRQTKNDSVDSFVIAQILRFGEFSVSHFSDEDTFALRNLSRFRFALVDEASDWKRKLVCILDQVFPEYSSLFSNIYGVASKELLSKYPLPEDMISIPADELAKMLSKCSKGRFGIDKAKEIQEKASNSFGVKFALKSFSFQIKQIIAQISFLEDQIADIEDEISSMINSLCPVITSITGIGDVLGAAIFSEIGDISRFERANQLVAYAGLDVAVKQSGNFNATDTKISKRGSPYLRRAIWLAACVAAFKDPALSVYYQKLRQRGKAHGTAIGAVARKLTNIIFAVLRDNKAYIPNI

SEQ ID NO: 372120 - protein, 506 aa, unidentified
MTNLVLRHRIYKADSPWLSLTINLRQRPMPAFFLGIDASKGYADFILLDQKKQPLETAFQLDDTFEGHNQLYRILQAFCKAHPQARLWAGIESTGGYENNWIEALRRFQASLPLQVARLNPSGVHGHAKAALRRLTTDAISAQNVAEYLINHPEQVTYHQQDPLASLRRQWSLIQLLTRQRTALLAHLESMLYTGHPEVLRYAKDGPPAWLLKLVVRYPTARRVARAKAQSLAKIPYLSLGRAQALIETAQRSVASADDQTTEELLRETARQILHLGQLIKQHTETMTQALGLPEEIHLLKSFQGIGDYAAVGLLLEIQSVERFASAKKLASFFGLHPVYKQSGDGLGAMRMSKQGSKKARALLYMVTLTALRANPVIRPLYERLLAEGMEKMAAIGVCMHKTLRIVYGMLKHKQAFDPEIDRRYRERSASKRPSAGPDRRRRYQGFDVQAPVSRRASKKRQQPGHSQSEVVAGCGMLPLAAASVVSTPSAQPKFSRMAKNKSKTA

SEQ ID NO: 372121 - protein, 400 aa, unidentified
MLSIGIDVSKGKSTVCGMKPGGEIVYAPFEVQQTREGMLELVSLLRSSGEEVRAVLESTGSYHCPVVAALLENGIFVSVVNSLRMKRFCSQSIRKVKTDRIDAMQIALYGLAYWQELQPTRLPEDTYRELQLLARQYYQMTSMLIKAKVDFNALCDQVLPGMQELMSDHAGRHKLSDFVLRYRHTTHILEMGETRFRKDYCKWAEKKGYRNCERMAALIFATAQNGIPVLPNAPSTQIVITEAIRVLHTVEASRDAILTQMQALAKTLPEYSLVREMPCIGDTLAPRLIAEIGDVRRFHSKRALIAYAGIDAPPYQSGKFCANNRHISKRGNRYLRKTGYEVMQSYVMHKPANDPIFTFIEKKRGEGKSGKLAMVAGLNKFLRVYYGKVTELYRSLPAIE

SEQ ID NO: 372122 - protein, 358 aa, unidentified
MQSKSKKLDFKGVNIYTGIDTHLKNWRVTVMVEDTYYKTFSMDPKAKELSAYLKKHFPGGDYYSAYEAGFCGYSVHRSLVLEGIHNIIVNPADIPTTDKERKQKEDSRDSRKIARSLSNGELEGIYIPTQKTEELRSLVRYRKSLVKDIGRNKSRIKSFLYRHGIEVPMELDTASKYWSSNFTIWLGTVQLSTDFGHTVIHNMLDTVTLLRTKLLEVQKELRRIAGQEGYAQQVKWLTSIPGIGIISAMTFLSELESILRFKTLDKLCSYIGLVPTTNSSSETERVGGITPRSNQTLRGMVIESSWIAIRNDPALALAYSNLCKRMKPNKAIIRIAKKLLNRIRYVLNNQKEYEYAIV

SEQ ID NO: 372123 - protein, 404 aa, unidentified
MDDPTTAFGGVDWAVDAHAVCVVDDRGEVIEELDVAHTAAGLAELCQHLKAAGVRRVAIERPDGPVVDALLEADLEVVVVASRSVKALRERYGTSGNKSDRSDAYVLADCLRTDGHRWRSLEPDTPATVTLRSHVRARKDLVEHRVAVANQLRAHLRIVFPGAIGLFRDIDSPISLRFLERFPSATRAAWLSDKRLGSWLRANGYSGRKTPAELYRRLQNAPTGLLGDEGDARATVTLAYIAILRALRTQIDELDTRLDELLDTHPDAAIFRSLPRCATVRAATLLAEIGDCRARFPDPESLSCLAGVAPSTRASGRHRAVTFRFSSDKKLRDALCDFAGDSWRANHWAEARYRQLRADGKTHPHATRILARSWAHIIWRCWQDHTPYDPTRHGGHIRLFETAA

SEQ ID NO: 372124 - protein, 379 aa, unidentified
MIVIGVDTHKRSHTLVALDAVTGVTRGQLTIPATDDGTLSALRFAAELDSERVWAVEDCRHVSGRLERGLLASGDRVVRVAPGLTETSRRAVREPGKSDPIDATAIARAALREGTDTLPVAHLDEQALEIRILNDYRDQIVTERSRLANRLRWHLVQLAPELEAKLAPASLDHPQVRQRVARRLTRLPRGPQVRVAKLILKRIGQITVEERELRAEIKALIEAHCPALLAEHGCGPVTAAIIIGHTAGAQRFPTDACFARHAGTAPIPASSGNTQRHRLHRGGDRQLNRAIHIIALSRARTDPATRAYLERKHTEGKSKREAIRCLKRHLARRIWRILYTTHTPESPPPALTPTPPRPPSRRPISTIGGGAPAVMPCTR

SEQ ID NO: 372125 - protein, 443 aa, unidentified
MRREPEELPDEEHELIIERVCAIDVAKDSGKVCTRVPQESRPSRRVSRVWDVDATTGAILQLGDHLVCQGIEKVTVESTSDYWRIWFYLLESRGLDVQLVNAHDAKNVPGRPKTDKLDSVWLAKLTEKGLLRPSFVPPKEIRQLRDYTRMRVDLTRERSRHWQRLEKLLEDALVKVSAVASTLDTLSTRDMIEALIAGERDPRVLADLARGRMKAKHAALVEALTGQFDDHHAVLARMLLDQIDGLSTQIDELTARIDQLIAAIPAAQTPDCAEHGENNRPLSALDRLDEIPGIGRHGAQVILAEIGLDMSRFPTAGHLVSWAKLSPRTIQSGAKQRGGKTGKGNPYLKGILGEAAAGAAKTDTFLGERYRRVVKRRGKLRALVAVARSILVTIWHLLADPTARYHDLGADHFTNKIDKGSRVRNYIRQLQALGYTVNPTEAA

SEQ ID NO: 372126 - protein, 358 aa, unidentified
MQRNKKTFKGQNIYIGIDIHKKNWQVAVITESGYTERLSTAADAKALFKFLKSHYPDGNYRAVYESGFSGFATHYALSDLGVSCVVAHAADIPSSQYELTMKSDRIDAEKLARALRAGLIRGIYVRPKENLDDRGVLRIRKTIQIQVGGYKTRIKHLLHSNGVELPERFSRSGTHWSRAFIAWLREDVRLLSDTRRSLDLLLLQVETLRANLLEATRRVRALSMTDRYREDCALLMGIPGIGLTVAMTILTEVCDIGRFGNERQFASYLGLVPTSHSSGERVSHGEMTFRGNKHIGPLLVEASWVLIVRDRELGRMYTEYRWRMAGQKAIIKIARKLSNIIFAVLKTRKAYEPYRRDA

SEQ ID NO: 372127 - protein, 391 aa, unidentified
MIFVGIDVAKDTHYAAVSDDSGAVLVKPFAFQNNAEGFCLLLKKLSEFDRSKLLIGLESTGIYSENLICFLYESGFRLAVINPIQTATLRKTAIRKTKTDKVDTMLIIKSLMVNSYRLYSQRDADSLKLRTLCRFRQNLKKSKARLKIQLAGYVNLVFPEFGKFFKSGIHIAASYALLKKYSSPKEIAALRTSTLCTLLSKASHGRFGKDTAEALKSLALSSVGVKNPYISIQIAQTIAQIELLEQQIKDLNSAIEEAMESINSVLMTVPGIGAVNAACILGEIGDIKRFSKPCKLLAYAGLDPTVRQSGQFTAKSTRMSKRGSALLRYALINSAWQLTLNDTTFKAYYDLKRSQGLNHYGALGHVAHKLTRVIFKLLTSDTPFIPAKLVA

SEQ ID NO: 372128 - protein, 409 aa, unidentified
MRVMHCACAGLDVHQKTVVACTLVGPAGADPQIDKRTFGTSTSELLAMADWLRQRGITHVAMESTGTYWKPIWAILDGQFDLTLCNAAHIKQVPGRKTDQKDAEWIADLLRHGLLKKSFVPPQPQQDLRELTRYRAQVSADRSAVSNRIRKLLEGANIKLGSVASDVLGASGRRMLEAIVKGETDPHLLADLALGKLKEKRTELIEALRGRIRDHHRTLLRLELAQWKFLDTLVAELEQAIEEALGPFLTAVERVKTIPGFSDVSAAAVIAEIGPNMQQFADPGHLSSWGGICPGNNESAGKRYSGKTRSGNIWLKRILCQVGWAASHTRHTYFAALFRRIAAKRGKKRAVLAVGHALLVTIYAMLSKQQSYQELGADYFDRLHADGLKRYCLRKLEAMGHRVILEPAA

SEQ ID NO: 372129 - protein, 561 aa, unidentified
MVSPLFFYQLVLVALVWLCVMLHWAWPSDPAAVCPTTPEPPGPLPKHNREPTPFAGLTCKPPCAACEQAHEHVSQPPGCPPPRIVPTRGRPRQVVTSFHFCPDVHCDYQGWVGLGNLSANGHPSGGPWRQLYCTGCGGYFQETHGTPLHGKRVAPEKLVWAVGALAEGLGIRAVARVFEVDPNTVLAGRNEMDPPLCGSTAMSHNEFTIREPIEPQEASPMKPEMSILGIDIAKRVFHAVGMDERGKIVLRKRLSRHDLMPFLAKLPAVRIGVEACGGAHYWARRFREHGHEVKLMAPQFVKPYVKSNKNDSRDAEAIAEAVTRPTMRFVPIKDVDQQDIQALHRVRERLIGERTALINEVHGLMHEYGIVMPKGVSKFRQAVVEKLESEKDKLTALSQEMFWKLVEEFAALEKQLAYYQEKLDTLATTHPECQRLMTIPGIGPLTATALVAAVSDASAFKNGRQFAAWLGLVPRQHSTGGKERLLGISKRGDSYLRKLLVHGARTTIRWVGRKTDRRSQWIRQLVERRGKNRAAVAVANKNARIVWALLTSHQDYQLTTG

SEQ ID NO: 372130 - protein, 346 aa, unidentified
MEHYVGLDVSLKLTAICIVDRTGKIVREGVVTSDPETIAAFIKSHAPHVARVGLEAGATSTWLWTELNKIGLPVICIDARHAKAVLKMQINKSDRNDAVGIARIMQCGWYKEVRVKDLDSHATKALLVSRALLVKIKRDLENQIRGLLKNLGLVIGRAKMNVFAARAAELAEARPELAAAVEPLLKAREAVGRQIADLDRKVLRLARNNAQVRRFITVPGVGPITALCFLATIDDPTRFKRSRSVGAYAGLTTRRYASGEIDWTGRISKCGDKMLRTYLYEAANVLLTRIEKWSALKAWGIRLAKRSGLRKAKVAVARKLAVILHRMWIEGTEFKWSSKEAANQPA

SEQ ID NO: 372131 - protein, 405 aa, unidentified
MNAIGIDVSKGKSMVAAMRPGGEVIFPPFEVEHTASELSALAKRLKSLDGETRVVMEYTGSYYLPVAYALHEAGLFVSAVHAKLIHDNGKDESIRRVKTDKADALKIANYGIEKWAKLRQFIPESDARRTLKLLSRQYNKYGSLKTMLKNNFISLTDNTFPGVNELFTSPPRPSNGHQKWIDFATHFWHCECVCCGSVGAFTERYRKWCKRMGYRFNLTKAEDIYVCACGHFGVVEKNTFSKSLMTQAAAQLNAVCETQAAIAREMKHLAEFLPEYPVVSAFFGVGDILAPQLMAEIGDVYRFKNKGSLVCFAGLEVPVFQSGKFSAKDVPISKKGSPHLRKTLFQVMTCILQNAPANDPIYQFLDRKRAEGKHYFSYMTAGCAKFLRIYYARVKEYLDRLDSAA

SEQ ID NO: 372132 - protein, 410 aa, unidentified
MGVNIMQIIYSHCCGMDVHKQIVVVCLITPKGKEIRSFGTMTESLLEMVDWLIANNCTAVAMESTGVYWKPIYNILEATGMEILVVNAQHIKNVPGRKTDVKDAEWIADLLQHGLLRGSYIPDRDQRELRELVRYRTKLTQERSREVNRIQKVLEGANIKLGDVASDVMGKSGQDILRAIISGNSDPKTMAQMARGKLKNKTELLEKSLTGLIGPHQKMLLETQLQHIDFLNEQIQKISKEIESRMRPFEQAIEALDGIPGISRTNAEQILCETGIDMSRFPTDKHFASWAALCPGNNESGGKRKTGKTRKGNMALKAALTQAATSASRTKGTYFSAMYRRLAARRGKNKAIVAVAHAILITIYHMLKDSSNYRDLGVNHYDEINRQAIIKRSVKRLESMGYKVTVEPAA

SEQ ID NO: 372133 - protein, 343 aa, unidentified
MSYKLYFGVDVSKLWLDIAYYDGVDVDWKHGHIRVDNDEKGFAQLGRWLDRLGVGKGTCIFCMEYTGLYSQEFRQWLERMKIVYGMVSPRKMHRFEPDLGEDERSLDRIKTDEMDSFRIAIYCKEHSMKIRRKPSHLPSDAYFKLKRLLAERRQYVKQSTLYKQQLHDIGKYDTEASRQRKEAELASLTENALQTSKEMEAIIREDADIRKNYGLLCSIKGIGLIVAAETIVLTENFTSITNPRRYACYVGIAPDRKESGVSIQGGDHVGRKGFTQAKADLSMAALHAIRFDKGIRAYWLRRKAEGKHSGVVLNAVKFKIVLRMFAVIRRQKPYVEMEEYGKK

SEQ ID NO: 372134 - protein, 367 aa, unidentified
MLESITHVGLDAHQERIHAAILLPGRKDPIVDSFANTSEGIRRFVRRLQKQVPGPIESCYEAGPLGYGLQRSLIALGLGCIVIAPSLIPSKPGDRIKTDRRDARKLAELLRAQLLTEVHTPTPDQEAVRDLCRAREAVKEDQKRVRHRLSKFLLRRSIRWTMGRKAWTRAHQEWLRVQRLDHSADQVILDDHLLAIDQVDGRLFALDEQIEAWSKQEPYAEPVGWLRCFRGIDTLTALSIVTELHDVRRFPSPRALMAYLGVVPSEHSSGSQVRRGPITKAGNGRLRRLLIESAWHYRHRPAVGHRLKKRREGQPAHVIAVADRAQQRLHRRYRRLVERGKVPNKAVTAVARELVGFVWAALQPQPK

SEQ ID NO: 372135 - protein, 408 aa, unidentified
MKVFVGDDWAEAHHDVHVMNEAGDKLAAKRLPEGLDGIARFHALIAEHATEPGEVFVGIETERGMWVQALIAAGYRVYAINPLSVSRYRDRHSLAGAKSDPGDAKLLADLVRTDSHNHRPVAGDSDDVSGLKVLARAHQNLIWDRTRHTNRLRNDLREYFPAALAAFDSLAHGDAVAVLAKAPHPDQAKALSIAQIRSALKHGGRQRNLDTRSTEIRKALREPQLAAPPATAEAFAATTESLVEVIAGLNASIAKLETKLATHFRNHPDAGIYLSMPGLGVTLGARVLAEFGDDPERYNSAKSRRNYAGTSPRTIASGKKRAVLARHVRNRRLYDAIDQWAFCAINTSPGCRTFYDQRRTAGDLHHQALRALGNRLVGYLHGCLKTHQPYNEHTAWAHRQQPPVTIAA

SEQ ID NO: 372136 - protein, 362 aa, unidentified
MEQHQGTKLDFRGQQIYAGVDTGMKSWKVCIMTEQIEHKTFSQPPRVDVLTKYLRRNFPGAEYHCVYEAGYSGFWIHDELRASGIDCIVVNPADVPTKGKEHTHKTNGVDARKLCRNLRSGELDAIYVPARRSLEDRSLIRTRYGFVRKQTRCKNQIKALLAFYGISLPEEIAASHWSRRYIRWLEQEMIFKRPSGDQTLKSLLEELLSLRQIIAQLTRQIRALAHEEPYSTSVQYLMTIHGISTLTAMTLLTELIDIHRFGTLDHLANYCGLVPGERSTGEEQTMTGISPRRNAMIRGLLMECAWVAVRKDPALLMAFNTLSTRMPKNKAIVRIARKLLNRIRFVLKNQQPYQACIVQSPR

SEQ ID NO: 372137 - protein, 386 aa, unidentified
MNKIIYIGMDVHSTNYTLCSFEPGYGFEEDKIFGQVQFTEDFVKNTEKYISNLKKQRKDIEVICGYEAGCLGYVPQRELTKRGIQCVILAPSTMAVQKGGKKIKNDYRDAIDIARCLSSGAYKPVYIPDTEDEDVRDYIRMRDDHNIALKHTKQQLNAFLLRHGFKYEGKSKWTMRHLAWVRKLDCTVLQREIINEYLATYDTLTNKMKALDVRIEDFAKIERYSGTVRKLTCIKGISTHTALSFMTEVGDFNRFGTAQKFAGYIGLTPGEQSSGESERKTNITKAGNSHLRRLAVECSWSYSRGILGHKSVELKKRQKDMPAEVIAYADRAADRCRRKYYRMTAKEKNANKTVTAVARELCCFIWGMATAHYENIEDRPKELPEL

SEQ ID NO: 372138 - protein, 319 aa, unidentified
MWQPDRDRVRRWLRDDVTRRADGQPVAMAVEGCTGWRYVVEEVEAAGFEAHVAEPADTQAARGRKHRAKTDRSDARLLRELLRQGELPESWIPPPVVLEWRERVRLYKSLVDQRLVWMQRIHAELFQHGVAVPESAIRSAQTRARLASNDVVLSEAARQRVRVGYTMIDATDAEALPLKEQLTRFGMRQPACRVLVDSHYGIGGLLAVAIWSEYGDCRRFTRSDQAVRHTGLDVMVDSSDLRRAGGYLTRQGPATLRWALFEAAHNASRSGSPDHSYYTTVKDRHDGKLAAISVARKFARRCYHVLRNMDPDVVYAVPA

SEQ ID NO: 372139 - protein, 440 aa, unidentified
MAMRKREDLVFPNAAAIDIGASSHWAAVPPHSSDAPVREVGTMTDDLNGLADWLISCGVDVVALESTGVYWIPVYEVLEQRGLKVWLVDARQVKYVPGRKSDVQDCQWLQRLMSYGLLRPAFRPGADVCVIRAVARQREVLLTQQASWVQRMQKALVQMNLQLTEVISDVMGQTGQAIIRDIVAGQRDAKALARHRHRRVKASEQDIVRALTGNWREEHLFVLEQALGMYDDIAARLRVCDDKLGELLAERCAASVDLGKAPRAGSKARAEHDVRQQLANWAGADLTRINGLGLDSVMKILSEIGTDLSRFANVKHFCSWLGLAPATKISGGKVISARTKRSANRVRQALKMAAMSLSHSDSALGAFYRRLSSRMDKPRANTATAHKLARMVYFMLTRGEAYVDQGQQRYEEQQRQRSVAALKRRAAALGFQINPVGAAA

SEQ ID NO: 372140 - protein, 410 aa, unidentified
MQVVYPRCCGLDIHKKTLVACVLLTNPDGMLHRFVRTFGTMTADLLALDDWLSSHQVTHVAMESTGVLWRPIYNVLEEGRTLLLVNAQHIKALPGHKTDVKDSEWLADLLRHGLLHPSFIPPQPIRVLRDLTRYRKSLVEQRTQEINRLHKVLETANIKLGAVASDVVGASGRRMLHAMEQGESDPEVLAELAKGRLREKLPALRLALTGRLQAHHRLLIGELLDHIEYLERAIHRVEVSVADLLTEQERAVQILLTLPATGPVTAAAIIAEIGTDMRRFVSERHLSSWAGVCPGNKRSAGKQKSGATTKGNTHLKTILCEIAATIARSPDTYLHALYHRIARRRGKPRAMLAVAHSLLVSIYFMLRDQVPYQELGPDYFDHLQAQQLERHYVRRLEALGFTVSLTPAAS

SEQ ID NO: 372141 - protein, 262 aa, unidentified
MLIIGLDYHPEFQQIAFVDDETGEFGERQLLHQNGEAEKFFCELKQRGVKVRIGMEATGHSRWFERLIAALDFELWIGDPAQIKAKRVRKQKTDREDARLLLSLVLENRFPRVWLPSPENRDLRQLLWHRHRLVQMRTRIMNQLQAVAMNEGVRHKKGLWSNAGRAQLESFSLAPWAAQRRQDLLELIDQLNPRIEELTTAVKKEAEKMPEVLRLMTHPGVGELTALAFVLIIGTPQRFQCGKQIASYLGLIPCEDSSAGHC

SEQ ID NO: 372142 - protein, 455 aa, unidentified
MARRRKQEKNVYSLPVIRPETAGIDIGATQIYVAIAPDRDPEPVRMLGTFPRDLRAIADWLRATGVKSVAMESTGVYWIPLYQYLESCGFEVVLVNAHHIKNVPGRKTDVRDAAWIQLLHSVGLLSGSFRPAVEICAIRALVRHRQNLVEWSSQAILWMQKALTQMNLQLHNVIDDITGASGMRILRAVVKGERDREVLASLCDKGIRASREVIINSLEGDYRSEFLFILEQTLQQYEDLQKRIGACEAEAARLMDELPEKVDLKEKPLPAARIRVKRRASQPAAVPHLREKQYRVLGVDLTTAPCLHTTTVEVFLSEVGPDLSKFKNASHFANWMGLPPNNRVTGGKRLSSKRRKVKSRMATALRVAAQSAARSENAIGDFYRRMKSRIGPEQAITATAHKLARIIYHMVTTGEAYDESVFAKAQQKFRRNQESKLRANAKRLGFKLIPLEEAA

SEQ ID NO: 372143 - protein, 391 aa, unidentified
MPQPNDLSRSLTALDQDSTLIAVVEMSQSSWLVGAIIPGVERRPAKKLEASEGMLLALLHRWRDEAAKAGCTIDRITVAFEAGRDGFWLARWLRQRGIEAHVIHATSIAVSREHRRAKTDRLDAALLQRAFLGWLRGERGHCMMVAVASLAEEDAKRPSREREALVGERTRIGNRMKSTLARLGIRGIRPGLRKAAERLEQLRTPEGAPLPPNTLSELRRDLARLRLINDQIAEIEAARLERLRQQPDQARHPMILLLARVIGIGIETADMLVQEVLSRKLRDRRAVARYGGLTGSPEESGARRREKGLARAGNARVRRGMLQLAWRFLMFQKDSALAQWYRARTADARGATRKTMIVALARKLLVALWKLVTTGELPNGVVLRPAIQAAV

SEQ ID NO: 372144 - protein, 326 aa, unidentified
MHGVDAEGNVLIRRQLKRRYVLAFFEKLPPCLVGIEACATSHHWSRELKARGHNVRLMPPAYVKPYVKRQKNDAADAEAICEAVTRANMRFVETKTPEQQSCLMLHRTRQLFIRQQTSVINAIRAHMAEFGIVAPVGRKGVEQLLDVVADARDRRVPEVARACIAALGAQLRLLKAQILEFDRRILAWHRSNETSRRLDELPGVGPALATALVASVADAKAFRSGRNFSAWIGLVPKQHSSGGKDKLGSISKQGDRYLRSLFTAGALAVIRYAKIHDTQHRPWLTALLARRPTKVAAIALANKIARMAWAMMARGERYREPVALGA

SEQ ID NO: 372145 - protein, 415 aa, unidentified
MALKIVYQICCGIDVHKTFVVACIASTNKQGVTTYKRHRFSTFTQGLKELLQWLLDNHCKDVCMESTGKYWIPIYNVLEKDCNIVLAHPKYVKAIRGKKTDKKDAKWIADLFKHDLVAGSFMPPADIRQLRDLMRYRFKLTCFMSSEKNRLQNCLTVSNIQLASVVSDTFGKSSQRILDKILENPDDTSFDIEPLIHGSMKKKLPELELAIDGFITPEQAGKLKVIKKHFEDLESRKAELEKLILALASPYQQELDLILTAPSFKNKFTAIGIISEIGVNMEAFPSAKHLCSWAGLTPTNNESAGKKKSVRVSKAGCYIKPLLVQCANSVVKSEKHPEIRNRYLRLRKRRGHKKAIIAIARMLLTALYHILKNGENYNAELYRKSDLPPVDREITVEQALMIARNQGYKIKSATA

SEQ ID NO: 372146 - protein, 426 aa, unidentified
MLKSQELKLATIEKTQIIVGVDIAKKTNWAVMISPFNRLLQKAFSFNNTKEGFKNLVENVEKIKKIQKAENVIVGMEPTGHYWKPLANYLFNKNIKVVMVNSFHVKKAKELDDNSPTKNDKKDALTIARLIKDGRYNEVYIPEGVYADLRNISNTRFELIRKRNAVKNRIVAIMDEYFPEYIYVFKGIFCKTSIQILKNCPFPEDIKLKGIEEIITLIKQEVKKLYSKKQIIELKNNALSTVGVTRGITTAKIQLKMYIEDYELLEKQIQETERQLEKLLEQVPYAKHILEIPAIGTVNFAHFLGEIGELTRFSHWQQIRKYAGYNLVENSSGEHKGKSKISKRGRHMLRSVLYQMALVMIAKNKEIKQLYGYLTKRKDNPLKKKQAVVAVIGKILSIIFALVKKDEKYDSTKVFNQERQLELVAA

SEQ ID NO: 372147 - protein, 385 aa, unidentified
MDIVHDRCCGLDIHKKTVVACLIAPGPDGKPKKEIRSFGTMTGDLLGMADWLQRAGCTHVAMESTGVYWKPIYNVLEDRFNLLLANTKHLKMVPGRKTDVKDCAWIAELLRVGLVQPSFVPERAERESRELTRYRSSLVRERTAEINRLQKTLEGANIKLASVASEVMGKSGRAMLEALVAGIADPTVLADLALGQLRRKIPELQRALVGRFGAHQCFLVVEQLAHIDELEQRIERVSQEIRERMRPFETEIALLDTIPGVNRWTAEVLLAEIGFDLSRFPSAGHLASWAGLCPGNRESAGKRKSGRTRKGSPWLRVALTESAHATGRGKTYLAAQLHRLIPRIGLKKAAIAVGHSILVIVYHVLTRHQPFHDLGARPKSGEDAL

SEQ ID NO: 372148 - protein, 462 aa, unidentified
MQKFYLGCDVSKGYSDFVIIDDQMNCVEENFQLDDTAIGHAELSERISTFFEKHPSATLYAAVESTGGYEDNWYAFLLRQQGKFNLHAARVNPNGIAHDNKAGMIRNLTDKISARSVAEYQIRHPDKIPYGKRDPNKSLKKMWGRYRSLKKQMGVLLNELESLLYSANPELLPYYRSRMPQWLMLLLLKYPTAKMLARARVTTVASIPFLKKPLASVLVKNAKASTAEDSDDLTAFLVTSTVSQIASLAKQITIFEQRFEKECDWPEVQLLMSINGVGRMTAIVLMLYIEDITRFKSAKKLASFLGVHPELKLSGDGSKKGSYKMSKKGQKAPRAMLYMSVLAGLSKGSRNDVIKRIYDEKRASGMVAKAAIGVCIHKLVRLAYGVLASSKPFDPAIDDKNREKSKPAEKPVPLSKDRRYQGFDTAAPVSRRQNKKRMEQIKSQDSYAVECGIKDHAPRALQ

SEQ ID NO: 372149 - protein, 393 aa, unidentified
MQQRKNAGSEPVNNTESTSSIFISGLPACLNPDPDSRLTSIVEVVRLSSSPFFLKSVKDKSMENFYFIGVDVSKKKLDFCVMFEGKVVHEEETANHQSAIMSLLHHLEEDYGIVSDQILVCAEHTGQYTFPLACACKAVECKLWLENAAEIKYSSGVQRGKNDKVDAKRIAVYARRFQDKVQYYERPTEDIERLKQLESERTLYVTDLAKYKGQIKDQKDYMPKALYERKMKRLQALMDDLEEAIQAITDEMDEVIASCPVLSRQRELLMSIDGVDRVVATNMIIATEAFTRFDDPRKFNCYAGVAPFSYSSGSSQHSKARVSHRADKVMKRLLHLAAVAVTHRVGGELKKYYERKVAEGKNRMSVINALRAKIVARMFAVIKRNEKYKPILS

SEQ ID NO: 372150 - protein, 316 aa, unidentified
MTEAGGFVGIDVAKAELEVVVRPSGARWTVTNNASGLAQLQGRLQAAAPSLIVLEATGGYEVAVVAALATAALPVVVLNARQVRDFARATGRLAKTDAIDAGVLAHFAEVVRPPVRPLPDAMTQDLQAWLTRRRQLVDMLLAEEQRRSRAPRAIQRQIDQHVRWLRAQLGAVEKDVAQTLRESPVWREKEDLLRSVPGVGPILTTTLLGDVPELGQLNRKQIAALIGVAPLNRDSGTYRGRRAVWGGRARVRATLYMATLTAARYNPLIRAFYERLVAAGKPKKVALTACMRKLLTILNAMIARRTAWKPPAAVTA

SEQ ID NO: 372151 - protein, 279 aa, unidentified
MKVTTVGIDLAKNVFQVHGVDERGKAVLRKQLRRAQVAMFFGNLPPCVIGMEACASAHYWGRTLQRYGHTVRLMASQFVKPYVKTNKNDAADAEAICEAVSRSNMRFVPIKSVEQQAILSVHRVRQGFVKARTAQANQIRGLLGEFGLVIPKGIYNVAKRVPELLEDASNELPVPFRHSAWLGLVPRQHSSGGKPTLLGMSKRGDAYLRTLLIHGARSAILAAKLKVDNTNGWLTNLLTRRHPNIAAVALANKNVRTVWALLAHGREFKADYARHRMAT

SEQ ID NO: 372152 - protein, 411 aa, unidentified
MVKENFIYVGIDLHKETHTAVMIDCYNQKLGEITFPNRPADFPKLVTKVKKCNTDAKEVVYGLENAYGYGRPLAVWLIDKGYFVKDVNTAISHRQAKHRGAMYRKSDSDDAEAIALATLNMLDKLPDACPNDAYWSLGQLVHRRDNIMKQRTRLVNQLHEQLCIAYPSYKQFFNDISRPTALYFWEHYPSRKYLKGKSVEDLRAELVPVSHNKCSTKTCEKILDAVASDKVKNNAYQDARDMVTLSIVSDLQHYDSQLAEVDKMLEQMYKMLGCTLTTIPGVNVITAVKILAEIGDIKRFSNANKLAQFAGIAPLHLSSSGKGKDVATKQGNRRLQATIYFLAIQMVQVSSKGTPRNSVVRAYYEKRKAEGKTSQQALICISRRLISIIYGMLKHGTEYRMPVVESAGENR

SEQ ID NO: 372153 - protein, 310 aa, unidentified
MKKQTKHTPSVVLTSPAAVSGFTLGLDLGDRSHYVCVLDATGQMIHEGTLVNDRVALALLLTKYPAATVALEAGTHSPWISRYLTSLGATVIVANPRKLHAISRHERKCDRRDAVMLARLARADVALLHPLQHGSAQAQHDLLGLKLRDSLVRTRVNLINTVRFTLKSLGHTVSNPSSESFHKNMVTAVPAECLPVIKPVLAVLALLTEKIKLLERDLVRRSKKDYPVTQRLQQIAGVGPLTALCFVLKIGEPTRFGRSRDVGPYLGLCPGRDQSGGTDKQLRISKCGDGLLRRLLVSAAHYILGPFGPA

SEQ ID NO: 372154 - protein, 351 aa, unidentified
MNFIGIDLHKKTISACVMNQDRKVLKRQTLPCSEPKLIVAFFRQWGEFQAVVEATASYEWLWQLLEPLAQRLVLAHPKKLRVIAESKNKSDKLDAQVLADFLALNIIPEAYRPTLRQRQHRALVRQRCFVKKNLTRVRNKIRRLVSDYNADRRDLFTKTGLLYLAEVQKKFAEADRFVLGQLLAEWQYHRQQFQEVQRRLKFFAGKAPAKEKEIRAVLGSMPSVGPTTIEIVLSEIGDIERFRSNKRVVAYAGLAPGHRESAGHKKDLGITKEGSRLLRWALVQTAWRTLRCSVRWRWVYENLKKRRGSKRAIVAVARRLLTVMAALWRTGQRYRLEGGDPAGIPALVPAR

SEQ ID NO: 372155 - protein, 339 aa, unidentified
MQITTIGIDLAKSVFQVHGVDAAGNVVVKKQVRRTDMPEFFANLPPCLIGMEACGSAHYWARKLEGMGHTVKLMAPQFVKPYVKTNKNDAADAEAICEAVRRPNMRFVPIKNVEQQAILALHRARQGFVKARTAQGNQIRGMLAEFGLIIPKGLAFVRERVPLLLDEAGDELPGAFRTLILRLLEQLKALDRQVGELELQIQVWHRSNALSKRLEKIPGIGPITASALVASVGDAKNFKNGRQLAAWLGLVPRQHSTGGRANLLGISKRGDTYLRTLLIHGARAVIRYAEGKARQDWLHRLLGRRNKNIAAVALANKNARTVWALLARDREFRSDFAGA

SEQ ID NO: 372156 - protein, 348 aa, unidentified
MTLTIVETRAVTGGVDTHADTHVAAALDSIGGMLGVREFSATPVGYADLLGWLGGFGTVHLVGVEGTGSYGAGLARHLRAAGVRVVEVDRCDRQDRRRQGKSDPLDAVSAARAALSGRALGVPKGRDGAVEAIRALMVAKRSARGERTQTINQARALIVTGPDELRAKFARHSPAALVAELAALRPRAGDVPGYATQIALRELARRVEFFDAQLQRLDALIVPLVTTHAPGLLAVYGVGPDTAAMLLVAAGDEPARLRSEAAWAHLCAVAPIPASSGKVTRRRFNPGGDRQANHALWRIVITRMSAHPPTRAYVARRTAEGLSKKEIIRCLKRYIAREVYPHLRPAGG

SEQ ID NO: 372157 - protein, 388 aa, unidentified
MTTDHEFAVVASTTDVQKVFVAIELSKSTWVVAIQPPAVDKVSLFRIAGGEIERLFELFEQARRRAGQPVAICACYEAGYDGFWIYRALTARGVACTVLDSASIQVSRRARRVKTDRTDAESLVRVLMAIYRGEHQVAKIVQVPSPEEEDDKRLLRCRGNLLRDRIQHMNRIRGLLNLQGVRHIDPNRSNWENELVNLRTGDGRSFPRQLMNEVRREGKLLGTVVRMLKEVEAEIAGMIRDERKRRHPAQRGQNHPIARRLAEIHGVGPQTAGILATEVFYRGFKNRREVASYVGLTPTPYNSGTMVRDQGISKAGNRRARAVAVELAWIWLRNQPESKLSRWFRTRVGDSAGRVRRIAIVALARKLIVALWHFLEAGVIPEGAKTNA

SEQ ID NO: 372158 - protein, 381 aa, unidentified
MTTAATHHEHSNTTEATLFMAFELSEKTWKLGFTTGHGQKPRERTVPARQQERVLDEIAQAKRRMGLPDTAPVVRCDEAGREGFWLHRFVQGHGITNHVVDSSAIEVNRRRRRAKSDGLDVRKLLSMLMRYHHGERQVWQVVKVPSVEAEDQRHLHRDLETLKQERASTTTRIQGLLSSQGLRVTSLTKLPEQLDALRLWDGSPIPPGLRRRVLRVYAHHTFLSEQIAAVEAERRAQLQTSSEASIDKVRQLMQLKGVGINGAWLLVMEFFGWRAFKNRREVGGLAGLTPTPYQSGESAREQGITKSGNRHVRWMTTELAWSWLRFQPDSALSVWFRERFGGGGSRLRRIGIVAVARKLLIALWRFLKTGVLPEGAELKKA

SEQ ID NO: 372159 - protein, 368 aa, unidentified
MIVRIITYERSTLVNDEKYIGLDVHQATISVAVMDATGKVVMESILETKAATILEFFAGLRGTLWVTFEEGTWSVWLYDLLNARVDKLVVCNPRKNALLKDGNKSDRIDARKLAELLHGNQLKPVYHGETGVRMLRELSRSYLTIVKDLSRVMNRLKAVYGSWAIPCAGRDVYYRRHRAQWLAKIREAGVRRRAERLYEQLDMLQHLRQQARRELLAEGRKHAITAKLRQIPYLGPIRSVLAVALMQTPHRFRTKRQLWAYSGLALETRTSADYRYVEGQLRRSKKVVSIRGLNKDHNHDLKGLFKGAATMASVRPGPFQDFYQAALAKGIKPTMARLTLARKMAAITLTLWKKGENFDAEKLKSQAA

SEQ ID NO: 372160 - protein, 350 aa, unidentified
MIIIGVDFHPGSQQIASVDTDTGEFEEKRLAHREEAEKFYRDLASRGAQIRVGMEASGYARWFERLLAELQIELWIGDASEIERKRARKQKTDRQDAQHILQLMLKDDFPKIWVASWENRDLRQLLWHRHRLVQARTRIMNQLQAVALNEGLQCKKRLWRASGRQQLESFRLGPWASRRRRDLLELLDRLSPTIAELSQAIEQEAEKCPEAQRLMTHPGVGPLTALAFVLIIGQAERFQCGKQVASYLGLVPLEKSSGKRRRLGHITKQGSSIVRFLLVEAAQAAVRGDPQWRSKYLRLLMRRGRKTAKVAMARRLAIRLYWMWRERQDYQQSRSFGSHAGQPGNRDGVH

SEQ ID NO: 372161 - protein, 375 aa, unidentified
MSDLSEAFVGLDTSKLRNSVAIAEGGRDGEVRFFGEIENTPAAIGKLVKKLATKYGRVIFCYEAGPTGYGVYRQITALGHECVVAAPSLIPKKPGDRVKTNRRDAISLAKLLRSGELTAVWVPDRGHEAMRELTRARETAMMDLRRKRQQISAFLLRHGMHYAAEKKTWTKAHMDWLGRQKLDLAEERIAFEEMMQAAREARDRLHRLEDAIRAAVPQWSLAEAITALMAMRGLDLVAAATFLAEIGDLSRFQSPRELMAYLGLVPSEQSTGDTVKRGPITKTGNGRARRMLVECSWSYRHPPRVGLNKQEKVAAAPQAVREIAWKAQSRLHNRYRSLLRKGKLKTVANTAIARELAGFLWAVNRAITRTGAAAR

SEQ ID NO: 372162 - protein, 360 aa, unidentified
MKQSSPSSSAAHRIAGVDLGDLTSHVCILDSITGEVLEEARIRTRPKDMQSFFGRHEAMRVAIEVGTHSNWSSRVIADAGHEITVANAARVRLIHGGPGKNDQLDAEKLARLLRYDRNLLSPIQHRSKNSQYDLAVLRGRGALVSARTMLVNHVRGVMKSFGLRIPTCATKVFADKARQHVPSELMPALQGQLEIIESLTGQVHALDLKIRDLCSNKYPVTSVLMQVYGVAEITALTFVLSIEDPNRFNRSRDVAAYLGLVPGQRQSGSSDPARRITKSGDRELRRLLVQCAQRILGKRGIDSDLKRHGERIASSGSKDAKRRAVVAVARKLAVLLHCLWLTGEIYEPLRNSKRKPSISA

SEQ ID NO: 372163 - protein, 348 aa, unidentified
MVNAAGIMGIDVSKKELAYALGDACSKRVVWERKVPNTPAGVRRILEQSPPGTAWVVEPTGRYSISLVKQARQADQRVFLAPPRKAKMFLASLPQRAKTDRLDSRGLAMFGLARMTLDPLAPYPIKSGNVERLDQLLSARKGLSRALSKLKQQRSELPHAAEALKAAVADLGAHIKALDKQIAALTEEDPDFAVAKELMKVPGIGKVTAAAVAARLSCKRFSHPDQFVAYVGLDLVVCDSGQRKGRHRISKQGDAELRRLLFLCAQASTRASNSPFKAHYERELHKGLTTTGALCAVARKLAKVCWSLHRHQSRYDPARVYQSPIPRTRAEAGAEDQIPQAAGRADGS

SEQ ID NO: 372164 - protein, 365 aa, unidentified
MASLPSGPGVVHVGMDTSVREIVCGVLRPGMEVPAVDRVPNDEESVRRLIGRLGDRRLLAVCYEAGPSGYELHRLITSMGVACEVIAPSLVPKGASDRVKTDRRDAVRLTLALRAGMLTAVRVPSPSEEAVRDLVRARGDLLDDRRRAQQRLGAFLLRHGRVWGAAKWTCAHRAWVDRQEFAEPAMQETLDAYRGALEAREAELRAAEARLGAWAGREPLAAAVARLGAYRGIAGLTALTLAAEVVDWRRFATARAFMGFTGLVPAEYSSGARTRRGSITKAGPEGVRTALAESAWAYRHRPAVGALLRRRQAGADPATLARSWKAQQRLHATWRKMAARGKPPGVTATAVARELAGFVWAEMTS

SEQ ID NO: 372165 - protein, 345 aa, unidentified
MEQDTMIGVDLAKSVFQLHGATMTGHVKFRKKLSRQQFRKFMTDHPSASVVMEACGSAHYWAREMTHLGHEVKLIAPQYVRPFVKRQKNDVADAEAIVIAAQRPEMRFVEPKCEDQQARAVLFRARERLVHQRTELVNALRAVLYEFGKIVPQGIRHLKRIDAMLEDPSSSLPMLVCEECRDLMAQIAEKTARIVAKTKKVKELAEQTVMARRLQTMPGVGPMTALAIEAFAPDMKIFRRGRDFSAWLGLVPRQHSSGGKERLGRISKAGQTDIRRLLIIGAMSRLNWMGRRSIPEGSWLAEMLSRKPRMLVAIALANKMARALWAMLTNNEGYRDPTFAKAAGA

SEQ ID NO: 372166 - protein, 388 aa, unidentified
MQDVADQSAAPTTIGTDLCAIFVSLELSRSTWLATSLSPGRGEKMSKHSVSAGDIAALLARFSELRRKACARTGKSFPIVVIQEAGLDGFWIHRVLLSEGIESHVVDAASIATSRRRRRAKTDRIDGETLLRALLAHRRGEPRVCSMVRAPTPEDEDRRRICRERKVLIMERVQHVNRIKGLLFSQGASGYEPLRRDRRVRLDALQTGDGRRLPQHLKAQVCRELDRLELLLEQVKAVEAERDALLNAEQTKASAPPPMLLGVRGVGPEFASVLWSEGLSRQFDNRRQVAAYAGLAPTPWQSGSVNREQGISQSGNRRLRTTMIQLAWLWLRHQPRSALTLWFEDRMERNGSRRRKTTIVALARKLLVALWKYVTAGVVIEGAMIRAA

SEQ ID NO: 372167 - protein, 378 aa, unidentified
MPSETTVYVAVELSVSSWLVAARTAGAEKSRLHRIQGGDTTTLLALITKLRSRASTKLGRAVDVACCFEAGRDGFWLHRLLTAHGIAAYVLEPTSILVNRRARRAKTDRLDAEGMLRVLATWLAGDRQVCSMVRVPTPEEEDAKRPHREREHLVQERLRIENRIEALLFTQGIRKRPSLRSWVRDVAELRTGDGRELPCLLRIELERLRRRLVLALELIHEVEADRAEALAATADDKMTQKIAALQRLRGIGPNFAAVLVREVLYRSFANRRQLASYVGIAPMPYQSGGMDRNRSISRAGNPRARTTLIQLAWLWLRYQPGSALAAWFRERVGVLQGRTRRISIVAMARKLLIALWRYVETGVMPEGVEIRAEADATA

SEQ ID NO: 372168 - protein, 386 aa, unidentified
MRQPNDLSRSLVALKQDATVIAVIEMSQSSWLVAGIVPGVERQPLKKLAVDEKALLQLLHRWRKEATQAGRIIKRITVAYEAGRDGFWLARWLRAHQIEAYVIHPSSVPVSREHRRAKTDRLDTELLKRSFLGWLRGEPNHCSMAAIPSIEDEDAKRPSRERESLVSECTRIVNRLRANLARLGIRGLKLTLVGALERLTALRTPEGACLPANTLAEMRRDLARLCFVKEQINEIERARVQQLEQQPRHPRTASVRLLNRVVGVGIETADMLVQEVFSRKLRDRKAVARYAGLTGAPNESGQKRRDRGLSRAGNARVRRGMIHIAWGFLVHQKDSPLAMWYRARTAGGRSGLRKTMIVALARKLLIALWRLVTTGEMPAGFALRPV

SEQ ID NO: 372169 - protein, 346 aa, unidentified
MEKSISNLSSVTTVGLDLAKLVFQVHCVDTSGRVVFAKTMKRKKILVFFAALPPCVVGLEACGSAHHWARELIKLGHDARIMPPAYVKPYVRRQKNDAADASAICEAVTRPSMRFVGVRTLANQATLMHHKAREMLVAQRTQLLNSLRGHLAEIGVIAPQGQRHAHQLADRIEARDETIPLSVCEALAPLVVQLRYLDVAIAQLDRTIAKMAHKDETARRLMTVPGVGPITASAMVASVQDASGFSGAREFAAFLGLAPRQNSSGGKQRLGRISKMGNRYLRKLLVVGAHAVLYHRKPHTDALRMWAKKLMEKKPFKLVAVALANKMARIAFAILRARTIYNPIAA

SEQ ID NO: 372170 - protein, 351 aa, unidentified
MMIIGVDYHPSFQTIAFLMEETGECGEQELNHSDGQAEKFYRDLKQRGICVRVGMEATGYSRWFERLLAELGFEVWMGDPAEIKAKRVKKQKFDREDARLLRRLMLENNFPQIWVPSPENRDLRQLLWHRHRLVQMRTRIMNQLQALAMNEGYRWKKKLFSEPGRAQLEKLALAPWASRRRQELLELLDRMNPTIEELTAAAEREARKRPEALRLMTHPGVGPLTALAYVLIIGTPTRFQRGKQIGTYVGMIPCEESSARKQRLGHISKQGNSLLRFLLVEAAQAATRIHPDWRRRYMHLAMRRHKSIAKVAMGRRLAVRLYWMWRNGCDYSPSLKVGSYAGQLGTGHGAK

SEQ ID NO: 372171 - protein, 338 aa, unidentified
MSIVMGLDQHRAQITADWLDTETGEVKRGRVAPADRAGVRRFLERFRGEELDVALEATTGWRFVVEELRRVGAVVHLAEPAETAGLRGPKKRAKGDRADARHLRELLMIKRVPESWISPDHILDLRARVRLRHELGEQRTEWQQRIQAVLYHHGCPQRRSLMVGDGREWLASQPLPETAREQVTVALQMIDALSVQMAPLEKELRAYARRQLGCKALMAHYGIGELTAVTILAELGDCTRFSSSRQAVRYAGMDITVKQSDLHRAPGHISRQGPPALRWALYEAAQVARRPGSPDRDYYTQTAARIGGNRACLSIARKLLKRSYHTLRELGEEALAPA

SEQ ID NO: 372172 - protein, 373 aa, unidentified
MPKYSTAFGMDVHLRSTTVCALDADTGEAVTRRFPGNPWGEIAGWMDGFPGPSLAAYESGYLGFAPQRELAGLGVECVVAAVSKIPRSAADSASKNDRNDAARMAKAILAHDISPVWVPSPEVEGIRDLAGAYDGATTRLATAKQRLLAFLAKRGFVYGGTTPAGNPRKYWTYDFLRWLDKVRPEDDGGVRTLAALRNEVEAAAEARADLLSEYRAAVDASPIAAEVAALQSIKGCAFALAAAFSAEVGDFTRFRSGRQVTAYFGLAPSQRSSGDSVRLGGISGAGNALVRKLAVEGSWCYAAARHQPKLMPRDTGVPLEIRVHGRKGSERLLRRREEMLARGVPAAKANAATAAELVRWLWALGMMCREGAE

SEQ ID NO: 372173 - protein, 386 aa, unidentified
MIKHRPLSVHLHKKGHKLFIKNVSHLKQEPMQTKITKKIDFSNHNFYIGLDVHKKSWYVTILTDGMELKTFSQPPSAHLLFDYLNNNYPNGRYFSAYEAGFCGFGAHRELLNLGINNIVVNPSDIPRMDKELSYQTDKSDSRSIARELRNKQIHGIYVFNQANEEFRALFRYRIILAKEIRKTCNRIKAFLFYRSIAIPLQFDNANWSNSFLHWLEQLPLEQAPAKFILGQMVMDYRQLHIKKLEVEKQLRAMAKLKDAQLLIVLQSVPGIGPITAIALMSEIGDINRFKTFKQFASYIGLIPRISQSGEKLYTGKMTYRNNNYLRPLLVEAAWQSIRSDPAMLAYYKHACGKTMSKKAIIKVARKLLSRIMYVMKNRKPYQNNIK

SEQ ID NO: 372174 - protein, 347 aa, unidentified
MVIIGCDFHPGFQQVAIFDKRTGEIEEKKLKHREEAEQFYHALAGEPVRVGMEACGHYPWFERLLAELGMELWLGDAARIRASVVRQQKTDRRDAEQLLKLLREERFPRIWVPSLGERDARQLLVHRHQQVQARTRVKNQLQAMALGQGVQRKRKLWSAVGRAELEQLPLLPYAWQRREQLLRSLDWLDAEIAELQRRVEQEACERPAAVKLMTHPGVGPVTALAMVLTIGPAERFQSPRQVASYFGLIPSEHSSGGRQQLGRISKQGNAFLRFLLVEAGQSAARYDAELGRFYRRLSARKHRALAKVAVARKLAMRLYLRLREDWNYAQLSRAVVQAGPSHSVVQR

SEQ ID NO: 372175 - protein, 402 aa, unidentified
MNAVGIDVSKGKSMVAIMRPFGEIVSTPFEIKHTASDIHSLVELINSVEGESRIVMEHTGRYYEVLAHQLSEANLFVSAINPKLIKDFDNDSLRKVKSDKADAVKIARYALDKWQNLKQYNVMDELRNQLKTMNRQFGFYIKHKTAMKNNLIGILDQTYPGVNTYFDSPARSDGSQKWIDFASTYWHVDCVRKMSLNAFIDHYQNWCKRKKYNFSQSKAEEIYGKAKELVPVLPKDAITKLIIKQAVDQLNSASTTVESLRTLMNETASKLPEYPVVMAMKGVGTSLGPQLMAEIGDVSRFTRKSAITAFAGVDPGVNESGTYEQKSVPTSKRGSADLRKTLFQVMDVLIKTHPQDDPVYQFLDKKRAQGKPYYVYMTAGANKFLRIYYGRVKEYLASLPES

SEQ ID NO: 372176 - protein, 354 aa, unidentified
MLSVGLDLHKRYSQVEALGEDGERRSAARLVNEFEEIEGFFRSLREPCRVVLEAGWNWGSMYDWLERVENVVEVQLAHPYGVRAIAAAQVKTDRIDARMLGQLLRVGLIPRAYIPGKETRQLREAVRQRLFLVRVRTMLKNRVHALLDRHHVVPPPVSDIFGKRGRDYLSKVELPGCAQDLLRQDLRLLEMLGSEVRQAEVLLARALKGDRRVELLLTVPGLGVLLATVVALEIDSVERFVRPAKLVSYAGLVPTTYSSGGKTSHGGLMKMSNKWLRWALVEAAWIAVRHDPYFRHQFGLHCRTKGPKTAIIAVARRLAEVLWHVLTEDRPYQVRQPASKRREYGLTPAALIQD

SEQ ID NO: 372177 - protein, 341 aa, unidentified
MLYAGIDIHKNVFQAVVLDPDSGELSESRFEPSRELLGEWASHWGGRLAGVAIESTTGWRWVARELQARGFEVHLIDPGRASALRGRRRRPKTDKLDARWLALILARHLLSECEAWIPPAQIQLLRDQTRLRKSLVNSRTAWAQRLHALLTHEGWPCSRGRLLTREGHRWVTALELHPAVRAQIDVMPTIIEALDEQVALVERELRRFARRDSRRQALQTILGVGPIFSCHLLAEIGEASRFKRSRQIVRASGLDPAVIEPADNKRRGRLAEQGSPHLRWVLVEAANQRNRTSSPDHALDASTAARRGRGRARLTVARKIARRAYHLLSAGEAAELENCTT

SEQ ID NO: 372178 - protein, 412 aa, unidentified
MQAIIERCCGLDVHQETIVACLLVGAPGAQPTKEVRTFRTVTRELEALRDWLREAGVTHVGMESTGVYWRPVYTVLEGHFELIVGNAQHMRNVPGRKTDVKDAEWIADLVRHGLIAKSYVPPRPLRELRELLRYRRKLVESQAAERNRLLRLLETANIKLASVASDVFGVSGRAMLRALIAGEASPEAMADLARGLLRRKRADLILALDGRVEEHHRFLLAMQLRRLEAIEADIAALDQRIGKRLEPYAAPHTLLMQIPGVDWVVAAVLIAEIGVDMSVFVSVYHLAAWAGVCPGNHESAGRQKSGRARKGNIHLRAILVGAAISASRAKGTYLKDKFHRLKARRGGLRAALAIAHKILVSAYHMLAKNLPYRDLGEAYLDQISQTRTVANLKRRLERLGYRVILEPNAQPT

SEQ ID NO: 372179 - protein, 362 aa, unidentified
MNTTTVAVDLAKSVFQLAVADGTWRVVETHRLTRTQFERWLANRQVDLVVMEACGSAHHWARWLDSLGIAVKLLPAAYVRAYVRRNKTDKADACALLEAARASDIRPVRVKSVEQQALQGLHRIRSLWMGTRTSRINALRGFCREFGLAIPQGARTGVEVMARTLADPGSPVPALIRGSMKLLIEEIRLLEQRIAQLEKALTELAKHSPACTTLLSVPGIGLLTATALVAATGGTVAHFKDARHFASWFGLTPKEHSSGSTRRLGRISKRGDRYLRMLLTHGARAVLRAAAVARQAGRPIDGLKDWALKVQGRANHNKAACALANKLARICYAVLRDATPYGRITPRQERKKIGRTAFAVAA

SEQ ID NO: 372180 - protein, 400 aa, unidentified
MSGLKGSFDCFVGIDVSKDKFDACGITGEEVKLFQISAGMDRKGFEKLKGHLASVSVSSVLIGMESTASYHVNLFSYLVSEGYKVILINPLLISNYVKMQLRKTKTDKKDAVVIAQFLLANGDTLIQRITPSLISDLRDLSRQRESLVDEMTSLKIEIKQLLNITFPELEHMVGIFTKSILNLLQQYPSAFALRDADLDQLSQMLIADSYGHKREAFAAALIKAAHSSIGINSTAKEMILKQKIALLFHLEDALQEITGMLIEMARKLMEEDTNIMTSIKGIGDKTATNFLVEMGGDINQFERSGKIIAMAGLDPAVYQSGKHEGKGRITKRGNRHLRRIIWLMTTKVIQYTDIFNAYYQKRRKEGLPYKMAVLATAHKLIRVIYAMLTQRTTFCPQMNS

SEQ ID NO: 372181 - protein, 394 aa, unidentified
MKLVGIDIGKNKHFFCIMDKVTGEIIVSPTSFLNNKDGFDFFIQKLKPYSKDSLLIGMEDTGHYHFSLLKYLLDNHFTVALINPKTTDFTRKLQGGITKNDELDTFTICDVLDNHERKKLYRITKVNRFDLYEQKQLTRHHHNLKEELNVYTNRLQKSIDIVFPEFNSLFKSKYGTIYMNILKTFGSADNIANTDIRILRKCFDIKGRGNRISLTPEKLKECAKASIGIPSSSEEIKIKHLIDQIELINEQISEVDKKIEEFSVQNNSPILSIPGISHFSGTSILAELGDICNYSKPSQIIKFAGVAPYHYESSQYNAKHTTITKKGSKYLRKTLYQIILPVIRYNPVFQQYYQLKLSQGKGHRCAQGHCVRKLLRIIYHLLNTNQQFDPKLLR

SEQ ID NO: 372182 - protein, 402 aa, unidentified
MTAIGIDVSKGKSMMAGVSCNKVVVIEPIEFSHTEEALNRIVEQIRTINDETRVVLEATGHYHEAVVAHFIKNDIYVSVVNPLLVHDYGNNTVRRIKTDRKDAIKIARYGLDNWAELREYIPQDMVRQQLKMFSRQYNLSMKTIRALENNLISLLDKTFPGLNKLFVSRKRKDGRQKWLDFSQTYWHVATITQMPESDFIADYKTWCIKMGYQFKETKACEIYAYCQKQKPIITLPFNTINSLLITTAVEQILHMSRGLAIIKDEMIHLATLLPEHETVISLYGVGALTAAQLIAEIGDVRRFHKRGSLTAYAGIDPLPQQSGKYEKKSTKTSKRGSASLRKTLFQVICTYLRRAPEHESIFHFIDKKRAEGKPYFVYMTAAANKFLRIYYARVKAGLETTG

SEQ ID NO: 372183 - protein, 326 aa, unidentified
METYDYIGIDVSKSWIDCAYQDQGAWQSERVCNEVDPLRTWLSQWQEQEVCLVLESTGYYHDKLVCLAEEVGIAYVMVNGRKSYHFMQAQGHLHKHDRQAARSLAQMGSEKQLQPPIVPSYMKEHRQRKQLQMALNALTKQRGMLKNQLHALEQLYQANPLAQTALQSALEVVETQIQELEKALSPSDEEEVQRLVQLMRSVVGIGPKSVECLLTYLGDFSQFESHKQLLKFVGVIPGHHLSGSSVRKRARISKQGPGQIRATLYMAARSAKKHNHACRELYERLRKKGKPHKVAMIAVVAKLLKQVYAVVTSEIEFDNQYYLKYN

SEQ ID NO: 372184 - protein, 337 aa, unidentified
MQVTLVGIDLAKNIFQVCGVNQSGRSVFNKQVKRAKLMQCLVQYPDAMIAMEACGGSNYWGRELKKRGMKVMLIPPQHVKPFVKGNKNDRNDAFAITEAARRPHLKCVEPKTLDQTDMNQIHLLLARLVNQRTALINQLRGFMSEYGLVVSQGKEKLFAALPGILEDAENGLTFAARELIASIINEQHQLNERIKGLEKDICLQARASEQALRLMQIKGVAERISTAAIAHAGNGAAYKNGRQFSANLGLVPRENSSGGKQKLGSITKRGNEYLRRLLIQGAWSVIRYADTSTDRLSRWAKQIVERRGKHKAVVAVANKMARIIWSMLYHQTEYRAG

SEQ ID NO: 372185 - protein, 451 aa, unidentified
MDWWNITYRKDGFREAPTTASLLKCKSVRYRQTVYLERGYKSKEVCGPEQHRNKYTGGIKMVCVGIDVAKDKHDCCILDSDGMVRADCFTIPNNMDGFKQLLQTIRNCTKKSDKIKVGLEATGHYSYNILGFLLDNGLPTYVINPLHTNLYRKSLSLRKTKTDRVDARTIATMLLSDVDLKSYTDIAYHNEELKSLTRYRFDKVQECAKLKQSVSRLATILFPELEGLVSSIHGTSIYALLGEYPGAKQISEVHLTKLTNLLTTASKGRYGKEKAIQIREAARASIGSVMPAKSLELKHTIKLIQELASEINEIEDSIQKIIDELNPPILSIPGMGVNSAAVILAEIGDFSNFSSPDKILAYAGCSPSTYQSGKLTNCYAHMEKRGSRYLRHALYNATKYVCYWNPVFAEYLAKKRAEGKHYNVALSHAMKKLVRLIYALQKSGKAYLAAA

SEQ ID NO: 372186 - protein, 407 aa, unidentified
MNAVGIDISKGKSMVAALRPMGEVAFLPQEFLHTEVGLEQMAYTIIALGEDTRVIMEATGRYHEPVAAALHEYGIYVCVLNPLLIKQSGSGSIRKVKTDKADAMKIAKYGLDNWANLREYTPMDTIRQQLKLCSRQYNLYMKTVVSLQNNLISLTDKTFPGVNVLFSSPERTDGHQKWMDFVMTFWHCDCICRVSEKAFTERYQKWCKRKGYHFSAEKALDIYAAGCSHFTTLPKNENTKLLIVTAAQQLLAGKITLATLRAEMTRLAAQLPEYETVCAMYGVGETTAAQLMAEIGDVRRFPRRSSIVGFAGVDPGVDESGKHSAKSVPTTKRGPSHLRKTLYQIVCTYLKKSPADEPVYQFLDKKRAEGKPYFVYMTAAQNKFLRIYYARVKDCLEAFDAQTAEQT

SEQ ID NO: 372187 - protein, 370 aa, unidentified
MSVRRILAKTIDTDLEYEAIGIDLAKNCVSAALLTTDGEVVCIDRLDYSELEKSAQALSSTTFAMEPCTEMNYLVQKLEAWGHRCLVIGGKNVQNYVENHFSGQKTDLNDAQALAFLAQDTQLRTIKAKDVEQQKYASLTTLREQYIKQYRQTIVSLKGICQAWGLNISKGISGKARLKDLIENHAAFPEELKESLVDMVTHAQTAQKALNKITKTLEELAKSDKVCQLIQTIPGLGSICSCRLRATVGDIKRFKSPKDFPAYYGLVPRSIATGHNERKGKITHRGDRTMRSLMVQAAGSLVNMATKGKLKSKQLTKWILKKQKEKMPWGKLVCAVAAKLLRIVRAVLISNKTYNSKIAGVAKCSLPKGS

SEQ ID NO: 372188 - protein, 459 aa, unidentified
MQVEVSAEPVERAVLPVGLGVQVGIDAAITSNHHVCVRAHSGDGVVTTCRFTVAPTLAGLSMLTKRLADYPGVVAVAEPTSMSWLPLAAAVAEASGQLALIGSRHAARLRGAITGKNKSDVIDADVLARAGEVFDLVPLRVPPPGQLALRRICIRRGAAVIDGNRYLRRLISLARWAFPDVWNGFAGSLATAKAVLSRWPHLAQLAAARRASLTAVVAEHTRDVPDVPARAEAIRDAAGAWARFWQGRLDLDELAWAVSEHLGDLQVAAGRIDRATTLATDYWERLYGDDPLLASLPGLGPITAPTIRAFLGDGATFQSAKQAASYVGLAPSNWSSGTVTQPSRAITKEGPAVLRLAFYQAGNAARRVDPQLAAIYHRLMVTRGHCHTQATVAVARKLVERTWTVLHRGQPYQLRDPDGQPITARAAKALIAEQFTVPDTVRARARAHSAATHRAKLTR

SEQ ID NO: 372189 - protein, 367 aa, unidentified
MKDVTTYVGIDAHKKDLFIAMLIGPGKTPVTWTVPNEPQAVRRLVRKLERDASGPVQVCYEAGPCGYALQRQMTTARVSCQVIAPALIPRKPGERIKTNARDARKLAELHRAGLLTEVRPPTPEEEAVRDLCRARDDAREDLQRSRHRLGKLLLRRGLHFSGRNWTRAHREWIHSLTWAQPAERVVIDDYQLAIDHLEARLIELDARLSEIAQTDPYREPVGWLRCFRGIDTLTAILILAELHDFRRFPSARALMAYLGLVPGEDSTGDKHRRGRITRTGNTLVRRLLVETAWHYQHRPSIGIALVKRRKGQPGRVIAIADKAQQRLCRRFRRLTEQHKPAPKVAVAIARELTGFLWAALQPAVPAN

SEQ ID NO: 372190 - protein, 313 aa, unidentified
MDATFVGIDVSKNRLDVAVRPAGEHFAVARSAEGLRELIARITPLAPTVIALEATGGYETVVAASLAAAGLPVVVVNPAQVRAFAQALGKRAKTDPLDAAVIAHFAEATNPPVRPLPDADTRRLADLVARRCQIIEMMLAERQRQERLTEKRLQNSIARLLAALQKELSALDTAIDDAVRGSPAWRDKEDLLASVPGVGKTIARTLIAELPELGTLDRRRIAALAGLAPWTRQSGQWKGKSFIGGGRARVRAALFMGAMVAARHNPVLKAFRDKLVAAGKPKLVALIATARKLLTILNAIVRDGKHWQEAEHA

SEQ ID NO: 372191 - protein, 321 aa, unidentified
MVFCGVDAASEFLDIEGLGSHERVLNEPRQVKEWVKSTPRDAVIAVESTGGYWRLLADLAYKSGRTVYLLSPRQVWAYRHSLGRRAKNDKMDARLIRDFIQSNHARLHPYEPWAEPWKTLRDTVRLRTRLARDRARIALRMRAFGMPPREIAKVTRGIKDQLIKLDKQIKAVIEELPEAKAVQSIKGIGPLTTAALIAVLKQIPLAHAAAFVAYIGLDLVICDSGKRTGKRRITSWGDVTLRSLFYLAGKSAARAPEWQPYVNKLKQRGMKPIQIHCALARRLARIAFALYHSGETFDLERFTKDHTQKEENAPSMLAMQT

SEQ ID NO: 372192 - protein, 348 aa, unidentified
MIIIGVDFHPEFQQIAWVDTDSGEFQEKRLAHPAEAEKFYRALAGEKVRVGMEASGHARWFERLVTELQFELRIGDAAEIRTKRVRKQKTDRQDAQLILRLLLEDRFPQIWVPSSENRDLRQLLWHRHRMVQARTRIMNQLQAVALNEGLRCKKKLWREHGRQQLESFRLAPWATRRRRDLLDLLDRLTPTIAELSQAIEHEVEKRPAAERLRTHPGVGSLTALAFVLIIGEVNRFRCGKQVAGYLGLVPLEESSGNRRRLGHITKQGSSMMRFLLVEAAQVTVRSLPEWRSKYLHLVLRRGRKIAKVAMARRLAVHLFWMMRKEWNYQQLKKFGSHAGEPGNRHGVQ

SEQ ID NO: 372193 - protein, 332 aa, unidentified
MYDSTTTVAVGLDVHACSIRLAAVRADELLEERTLPYDEEQVARLLRRWPGARCCYEAGPIGFDLYRHLVGRGIDCAVVAPGLVPQRPGDRVKTDSRDARKLARLLAGGLLEPIHVPTPELEAARDLVHAREDARLDRMRDRHRLSKFCLRHGRRLPTSSWTVARRKWLSEQRFAFAAQQQTFDTYVHTVDLVDARIEHLEQAIRTTAAEGPWRTLVARLRCLRGIDTLTALALVVEIGDFVRFKTAEEFMAFVGLVPSERSSGEQRRQGSITKVGNAHVRRLLVESAWHARRRPTIGYELGRRQRGQDAAVIERAWRCQQRLYSRWQRMAG

SEQ ID NO: 372194 - protein, 340 aa, unidentified
MGQVVRIGLDLAKSVFQVHGVDEAGEIVVRRKLRRSQLLTFFAKQPACLVGMEACASSHHWARELIALGHEVKLMPAQYVKPYVKRSKNDAADAEAICEAVTRPTMRFVAIKSPDQQCAMMLHRVRLVLCRQRTQLSNALRAHLAEFGIVAPVGRLGLERLIEIVADPEDRRLPGRARISLRMLVAQLAVVKAQILENDRRIMADARSTELGRRLMTVPGVGPLLASALVATVADPRIFRSGRDLAAWIGLVPRQNSSGGKERLGSISKAGHRYLRQMLVVGSMAVIRHAGRRAEQRPWLTQLLARRKVKVAAVALANKIARTVWAMMVTGDRYREPVAA

SEQ ID NO: 372195 - protein, 392 aa, unidentified
MSKVIMIGCDLHDAWMRLRIAVGAEKAVAKSFATADAAALIAWVKEFASLQGATRIVFAYEASGQGFGLYDTLTDAGIECYVLAPTHLPHTAHGRKRKTDDNDAQMILDEIRAHVLAGRKLPAVWVPDPQTRDDREAVRMRLEIGEQRTRIKNQIRNLAKRCKLTWPVWFTKSGNWSRRSLQWLRSVAAGEGQQVGRGIQVTLQTLLDLYQELSRQLGVLDQAVAKLACTPRYAREFARLRLLPGVGTLTAMVFLTELGDLARFANRRQLAAYLGLIPAAYESGQRDDRKGHITRQGPARVRHLLCQAAWAAQRVCARWKDRYEQLKRGSQKRAKIAIVALMRLLAIQMWHTARCQKLEELRDAAGPPETSARARQKGPPHPPYAIASACSG

SEQ ID NO: 372196 - protein, 314 aa, unidentified
MTFPATAGIDAGQRHLDVGLPSGTIFRTENRPEAFPALLARLKREGVERVVLEAIGSYTHALVQALAAAGFAVGLVNPRRIKAFRVAEGKRAKTDRLDAGLITRFADRMRDAFRPLPDADQVALKALSTRRRQLTEMIAMEKTRLKQALDPLVSESHKDTISALAEACRRIEDEIESRIAKDEQRAQNRRILLTIPGIGARVAQVLLTELPELGRSDRKAIASLAGLAPHVSQSGQAPPRAAIAGGRPCVRTALYMSALVAARHDPNLRAHYQTMRAAGKPAKVALVAIARRILVTANALIRQQASYKPEPNPS

SEQ ID NO: 372197 - protein, 400 aa, unidentified
MYVGWDWAGKTHDVSVLDEQGCLVEHFAVGHDEAGFKHALKRLGRHGQPEALPVAIERPSGLVVERLVEAGHPVIPIHPNAFNAARSRWGASRAKSDPGDSYRLADYLRTDGRRLRRLRPMDEATRKLQALVRMRDDHVEARVAASNQLEALLNEHWPGAIDIFKTVASDIALHFLDRYPTPASAARLGETRLAAFLTRHSYSGRRSPAQLLERLRRAPTAPGGLDPEVLTELVRHQVDVVRTLLHTCKELEHAMAAVLPDHAKARILAGLPRIGDGVNLAQVLGEVGPILDASLDVDHAAAQCGACPVTKASGQSRGVHFRWAANNHARQALQMFADNSRHASPWAARLYAKHIAAGKRHPHAIRILMRAWLRVIWSCWHSHTPYDPARHRSELRLKGA

SEQ ID NO: 372198 - protein, 354 aa, unidentified
MNTTQVFEKRKIAVAIGIDLAKDHCDVVAYNADNKICFTKANWAYPHLMEWLANAQPAVVLMESCKGCHVRARDIADLGHDTRLVKGADVKALRNVCQKNDIRDADYIARLLYVPGTKFVFVKNQRQQSLQFLQNEYKSIQELRIQVGNQIHAGLEEFGCPGPKSKKFIQSRMMAHLEKNAEPIPEEVMSSFHRRREMWLNLFEQEEEAKKRMEEIAKTDDDAQRIMTVPGVGAQTAVGMLVHIGGDIGRFKNSGQFAASIGLVPKQNSTGGNTTLNGITKCGPKRLRANLVQCGQVILMHADKLKGNFGDWVRKLRDSGKKRGVIVCAIAAKIARIVYRLMKDKVDYTPVPSR

SEQ ID NO: 372199 - protein, 318 aa, unidentified
MVKGIGVGIDVSKATLDVATSDGTVALHVTNDTEGFDCIIAALRDVSVHRVVLEASGGYERDALIALFEAGHPVVLVQPVRARNFARALGRHAKTDPIDAAVLATMAALVVDEVPLWEPTEEALADLEALVERRRNLVEVKAAEEKRLRLARTIVRADIDTFIAELKLKIRDLERRIDCLIAEVAALANDAEVLESVEGVGRISAATLLVSLPELGTLSRGEIAALAGVAPMNRDSGTWSGQRAIHGGRAQARNALYMMALVGTRWNPVIRERYAHLLSRGKKPKVALVACMRKLLIHLNGLMRMHRNGPTKSALQAC

SEQ ID NO: 372200 - protein, 413 aa, unidentified
MSIDPSADPVRVTAGVDWAKDDHAVCVVGDQGEVLERFAVAHDAAGLRQMATRLLRAGALQVGIERGDGPVVNILLQAGLTVFVIPPGQVKNLRSRYGSAGNKDDRFDAYVLGDVVRTDVRRLRPLVCDSEQTTALRSTVRARRDLVGHRVAAANQLRAHLQTVFPAAAVLFADIDSAITLAFLSRFTTQEQADWLSPRRMAAWLKSVAYSGKTDPALLHARLTAAPRGATGQHAAVHAATTLALAALLRTLNAQIQALAASIAAQLDAHPDAVIFTSLPRSGTVRAARLLAEIGDARGRFPTRDSLTCLAGVAPSTRQSGKVKAVTFRWGADKQLRDALCDFAGDSRRASPWAADLYNKAITRGCDHQHAVRILARAWAHVIWRCWQDHVPYDPSAHNSLQALLNRDQPIAA

SEQ ID NO: 372201 - protein, 393 aa, unidentified
MRKPEQQHKPLNDLSRSLTPFDPNRTLIGVIELSKKSWLVAGMIPGVERQPLKKLAADENELLKLLERWRAEAEKAGHKINRIAVAFETGRDGFWLARWLRARGIEAHVIHAASVAVSREHRRAKTDRLDTQQLMRAFLGWLRGERQHCKMAAIPTLEDEDAKRPHRERETLVGERTTIINRLKATLTRLGIRNFNPKLVKAPERLEHVRTPEGEPIPPNTQAELLRDMQRLRLVREQIGQIEKARLEHLKRNPNTGPNLMVSVLARVIGVGIETADMLVQEVLSRNLRDRRAVARYGGVTGSPDESGSRSREKGLARSGNARVRRGMIQLAWRFLEFQKDSALAKWFRARTENAPRSRKKMIVALARKLLIALWHLVRDGVVPEGVVLRPAH

SEQ ID NO: 372202 - protein, 341 aa, unidentified
MTMFAGMDVGGKRTAVCILDDAGKVVWRGMADTHPEMIDAVLRRFKGELTKVGLESGPFTPHLFRSLAAMGYPMICMDARRAADAIKSRRIKSDKGDAWARAEMLRTGWFTSVHVKSADTHRLKALLGARDQLVKVKRSLGNQVRGLLRPFGIRLPSRAGMKKFMAAAYQSTRDDPVMGASIEALLEALASIEAQLAKLDDGLKELSRRNEVAWRLMSVPGVGPITALAFIAAIENVERFRRTRDIGAYLGLTEKRYQSADTDVGMGISKQGDAMARHYLYEAANVLLTTVKRRFALRNCGLKLIKTIGPKRARVAVARKLAVLMGRMWKDGAHFEAAVAA

SEQ ID NO: 372203 - protein, 403 aa, unidentified
MNAVGIDVSKGKSMVAVIRPFGELVVKPHEVRHTASELRELANSLKSLDGETRVILEHTGRYYEPVAQMLHDAGIFVSAVNPLLIKEYGNNSLRRVKTDKADSLKIARYGLDNWVELRQHTPMDTIRYQLKNMNRQYGLYTKNKTALKNNLIALLDQTYPGVNALFDSPAREDGSQKWVEFAASFWHVDCVRSMSRAAFTERYRKWCKRHGYNFSAARAGEIHDQAKDLIAMLPKDALTKMLVQEAVAQLNSVSRTVEVFRAEMKRLAEQLPEYPVVMSLYGVGDSLGPQLMAEIGDVSRFAHKGSLTAFAGVDPTPNQSGAYEAKSTSSSKRGSPELRKTLFLVMIALLQKAPPDDPVYRFLDKKRAEGKPYHVYMTAGCNKFLRIYYGKVKEHLASLNTAE

SEQ ID NO: 372204 - protein, 332 aa, unidentified
MKKFDYFIGIDVSKLTLDVTVLLLQNNKDEFIDYQKIDNNEKGISAYLKKLFKGQCLTENTLFCFEDTGIYSMPLACILSEKGLNYWRVPALEIKRSKGICRGKSDKTDSKDIAFYALSHLHKLRLSTVSDTIIQKIRLLFSERDKIIRSLGAFKRTSENKDFLSKKIFQSVENINQNIINQLNNALNEVEEKMMSIINEDEKTKQQLALISSVCGIGKNTAIYLIICTKGFSSFENWRQLACYAGYSSGTSIKGRTKVSPLADMKLKSLLYMCALVAIRHDKELKTYYERKVAEGKSKMLVINNVRCKLLARIFAVINRNSPFINTWKFAV

SEQ ID NO: 372205 - protein, 353 aa, unidentified
MTIVGGFDVHRKQLTFDYVDTVTGEVRSGQIRPATRLTLRQWLGQHCPDGDAEFALEGCTGWRYVVEELTAAGAVAHLADPAETAGLRGPKKRAKSDRTDARLLRTLLWEGRLPESVIPPAHVLELRSLGRLYCALMDERRAWQQRIHAQLFHQGCPPITALLSQTARDGLASAELSPAGRRYIEAALRRIDELTDEIEPVRTELVSLARRQPGCRALQARHYGVGWLCAAIIWAEIGDARRFASSDQVVRFAGLDVTVYSSDGKRCPGHLSKQGSPALRWAAYEAAKCAVRSGSPDYAYYHQVAQRTRGKRQTSGKNPTLAVERKLLRRCYHTLRELGDAALAPPAAERQVA

SEQ ID NO: 372206 - protein, 358 aa, unidentified
MKALKQNVGIEVDSQNLKVSLQILKEDLTKKILGSRTFKNNQTGFKALGEWIEKKRVSDCKVNLTMEATGVYFENLVYYFHEHSDYLLHVLLPSVSHSYARSLNQKSKTDEMDAKMLAQLGLERELAPWKPLSKFMRNLKRLHRERIQLIKEKTLVSNQLHAEEAAHDTRKDAMKRYKKRIQFITTQITEIEEELKKLVGQDPKLKQRIDHVCTSPGLGFITVVGIVAETNGFALFKNRSQLMSYAGYDVVKKESGTSVRGPSSISKKGNSFIRYLLYMPALSAVRFCEHHQAQYERILCKTSIKMKGNVAIQRKLLLQIYALFTKNEPYDPNYHAILREKLAAKNKCVHEEMEEASI

SEQ ID NO: 372207 - protein, 346 aa, unidentified
MVRYIGMDVHREFAQLAVVEGGLTRDDGRIGVTPEALREWAAGLRTDDEVVLEATGNSDAIATLLTPLVTRVVVANPTKVRAIAEAKVKTDKVDARILAQLLAADFLPPVWLPDERTRSLRRQVSRRTHLVRQRTRCKNQIHAILNRNLVPTPPVSDLFGKSGRHWLAAQQLPIDERDSVQALLRQIDFHASELAAVDKDLATAALADPTALRLMTIPGVDAITAIAIIAAVGDFTRFASPDKLVSYLGLNPKVRQSGNSAPVHGRISKAGRAQVRGAMVEAAWSASRAPGPLRAFYQRIRPTRANLVCRPSCAGRGDYLGREWVEWVGGDVLVTGDLHGDLLQRA

SEQ ID NO: 372208 - protein, 335 aa, unidentified
MKLTINQSEFFLGIDVGKTDLFCYIIGNTESFNADFKNTVPGISRLIKWVLKISQGHVVHTCMEATGHYSRLVSQTLIDALNGDLYVVNPRQVKAFSNRRLRRNKSDKADAKLIAQFLVSEQAELTKFIPKTKEEQSIQEISNQKEYYTREIVKFKTQLQCRDILFCKKSIERMIKALEKECEKLALQLDKLIAKNIQKKHNQSLLLTVPGLATTTVNLLIAQLPSIDQFSSPRQLAAWIGVTPKHYESGTSGRSYTPITKMGSAPLRSGLFLPAMSAMTHNPVIKTFANRLRENGKKGKVVVVACVRKLIHIIYAILKKQEPFNPNMKTAIVPS

SEQ ID NO: 372209 - protein, 404 aa, unidentified
MAVVIGVDPHKGSHTAVVLGGDEAPLGQVRVRAPAAQAQRLLAWAAAWPERTWAVEGAGGLGHLLAQELVAAGERVLDVQPKLAARVRLLAAGAVNKNDPSDARSAAIAALRSPSCLPVRPDDRAAVLKIWAKRHHDLSRGRNQVACRLHAVLCELVPGGLAREISADQADQILAGAGPRGAVQQARAELAAELAAGLRRADALPKETKKKLATAVRASGTSQTGLFGVGPVIAATVIGDVRDVSRSASRDRFAAYDGTAPIEVSPGNRKVHRLSLRGNRRLNHAIHMAAITQIRYKQNEGRACYDKKTAEGKTPEEALRAVKRQISDAICRCLKAGAARIAAASVQGPGGHAGNDSVASAAGSHPERRLFGQATPGPATTLRHPADQQKRTSSRARKKTARTA

SEQ ID NO: 372210 - protein, 339 aa, unidentified
MSLYAGMDLHSSNTYVGIMDDKFKRVFKKRLKNDLSLILASLEPFRDELKGIVVESTYKWYWLVDGLMDDGYVDIHLANPCAIKQYEGLKYRDDQHDAFWLAHLLVLGILSEGYIYPKEDRPVRDLLRKRSFLVKQCTSHIHSVRCMIERQTSNRLSCREIKKLEVPDLEIFFQDEHLILSAGANVAAIAFLTHHIARIQKAVKKQAKLREPFKLLRTVPGIGDILALTIMLEVGDIRRFPQVGDFASYARCVPTERISNEKSKGKGNRKNGNRYLNWAFVEASNFARRHNEKFRRCYQKKRAKTNHIIATKAICNKLARVCYYIMRDQVPFREEAIFC

SEQ ID NO: 372211 - protein, 417 aa, unidentified
MKIVHQVCCGVVVHKNFIVATIASTNKNNITTYLQKTFTTLNPELFAFRTWLLDNNCYDVCMESTGKYWIPVFNVLEASDIRVIIAHPKYVRSIKGKKTDKKDSKWIADLFKHDLVRSSFIPPKDIRALREISRYRSKLVYMRTSEKNRYQNSMTVSNIGLGSVLVDSFGITAQLIMGHILTSDIPDEEFCLGLIQKAAKKKTDKIIESIRDCNISSDQRFKMNETKAHMDYLEQAIARTEVELFVRIKPYFGLIELLTGIPGIKPLSGAIILSEIGVNMEVFESAGHLCSWAGLAPTNNESAGKKKSTRISKAGEFLKPLLVQCALGAILCKRETYFAVKYKKIKKRRGHKKAIIAIARMMLTCIYHMIKNGECFNPCDYQELSNSTPRVHKLTESVAIDFLAKSGYDISTLQKAV

SEQ ID NO: 372212 - protein, 344 aa, unidentified
MRIAVLGIDLGKNVCSVVGLDSSGAVVLRRRVRRDTLIDLVAKLPSCIVGMEACCGAHHLGRLFAAQGHDIRLMSPEYVRPYVKAQKNDDRDAEGIAEAATRPTMRFVEMKTEDQLDMQTLHRSRERLVGERTALINQLRAILLDRGIVVPQGKRKLEQYLVILMNEHDGEGLSARMRMLVADIRAQWQELDRRIGEFDAEFVRWAKENEDARRLVTIPGVGVTISTALIAAVGKAETFEHGRDLAAWLGLVPRQSTTGGKPRLMGISKRGNKYLRKLLIHGARAALPYVAEKDTALGRWAKSLLSRVHQNVAVVAFANKLARICWAVLRSGQRFAAKGEPLVV

SEQ ID NO: 372213 - protein, 370 aa, unidentified
MLSIGIDVSKGKSTVCGMKPGGEIVYTPFEVQHTREGMSELVSLLRGSGEEVRVVLESTGSYHCPVVAALLENGIFVSVVNSLRMKRFCSQSIRRVKTDQIDAMQIALYGLAYWQELQPTRLPENTYRELQLLARQYYQMTSLLIKAKVDFNALCDQVLPGMQELMSDHAGRHKLSDFVLRYHHTAHILKMGETRFRKDYCKWAEKKGYRNCERMAVLIFATAQNGIPVLPDAPSTQIVITEAIRVLHTVEASRDAILTQMQALAKTLPEYSLVREMPCIGDTLAPRLIAEIGDVRRFHSKRALIAYAGIDAPPYQSGKFRANNRHISKRGNRYLRKTGYEVMQSYVMHKPANDPIFTFIEKKRGEGKEW

SEQ ID NO: 372214 - protein, 521 aa, unidentified
MTDSTVSIIGVGIDTARYGHHVSFLDQDKRSATKPFHFTENADGYRRLKNAFLKLQSKHPGLQLHIRIDAAGQYAENLIQWLHLLRMPTVISVGQPAMNKAYRNAHFNKRKADPVESLACARFAVVERPAATLHNPPEFSQLRDVVALMESSSKQRTRLVNQLHGLLARAFPEFATLAKDIAANWALKLLLKYPTAEKIAAARLDSLLKIPHLDLDKAIRLQQAAKESTGSAAGPVVDQLIKQKVRAILDEQKEARQLEELVKTAFDALPNGPHQRLITIKGIGLQTAAALVAKIVSIERFNSASALIGYFAVFPEEVDVSGTDKNGKPKKGTEVRMCRKGNDLVRRLLYTAAQCAAKHNPAVRALFTRQIAAGKEYNVAIGHCMAKLLRQVFGIWKTNRDFDPDYETEQINDMAEADEQEPTVQEKVVGHKNRAVKPQQQVVTTTTSILPATRQPSKRRSPKRTTQSPAPAEAAIDPFSKSPRSSRDATVLPVQESDRLPAAGDKQSWPNDDPTQTPGVL

SEQ ID NO: 372215 - protein, 340 aa, unidentified
MHTTQVSVDLAKSVFEVAVSHRPGHVHERRRLTRSRFHSFFAEREPVEVLMEACGTAHHWGRELQAMGHRVRLLPPGDVSRYRDGNKTDRSDAKALLEAGRNEAIDTVPVKSVDQQAIAALHRLRSGYLQTRTARINAVRGHLREFGVTIPVGAKQVIPHARRALADDVVPGYLRHALEEVLDEIEALSAKAKDLQRTLERLAEHMPDAVLLMTVPGIGVLTATALVSFVGDVRRFRSSRHFAAYLGLTPREFSSGSARRLGRITKRGNSYVHMLLIHGARSALRAGSVAQVPDDLRAWALELQRRKGHNVAAVALANKLARVAWRVWRDQRPFERRAAA

SEQ ID NO: 372216 - protein, 353 aa, unidentified
MKYDYSGKDVYVGIDVHKKSYSVYCICNREKVKSWSMRTSPTDLIEQLQRFFVGARIHAVYEAGFSGFALHRALTQAGIKSIVVNPGSVETASRDKVKTDKRDAKKLAEQLSDNRLKSIYIPGEEEELSRLFTRLRATIVKDRGRIACRIKSKLFQFGYDEGLIDDKTTSVEWVKNLKKMDDFPFELKRVIDYFCDQWLRLTDDLKQINKDIANQSKASQELSALEDIYKSAPGIGTISSKVLSRELGTLKQFSSNKHAYSFMGLTPSESSSGEMRRQGGISHCGRPYLRQILIEVAWRATGKDAELAKKFAELSYRRGKKRAIVAIARILVGRLRCCLMNGMVYQIQNGTAL

SEQ ID NO: 372217 - protein, 365 aa, unidentified
MMEKRGPAAGAGPKHRVRRTAAEHYAGIDVSLELSSVCVVDAQGKIAREAKVAREPETLVAFFKEMSASVPRIGREAGPLSQRLYAALVEADFDAVLLETRHVKAALSAMTAKTDRKDARGIAQLLRMGWFRPVHCKSLGSQEVRALLTARQQLLSKLADVELSIRGILRGFGLKMGVTTRKTFESRARELAAGRTMPETEIAAMLTARAALLAEQNRLHKTVLKIVHDDQACRRLMSIPGAGPIVAITFKTAVDDPTRIMKSKAIGPVFGPTPRKYQSGETGVTGGVSCVGDTKVRTALYEAANILLSRVKRFSALKRWGMDPAKRRGLKRAKAALARKIGLIMHRMWIDGTEFRWTTAERAAA

SEQ ID NO: 372218 - protein, 444 aa, unidentified
MSKPSTAVASAPEWAALAAIDWGDQKNFWRLLPAGSERQEQGQLENTPEAVEVWAATLQQRFGGRPIAVCLEQSRGALVYMLAKYAHLVLFPVHPTTAARYRETFRTSGASDDASDTASLLDLLLRHREKLRLLRPDTTETRLLQFLVEERRRLVDEKTRHSNRLTDCLKLYFPQMVQWFDVTSPLVGDLLERWPNLEQLRRAHPGTLHKFFQQHNCRGEERIQERIRAIYQAIPATQDAAVLEAGAMIARGLVALLATLRNQIVVFEQRIEELVRSHPEGALFGSLPGAGAALIPRLIVAFGTQRDRYQSAYQVQCYSGIAPVKEASGKTECIHFRFTCPKFLRQTFHEFASHSIGQSEWAKAYYEHLRNDRKKSHHASVRALAYKWIRIIFRCWKDGKPYDERVYLESLRRRGALLGGALKLATHAEWKTVAGFQKLSEKNT

SEQ ID NO: 372219 - protein, 473 aa, unidentified
MKIPTDIMAVGIDPAKEVHQGVALAYPEVELLNSQFENSYETISSFDEKIMKLAHKNNLKVIYGLEDSGAYGKTIKEVLTSRFRETREVNPLKTNRQKDFYGGDKSDEIDARCIAQILLRSYESLPKIEEDNDIYASIREAERFREILVKMKTQNVNRLHFYLTKTWGGAYKNFFSSLQNKIALEFFRTYPVPQVLKETKAKELARFMYEASSHRLGRGNPRKVSIEKAKLILSSIKGIKDLPLTLEREMKKEIIKELVANISQVKASIKAIGRKLNKDLLPETHQSLTSLKSTDTVTASVLLGETLNPDRFSTRDKFARYNGSAPQERSSGGRAKHRARKGCNRRLKRTLRQISVTAIVREPLSRAYYQRCLSRGLSKSQALKRVDRKISDIVWKMMKTKEPYDRELAIKNIIKRSQRTKNLGRARWQSRNLRIRKPSDEIESLVLPPLNILAELEEIEKKYQSIMSVSERE

SEQ ID NO: 372220 - protein, 370 aa, unidentified
MSVRRILAKTIDTDLEYEAIGIDLAKNCVSAALLTTDGEVVCIDRLDYSELEKSAQALSPTTFAMEPCTEMNYLVQKLEAWGHRCLVIGGKNVQNYVENHYSGQKTDLNDAQALAFLAQDTQLRTIKAKDVEQQKYASLTTLREQYIKQYRQTIVSLKGICQAWGLNISKGISGKAQLKDLIENHAAFPEELRESLVDMVTHAQTTQKVLNKITKTLEVLAKNDKVCQLIQTIPGLGTICSCRLRATIGDIKRFKNPKDFPAYYGLVPRSIATGHNEKKGKITHRGDRTMRSLMVQAAGSLVNMATKGKLKSKQLTKWILKKQKEKMPWGKLVCAVAAKLLRIVRAILISSKPYNPKIAGVAKCSLSKGS

SEQ ID NO: 372221 - protein, 346 aa, unidentified
MKMVRFFLGLDVGKSEIVATLMDDEEKELFRGAFKNQLSGFREMMKAVTGLTLNLAKEYQIYAGMEATGTYYLKLVKFLYEKVDGVTPYVINPNKVKKYMEYRGSRTKTDLQDSRIIAMCIRDGVENGLFRPWFPSRKEHEELKQLVRLRESLLTMKNMEKNRIEGLEQNPDHSPHAMKILEDHVAYLSRQIKELEAILKDNIKHGNFPDIEKDIERLKSIPGISDLTATCFVSEIGEIERFDGIKQIVAYAGLSPMEKQSGTSIRGKAQICKKGSKKLRQILYMPTLAAIRCNPVIKSFYEKLLEKGKKKMVAITACMRKMLHIMYGIMKNKAYFDPALCMPNVR

SEQ ID NO: 372222 - protein, 381 aa, unidentified
MRTTATPNEHDTTTERVLFLAFELSEKTWKLGFTTGPGQKPRERAVAARHQARLLQEIAQAKRRFGLPDTAPVVSCYEAGREGFWLHRFLQTQGITNQVVDSSAIEVNRRKRRAKSDGLDVRKLVSMLMRYEQGEREVWRVVHVPSGEAEDQRHLHRDLETLKQERASTTTRIKGLLSSQGIRLRSLSKFPEQLDALRLWDGSEIPSGLRRRLLRVWAHHQFLSEQIAALEAERRALLQSSQEAPIDKVRQLMQLKGIGINGAWLLVMEFFAWRALKNRREVGGLAGLTPTPYQSGASAREQGITKSGNRHVRWMTTELAWSWLRYQPESALSCWFRERFGSGGKRLRRIGIVAVARKLLIALWRFLNTGVLPEGAELKAA

SEQ ID NO: 372223 - protein, 377 aa, unidentified
MSKLRFVGLDVHAETIAVAVAEAGGEVRSLGVIPNRLESVRKMIGKLAPIGTLKCCYEAGPTGYVLYWQLAQMGVACEVIAPSLIPTKAGDRVKTDRRDAEKLARCYRAGELTPVWVPDADHEALRDLVRAREAAKKDQLRHRHRLGKFLLRHGKRPTDAGKAWTQKYLNWIRIHVHFDQPALEATVQYYREEVEHIAERITKLEQAIDEAVQQEPSEIRAVIEALQALRGVAQTTAATVVSELGSLSRFPNPSQLMGYSGLVSSEYTSGNRVQRGRITKSGNAHLRRVLLEAAWTYQHRPNVQGRVLRRQKSLALSEEARQIAWKAQQRLHKRFAALTARGKERNVAATAIARELLGFMWAIAVHTEAQQKQAKAA

SEQ ID NO: 372224 - protein, 474 aa, unidentified
MNIKGTKKKNQVVTVNIFEQQELLKKAEVIRENLIASTWRELETNGKLGKNEKLSFVSDDMLILGCDVGSDTHYVRAIDTRGRELSKSAFPFSNTLEGFQSLMDWATKIAASNDKKQILGLEPTGHYWFCLATWLIGNGISVVQVNPYAVKQTKEVEDNSQLKDDRKDPKLIANLVKDGNFGMPYLPEKLYADIRRLSMLRDQINEDRIRDLNRLHREMKIYFPEYKDAFGKIDGAFCLEVLKVAPFPEELVTLGVEGIRQIWHEAKLRGRGYVNATSIFENAKKSIGIQDGAESGKLAVKWFVHRMMESNEQVAEIESRLHQMCMEIPYAENILEISGIGENTLSGILAEMGDISRFDDVKEIQKLSGLGLVACSSGKHKGETKISHRGRKRVRYWLFQAAKSAVAHADEFKELHAYYTTRKDNALKKKQSLVVIACKILRVIFAILTKGTPYDPKKLLGDIVRPNERSIQAA

SEQ ID NO: 372225 - protein, 305 aa, unidentified
MKSYIGIDVSKLQLDLCHRQQSTQIPNTEKAIRHWLKSIPTSAILVCESSGGYESLLILLAHASQRPVARLNARQVRDFAKAKGRLAKTDKIDAHILVDFAETFHPEPRGLPDPLQQELAALVKHRAHLLLQITQNNNVAETLSDKKLLALVARTVAFLRKQVDQLEMLMADKISQSPNLAAKAQRLQQVQGIGSLSATALVALMPELGTLSDTQAAALAGVAPFNRDSGQYRGQRHIAGDRSQVRSVLYMAALVASRHNPVLKSLYLRLLAKGKAKKLALTVLMRKLILLANRLLKNPNFSLAT

SEQ ID NO: 372226 - protein, 459 aa, unidentified
MNRKRSKSKAERTLPMMHPNAAAIDVGATMHMAAVRADRATEPVRSFGTFTADLHRLVDWFTECGVETVVMESTSVYWIPIFELLDARGFAVFLVNARDAKHVPGRKTDVSDAQWLQRLHSHGLLRASFRPKGQIAELRAYVRQRERLLEYAASHIQHMQKALTEMNLQLHHVVADITGTTGLRIIRAIIAGERDPEVLARLRHYSCHSSAETIAKALTGSYRTEHLFALEQALALYDVYHEKASACDVRIEAVLKGLSIDRARSGSKELPTPRRHRTDQPNALAFDVRAALFRLLGKDITMIDGLGPYLSLKLIAECGDDLSSWPSAKHFTSWLGLAPSNKISGGKILSSRTRRSGGRAAALLRLAAVTVGRTDTALGAFYRRLSARIGKAKAVTATARKVAVLFYNAVRHGMEYVDPGASAYETRYRARIVNNLHRRAKAFGFVLQPMEPTPNVVVS

SEQ ID NO: 372227 - protein, 365 aa, unidentified
MSSVPSAAELIHLGMDTSMKEIVAGVLRPGEEMPVVSRIPNDKESIRRLIGRFPDRRLLSACYEAGPGGYELHRLLTSMGVACDVVAPSLIPRGASDKVKTDRRDAVRLTLTHRAGLLTPIRVPSPAEEAVRDLVRARGDLLDDRKRMQQRLNAMLLRHGRIWHGAKWTYAHRVWVDKQVFDEAALAEAFALYRGALDAREAELAAAEKLLAAWAGRDPLAGPVARLGAYRGIAQLTGLTLAAEVVDWRRFASAPAFMGFSGLTPTEYSSGSRTRRGHITKAGPEGVRTALVEAAWAYRYRPAIGVTLARRQAGQSPQTLARSWKAQQRLHAKYKKMTARGKPPGVAVVAVARELAGFVWAEMTS

SEQ ID NO: 372228 - protein, 338 aa, unidentified
MEFKRIAIDTSKHVFTVHGVDQQEHPILRRELRRAQIQAFFGKLAPTEVVLEACCGSHHWGRALSRLGHRVRLIPPQYVKPFVKRAKNDRKDAEAISEAAARPSMRSVPVKTVEQQAETMLVKHREMLVTQQTQAINALRGHAAEFGVIAAQGSQNVGALLTVLAADTAIPAAARAMFSHMGQHIAELNAKLETLDRQLMERHRANPVSRLLAEIPGVGPITAITMAMIVDPNNFESGRHFAAWLGLTPREHSTGGKQRLGKIIKAGNERLRQLLVVGATAVIRYARPGSRSASGWLLQLLERKPRKLAAVALANKMARIIWAMMARGEAYRRQPTAA

SEQ ID NO: 372229 - protein, 321 aa, unidentified
MSRIFIGVDVCKDFLDAHARPAAVAQRFDNTPAGIEQLVAWASALAPERIVLESTGPYSKAAVGALLAAGLPAVIVNARQARDFAKGTGQLAKTDAIDAAILAHFGEVVATVVRPLPPQEILEFREFCDRRGQLVRILAAEKNHRHAALGASAKVLANIDKHIAFLKRQIEDLEERMDGIVTNSETFKAKDEILQSIVGIGPQVSRTLLVHLPELGTGSRQAITALAGLAPFAEDSGASSRTRHIRGGRAKVRMALYQAAVVAIRHCPTMKAFYASLQARGKASKVALVAVARKLLVLANALLRDKTCYQAPANSVCPQNT

SEQ ID NO: 372230 - protein, 328 aa, unidentified
MSKERFYVGIDVGCSEVWVVAGKSKARKFSHNDQGVKQLYRWAKEKSGELLLHFCMEATGVYSQSLAVRLLGCGRCEVSIVNPAQIAAFAKAQMRRSKTDQIDAQVIWAFAQAQQPRCWQPERQAIQELAALVAQADALRKTQRSWKNRQHAHQYYPSLPRTVQQTTAKVDQMLKQQLEKVQQEIHRLCQADTELKRDLDLLCTIPGIAELTATRLLAYGKSALTERSPKELTAHAGLAPRHRQSGTSLNGRSRLSKQGDARIRCTLYMPTVAALTFNPIIRYHYQRHLANHKPRMVALMACMKKLLLMAQAILISQQPFNPNLLTLR

SEQ ID NO: 372231 - protein, 334 aa, unidentified
MTKVTTVGIDLAKNTFSLHGVDESGKVLLRKTVSRARLLEVLAQLPACRVGMEACSGAHEWARQIQAFGHDVRIMAPRFVAPYRRSGKNDSNDAEAICEAVQRPSMRFVPVKSEEQQAVLTVHRVRLGFVEERTATINRIRGLLAEFGVVLPQRAVEVRRGAAAQADRLPILARGAILDLLQHLAALDERIAAYDRELEQLAQGSESAQRLMTVPGVGPLTASATVASIGAAHEFANGRQFAAWLGLVPRQYSTGGKARLGHITKRGDAYLRTLLILGARAALQMAARRDDRLSRWALALKARCGYHKAVVAIAAKNARIVWAILTRNTEFKAI

SEQ ID NO: 372232 - protein, 324 aa, unidentified
MRFAGIDIAAETHVVAVMDAAGAVLVKPTPFTEDAEGYARLLDRLGPPSELLVVMEATGHYWKNLFATLAAHGVAVALINPLRTHRFAGEDLARTKTDAIDALGLARFGAQKRPAATRLPDAATEELRELVRLRDRLVQNFGDRVRQLHRLVDLGFPEFTRYVKGLDSELATALLRTLEGDIERTLNDHEVGSLLTTIDGIGPQTAARLVAELGDPARFRSAAALAAFVGVVPALRQSGKRTGTRAGLTAIGHGPLRAKLWMPTLTAVRKNPWLRAYYERLRARGKLPKVAVVAAMRKLLIAVYAVAKHRRPFISTPVAAESRP

SEQ ID NO: 372233 - protein, 339 aa, unidentified
MQKKFFIGIDVSKHTLDVAFIIHESSTVIKPLWSQFANSSSGLRAMHSWLTEQGVLFNEQTIIVIENTGIYHRLLWHFFSSMHVDLCIENAAQVKWSLGIARGKNDKVDSRRLALYAVRHVDRLKPTPALHQQILPLKDLMTLRNKLLLQINNLNTGIKELNSISISASFAKEAGKLIQPAVSGLQEALKKTEQQIKALLKKDKTLLDMYKRLNSVPGIGHITAVYLICCSNMFTLCSNGKQLACYCGVVPFDHQSGISIRGRNHVHKMANKELKRLLHMCALTSIKNHPEFKDYYERKKLEGKHAMSILNAIKNKIILRAFAVIKNERNYVDNYKTAA

SEQ ID NO: 372234 - protein, 533 aa, unidentified
MIHLWTTCSELETGIPLVFYTRKGAWSEQVAATSLVKPQAIPFGRLHKIDTAYPEHVVQNKTTGVSLMENKKKLKLKKKTNLPFHLQHINVNAAGIDIGSESHFVAVPEGRDKESVRAFSSFTCDLFNIATWLKTCKIDTVVMESTGIYWIPLYDYLESEGFEVKLVDARHVKNVSGRKTDVLDCQWLQQLHTYGLLSGAFRPPEDICALRSLHRHRFNLVRFASSHVLHIQKALSLMSLRLHNVISDITGVTGMSIIRKIVDGERDPKKLAELRDRRCKNSYEIIVKSLEGNYRSEHVFSLKQALELYEYYQTKITECDNEIEQTLKSFKSAINIKENPLEGKRKTAGKNQPKFDVRTLLYEKAGADLTRVDGINESTALTILSEIGFSVESWKTSKHFCSWLGLSPGNKVSGGKVITSKTKRCANKVAASLRLAATNLCRSQTALGAYYRRMSAKLGKPGAVTATAHKLARLVYSMLKHGTKYVDQGMSHYEEQYKKRVIKNMQRRAKQLGFKLVKAINVDNDNIATLLTI

SEQ ID NO: 372235 - protein, 372 aa, unidentified
MEQNTGVFVAMDTHKETIAVAVAEAGRSGEVRFWGEIPNRADTVRRLVEKLASKYGRLSVCYEAGPCGYELHRQITDLGHECVVVAPSLIPVRSGDHVKTDRRDALTLSRLHRAGELTAVWVPDAAHKAMRDLVRTRTAAMEMVRRARQQLQSFLLRHNRTFTGRCPWTGAHRRWLATQRFEHPAQQIVLQELIDTVTDAETRRDRLNGQIEELAQSWTLRPLVEALQAMRGVAFLSAVVLATEIGDFRRFANPRQLMAYLCLVPSEHSSGRKVQREGITKAGNTRARRVLIEGAWSYRWPARVTNEIRARLEGLPKAVQGIAWKAQTRLCARFRRLTATGKNHNVVVTAIAREMAAFAWAIAREVEPVQAP

SEQ ID NO: 372236 - protein, 458 aa, unidentified
MEGLGGLTPTRVSSHEDWSISTVLRLRCSCPTTRGSRVLGVGIDWAEEFHLVALGRPGEGVFDIARVEHTPADIDALVARIASIEPDPAEVRVVLETSHGMLVERLLDAGYVVVPVNPDLVARRRGPARKKDDAEDARIACLIALDRFERLRVLVPHGEEAGELRAIARDDERAARDERRLLNRLRADLIATFPAAHVVAGDDMGAPTFLRLLERWPTADALAGATHDELVDFARVARHSWPERFAGQVATAIATSHFVPRAYLVRAKEGTIRLLATQLLALGAQRRAWERRMGELLLGAPRTGRNKQPKEEKRGPTVPGGEIYLSFPGLGDRLAARVAAEIGDIANFDTPNGLQCYAGKAPVTRRSGKHELVVANRLACNGYLRDAVQLWAFCSLSRSGWAREFYDGQRSRDKGHHAALRALGNRWLEVLWHCLSKDVAYDEATHVANRDRALARAA

SEQ ID NO: 372237 - protein, 343 aa, unidentified
MKITRVGVDLAKNVYQLHGVDRYGKAVWKRRLRRGQWLQALTDKVEPGCEIGMEACTGAHHWARELQSRGYTVRLIAPQFVKPYVKSNKNDANDAEAICEAMSRPHMRFVTVKSVEQQDIQATHRVRTEIKDHRNAKANQIRGLVAEYGLVAPQTLLALRGAIPQWLEDAENGLTDYFRSLLHGLWDDLLTLEDRLKELDKEIEKLARSNEVTKRLQQLRGVGPIVATALVATVGDGAQYSKGRQMAAALGLTPRQNSSGDKHRLFGISKRGDVYLRTQMIHGARAVVSQAKHRNDPLSRWVTDIAKRRHPNVAAVALANKTARMAWAMLRNDTDYDPGLGAC

SEQ ID NO: 372238 - protein, 356 aa, unidentified
MQTQVTKKIDFSGKELFIGLDVHKKSWSVTILVEGMEHRTFTQPPDPNVLFNYLQKMFPGGTYYSAYEAGFCGYGIHRELNSLGIKNIVINAADIPSSQKDHLEKRDPIDSRKIARALGKGLLRAIHIFDRDTEELRSLNRTRFYLMRDLRRSKNRIKSFLQYYGESIPPEFDNNQWTLKFISWLKNVKMQTLSGQDAFSNLIRSYEYHREQILTLSRQIRQRVTEYDKELYTLLKTISGIGPLTSSALITELGDINRFPHIDHLSSFVGLIPRVKQSGETSYSGGITFRCNEYLRTLLIESSWQAIRQDPALMQYYHEHLINNKGQKVIIKVARKLLNRVRYVMKNRQPYVTGVA

SEQ ID NO: 372239 - protein, 352 aa, unidentified
MIAIGMDAHMAMSHVYAAASDFTDPEDSEFADEFNQVFKGPVTSDVAGLSKIADFLKDTEHCILIENSSKAHDVFWTLTDLGCTVLVANAGDLYRINMSVKKTDAHDAAELAAYMRRRINGENEFSACLMVDSKWMNRRQICRLYVLESQELSDCRRRLRSFMLLRGTVLDGIPKDIASENALTRLEECADESMRLLIERTRQCRERMKTCLKSIEKEFADDEMYNLLISIPGFGPVISAYFSSIIVDIDRFPNAGCFSAYLGVVPKQRDSADSSPRLGITRRGDATARRLIFMSTMIHIYRDKDRASGISRRYDNHCLRMPKKKALVAASNKMARIVYGMLKSGTEYKDGF

SEQ ID NO: 372240 - protein, 316 aa, unidentified
MDAVLECCVGLDVHQETVVACVLFGPLEHKPKKETRTFGTTTPELLTLTDWLEEQKCSHVAMESTGVYWKPVWNILETGSFQLILANAQRIKNVPGRKTDVKDAEWIAQLLRSGLIEGSFVPPVEIRDLRDLTRYRKKLLQDTTQEKNRIHKILQDANIKITTYISDIFGVSGRNIMESLLAGEVITVESIKMMVRGKVRSKVPGLVDALNNRLRKHHREMIRFSWEHLNYLERTILEIEDRIEQSLRPYREEVELLDSIPGVNETGAAMMIAELGTDMSVFPTDNHVSAWAGVSPGNNESAGKKKELEPPQGTRR

SEQ ID NO: 372241 - protein, 416 aa, unidentified
MKKGQNTRGYQRYMALDIHREYILVGAQNEEQDWVLTPRRVSIEKFPEWAKKNIRLGDIVVLETTTNVWTTYDIVAPLASRVLVANAAEVGEIANARVKTDKEDVKRLLKLLIGGIVPEVWVPPMPVRELRAFVSYRGRLVATSTAIRNRLQSLLHKHNLMLSEAGLLDQAWWEAQKNISSLEKLQIRQELALLQEVEKLKAAVDEELQCQSTSSTWGKPALQIMQLPGVGFIVAMTVLAAIGDIARFDHAKQLVGYAGLGAGVHDSGKTHKEKKITKKGRRELRWAMVEAAWRAVRMSPFWKAEYEKHLKRMRKPNQAIVVIARKLLIAIWHVLSKEETDIHASEEDLAYKMLLLSWSLKEETRRGLTYKQFAKYALMKVGVETDITRFVRKNVPRRLASREEVLVRMTELGLSA

SEQ ID NO: 372242 - protein, 298 aa, unidentified
MSVYVGIDVHRKRSRVAVVAGDGKVQLNRNVVNGQEPILRLIGGLPTGTPVAFEAAYGWGWLVALLEDYGFDPHLVHPLRCKAIASARLKNDKVDAAILAQLLRADLLPEAWIAPAPVRQLRAQLRHRASLVRLGTQLRNRIHAVAADFGYDRTGSYWTGPGRGWLAELDLPPVSREIVTDCLASIDALAPVIERLDGELHQRAKADPRVKVLRTLPGVGEFTALVMLAEIGDITRFSSARKLASWAGLTPTVRGSDLTVRHGHIWKAGLGVAAVGPEPGGADRQALPGVRRHLRRHR

SEQ ID NO: 372243 - protein, 369 aa, unidentified
MANQLPVVGIDVSKATFDSQWGSQKGKRQQAHFSNDANGFAHLQGWILQHGVTQVHCCLEATGTYSDALAAFCFAAGHVVSIIAPHKMHAFRLSEGILSKTDKIDARLLASYGEQKRPGPWHPVSASAQQLKGDLDRLDELRAMQQQETNRLENHRLDAQARKRIQAHITWLDDEITSWAPLLEERFAQAFKQEHPQEPPQQKQTPGKKVKRPRKKTMQIAPIDAMMQVVGIGRLSALRMYAIFATLQEHASSEQMASYFGVVPHQHESGTSVKGKTRRRGGNRQARNWLYMCALTSKRCDPDMKQWAQELQARGLCKKAVIVAVMHKLARILFGLFKTNAPYDATKAFPMHYLKEKEETTTKKLAIAA

SEQ ID NO: 372244 - protein, 330 aa, unidentified
MKKWEFTLGVDVSKNTLDISCSELNEHVKIKNGTEGFTVFLKWCKHFKIDLKQSFLVMEFTGGYEYKLIQFCESRGILYTRIPGLAIKNSLGITRGKNDKVDSSRIAQYGEEKHKSLTPSRPLNPAIVSLKELLSFRKRLVRENAGYQATIKERIHMYGGNKKDIIVKKLEQKLKGNIKNIAAIEAEMLNIVAQDEKISINYSLITSIKGIGKINGLMTIAFTENFTSFTNPRSYAVYVGVVPFDHSSGISIKGRKRVSHIANKELKQELNQAARSAMEWDKEMRSYGEEKLKTKCYKIVLNNIKFKLILRMFAVVKRGKIYVENYRNVA

SEQ ID NO: 372245 - protein, 309 aa, unidentified
MKQSVVYIGVDVAKAHLDVAWQKQSRRFGNDKSGRAALVAWIKQSPTAVQLLCEASGGYERGLLESLEQSEIKVTLVQANRVRQYARAAGILSKTDKVDAGVLSAFGAAMQPKPTRPQSAEQKRLREYEAQRRHLSRILLAEQNRLAQLGCAELRALSRKLISQIKNQMATIDVRIGSVIAQDQELRLKAEKLTSITGVGERTAALVLAEMPELGRLNRRQAAALAGVAPFNRDSGTLRGKRTIFGGRRALRSGLYMTALAAARHNQILSNFYQRLRAKGKPHKLALTAVMRKLLLVLNHSLKPIPSPA

SEQ ID NO: 372246 - protein, 467 aa, unidentified
MTPSKDAFPEPCPPVPTIPEPSVLRPSFSLPLSNPHAAGIDIGEAEHWVAVPPDRAPQPVRRFGTFTADLDALADWLLDCGITTVAMESTGVYWIPVFELLEARGLQVFLIDPRQAKRAPGRPKTDRLDCQWLQRLHAYGLLAGAFRPDDQVCVLRSYLRHRQMLLTSAAHHIQHMHKALQQMNLKLTQVVSDITGATGMAILKAIIAGERDPVTLAKLRNPHCQHDADEIAKALQGTWRAEHLFALRQAVELYEFYHQQITQCDQQIKAHLETFGDKSAGQPLPPKARRHKKTNEPRFDARTPLYRMAGVDLTTIEGIEEGTALVILSEIGTDMHRWPSVKHFCSWLGLCPQHQISGGKVLSRRVRPGAHRVTVALRLAARSLHHSQSALGAFFRRMKARLGTPKAITATAHKLARLVYSLLKHGSAYVQQGLENYEAQYHERKVTTMAKQAKALGYTLVPLVAQG

SEQ ID NO: 372247 - protein, 412 aa, unidentified
MIVGIDVGSETHYARAFNWRNYEYSKKPFAFSNDEAGFPSFKDWMDDIAEKHGMETVIPGKEPTGHYWLNLGAYLQEQGMKPVHVNPHHVKKSKELDDNNQSKNDRKDPKTIAGLVNEGRFSYPYIPTGIYAEIRNLSNLRIQTQEEITRIKNRIARWFSIYFPEIKDVYRNPDAVSGLMVIKQAPLPCDIKELGVDGVNKIWRDARLKGAGIKRARTLVTAAEHSIGNTEAPRSARKEIRNLLEDYEGYKKRMDELMEEIEKTLSEIPYIDKLMEINGIGIKAVSCFIAEVGDIGRFDNPKQVQKLAGYSIVADSSGKHKGESRISHRGRTRLRYALYEATISVIGKNKEFKVIHSYYRTREKNPLKKMQSVIAVACKLIRIFYTILTKGVDYDGQKMLNDIVRPEIQPAA

SEQ ID NO: 372248 - protein, 408 aa, unidentified
MAKEPLNVLVGVDTHAHTHHVAIISEYGKPLADQEFLAVGSGYRKILDFIASHGTAAAVGVEGTGSYGAGLSKVLRSEGLTVLEVNRPNRAQRRLKGKSDPLDAYQAAQSVLAQQGLATPKAKDGPVECLRILRTARSSAMKARTAAINQIKGLLVSAPDALRAKYRGMATPAMIAALQRSRPSGHVADPEYMTLLTLKTLATRYHVLAEEITAADTALQEILDSYAPLLCDLPGVGPDVASQLLITVGDNRGRIGNEAQFAALVGVAPIPASSGKTTRHRLSRGGDRNANRALHQVVLTRMSSCPRTKNYVSKRTTEGKSKREIMRCLKRYVSREIYRQIFNPIPAPSVTDLRQKRKSLGLTVNAVAGELSQWPSVISRLERGLMRNDDLATSYRKWLEEQTTQKTN

SEQ ID NO: 372249 - protein, 420 aa, unidentified
MKSASSTLNSTLPESPPNDVTAGIDWARDDHAVAVVDGRGRQIYRCAVDHTAAGLRELVGVLGKYGVDEVAIERPDGPVVDALLGAGLTVVVISPNQVKNLRGRYGSAGNKDDRFDAFVLADTLRTDRARLRPLVPDTDATIALRRACRARKDLVRHRVATANQLRAHLRNVLPAGVGLFSEIDSAITLAFLTRFDTQDKVDWLTPKRLGDWLARQGYSGKVDPAVLHQRVLDAPRGATGVLAASQAHITASYVALLRTLAEQIKALEKRIDQQLDSHADAHIFTSLPRSGRVRAARLLAEIGDCRARFPTPESLTCLAGAAPSTRQSGKLRVVGFRWSCDKQLRDAVTDFAADTRLVNPWAADLYDRARERGHDHAHAVRILARAWLHIIWHCWQDSVPYDPANHRALQRFLAQQNEAA

SEQ ID NO: 372250 - protein, 370 aa, unidentified
MKKRITFVGLDTHKNSIEVALADVGRNTEVRLYGRIGGDSASLDKMIHKLQATGAELRFVYEAGPCGYEIYRHLRAQGFHCDVVAPSMVPRRSGDRIKTDRRDACNLARLYRAGELTAVYVPREDDEAMRDLVRGRQDAIDAQRKVRQQLGGFLLRHGFRYPGKCAWTLAHRRWLAGIKMPHPAQQIMLQEYIHSVEECTQRVHRLTEQILHLMPDWRMHPLVEALQALRGVAPVGAATTVAEIGPLDRFKSPRQLMAFLGLVPSENSSGGSIRRGAITKTGNAHARRALIEAAQAYSRPARISRAILKRQEAVSEPIRQIAWKAQLRLCARFRRLAARGKSRNRVVTAVARELSGFMWAIAKQVPEPQA

SEQ ID NO: 372251 - protein, 337 aa, unidentified
MTQITRMGIDVAKHVFQLHGVDERGHTVLRRRISRTQLCPFFAQLRSCLVGIEACGSAHHWARTLAALGHDVRLIAPQFVAPYRKNDKNDGNDAEAICEAVGRPHMRFVPVKDVGQQAVLTVHRARQLLVAERTALVNQTRGLLAEYGLIVSTGVGVLRRALPELLESPELPAMARDVFADLADRLRALDERIASYDRRVAQLARHMEPVQRLLQVPGVGPVTATALVATVGDAHAFKNGRQFAAWLGMVPRQHSSGGTRRLGRITKRGDVYLRTLLIHGARAVMRQLARRTDATSRWVLALKARRGFNKAVVALAAKQARVLWALLATGRPYAACP

SEQ ID NO: 372252 - protein, 376 aa, unidentified
MNSVAVVPLDIHKRFSKAVEMGEGGEVLGEARVSHAGRDEMKKYFSRFPAGTDVVMEATFNWPWIADAAEEAGLRPHLAHPMRAREMAKGMAKSDRKDAIFLGKLWLAGDIFPESYLAPPEVRRMRGLFRLRLTLVSMRTALKNAIHGQLHRQGILISECSDLFGKSGLAILEKLPMKEHERWQLDTKLSVLGDIGLYVKEMEQKIRRELKTDPRAQLLMSLPGVGEITAYSMLAEIGEIERFHNSRALASYAGLLPLDNESAEKDFGKRTGAHCNRFLRWAMIEAVTGAVTASGRMKSLYMRVKNRNKDKPQKARIAVARELIELSHLLLTRKVKYEEKRPPRPGSKEAGDGTRPNRASQTTLCARSPQASQAAL

SEQ ID NO: 372253 - protein, 341 aa, unidentified
MNSTVIAIDLAKDVFEVAVSHIEGKVAERRRTTRAKLQEWIATVPPATVLLEACGTAHYWARVISGLGHKVILIPPHVVRRYVAGNKTDRTDTKALLEAYRNEEIHPVPMKSEAQQGVMSLHRLRSGWMGTRTARMNEIRGLLREFGLTIPLGADRFMERATKIIHNDESPLPLPLKTAFEAALKELLELEERIDAVDKSLARVARQTPLVKLLQTIPGVGNLTASAAAASLVDFHRFKSGRQLASSLGLTPREHSSGNRRFLGRITKRGDRYLRTNLIHGSRSVLRAAKKKVNPSRLEAWALELERTIGHNKAAVALANKQARLLWVVATRGVAYQPHSV

SEQ ID NO: 372254 - protein, 346 aa, unidentified
MGRSITNLSSVTTVGLDLAKHVFQVHSVDASGRVVFAKAIRRNKLLEFFASLPPCLVGLEACGSAHHWARELIKLGHDARMMPPAYVKPYIRRQKNDASDASAICEAVTRPSMRFVGVRSLENQAALMRHKTREMLVSQRTRLLNALRGHLTEVGVIAAQGPRHGRELAELIEACDEIIPFEVCEALAPLVVQLRNLDEAIARLDRIIAELAQKDETARRLMSIPGFGPITASAMAATIQDTSSFAGPREFAAFLGLTPKQNSSGGKQKLGRISKMGNRNLRKLLVVGAHAVLFHRKPHTDPLRMWAKRLLEKKPFKLVAVALANKMARIAFAILRGKTVYREIPT

SEQ ID NO: 372255 - protein, 389 aa, unidentified
MKIFVGIDIAKLNHFAAAISSDGEILLEPFKFTNDADGFQLLVSKLESFDKNSIIIGLESTAHYGDNLVRYLVAEFYQVCVLNPIKTCQMRKNNVRKTKTDKVDTFVIAKTLMMQDDLRFITFFDLDMMDLKALGRFRQKTIKQRTRLKIQLTTYVDQVFPEIQYFFKSGLHQHAVYALLKEAPSPKEIASMHMTHLANLLKVNSHGHFTKEQAKELRVLAQKSVGANDSAISIQITQTIQQIELLDSQLEKIEAEMTDIMRFNDSVIMTIPGIGYINGGMILGEIGDIHRFSNPNKLLAFAGLDPSVYQSGNFQAKTTRMSKRGSRVLRYALVNAAWNVVRNNATFKAYYDAKRAEGRSHYNALGHCAGKLVRVIWKMLTDEVEFNLE

SEQ ID NO: 372256 - protein, 387 aa, unidentified
MTVRTVNNLPAALHGETVRCLFAIELSKQSWVVGFITPLTTKISRRTVGGGDWKGLLSLIDEVRARVGRETGRPVEVLSCYEAGYDGFWLHRQLIAHGICNYVIDPASLQVDRRARRVKTDRIDAERLLYSLMAYLRGEPKVWSVVRVPSVAEEDARRLHRERHRLVSERVQHVNRIKGLCALQGVYDYQPLHPQAMARLEQLRTAQGVGLPPRIKSEIKRELQRLKLVVEMIATLEAERDAIIENKASTHINSAKIQALHKLKAIGPEFATVLVGEIFHRDFNNRRQLASYVGFAPSPYRSGKVAHDQGISKAGNSKGRTTGIELAWLWLRYQPDSDLSTWFRARVGTTKGRVRRIAIVALARKLLVALWRYLETGLVPEGAVFKR

SEQ ID NO: 372257 - protein, 424 aa, unidentified
MKVTYQTCCGVDVHKSFLVATIVKTTGDIEPSYQKKRFSTFNNSILEFKQWLLDNDCHDVCMESTGKYWVPVFNLLEDDINVVIANPKWVKAVKGNKDDTKDSKWIGDLFRLGLVKGSYIPCKKVRILREYTRYRYKLVSCRSSEKNRYQNALTVCNVALDSVVSDIFGKSSTSIIDYLLEQSGSSINHEEIASKLLRSLKSKEDAVIESVEGYQMTDAQKYRMRLVRAHMDYITAEINDVDKMIENMISSNTDFENAVQFLCTIPGVKRDSAITIISEIGTDMSQFSSSRRLCCWAGLTPGSNESAGKRKSVRITRAGVYLKPALVQCAHAAVKSDKSPYYKKKYESLVKRRGKKRAIIAIARMILTAIYQMLSTGEQWNPSDLYKIDMPVALVEKQKAKAIKQAKKLLQREGLLPPDEPLAS

SEQ ID NO: 372258 - protein, 418 aa, unidentified
MIDDVQWFVGIDWATQSHRACLLDVEGRHVSERDFAHDGAGLTELRDWLLEKTKAAPGQIAVAIETPHGPVVEMLLDHVFLVFAINPKQLDRFRDRFTVAGAKDDSRDARVLGSALRTDRQAFRRLVVDDPVVIELREWSRMADELQQERTRLANRVRQQLWRYYPQATELTDDVADDWFLALWQQVPTPTTAAKVSEKTITRILKHHRIRRVDATTVLLTLRKTPLFVAPGTTEAACAHIRNLAARLHLVNQQIKEAHRALDGLCARLEAATENPSGQIREQHDVTILRSWPGIGRIVLATLLTEATEPLRRRDYHALRALAGTAPVTRRSGKQCFVIRRLACNKRLQNAVHHWSRVAIQHDTAARRRYDALRRRGHGHARALRTVGDRLLYALCTTLKRQTLYNPDCQAAQMTASL

SEQ ID NO: 372259 - protein, 317 aa, unidentified
MKQSYDTRKIAGVDVGKAYLDGAVHGLEDQVRVGNAAAGLSELIAWLKAREVVRVGLEASGGYERAAAQALTAAGFEVVVHQPLEVRLFARLKRQRAKNDQIDARVIAMATAQVEAVKAAQDSRLQALAERLTVYEQITDQLAELKTAMEHVTLKDLVKTMKAQIAQMTRLKTKLLAAVLLAIKAQPDLLARFRLLISLPGVGPVVAAALVIRMPELGTMKRGQAASLLGVAPFDRDSGQFKGLRFIQGGRARPRRLMYLAALIAKRFDPALLAFAQRLQERGKPPKVVTVAVMRKLIEAANLVLGRGQPWVKQPQT

SEQ ID NO: 372260 - protein, 398 aa, unidentified
MTESSDYESVQVFIGVDVGKDTHHAVAINRSGKRLFDKALPNDENKLRSLISDLKQHGQILLVVDQPATIGALPVAVARSEGVLVGYLPGLAMRRIADLHAGEAKTDARNAAIIAEAARTLPHALRTLKLADEQIAELSMLCGFDDDLAAQTTQASNRIRGLLTQIHPAPERVLGPRLEHPAVLDLLQRYPSPEKLASLGEKKLAAQLCKLAPRLGKRLAADIAQALAEQTVVVPGTNAAAVVLPRLALQLITLRKQRDEVALEVEQRVLAHPLYPVLTSMPGVGVRTAARLLTEVACRAFASAAHLAAYAGLAPVTRRSGSSIRGEHPSRRGNKALKRALFLSAFAALRDPLSRAYYTRKMSQGKRHNQALIALARRRCDVLFAMMRDGTFYTPQGS

SEQ ID NO: 372261 - protein, 377 aa, unidentified
MKNVRFVGLDVHAETIAVAVAESGGEVRSLGVIPNRTESVSRLVRKLGKPEQLQVCYEAGPTGYPLYWHLTKLGVKCEVVAPTLVPIKAGDRVKTDRRDAERLARCYRAGDLTPVWVPDAAHEALRDLVRAREAAKADQLRARHRLSKFLLRHGRRASEGVQAWTGKYWDWVNSAVHFEQPAQTATFIDYVHEVEHAAARIQRLEQAINAAVETVPPKMRAVIEALQALRGVAQVSAVTVVAELGQISRFARARQLMGYSGAVSREHSSGARIRRGAISKAGNAHLRRIVIEAAWSYRHRPNIGKALAARQRGQSEAVKEIAWKAQHRLFHRYRRLMAAGKTKQQVVTAIGRELLGFIWAIGVHIERPPHPRLAAAA

SEQ ID NO: 372262 - protein, 487 aa, unidentified
MITERRLVGVDLGIASDHTVRVLTGEGSEVCRRRARPTVESLAAVEAAALAGAPADIRLEVVMEPTGPAWLPVAVFFCNRGHQVFRVASAKAADLRRFLSRHAKSNGIDADTLARLPLLAPGSLQPLELPGPAAAALDRRVRACDRLTQQGALHQRRIKDLARQLLPDSPLTGDLCQTDLAVLARWADPRALLGARRTRLLAVISKTSHGQQGAARADAWRTAATAALELYADHPAIAFTDLAAEVATEVRLLQAVRAELAGHAAARAEAYRFTDPGALAASLPGLAEVGAPTVTAIIGRPGRFRTGKQFRSFTGLTPKASETGDTDRKGQAMSKAGNRLLRTTLIRAADNARRQDPQLARIYYVQMVERGAEHLKACCVVAAHLAERLHTVLVRGMPYVVCDTDGTPVDPARAKQIIAEHWTVPSEVRARRRSHKASTRRGAKAGKAPQQVRAGHDRSDTRRVDKRGDLPRNSSVLAPRTPVKQGT

SEQ ID NO: 372263 - protein, 373 aa, unidentified
MPQANDLSRSLVALEQDSTVIAVVEMSLANWLVAGIVPGIERHPLQRWRDEATKAGRNINRIAVAYEAGRDGFWLARWLQAHGVEAHVIHASSIAVSREHRRAKTDRLDTDHLKRAFIGWLRAEPDHCHMAAIPTLEQEDAKRPTREREKLVGERTRIINQVKSCLARFGVRGFKSKLRKAAERLEALRTPEGVALPPNTLAELRRDLLRLRVIMDQIKAIEVGRLERLKKAPKARPNAMVRLLARVIGIGIETADMLVHEILSRNLRDRRAVARYAGLTGSPDESGKRRREKGLARAGNARVRRGMIQLAWRFLKFQKDSALAQWFQSQTTNARCRTRKTMIVALARKLLIALWRLVTSGEIPIGVALRPAA

SEQ ID NO: 372264 - protein, 390 aa, unidentified
MVTILRPFGEIVSSPFEIKHTSSDIHSLIKLIHSIEGESRVVMEHTGRYYEALAHQLSAADLFVSAVNPKLVKDFNNDSLRKIKSDKADSVKIARYALDKWQSLEPYSITDELRAQLKVMNRQFHFYVKQKTAMKNNLIGLIDQTYPNANTYFNSPTRSDGSQKWVDFVSTYWHVDCIRKMSLNAFVEHYQNWCKRKKYAFNKSKAEEIYTKTKELVPVFPKNEITKHIIRQAVDQLNSTSVTVETIRTLMNETASKLPEYSIVMQFKGIGPSLGPQLMAEIGDVTRFTHKGALTAFAGVDPGVNESGSYAQKSVPTSKRGSSNLRKTLFQVMDVLIKTMPQDDPVYQFMDRKRTQGKPYYVYMTAGANKFLRIYYGRVKEYLSVLPDPS

SEQ ID NO: 372265 - protein, 358 aa, unidentified
MSHDKSNKLDFTGQPIYIGLDVHKKSWSVSIFSNYGEYKTFNQPPEVDKLFQYLRHHFPGGDYRSVYEAGYCGFWIHDQLREKGIQCLVVNPADIPTKNKERRAKRDRIDCRKLGRSLRNGEIAGIYVPCRPKLEDRTLIRTRQSMVRKQTRCKNQIKAILLFYGVVIPEQREMGHWSRRFIQWIEGVRMERASGDMALRAHLEELSHLRQLIASLNRAILRLARTEEYGPLVRLLKTVPGISTLTAMILLTELGEITRFPSLDELSCYVGLVPDTQASAEKEYVGGLTQRRHAQLRWLLIEASWTAIRKDPALLMAFEQYCKRMRKTKAIVKIARKLLNRIRYVLKNQAEYVPCVIG

SEQ ID NO: 372266 - protein, 453 aa, unidentified
MCLEDRPVLEPNAAGIDVGAREMFVAVPPGRDAKPVRVFATFTEDLQRLTDWLVQCGVTTVAMESTGVYWIPLFEILEQRGIHPCLVNARHMKNVPGRRTDWHECQWLQFLHSVGLLRSAFRPEQDICAVRTVLRHRSELVMAASQHVQHMHKALTQMNLQIHHVISDITGVTGMAIVDAILAGQRNGAELARLRDPRMKVDTETIQKSLQGNWRSEHLFTLGQSRDLYRIYQQQIASCDLEIEKMLQRFEPRTDPAERPLPPDRKRNRNGRKKRKKNGHPHPEFDLRTETYKLFGVDVTQIPGLDENALPLFSEVGRDMSRWPTAAHFVSWLALCPDNDISGGTVLWRGARRIKNRAGHLFRLAAFSLHHSPTPLGNYLRRMKAKLGPKAATMATAHKIALIFYSMVKNQVEYDETIWATRDSQREKRLEAKIKRQAKQLGYELVPIEPKAA

SEQ ID NO: 372267 - protein, 310 aa, unidentified
MKDTIGIDISKATLDIHRLSTGETAHFANSPAGLRALRHWIGAETPDLVVYEATGAYHATLERSFAGVLPLAKVNPLQARRFAQARGTRVKTDAVDARILALMGSALDLVPDLPAGRNQHALKELQIARMALVKERTRLLNRSKTQTMAILKRQSKARLEQIRRQLTELEDALMDLARQCPKQTRAFDILRSIPGLGRITSVAILAECPEIGTLTRKQIASLAGLAPMTRQSGQWRGKAFIQGGRKFLRDTLYMPALVASRYHPDLRQKYQSMIQAGKPAKVALTALMRKLIELANALVRQDRKWTPKTA

SEQ ID NO: 372268 - protein, 377 aa, unidentified
MSKIKFVGLDVHAETIAVAVAEWGGEVRSLGIIPNREESIRRLVKKLGPAEQLQACYEAGPTGYIVYWELTALGVKCEVVAPTLVPVKAGDRVKTDRRDAQKLAQSYRSGDLTPVWVPDAAHEALRDLVRAREAAKKDQLRARHRLSKFLLRQGRRPPAGVKPWTQRHLAWVKQAVHFEQPAQEFTLLDYIHEVEHATLRIGRLERAIDEAVQSAPSRMRTVIEALQALRGVAQIAAATIVAELGEVSRFAAPRQLMGYSGMVAKEHSSGQRIWRGGITKTGNAHLRRVVTEAAWAYRHRPSIGGLLRRRQEKLSEEVKEIAWKAQHRLHARYRRLTGRAKSKQQVVTAIGRELLGFIWAIGVQAESKVREPMRCAV

SEQ ID NO: 372269 - protein, 349 aa, unidentified
MSHKSAPPTVSTIGIDLGKNSFHLVGLDQRGAIVWQLKCSRAQLERRLANIPSCLIGMEACSGAHYIARQLAALGHDVRLMPAQYVKPFLKGHKNDYRDAEAIAEAVQRPTMHFVAIKTPEQMDLLALHRVRSRLVSQRTGVSNQIRGFLMERGIIVRQGMVPLRRALPDILSSNTPALSPRIVNLIAELVQDWRRLDERIAAMSADIESLVEQDEACQRVMTVPGVGPIISSAMVAAIGNGAGFTQGRDFGAWLGLVPKQESTGDRTILGKISKRGNKYLRTLFVQAAHVVLARRPSAAMRGLWPWIEQASRRLHRNMLAIALANKLARIAWAVLARGRSYQPRIVAI

SEQ ID NO: 372270 - protein, 509 aa, unidentified
MRIIGLDIHRAFAEAVAWEDGRLRRLGRVDMRRDLLAAFAAKLSPNDVGVIEATGNATSATAVVAPHVKKVGIGNPKQVRIIAYAKIKTTIEADVLAQLYASGFLPEVWIADEPTQALRRQVTRRNQIVRQRSRLKTVIQSILHSHLIPSCPHADLCGAKGRTWLIEQVVPQDERLAIDRHLREFDRLGEDLQVIERDLARSALEDEGVKRLMTIPGVDITVALAMKAAIGDVSRFDDPQKLVTYLGLNPSVRQSGQVRPTMGGSPSRAVVMRAACSSRRPGRPLVLPDRCEPSPCGVRARRGQHVAAVATARKLSVVIWHLLMKGESYAWARPSLHAKKLARCGTQGREQGCARPKGSRARLQHKEPPGRRAPLGGAGRGRLCTPRRRLEPTRSEEGRHGCRKPGAQLGIRATWPQEASSPMQTMDEFPADAEMPVDRACRRPVMRCPRADEFAPDAPGHDARVRVPRRSVCSRLIGVGRGRNTSVTKSERMILKRRFGRAGSNYPTK

SEQ ID NO: 372271 - protein, 280 aa, unidentified
MEHHSEAFVALDTAKLRNAVAIADAGRNGEIRYLGEIDNTEAETRKLVAKLASKHARLTFCYEAGPTGYGLYRLIKSIGHDCIVVAPSLIPYKPGDRVKTNRRDAVNLVKLLRAGELTAVWVPDARHEAMRDLVRARDAAVKDYRIKRQNVSSLLLRLGRHYPGKKTWGRTHINWLTGLKLEHREQRIAFEEMLLAVRQVRERIERLEQAMREAVADWTLAPVIEAVQAMRGIDMVGAIAFLAELGDLSRFENPRQLIAYLGLTPSERSTGESVKRGGIT

SEQ ID NO: 372272 - protein, 436 aa, unidentified
MMDTAEGDGQVLGIGIDWAEEFHDVALGTPEKGVIEQFRIEHTPAGVGALIERALRLEPDPAEVRVVLETRHGLLVEALIDAGFTVVPVNPDLVARRRGPARKKDDAEDARICCLLALDRHAGLKALVPHGELGGELRAIARDDERAARDQRRLLNRLRADLQTTYPAAYPAALTLAGADLGAPTVLRLLERWPTQPELAQASRDDLISFARAGRHGWPDRFADRVTAALATSSLPTRDYLVRAKAAGIRLAAVQLLALHEARRGWEARMAELLLGGRRTGRNHTVQDPDPGKAFPGGAIYLSFPGLGDRLAARVAGEIGEHIDQFDSPNGLQCYAGQAPVTRRSGKSDFVVARRLAHNRYLGDAVHQWAFCSLRLSGWAREFYDQKTTAGKSHHAALRALGNRWLEILWHCLIKGALYDEALHVANRNRALGRAA

SEQ ID NO: 372273 - protein, 312 aa, unidentified
MIEQCFVGIDVSQDRLDVLLLPQTTGFSVANNEAGWNALIARLRDLPVAAIGLEPSGGYERGVIRALLTASLSVRRINPNRLRQFARARGALAKNDRLDARLIAAYVATMPTHVVRHDPAAARIAEIVTVRRQLCDEHVAVENQAAQLEDAMLRRLAKRRLARIETDIRLLDKRLAEMIAAEADLARRYACLTSMPGVGPVLAFTLIALLPELGRMSRKQIAALVGLAPYDFDSGKLRGHRSIYGGRMPVRNVLYMAALSACRYNPALKTFHNRLAAAGKKPKVILVAVMRKMITTLNAMLRDGAGWQPQAA

SEQ ID NO: 372274 - protein, 348 aa, unidentified
MTMVCGLDLHRRQITFDALEVESGQVWTGRVWQPDRERFRRWLRNDVIARAHGGPVSMAVEGCTGWRYVVEEVVAAGFEAHLAEPADTQAARGRKRRAKTDRSDCRLLRELLQGGRLPASWIAPTIVLEWRERARLYKPLVDQRSTWVQRIHAELYQHGVTLPETSIRWAKTRELLEDDGLEISPAGRQRVLTAYRMIDAITVESRPLKADLQRFGRRQPGCRALIEHQYGIGGLLAVVMWSELGDCQRFARSEQVVRHSGLDVTVDQSYRRRAGGFISRQGPQTLRWALYEAAKNASHHRSPDHDYYSDVKEHLNSKLATISMARKLARRCFHLLRAVDPDVVYATP

SEQ ID NO: 372275 - protein, 403 aa, unidentified
MNSVGIDISKGRSTIAVMRPFGEVVISPFEVRHTDSELSELARQLKSLNGETRVVMEATGNYHAPVAKLLHNAGLYVSVINAKLVHGYGNNDLRRVKTDRKDAVKLANYGLDRWLTLPRYVPEEDTRLLLKNCYRQYRQYSKVQTVLKNNLISLLDMVFPNVNRLFSSPIRGDGSEKWVDFVAEFWHCRCVSEKSQKAFTNKYQRWCRKHGYNFSEAKAHTIHAEACGHIDVIPKSETTKLLVEQAVAQLRATSAALAALKHEMQALASILPEYPVVMDMFGVGPTLGPQLIAEIGDVRRFYSKKALVAYAGLDAPPNDSGDVSGRHKSMSKIGASSLRRTLFLVMSVYLQTAPLDEPVCQFMDRKRAEGKPYCVYMMASANKFLRIYYATVKAYLEPLERTA

SEQ ID NO: 372276 - protein, 364 aa, unidentified
MDPRQSSRSNVGREPQRGRIIMQVVRIGLDLAKYVFEVHGVDGQGNVVIRKTLRRGLVSTFFANLPPCLVGMEASNGAHYWARLLTELGHKVRLISPQFVAPYVKTNKNDRNDAEAICEAVSRPTMRFVPPKSPEQLAIQALHRIRQRLVQSRTRLVNQIRGILAEHGIVIARDIWRLRRALAEITGHATDDLNTLVRVLILAAQAELMELDRRIASCDRRIRELYRTSELCQRLGEIEGIGPVTATALVAAVGDRSCFKNGRQFAAWLGLVPKQRSSGGRHRLFGISKRGDRYLRTLMIHGARAALGKAGGKQDLRSRWLASLRQRRHANIAAVALANKNARIVWAMLAGNVSYEPARSVQAA

SEQ ID NO: 372277 - protein, 368 aa, unidentified
MNNNTLEAARTAGAKELKNQKAAKAKRIVIGTDVHKNSYQAARKIDNGAIGAVAKFRSQEELLLYVEKQKEQAEEVVVVYEAGPLGYVLYRALKAREVRCYVCAPDSREQKRKRRKNNTIDTRTLTSNLFNYLHGNERALQLARVPTEEQEQARLQSRQHDQLVEERKRLGAKGNALLLSRGFGSWANWWRPKAFSRLSQLVPGWLLELLETWVDLLRKLDEKIRRAKVALAQRWSGPRPKGAGAPSLVQLQSEVLDWGRYSNPRKIGCLAGMVPSEWSTGDRQWQGSITKVGVPAIRRVITEMVWRIILFQPQYRPVQKWQEVLRGSTRGLKKKAVVAIGRQLMVDLWRLQTGRVSAQELNLVMIGG

SEQ ID NO: 372278 - protein, 362 aa, unidentified
MKTKHQRKQFRTIIGVDLGDKKHHVCVTDKDGNILSETTIPNRREHLVRLAKEHRGGLFAMEVGTHSPWVSRLIEENGCSCLVANARKLRAIYQNERKCDALDARMLAKLARVDPELLSPIKHGSEERQLDRLAITLRDSLVRQRVNIISTIRFSLKSLGVRLPGCSTPYFARLCRQELEDSPLLAVVETSLVALDGLNAQIKALDKQIAKTAAEQYPQTKRLEQITGVGPITSLSYVLAVGEPERFKDLRDVAAYLGLVPRRDQSGQSDKQLPISKAGNRDVRRLLVQSAQYILGHFGPDCDLRRHGLKLAARGGKAAKRKAIIAIARKLAVLMLVLWKTGKPYQPLRESTPETAAKKQAA

SEQ ID NO: 372279 - protein, 399 aa, unidentified
MLAVGIDISKSKSVAAILNQDGSMHTSPFEFHHTQPELDAFIKYILNSKQSATILMENTGHYHYPVLKAFQEAGLPVCMVNAYQIKKFGDMDLRKAKTDKKDAVRIARYALEKSYSLFPYTSMEQKYEDLRFLARQYNQRMLTLKTNKVFLLNLLDETMPGITNILPLTTRTPETSLSVLFINRFKSYDRIKKMGKSRFLDAFEKIARKSRNRQTKTYGLAIYEAALRNITTRGENEYTLAAQDQCLELVCESQKAADSIILKMQTLAETLPEYAVLRSMAGVGDRLGPLILAEIGDIRRFHSGKALNAYAGNDAPPYQSGTFESHNRHISKRGNAALRKYCFEVMQALKLTRPQDDPVYLFLLKKEQEGKPYNVAKMAGVNKFLRIYYARAMETLKQQ

SEQ ID NO: 372280 - protein, 455 aa, unidentified
MPSKTKKKKQAVLPVLNADAAGIDIGATEIFVAVPKDRDAEPVRSFQTFTEDLRTLCRWLQACHIRTVAMESTGVYWIPLLQMLEAAGMEVLLVNARYVKNVPGRKTDVADCQWIQYLHSVGLLKASFRPAQEVCAIRSVLRHRDNLVGLASQHVLHMQKALDQMNLQLHHVISDITGTTGLAIIDAVLAGERDAERLAALRDPRIRTAKETIAKALIGDYRPEHLFTLQQSVSLFRVYQSQIRACEAEIERLISRLMTKTDATSQPLPLAKDSVKKCKVMTPARAITLREEGYRVLGVDLTSIPGISVLTVQTILAELGPDLSKFRSAAAFSSWMGLCPNNEISGGKVLRAGTRRVKNRVAVALRMAAQSLQGSQSALGAFYRRMRTRLGAPKAITAAAHKLARIIYHLLATRQAYEDTVFSRLETQHARSVENRLRAQARVLGFDLVVAERVP

SEQ ID NO: 372281 - protein, 442 aa, unidentified
MEVIYERVAGLDVHKDTVVACLRTHLGRTAERECRSFGTTTDELLALRDWLAAAGCQLAAMEATGVYWMPIYKILADGDLTLLVANAAHIKGVSGRKTDMNDAMWIADLAACGLIKASFVPEEGVHEMRTLMRTRKQLVREQTSHAQRIQKTLTEANIRLDSVISDIMGLNGRRMIEAMIGGLRDPRKLAALADRRLKATPKQLYDALHGRLTDHHRFLLKLHLTQWDALDLSVQEIDRQVDARLTQMQASRPADDPELAVADEHVKDEEVTADKARFPELIDLLLTIPGVAKVSALTILSEIGPDMSRFPTAGHLVAWAGMCPGQNESAGKKRGSRLRKGAPWLKTMLVQCAWAATRAKTSYYRAQFYRLRARRGPQKAICAVAASILAAIYHMIKNGTPHHDLGVDYFERRAPETKAKRLTAQLKKLGYQVTLTPIPKAA

SEQ ID NO: 372282 - protein, 335 aa, unidentified
MLYLGLDVHGKWTTVAGFDPKTGEAVRIDRMPNDGESLREIQGLLYGVMESGTNSWAMYRKLLPYFETLAVAEPAKLWNRQTDRRDAMRMAEKLYRGEIKPLYIPDERTQDLRVLVRGKIRASRWVTRLANEIGSLLRSWGYVGERSLLSKSGKARIGQAELPTHSARVLVLWKEMLDKAQEIEDELQKAIEEEAAEDSDCEVLQSIPSVGAFTALLVRAEIGDIQRFAKPGNLVSYVGLSPRTFQSGEACHHGRLGNWGNRWLKYGLCMLGNRVAHSKKDNALHRLYWRVCLRGHRNSAKVAVARRSAEIIYHLLNKRERWEHFEEAKRAEAVA

SEQ ID NO: 372283 - protein, 382 aa, unidentified
MNRILKIGMDVHSTSYTLCAMEPVLGGEDRIFANIQVTSGYRNVIQFIDKLKEKLGSSDSYSIECGYEAGCLGYSLYHQLTKAGVKCTILAPTTMLTQQGKRVKTDKRDAVMIAQCLSYGGYHAVHVPADKDVSVKEYLRMRDDHKVALKKIKQQINAFCLRQGYFYAGNKWTIKHLNWLKKLVLSDLYRETLNEYLTSYEEQIAKIERFDKRIEELAEDSDYQENVKKLGCLLGIKIHTALSLIVETGDFKRFRKGNTYAAFLGLAPGESSSGEKINRTGITKAGNSHLRTLLIEAARGMCRGRIGYKSKVLRSRQDGNPTEVIAYADRGNTRMRSKYYRMIRHGKKDNVAVAAVARELACFIWGLMTNNITFKEEGTKAA

SEQ ID NO: 372284 - protein, 424 aa, unidentified
MKVTYQTCCGVDVHKSFLVATIVKTTGGIEPSYQKKRFSTFNNSILEFKQWLLDNHCHDVCMESTGKYWVPVFNLLEDEINVIIANPKWVKAVKGSKDDIKDSKWIGDLFRLGLVKGSYIPCKKVRILREYTRYRYKLVSCRSSEKNRYQNALTVCNVALDSVVSDIFGKSSTSIIDYLLEQSGTSINHEEIASKLLRSLKSKEDAVIESVEGYQMTDAQKYRMRLVRAHMDYITAEINDVDKMIENMISSNPDFENAVQFLCTIPGVKRDSAITIISETGTDMSQFSSSKRLCCWAGLTPGSNESAGKKKSVRITRAGVYLKPALVQCAHAAVKSDKSPYYKKKYESLVKRRGKKRAIIAIARMILTAIYQMLSTGEQWNPSDLYKIDMPVALVEKQKAKAIKQAKKLLQREGLLPPDEPLAS

SEQ ID NO: 372285 - protein, 346 aa, unidentified
MAHFVGLDVSVKETSVCVVDDTGKVLCEHKVPTEPDDIAVLLTSVGGDYLRVGIEAGPLSQWLVNGLSEAGLPVICVETRHMKALLQAQQVNKSDRNDARGIAQMMRVGLFKPVHVKTLAAQEQRMLLTSRKLVQRKLIDIESDMRGTLRSFGLKVGVVSTIGYEARIRHLVEGFPRLAAIVEPLLTVRRVMRQQLATLHKMLLDTVRHDPVCKRLMTAPGVGPVVALTYRASIDQPQRFLHSRAVGAHVGLTPRRYQSGEIDYDGGISKSGDAMLRTMLYEAAQVLLTQSRHWSWLKAWGMQVAQRRGMRRAIVAVARRLAVVLHRMWTDGTDFRWGSEPGTAVA

SEQ ID NO: 372286 - protein, 360 aa, unidentified
MTGTMTWAAMDVHARSTYAASLDVVTGELSRQRFDTGAVEPVVGWLAGLPGPVRACYEAGPTGFGLYRAAGAAGIDCQVIAPSKTPRPSGDRNKSDRRDTDLLLRQLMAGGLTAVVVPSATCEAARDLARAREQVRVDLMRCRHRLSKLLLRHGRVWDRSAWTKVHREWLSAQTFEQVNTELAFIDNLAACDGLTARKDALDERLSWVVSDPEFWPLVRRLRAFRGIDTLSALIIVLEVCDFARFSRAVQLGSWLGLVPSREQSGESDHHGSITKTGSKYARRILVEAAWHYARPPRIGRTLYERQEGLPDHVLQITRRAQSRLYRIHRRMRERKKPGNVITVACARELACFLWAAATAP

SEQ ID NO: 372287 - protein, 366 aa, unidentified
MNYRVYCGVDFHARQQTICCLKTETGVITTHELKHGDKAALRAFYSELGDATLVALEASGYSPWFELLLEELGHEVWLGDASEIRRRARRRQKNDRRDAELILDLLVHDEFPRIHRPTPSSREILRMLRYRHKLVRMRTSIKNSLQALAIQSGLSRRAQLFTGSGLQQLQTVSMSPVMQQQREQWLTLMEPLNLRIDEAVGWLKQQAKGDARISRLRTHPGIGLLTALGLVHTLEPISRFPNQRKLTAYVGFDPREHSSAEKKRYLGISKAGSRMLRFLMVQAAQTTVKYDEDLQRFYRRLYQRHGKPKAKVAVARKLLVRSYILLRDQIDYAEFQRRAVAARLARSLHRPNMPGVLIGQPASPEQ

SEQ ID NO: 372288 - protein, 365 aa, unidentified
MLYLGIDQHKRQLTVNVRGEDGKVVLKRQVSTQWEKVRAFFADFAEKAGPERGFWAIVEVCGMNGWLLEMLAEYGCGEIVVTQPTSRSKQKTDRRDASQLSHGLWVHREQLAGGGHPSGLRRVEPATAQQAEDRQLTTLRAMLTKKRTAVLNGIHKILRKHNREQECPTKVFQTKKVRRWLAEMELPRMDRLELDLLLPQWELFDQQLEVVEAKIAERAEADQQAKLLESMPGMGHYSAVAIASRIGDIERFRRPGSLANYFGLTPGCRNSGEATNRLGSITKRGSKLVRYLLGQAVVKVLRFDAGMRDWYKRIKRRRGSKIARVAVMRRMVTILWHMLKKKQRYHYELSLKKHQEFVAFEGSTG

SEQ ID NO: 372289 - protein, 411 aa, unidentified
MDVVHARCCGLDVHKKSVVACVLITQPNSSVERHVRTFKTVTADLLKLADWLSTLQVTQVAMESTGIYWRPVFNVLEDDERTLLLVNPQHMRAVPGKKTDVKDAEWLADLLRHGLLRASFIPPAPIRAIRELARYRKTLVQERADETNRLHKTLEGANLKLAGVATDVLGLSGRAMLAALLQGERDPEVLADLAQGRLRAKLPQLREALDGRVQPQHLVLIDHILAHIDFLGQAIAEVQAAIESCLPPYEDALQLLQTIPGVKPIAAAAILAEIGTDMSRFPSAGHLASWAGLCPSNKESAGKRMKAPMNHGNVWLRAMMGEVAWASIRTRATYFHAQFRRLSRRRGPKKAAVAVAHSLLIVIYHVLRTGKPYTELGVDYFNTLDSARLERHHVLRLEQLGYKVSLTPVAA

SEQ ID NO: 372290 - protein, 410 aa, unidentified
MLKIVYPICCGIDVHKKFVVACIASTGDRGVTTYRSSRFSTFTSGLRKLSGWLYSNTCTDVCMESTGKYWIPVYNILEDTCQITLAHPKYVRAIRGKKTDKKDARWIADLFKHDLVAASFMPPLRIRQLRDLMRYRFKLTGFGSSEKNRMQNCLTVSNIQLSNVVSDTFGKSSMKIIDYLLENPYDKDFDFVPLLHGSMTGKADDIRLAIDGMITVEQRQKMNIILNHFSGVQKCKADLESLILSLSEPYTRQCSLVSTVPGIKNPFSVIAIISEIGVDMSVFTTAKHLCSWAGLTPQNDESAGKKFSVRISRAGVYIKPLLVQCANAVVRSDKHPEIRGRYLSIRKRRGHKRAIIAIARMLLTAIYHILLKDEPYNPELYKKADILPKTRNITVDQAILLAQRYGYSVA

SEQ ID NO: 372291 - protein, 344 aa, unidentified
MDHFAGLDVSVKETSVCIVDDAGKIVREVKVVSEPDALLSVLSNPAYHFKRIGLEAGPLSQWLFSALAEAGLPVICVETRHMQAVLKAQINKTDRNDARGIAQMMRVGLYRPVHVKTLRSQKLRMLLTHRKLLQSKAIAIENDLRGTLRNFGLKVGIVGTVKFEARIKELVENLPDLAALVEPLLIVRRVLREQIIILHRRLLAIVRDDEVCRRLMTTPGVGPVVALTYRATVDVPARFRKSKAVGAVFGLTCSKYQSGEIDRNGRISRCGDEMMRVMLYEAAQSMLRSKKWSWLKAWAMQIARRRGMKKAIVALARRLAVIMHRMWVDGTEFRWTREQAAAAA

SEQ ID NO: 372292 - protein, 377 aa, unidentified
MKNVRFVGLDVHAETIAVAVAEADGEVRSLGLIPNRPESVGRMIRKLGKPEQLRVCYEAGPTGYVLYWQLTQLGVKCEVVAPTLVPVKAGDRVKTDRRDAAKLARSYRAGDLTAVWVPDAAHEALRDLVRARWAAKRDQLRARHRLSKFLLRHGRRTPEGVNAWTDKHLQWIKSQVHFAQRAQEITLDDYLHEVDHVAERIARLERSIDTAIESLPVKMRAVIEALQSLRGIAQLSAVSIMAEVGEVSRFEHPRQLMGYSGAVSREHSSGERIRRGAISKAGNAHLRRIVVEAAWAYRHRPAVGKTLAARQRHSSAAVTELAWKAQQRLHQRYVRLMGRGKSKQQTITAVGRELLGFVWAIGVHVEREAKVPLRQAA

SEQ ID NO: 372293 - protein, 336 aa, unidentified
MSELATVGIDLAKSVFQIHGVDENGLFLVRRQLRRSQLLAFFQNRPRCLVGMEACAGAHNWGRKLQEMGHDVRLMPPSYVKPYVKRGKTDAADAAAICEAVTRPSMRFVAIKSEACSSVMVLHRTRDFLVRQRTQIGNAIRAHMTEFGIITAKGAQNVERLKEQVDQLPQAARMPLILLFDQLVETNKRIERLTDEIEESYSQSETSQRLATIPGVGVLSATIIAATTPDVDNFDCARDYAAWLGLTPKPHSTGGKQRVGAISKMGNRYIRRLLYLGAMAQIMLRRRLKREPGSDWLSGMLMRKKTKFVAIALAHRMARMIFAVLRDGSRYEPQVA

SEQ ID NO: 372294 - protein, 393 aa, unidentified
MEAIFARAAGLDIHKKTVEATVRILEGNHVQQQTRRWGAMTREVLAMADWLEAQGVTHVAMESTGVFWKPIYNIVESRFTVILVNARHLKQVPGRKSDVRDSQWIAQLLQYGLLRGSFIPPRPQRDLRDLTRHRTQLVAEQTRVVNRIHKILEDANIKLGSVASDIMGVSGRAMIHALMEGEQNAAKLANMAQGQLRGKIPELERALEGWVTEHHRFVKLERRIEEVTRPLAPRVKQMDPVPGVDRRVAEVVLAEVGADVSSFPTHAHISSWAGMSPGNEESAGKRRTGRTTKGNRWLRQALVQAAWAASHTKDTYLAAQYRRLVGRRGKKRALVAVGHSILVIIYHLLKDGTCYSDLGGDFFDQLRPERLTHYYVKRLERLGHRVTLEPCTV

SEQ ID NO: 372295 - protein, 316 aa, unidentified
MQADLGLDIAKAKFDAALLLGEKFKTKVFSNDAAGWAALSAWLAAQSVTTLRVCLEATGTYGLAVATYLHDQGHQVSIVNPAQIKAFAATLLSRNKTDRADARLIARFSALHQPAPWQPPPREIRLLQALVRRLEALQQMLQQEQNRLDSADPAVATTIVRHLEFLRADIAAVRQQIRDHIDQHPDLRRKQALLDSIPGIGQATIAQLLAFISTRSFTSARQVAAFVGLSPQLRQSGSSVHGKTRISKTGRANLRKALYMPALVAWRHNPVISAFCQRLADAGKPKMVIAVAAMRKLLHIAYGVLKSGQPFNPNLT

SEQ ID NO: 372296 - protein, 335 aa, unidentified
MQIYGIDLSMEKFDVNFIDQNGNEKNKTVKNGINSISNFLKEVPAGSILCAENTGVYGDLLLFLCNQMGIDIAFIPGYNIKHSLGLVKGKTDKVDAMRIREYGERFYDKIVPTQYEDETMRELQELYTLRAQLIRSRKALQASETGRKHQPMQSICAHTSAQSVIDNLNSEIEHVENAIKKLILADQQLKDNYELATSIKGIGPVIATDLLIKTGNFKTIDTARKAASYAGVCPFPNSSGKMVKKARVSPFADKKLKSLLYMGAKSAVKYNKEYRLYYQKKKLEGKPHFLIMNNISNKMLRTVYSVVKNEIPYDENYVCLDPRERKINSSKIKVA

SEQ ID NO: 372297 - protein, 344 aa, unidentified
MEITTVGLDLAKSAFHVVCFDGHGHEVKKRMLKRAGVRTFFAQMAPCTIGLEACAGSHYWARELTALGHRVTLLPAQHVKAYLQGQKNDYNDARAIVAALGRPGRRTVAVKTQAQQDVQALHRLRSQCVKERTAQANALRGLLAEYGVVVGRGLAVLRRRLPEVLEDAENGLSAGFRVALRRGQVRLAQADADVAFFTAELARQAADDEAVRLLQTAPGFGPLNASAFASALGNGAAYRRGRDVGASLGLVPAQASSGGKPRLLGISKCGDRYLRTLLVHGARAVVAQAQRKDDDLSRWLRRLCAERGRNKAIVAMANKMARIGWAILRSRNPYRAEVGDPASV

SEQ ID NO: 372298 - protein, 466 aa, unidentified
MSSTVKKVPQKMSIVSSLPSEFERINISAAGIDIGAQKHYVAVPKGRDPKGRDVRHFDTFTADLYALVDWLKQCHIDTVAMESTGIYWIPLFEILEQNGFEVRLVNPRSIKHAPGRKSDVVDCQWIQQLHAYGLLTSAFRPDEQIHVLRAYHRQRTMLVNHAATHIQHMQKALEQMNLKLTNVISDITGTTGMKIIRSILAGERNPQKLAKHRHPRCKKSDKEIAKSLHGNWRDEHLFALQQALALYDFYQTQIEACDKQIQAQLCRFEDHSDGGKPPVSTGKSKGSGKRLSFDATEHLYRMTGVDLTQIVGLNTPTVLTIIAEVGLDMSRWPTSKHFASWLGLCPGSKISGGKNFSSKSKPSANRAAHAFRMAAYSLHRSQTAIGAFLRRKKAQLGAPKAITATAHKIARIFYEMLKTRTEYKDLGVDYYQNRYKERMLRNLKRKAKAFGLELVNSNQVQLVMVN

SEQ ID NO: 372299 - protein, 457 aa, unidentified
MSSPTILPTVPPHAAGLAIGKIEIYAAVAPTADPQPIRVFGTFTPDLHALADWLVACGVTSVALESTGVYWIPVFELLAARGLQVCLVNASHIQRVPGRKSDYQDCEWLRQLHSLGLLAASFRPDAEIVTRRSYLRHRAELIQHRAPHILHMQKALRQMNLQLDSVLTDITGVTGQAILRAIVAGERDPVKLAQLRHPNCHSPAAMIAKALTGPWCEEHLLVLKQALALFDFYTTQLAECDAAVARCFSAIRPRFTPPPTAADTAETPPVAAPTAPAKKTSHSHSKNAPAGNVRADILRITSVDLCAVDGISASIAQTILSEIGTDMTRWPTVKHFCSWLRLAPRNDISGGKVLKSRTLPHHQRAAQAFRLAAQAVSRADCATGAYYRRMRARLGPQQALVATAHKIAGIVYFMLKEHRPYADRGAEAYNTRFREHEVKLLERKAAKLGFTVTPKTV

SEQ ID NO: 372300 - protein, 370 aa, unidentified
MHGPYTQIVAIDLGKFNSVVCLFDPANGTHRFQSLATTPTSIHDLLASLIAAPADAASVLVVFETCEVCGWVHDIATALGFPVAVANPCHEAWRWTKVKRKTDKDDALKLARMAHLGELPTVYMPPPAMRQRRRLVHHRHALVHRRTAVKNQVRSIFAQQGLPLPARGKAWTKAGVAQLTAESRALGDCGGLDLWRGRLSVELALLASLDKQLAIVESKLEAIGLADDRVTLLTTVPGVGRCLAEAVVCHLDDVSRFPSAAAVAGYAGLVPKQMESGQMKRSGRITRHGPSLLRGMLVEVAWMVYRHNAWARDFVTRVSRGVKGRKKIAIVALARKLLVILWSMLKHKQSWREPVGAETTTPAATALAPA

SEQ ID NO: 372301 - protein, 482 aa, unidentified
MQPKPQEKTTKDTCRTEPGHWHEMNRKQRRETMRKIQSDDLSLEVVHPDAAGIDIGNESHYVAVPPTRDSQPVRRFGCTTAELKAMAQWLKQCGIRTVAMQSTGVYWIAVYDILEAADLEVYLVNARETKNLPGRKSDVQESQWLMKLHTYGLLRNSFRPSQQIRMMRTYWRQRNDLVQAAGRHILRMQKALTQMNIQLANVLSDVSGMTGQAIINAILAGERDPHKLAEFRDPRVKASKHEIALSLEGNWQEDLLFVLKQEQDGYEFCQKQMLECDRQVEQYLQQREDRSKGTPLPEEKRKGRLKKKKGNAPQFDLRGELFRMSGVDLTQIDSIDVMTATTILSEVGWDMGKWETEDHFVSWLRLCPDNRISGDKIIGKGRLPTKNRVSISLKMAASTLRRSNTYLGAQFRRFRTKLGSPIAIKAMAAKLARLVYRMLRHGMKYMDQGAKFYETQHRNLQIKQLKWKAAKLGFQVVQAPAA

SEQ ID NO: 372302 - protein, 340 aa, unidentified
MSLYGGIDLHSTNSVVVLLNDRDEVIYQKRLPNDLPTILEQLAPHHAEIQGLVVESTYNWYWLVDGLMDADYRVHLANPAAIQQYSGLKYSDDHSDARWLGHLLRLGVLPEGYIYPKADRAVRDLLRKRAHFVRQHTSNVLSVQNIMVRNTGSRCSVKRLHELTKKELNGLLPEAEQALAVTSSLVVLDCLGQQIKTLEKAVTQCLKHTPSYEQLLTVDGIGTILAQTIALETGNIGRFPSVGNYASYCRCVDSTKISNGKRKGKGNVKNGNPYLAWAYMEAAQFAIRFNPRAQRFYQRKLAQSNNNTILARKSVAHKLSRACYYIMRDLVPFEAMKAFG

SEQ ID NO: 372303 - protein, 394 aa, unidentified
MNFIGVDLHKKSITICVMDEKRKILARKTLPCTQTNEIVEFFRQFRPFKVVVEATASYVWFVELVEPLAEKIVLANPKKLRVIAESTKKTDNLDAQVLTEFLVLDMIPESYQATPRLRQHRALVRHRQYLQGRITSVRSKIRHILSNYNADRKDLFSSNCGLAYLKEVRLNDVDRFVIKQLWAEWQDHLAQRLAVSKKLKAFVAKAPQREAEAREILKTAPQVGSVTAEVILSELGDISRFRNAKTVCAYAGLVPVVRQSGERKSKDMKITKEGSGLLRWALVEAAWRLVGKSPKWAALFSRLRHRSGKKRAIVAVARKLLCVLYAMLRTSTPYKILTTQTTAAQSPKRRAEQDRTERNPCESEPPVERRPVDVTTMRTTPQRTPTTAPSLDVA

SEQ ID NO: 372304 - protein, 351 aa, unidentified
MNYIGVDYHKKYSYIVVKNEDGYIEGRGMVNNTREEVQRFLEPYRPGMAVVEATRNWGLIYDWLEEVLHDVALAHPLKVKAIAEARIKTDKISADILADLLRADLLPRAYAPSKQTRELKNVLRQRMFFVRVQTMVKNRIYDILDRHPEVLSQAPETSDLFGAAGMQWLSQTALPGEDNRLLTSELELLKFLKEELSHSNGTVKKLAKKDRRARLLQSIPGIGPFFSVLILYEIDDISRFRDEKKLCAYAGLIPSTHASGGKVFHGKITKTGSKWLRWAAIEAAQTAVRSDSEFHAYYQRIRIRKGANAAKVATARRLLTIVYRLLRQGRFYERRTTNTRKIVTPAALVTD

SEQ ID NO: 372305 - protein, 350 aa, unidentified
MLIIGADYHPAFQQIAFVDTETGELQERRLEHPEAAEKFYRDLAAQGKKVRVGMEASGQARWFERLLAELNFELWIGDAAEIHRKRERKQKTDRQDAQHILRLLLKDDFPQIWVPSWENRDLRQLLWHRHRMVQARTRIMNQLQAVALNEGVRCKKRLWREKGREQLESFRLAPWASRRRHDLLEWLDRLNPTIGALSQAIEQEVEKCPEAQRLRTHPGVGPLTALAFVLIIGKPDRFQCGKQIASYLGLVPLEDSSGNRRRLGHITKQGNSLLRFLLVEAAQVTARSLPEWRSKYVHLTMRRGRKIAKVALARKLAIRLYWMMRKGWDYEQLKKFGSHAGQPGNRDGVK

SEQ ID NO: 372306 - protein, 347 aa, unidentified
MLHVGLDLSRHRLDVHALGDDGETVKVVASPPDAAGLRSLAQQPWARGQRVRATIESMNGARFVHDQLELAGWDVAIADAQKVKGFAPLACKTDRIDAWVLAELTRRELVPEIWLPTPEVRAERERARWRLHLVRHRVALKNRIHSTLLAFGKPCVVSDLFGPGGRKLLDQLEFPDPWASNLTAALTLIDDLSDQISECERDLRRLGADHPYVPTLMTTPGIAWVLGYTIASEIGDIERFASPKKLVAYTGLCPRVYQSGGSDHRGPLAKNGPKYLRWAYIEAATHAARSPVYKDRYKATKARLGRQRGSKVARVDIARRVAEANWHMLTKGEPFAPAGPAHSALVA

SEQ ID NO: 372307 - protein, 401 aa, unidentified
MKQLYGGIDIGSESHHIIIIDENETIHYDAKVPHRLNAIAKVIEQFRELGKNNGGTVTFAIEGKNGYGAPFDRLLIEAGFCLYNVDNLKLRRFRDVFGAEWRNDKRDASMLAKMLKLRDHVDSENEKAFIKVDPVPETHEKLKILSRHQQTLIGEKIRIQNRLKKRLLEICPGILEIGDTDSKRLLRLLHKYPDFSKYKKLTVGSLLKIKMIGKNQAPFIWEKVHNLHYVEDIADVYKAIIASYVRRLLDLHEEITILDTHLEKLGEQSTSVTQLRTIPGVATKLSSRLIGELGNIDRFAGERQLAVYCGIACIDDESGKRKKTRVVFKANKICKATMIEIAGCTIRYVPESRAYYARKRSEGKTHNHALRCLARQLIKVIFLMLKENRSYIVRDAVKKAA

SEQ ID NO: 372308 - protein, 342 aa, unidentified
MNEYDGKQFVGIDLHRQRSVIVRQTEAGEQLSAVRIVNDPVALGLQLEDAGADPEVVLEATYGWYWAVDVLQAQGAQVHLAHPLGVKGFRYRRVKNDVRDAGDLADLLRMGRLPEAWIAPPATRELRELVRYRAKLVAIRSGLKAQVHAVLAKAGVLIAVSDLFGVGGRQRLAKVPLATAYAQRVRSLLELIDILDGHEARFAALIAKRLDADRGYQAIQQVPGIGPTLAAVFVAEIGDAGRFTDPAHLCAWAGLTPRHRESDTVVRRGHITKQGSKLVRWAAIEAVQRHPTTTKIAADKDRIEARRGKNIAKVAAARKLLTLVYYGLRDGHIRALDRDRAA

SEQ ID NO: 372309 - protein, 368 aa, unidentified
MIEYKLKAAPTAISKEQKGQKGSKAKRILIGVDAHLESYQAASKIDNGAVGVAQSFRSKEALLLRLEKQLQQAEEVVVVYEAGPLGYSLYRDLSARGIQCLVCAPKSDEQKRKRRKNNSIDARSLVSHLFNYLNGNEQALQLVRVPTPAQEQARLASRQHDALVQERKRLGAMGNSLLLSQGYGSWKNWWRRKSFERLSQVVSSWVVELLNTWVDLLRALDEKVQHAKASLAKQCQGPRPKGVGAPSLVQLGAEVLDWSLYNSGRKIGCLAGMVPSEWSTGNGQRLGSITKVGVPAIRRIITEMVWRMILFQPQYKAVQKWRAVLEGSNRGLKKKAVVAIGRQLMVDLWRLQTGRISAQELNLIMVEG

SEQ ID NO: 372310 - protein, 370 aa, unidentified
MKKYSEAFVGFDTAKRKHAVAIADAGRDGEIRYFGEIDSSPATVEKVIGKLAKRYPTLHVCYEAGPTGYGLYRQVKALGHDCAVVAPSLIPRKPGERVKTNRRDAVTLARLFRAGELTSVWVPDAIHEAVRDLGRAREAAVADLRKKRQQLLSFLLRHGRIFSGRKHWSLAHLRWLAVQKFEHPAQQIVFQDAINAIEDAVARLRRLDQQLLAIVPSWSMAPVVAAYQAMRGVSFIVAVTFVAEIGDVRRFDNPRQLMAFLGLVPSERSTGETVRRAGLTLAGNRRARRVLVEGAWTYRYPARVSETLRSRLEGLPKTVRDIAWKAQIRLCARYRRLSAAGKKTPVVIAAIAREMAAFLWAIGRQIEPLT

SEQ ID NO: 372311 - protein, 316 aa, unidentified
MAASEVFVGIDVSLAELVVAVRPSGETWTCANDEAGIADLLQRLRPLHPTLIVLEATGGYERAVVGALTTVHLPVVVANPRQVRDFARATGQLAKTDTVDAAILALFAERIRPAPRTLPDAATQALAALVARRRQLLDMLTAERNRLSHAVPVVAKDLRRHIRWLERRLEDVNGDLDKQIQASPVWRAKDDLLQSAPGVGPVVSRTLLGAVPELGHLGHKALAALIGVAPLARDSGTWRGHRAIAGGRAAVRAALYMAAVVGVQHNPILRAMYRRLVAAGKPKKVALVACMHKLLTILNAMVRSNTAWRQVVAQTD

SEQ ID NO: 372312 - protein, 319 aa, unidentified
MEGSFTSFVGIDVSKASLDVYLLPQELQQRVANDKPGIQELLGTLPAAGCCLIVVEATGGYHRRLVADLANAGHQIAVVNPRQARDFAHGLGIVAKTDAIDARSLAHFAKHVRPRPVAPVSEKQAELQELVTRRRQLIDLRTAELNRKETVSSKNVRKNVQQLVDLLRKQIEQIEEEILHLIEEDDDWTEKAKLLSTTPGVGQISIVTILGHVPELGQLNRQKISALVGVAPFNRDSGRFQGKRSIWGGRAAVRSVLYMAAITARTHNPVIREFAKRLEAAGKPFKVVITACMRKLLVILNAMIKNRTPWSPKKCLANA

SEQ ID NO: 372313 - protein, 309 aa, unidentified
MDIVVGIDVSKDRLDVAVAPSGLTFQVPNTQGGIDDLVSRLQSIGADVVALEATGGFETAAVAGLSATGLAVIVVNPAQVRAYANALGRRAKTDAIDAAVIAAYVLATRPELRSLKDAETQVLSALVARRRQIVQMIVAEENRERMALAKEAQKSIKRLLSALRRELESLDRDLDDQIRKSPVWRVRETLLTSVPGVGPATARTLLAEMPELGSLDRRQIASLAGLAPWTRQSGTWKGKSFIGGGRGKVRAALFMAALVASRYNPVLKAFRDRLVAAGKPRIVAVVATMRKLLTILNAIIRDEKPWQNA

SEQ ID NO: 372314 - protein, 342 aa, unidentified
MQITTIGLDIAKNVFQVHGIDAKEKVVARKQLRRSQVITFFKALPPCLIGMEACATAHYWARELTKLGHEVRLMPAKDVKAYVKRNKNDAADAEAICEAVRRPTMRFVRIKSAEQQGQLMQHRTRDVLIRQRTQIINALRAHLAELGVVAAQGNAGVNELRAIVTDEQDTRLPIDARASVIVLAAQLEALESVIGAIEKRIKMQHRSSEASQRVEAIPGIGVIGATAIVATVADPTVFRSGRDFAAWIGLVPRQDSTGGKQKLGPISKQGDRYLRRILVVGAIAVLRRAQENPGKYPWLTQLLARRPFKVVAVALANKMARMAWALLAHGGTYRAPELAETA

SEQ ID NO: 372315 - protein, 417 aa, unidentified
MSMILNVGIDISLRKGAVSFLNQEGKHLGKVFEIPNSPSGFDQLNEKISQAVNQYHFQQILLGLEATSNYGFHLMDYFTRTTLPCEIKVYQINAKYIKRFKKAFPEREKTDLVDAQFIAEYLRFGKLPVDYKPEALHLPLKRLVRYRYHLVKSIEREKKVFIANLFLLFPGWVQERPIKTLTHTSMVVLNDLSLDDIVNMPLEEMAAFVAKAGNNRSPDPGAIAEKIKQAAKESYRIRPELANSCQFILASITKTIAALKKALAELDRAIADESKGFINPLFSIKGVGPVYATGIVASIGDIKRFSSDDQLARFAGLVWKRNQTGETECEEKHLVKECDKYLRYYLVEAANSLRTHNEEYQAYYLKKYHEVSTHQHKRALVLTARKLVRLVFALLAKNQLYDPQRRFQSPVASCEKV

SEQ ID NO: 372316 - protein, 400 aa, unidentified
MLHHERGIVAERSFAHAGKAIVEFAQWLSGLTDDPGQVAIAIEIPRGAVVETLVERGFHVYAINPKQLDRFRDRYSVGGAKDDRRDAFVLADSLRTDQPCFRRVELDDPQVIQLRELSRVDEDLQREGNQLANRLRDQLHRFYVQALQLCPAADEPWLWTLLELAPSSSVAQRLRPKRVERLLRAHRIRRLKADDVVSALRVPALQVAPGVVEAATEHIALLLPRLRLVHSQRQRCGARIEALLDELRAAGEEDDKPGEHSDVAILRSLPGVGRIVAATIIAEAGAALTERNYDALRAHAGIAPITKQSGKHRTVLMRYACNGRLRHALYHCARVAVMGDLPSKTYYTAQRQRGHTHGRALRAVADRLLRILVAMLTTRTLFDCTKARPPQLSSPSEKVA

SEQ ID NO: 372317 - protein, 347 aa, unidentified
MLADEVDYVIGVDTHRDQHTLAVVNAPAGAVVAETVVRATARGYADALRFAERHACGVRAWGVEGAGHYGAGLTRYLGGRGETVLEVGRHARGERRLRGKDDPLDAIRAARTGLAAETLTLPRSGERQEALRVLLLARRSAVDVRRVALVQLRSVIVTAPEQLRDELRRLSVTQLIRRCSRFRRSHSRTPNELAIVLALRSLARRIDAAEADELEREIIGHVRALAPQLLSESGVGPIVAAQLIVSWSHRDRVRSEAAFARLAGVAPLPASSGQTIRHRLSRGGDRQLNRALHTVVLHRRQHDAATRSYIARRVAEGKTTREAIRVLKRYLARHLYRVMQNATPLTT

SEQ ID NO: 372318 - protein, 366 aa, unidentified
MFSVSQLRGPIHLGMDVAKDAIAVGVLGWGEEIPVVDRIFHDEASVRRLVARLGDPTVLRACYEAGPTGYELYRLLVSLGVRCDVVAPALIPRRAGDRVKTDRRDAQRLARLHRAGELTAIRVPSPAEEAVRDLCRARADLVADRRRVRQRLKAFLLRHGRVYRGGRAWTQQHQRWLAAQSFDDSALRLTYAHYRSVLEARDGELAAIEADLMGWCDREPLSDTVHRLAAYCGIGDLSGLVLAAEIIDWRRFATAPLFMGFTGLVPSEYSTGEATRRGHVTKAGNRSVRTTLVEAAHAYRHRPAVGATLKTRQRRVEAVTVARSWTAQQRLCGRYRRMSAQHKPTGVIVTAIARELAGFCWAEMTS

SEQ ID NO: 372319 - protein, 350 aa, unidentified
MTTLPLRITAGVDTHLDVHVAAALDETGSLLGVESFATTTAGYRRLIAWLRGFGQLELVGIEGTGSYGAGLTRVLLGESVRVVEIDRPNRQRRRRRGKSDPQDAITAARAAQSGDACGEAKTRDGNVEAMRVLRVARFSARKARTQALNQMRSLISTAPESIRDELRHLKAGPMLDSASAYRPGTKQDLVSLTKFSLRLLARRAIALEAEVAGLDALLSPLVAETAPDLLAVMGLGTDTASALLVAAGDNPERLRSEATFAHLCGVAPLDASSGKNERHRLNRGGDRQANSALWRIVITRMVCDARTRDYIERRMKEGLTKKEAFRCLKRFIAREVYNHLPRQQLALDSP

SEQ ID NO: 372320 - protein, 344 aa, unidentified
MEYFVGLDVSLRSCALCILDGKGAVMFERELPCEVGDIADCLASFPHPIERVGFEAGTMSQHLFFGLTDAGFDVVCMEARQVSAALSAMRNKTDKNDARGIAQVLRTGWFSPVHMKSREAHGIRALLSTRKALLKKTMDLANEVRGLLNIFGIRLPKTVKHGSFDGVVRPLIEMDDILAHALVPLLDARVVLYQHYLELDRRVKRAASHDKVCMRLMTVPGVGPIAALTFKGAIDDPTRFKRSRTVGAHFGLTPRRYQSGEHDNPGRISKAGDRDARAALYAAANALLMRTMAGSQIKSWGMRLLRTKGRRRAVVAVARKLAVLLHRMWIDGTEFRQDQVGGTA

SEQ ID NO: 372321 - protein, 320 aa, unidentified
MQRSPKSIVVGIDVSKAMLDVAASVPFKMKQIANNSAGIAKLTALLKDLSPKIIVLEATGGYQQAVVDAFHVAKLPVSVANPRKVRAFAVAAGVLSKTDKIDARTLVQFGSAMEPEPTLPVDPASREVAEIQTRRRQLIENRTAEKNRVKTAPTHLRDGINRHIAWLDEEIDQIEQRIKDLIKVDSFLSAKFQIVTSVPGIGPATASALLGHFPELGRIASKQAASLAGLAPFADDSGRRTGKRFIRHGRANVRSAMYMATLSAIRFAAPFCAFYQRLIGMGKPKKLAIVACMRKLITTLNSLVRNRQVWSPPIAGATMA

SEQ ID NO: 372322 - protein, 409 aa, unidentified
MDVLYRCCCGMDVHKDTVAACVLIWESGRARKEQRVFGTTTQQLLELSDWLHGHGVTHVAMESTGVYWKPIWNILEGQFDITLVNPQHFKSVPGRKTDLKDGEWIGDLLQHGLLRKSFVPDKPTRELRDLTRSRAMLAREKVRLSCRIQKVLEDANIKLASVASDVLGSSGRAMLSAIVKGESDPSILAELAQKRLRAKIPQLQTALTGRITDHHRFLLKQWLEMLLVTEGKIAEFDRQIEETGAPFAEAVATWITIPGIDRVAAWCLVAEIGTNMDQFGSAQHLSSWADICPGNNESAGKKKSGKTRRGSVWLRRVLCEAAWAASHCKRSYFQAQFHRLAGKRGKKRALLAVAHSVLVVVYVLRKRGCVYQDLGRDYFEHINQEQLTRYHVKKLQRLGYSVTVAPLPT

SEQ ID NO: 372323 - protein, 390 aa, unidentified
MISCLRFSHCLLFSYEFEQSIKGCKFTYNPAFETRKNCEGTPLHYSLNNKKVMKVIKQNVGIDVSKKELVICMIYLFEDLNIKIKGTRKFPNTLSGFGSLLGWVALKKDSSLDVHFTLEPTGVYHENLAYYLNENRQVVHIVLGLKAKKYAESLDTNSKTDKLDSKALARMGSERQLDVWRPSSPLFLKLKVLTRERSALIKVRVMFQNQLEGMGHSAYPNKKSMNRLKSLIKAINDQTEKIEKDIEKVSEGNIELKAKVLKVMTIPGVAFITAITIIAETDGFALIKSIKQIVAYAGLDVRIRESGKWKGKAKISKAGNVHIRKALYMPSLSSITHALTYKLFYERLRDRKGIKMIALIAVQRKILGLIYTLWKNDSVYIENHQNKNAA

SEQ ID NO: 372324 - protein, 351 aa, unidentified
MILIGVDYHPSFQTIAFFVEETGEYDERELDHSEGEAERFYRDLQQRGIHVRVGMEATGFSCWFERLLAELGFELWIGDPAEIKAKRVRKQKYDRKDARLLLRLMRENNFPKIWVPSPENRDVRQLLWHRHRMVQARTRIMNQLQALAMNEGKRRKSKLWSTQGRAELEKLALAPWASWRRKELLELLDRLTPSIEELTAAAEREARKRPEVLRLMTHPGVGPLTALAYVLIIGTPERFQCGKQIGTYVGMIPTEDSSAGKQRLGHISKQGNSLLRFLLVEAAQAAARVNPHWRRRYVHLAMRRHKSIAKVAMGRRLGIRLYWMWRNGCEYSPSFEFGSYVGKLEIVHGVK

SEQ ID NO: 372325 - protein, 356 aa, unidentified
MNKVTANFENQTVYVGLDVHKRSWNAAIFLGEFYVRNIQQPPSPQALHHYLINNYPGAHYTCAYESGKFGFWIQRHFKQLGIECLVVNPADIPSTHKDEVYKTDTRDARGIGQALSGGQLKSIFVPNQDQEADRQLVRQRKKLWADLVRCKNRIKAFLDYLGIPVPSRFDNPNWSQNFLLWLRQLEFEQPSNRVTLNYMLDEMELLRKQMLSICNAIRKLMRSKKYNKLYYLLRTVPGIGPLTAASLITEIGDINRFSDFYHLNSFIGLLPMEHSSGEKELRSRITIRKHRQLRSDFIECAWTAKRSDPALALYYTEQLKKGKNGKAAIVKVARKLVSRIRYVWRTQQPYQCAVVK

SEQ ID NO: 372326 - protein, 340 aa, unidentified
MGEISIVGVDLAKQVLQVHGAAADGQVLFRKKLSRAQFAKFMASLPPCVVAMEACATAHYCGRELSRLGHEVRLIPPIYVKPFVKRQKNDAADAEAVAEAAQRPTMRTVAVKTADQQARAMLFRTRDLLVGQRTRLVNALRGHLAEHGIIIGQGVGNIARFAACLDQDTLPDLVRDLGRLYLDQIAQISDEIDKLDKRIATAARENSTARRLQTMPGIGPVCALAIASFAPEMREFRRGRDFAAWLGLVPRQHSSGGKQKLGRTSKMGQRDIRRLLIIGAMSVVHWRGRHGGRPGSWLSRMLARKPRKLVAIALANKMARMIWAMLAGETDYRDPTGAIC

SEQ ID NO: 372327 - protein, 417 aa, unidentified
MKTSSNAIPIERYVALDIHKEYVMAGGMNREQEWVLQPRRVEMERFRAWAVTNLRMGDEVVIEATTNVWDIYDIVVGLVSRVVVAHPAAVRQIAEARVKTDKQDVERLLRLLIADIVPEVWVPPVHVRELRALISYRWRLVKMSTMIQNRLHSLLHRHNIHPPEGGLDTEKNRSWWEQQEFSSLETLQVKQELATLYQVERHKGEVEQELGRMSNSEPWASQAAYLMQLPGVGIVITMTALAAIGDISRFESPKKLVGYAGLGAGVHDSGKEHRDKKITKCGRKELRWAMVEAAWRAVWHNPYWKKQFEALKRRKHPNQAIVVIARKMLVTIWYVLSKQEAYRYASEEDLAYKMLIWSWSIGKEAHQGMTRQQFAKYGLLRLGVGEHLTRIVRDGLPRRIAPTEEVLAIRPELRPPE

SEQ ID NO: 372328 - protein, 345 aa, unidentified
MNKLMAGIDLHSNNLVIGIMDMDGKRVASQKLSCKLKEVVGFLSPFKQRLEQVAVESTYNWYWLVDGLQALGYPVVLANPAGMEQYSGIKHADDTNDAFFLAELLRLKILPTGHIYDEQLRPVRDLLRRRMTLVHQRTALMLSFKSLYTRTTGQEMSLGELKELAIKEAQDLYDHPANQLIAGMQIKHIEQLTGSIEKIEEAVLDCARELPFYSKLTTLPGVGTILGMTITMEVGEIKRFAEPGHFASYCRTVAAQRMSNHKKKGENNSKCGNKYLAWAFVEGANFARRYNEQCRKWYDRKAAKTSNLIATKALACKMAKAAWHVMAEGTDYDSKRMFGQAASSK

SEQ ID NO: 372329 - protein, 345 aa, unidentified
MQPMYYIGLDVHKRTIRYCVKDGSGAIQGEGTLPATRAELDRWMKTLPQPWTAAMEATVFTGWIYDHLKPHAATLKVAHPLMLRAIAASKKKNDRIDAKKICDCLRCDFLPECYMASTAIRERRRTLRYRNLLVRQMVQIKNKTSTLLMEAGVSYNKQRLHKAGYFRELMATNPDIHDGLRSLLRLCRETVVRLSKTESALVRSLERDPQLLERVERLMTIPSVGPITALTWALEVGEAMRFSSIKKAISYCGLCGAQKSSGNTTVRTPLSKQRNRHLQTTLIEAAKMAPRYSPTLALLYDQEKQKGNANRATLAVARKRVAYLMAVDRGQRHFRVLETTNRIAA

SEQ ID NO: 372330 - protein, 459 aa, unidentified
MDTRIIGIDLAVKAAHKAIVLDQASNRFVSKLHTFHTDPAALDRLLSDARAGTTDDVRLMAVLEATAMSWYTVGIYLERHGVEVYRVNGQQVTDLRRFYQRHAKSDRIDARVLARLPIVCPQQLHRCFFPSGPQMALQRACREVARLQQQATASKNRLLATDSFAWLGLRGLLPAAYGEAAFWVRDHWYDPWRVRAAGESALTEAWRAASSEQSDETDWIALLIQQAERVITLYGDSQCVDYDQLQASLRREQQRIRDTEEKIHQLRLETVRPLYRQLHPERHLETIQGVGQDSAAVYVAFIGDIQRFPSLRDFRGWTGMIPFSRQSGDRQSRGLRITKAGPDLIKATAFLNANVARLWDPQIAVIYHTQMVDYGKHHLQAVCACATHLLNRIYVVLRDQRPYQLRDVDGSLVSKHEARRICQERYLVPDEIRRRNNHRVRKARAEQRTERRYRRRNES

SEQ ID NO: 372331 - protein, 353 aa, unidentified
MAIVADHYAFVTGVDTHARSHTLAIVDARSGQELDTRTFPSTPSGRGRAARWLQRRCGTSSGVLVAMEGTNSYGATLRELLSDGGYRVIEAPKPVRSLRRSQGKSDQLDAVRAAQAVLSLDVDRLTEVKSDPIAQALRILLTARAGMTRERTASINMLLALLRTIDLGIDARRTLSNQRIRMVAAWRCRAKATPTRIARGEASRLAKRILEIDHHLKDNLIELTLLVHDAAPELLAMPGVGPVSAAVILGSWSQPGRVRSEAALAALAGTCPLPASSGNTTRHRLNRSGDRNLNRAFHTITLVRMSHDERTKAYVQRRTLEGRTKKEIMRSLKRYVTRQVYRTLAARSRVDKL

SEQ ID NO: 372332 - protein, 349 aa, unidentified
MSEAYDGPQVVGMDLHRRRSVLVRMTADGRKLETARIANSPAGLRGVIARAGKRPKVVLEATYGWYWAADTLAAAGAQVHLAHPLGVKAFSYRRVKNDEKDAADLADLLRMGRLPEAWIAPAEIRELRELTRYRIKVVRLRTSCKDQVHAVLAKLGIEVTCSDIFGVAGSAWLDGLVLGQPYAGKVASLRALAGELTAEITVLEAAIAGLLARHDGYHAIRALPGIGPVLAAVLVAEIGDITRFPHPARLCSWAGLTPRHRESDTKVSRGHITKQGSPLVRWALVEAIQHVPAGHPLRQRKEDILARRGDQAKHIAKIAVARQLLTWVFYAMRDGQVRALAPATGQQAA

SEQ ID NO: 372333 - protein, 415 aa, unidentified
MGKQREKACGADIHKNKIVATILSLAGIKNQSEFGTTLSELLRFKAWLTDNGCDVVAMESTGTYWIPIYSVLEDGIEVIVANPYMIKHIPGKKTDLTDSEWLAELCLKDLIVPSRIFPKEDRVFRSLTRAREGLVKIRTQLKNRIHKDLSSSHIKLSSVVTDVFGKSGMHILRGLLDGRSIDEIIEGIPSRRIKKKADEIKASIENNLDPSQIFLVESLDLMGCVQNKIDRIDMDLKRKISARQKDLKIAMSIPGIEFTSAATILAEIGNYRNFNSPEQLASYFGIVPFVNQSADKLHTGRITKHGSKHLRWIMVQVAHAASKKIGSRLRKFYLRVRAKKGAKVAIVALAREILCILYHLLMNQEAYEEPGVAKRSRLARVDQLSPQRKLTAQEMGRGCVSWKSAIEIRSPCINF

SEQ ID NO: 372334 - protein, 335 aa, unidentified
MSSLVCGLDVHKDSVYATVMNYGGEVIEKRRLSNDGVLDFLSQYPIDKVAMESSTSIVPVYRALRGKGYEILVSHPKKTRLIAESRIKTDRVDSWAVTELARLDALPLSYMPPDDIAALREKVRRRAFLVRMRSKLKVKIKAQLVVNGLTPPSEYGLFTSKGLEWLRSLQLDAVDSYLPVISTLDIQVGKLSKELRGMASGDEDVRLLMTIPGIGYYSALLVKSEIGSIDRFSDGEKLCSYAGLVPSVSISGKYRRHGSITKEGSRWLRWIMVESVHTHLKYDTSITRAYHAIAERKGAQIAKVAAARRLLMCCHSVLRNREPYHDPAGHYQASS

SEQ ID NO: 372335 - protein, 340 aa, unidentified
MKLSVIGIDVGKTVLHVHGADAQGKPVLRKTFSRGGLVEWLAQQVPCLIGMEACGGAHHLARVLTDCGHTVRLIHPGFVKAYVKSNKNDFRDAEAIAEAVTRPTMRFVAIKTIAQQELQALHRLRSGAVTQRTAIINQLRGLLLEFGLTVLRGPTALRRRLPEILETADGGLQALGRELLAELQREWVHLDERIAALEQRLKQQTQTLEPCRRLRSIPGIGVLGASAFVAAFGGGCQFASGRDCAAALGLVPRQHSTGGRSQLGSISKRGDAYLRALFIHGARAVLRYADRHDDPRSRWVWALKERRGVPVAAVALANKMARTAWAVLTRGTTYQVPVAA

SEQ ID NO: 372336 - protein, 348 aa, unidentified
MTLVGCDLHSRKQQVAALDTTTGEVLEQELAHDGDAVERFYRALRPPVTIGIETTGYTQWFHALMHRLGHTVLVGEAGRIRAMVVRKTKTDRRDARHLLDLLKHDRFPTVWMPDPDTRDLRALVAHRVRLVRMRTMVKNGLQAIALNQRLALRSALWTQRGLAQLRGLALPPHTTRRRDDSLELLAWINVRIDQLDAQLAAVVDADPRARRLLTHPGVGPLTALTTVLVLGPVTRFPDGKHVVSYVGLAPAINASADKQHLGKITKQGNALLRWVLGQAAPQAARADDELRRRYFAVLHRRGRPKAKVALARKLLVRLYVMLRDQIDYEEFRRRGRAGQASRAPVTIT

SEQ ID NO: 372337 - protein, 353 aa, unidentified
MWIIGCDFHPRYQQVYGVNKKTGEVVERRLSHEGPEAKTFYRELPAGAVVGMEATGAARWFERLMEECGHHLWIGDAARIRASTVRKQKTDTRDARQIYRLLELGEFPRIWVPTPAERDVRQLLLHRHKLVQWRTQLQNQLRALARSEGFLSRQSLWSGHGRQELESLALGPWASERRQDLLRLLDPLEQRIAILSAQIESEASKRPEVLALQEPPGVGLLTGLAFVLTLGPVHRFHRSRSVVSYLGLNPGESSSGERQRLGHISKQGNRMMRWLLVQAAWIAARKDPELARVFKRLAFRRGGKIAVVAVARKLAVKLYWRLRTAASNTVQPPAPMQGSSRKVMVNATGSPSF

SEQ ID NO: 372338 - protein, 425 aa, unidentified
MKGTQNQKISQIKFETLVVGIDIGKETHYARAFDYRGIELARLLKFSNTDQGFQRLDQWMRDICKQQEKTEIIAGFEPTGHYWFTLGDHLKRQGYKLAIVNPFHVKRTKELDDNSPTKNDRKDPKTIAMLVKDGRYREVYIPDDIYQELREAVSERERLQEQLTSIYNRVVRWLDIRFPEFTTVFKDWRRNAALITLRSFPTPKKVMEMGVDKIVETWRKQMKRASLKRAERLVKAASRSVGRTSGKVASEASLQNLLAEYDLYCQQYDKQEQLMQELLMQVPNADKLLDIKGVGLITAATFVGEVGNISRFQDPRQIQKLAGLNLVENSSGKHKGKTTISRRGRKRLRHSLFFSMIAMLGKNQEFRLLHQRNLMRENNPLNKMQSIIALCGKLIRVFFAILTKGVDYSPEKMLGDMEQSSRVAA

SEQ ID NO: 372339 - protein, 385 aa, unidentified
MQERKVITMITHYIGIDAHTTNYTLSTASDFEEKPYNTSKYAAKLHYILKYANTLCKKDKIQKENILLGYEAGCLGFKLQRDLNKEGFNCIVIAPSSIPGTEMNRKRNKKTDYRDAEAIAKALRNNDYSAVATPDEQDEAIRDYIHEREAQKKTLKAIKQRIGALCNRQGFYYEAGGYWTKKHLDWLKSLTFPNEFFREVLDSLLLEYEHVTEKIETMDKRIEAFAEMDKYRESVHKLVCFKGIKTLTALAVIVEVGDFARFMKAKNFVAFLGLSVGEQSSSTDHNQGGITKQGNCFIRRLLTEAAQCFSRVTSSKSKALKERQEGNSEEVIAYADKGNERLRKRYYHLIIHNMKNPNKAKTAVARELACFIWGMMTDNIHTVLS

SEQ ID NO: 372340 - protein, 342 aa, unidentified
MQIATIGLDIAKNVFQVHGIDAAEKVVVRKQLRRSQVLAFFKALPPCLVGLEACATAHYWARELAKLGHQVRLMPAKDVKAYVKRNKNDAADAEAICEAVRRPTMRFVQVKSAEQQGRLMLHRTRDLLMRQRTQVINALRAHLAELGIVAAQGRDGIKELLKIIASDADERLPADAHASLVVLAAELRAMQTLIGSIEKRIMTQHRGNEASKRLRTIPGIGIIGATAIAATVTDPKAFRSGRDFAAWIGLVPRQDSTGGKQKLGPISKQGDRYLRRILVVGAHSVLRRAKLSPQKYPWLTQLLARRPFKVVAVALANKMARMAWALLAKGGAYRAPALAAAA

SEQ ID NO: 372341 - protein, 384 aa, unidentified
MSFGTTSAELRKLTMWLVENDCQSVAMESTGSYWKPIFNILELSGTDMEIIVVNARHMKNVPGRKTDVNDAEWIAELLQYGLLRPSFIPDREQRELRELSRYRKSLVGERAREINRLQKMLEGGNIKLTSVVSEVTGYSSRRLLDRLLRSDEPMTEDVISGLVHTSLAGKSKELETALDGLLSELQKELLIKVLDHIDDMSRRIADLDDFCRKQMKKYEDALDKLDEIPGIARRTAETILIETGLDMSRFPTAKHFARWAGLAPGNNESAGKRSSGRTTKGNPTLKSTLIQSAKVAARKKNSFFKARYQKIAAKRGANRASVAVAHSMLIAIYHILKSGERFKDLGEDYYNQFNREKKKNYYLKKLTKLGVNLKEATLSIQTAT

SEQ ID NO: 372342 - protein, 363 aa, unidentified
MVDGARSRHRSAIGCFVGNESHEGSRPHANIAKNVFAVHGIDAAEKVVVRKQLRRGPVLAFFKALPPCLVGMEACATAHYWAREFTKLGHEVRLMPAKDVKAYVKRNKNDAADAEAICEAVRRPTMRFVRIKSAEQQGQLMQHRTRDLLMRQRTQVINALRAHLAEFGIVAAQGDKGVKELLALVTDKEDTRLPIDARASVIVLAAQLEATQTMIGAIEKRIKMQHRSNEASQRVETIPGIGVIGATAIAATVADPTVFRSGRDFAAWIGLVPRQDSTGGKQKLGPISKQGDRYLRRILVIGAHSVLRRAMQNPEKYPWLTRLLARRPFKVVAVALANKMARMAWALLAHGGTYRAPALVAAA

SEQ ID NO: 372343 - protein, 364 aa, unidentified
MVEDRRTVGVGLDVHKSSVRLAAVCGGELLGETTLAYDHEAVERELRAWPDARVCYEAGPTGFGLHRYLVAAGVDCVVVAPGLVPSRPGDRVKTDKRDARRLAALHAGGLLTAIFVPSPELEALRDLVRAREDARLDRMRARHRLGKFILRHDRRMPTTCWGVTRRAWLGRQAFELPGQQQAFDDYLFALDQVDRRIENLEAELSRLAQDGPHRELIGRLRCIRGIDTLTAIGLAAEVGDFSRFRTAEQFMGFVGLVPSERSSGESRRQGSITRAGSSHARRLLVESAWHARRRPTVGYELGRRHRGQDPQVLERAWRCQQRLHRRWQRMAGRGKPSQKIVVACARELAGFVWAIATDQPIRTR

SEQ ID NO: 372344 - protein, 350 aa, unidentified
MPRRNVPRPAAVYGIDIGKNTFHVVGLGSDGVPVQKVRFRRDTLLQFFERAPPTIVAMESCAGSQWIARKIQALGHKVRLIPAQFVKPYVKSNKSDIIDAEAIAEAAARPTMRFAALKSEEQADLQALHRVRDQMIGTRTRLINQMRAFCLEYGIALRQGAGLFKLDLPLVLEDQSNDLSSAMRKLLVELFADLRLLERRIGDVTREIEAIASREDAARRLMTIPGIGALGATALLAAVGNGRQFQKARDLAAWLGLVPREYSTGGKQKLLGISKRGNRYVRKLLVHGARSCFRHLDRTRDRLGSWLDGLQARMHPNKAVVALAAKMARIVWVVLTKPGALYERRDPAFT

SEQ ID NO: 372345 - protein, 391 aa, unidentified
MSMYFVGIDISKYKHDCCIISAADQQIVSKFTVKNDKDGFEHLLTTLNSLSNPEDIKIGFESTAHYALNLELFLENAHHSFMEVNPVLIKEYKKSTTLRRTKTDSVDCESIARWLMTVEYKPHSKGFYHSYSLKSLTRLRDRLIRQRSFYLVKITNVLDHTFPEFKPFFNERLSKTAIYLLENYGSAEKMAHMNSASYDKLRCASRGKFSIQQFLRLKELAANTVGVNNSIFVIELNSLLTLYNSLCKEIKTLEAEITKLIEEVHPHYMSIPGIGPISAAVIYAEYGDISNFSNPGQMLAFAGIEPGINDSGTESHGGRMVKHGSSQLRYVLLNACLPLIRFDITFATYYAKKRAEGKKHRVAITHVAKKLIRVIYALERQDVDFNVQKLR

SEQ ID NO: 372346 - protein, 382 aa, unidentified
MHYRTSSQHTDETVIHAALELSKNSWLLAIEATEHNRPSLHHLKGGDSSALLAKLHRACEQFECRTGNRAKIVLCYEAGYDGFWLARLLENHGIDCLVVDPASLQVDRRARRVKTDRIDVEAILRTVIAWRRGERHVCSLVHVPSRDEEDLRRSHRERDRLVKERTAHTNRIKGLLFTQGIRDINLRRRRKPLVIDFADLVTGDGRCIPPRLKSEVERELQRLALVDEQLAIAEAERDQVARQCEDSEKKRHQLALLRGVGETGAAILVREVFYRTFSNRRQVGSYLGLAPCPYDSGSSTRSHGISKAGNARARSTMIELAWFWLRYQPDSQLTLWFERRVTGQSKRIRRIMIVALARKLAIAFWRYVETGLVPSGAIVAKV

SEQ ID NO: 372347 - protein, 461 aa, unidentified
MAKQSGKRKKGGAKADATEGLPPLNLHAAGIDVGSAEHYVAVPLDRDVEPVRRFGSFTADLHRMAHWLKDCRITTVVMQSTGVYWMALHDVLESHGFEVNVANARHTKTLPGRKTDVQECQWLQKLHTFGLLNNSFRPPEEIRVLRGYLRQRENLVAAAATCIQHMQKALTEMNIQLANVISDISGTTGLAILYDIVRGERDPYKLAMHKHSRIRASRQEIARSLEGTWRQELLFVLEQSLDLYQTYQQKIQTCDERIDGQLRSMEPKIDPVSEPIPEPRRGKDWRGHQSGFDLRGQLYRITGVDLTRIDGIEVQNAQTIISEVGVDMSRWKTEKHFASWLGLCPDNRISGGKVLKRGTRHVVNRASTALRLAASALLRSQSALGAKFRRLRSKLGAPKAITAMAHMLARLVYRMLKFGHEYVDRGIEFYETKYRQQQLHWVAKQAAALRMQLVPLTEVPS

SEQ ID NO: 372348 - protein, 464 aa, unidentified
MNKRKRSSEKKVVPTALPVIRPKVAGIDIGSRDHWVCGPARADGEPNVKVFRSTTAQLREAVDWLVGQGVESVAMESTSVYWIPLYEMLESRGIEAVLVNARQLHNVPGRKTDFHDCQWIQLLHSCGLLRGSFRPGDAVVALRATQRQMANLVEERTRYVQWMQKALDQMNVQVHRAVADLTGTTGLAIVRAIVAGERDPVRLAQHRDPRCRKSSEEIAQYLTGNWREEHLFNLASSLRLFDAVEEQIVSYQNRLLQVIDTLQHVDRQNVPVPSHHNPAKEKDLRSHGEQQFRTALWRFSGADLTRIDGIGVGAANTILTEVGQDLTDFPNESHFVSWLRLCPRTSISGGKPLAKKRNGLGANRVATALRMAASALRRSKTALGAAYRRIARHKGAAVAVFAMARKLAQLVFRMLRYGADYVDAGEKAYELQFEKRRLAGITEAARSLGFALVPTQQTPPAAPA

SEQ ID NO: 372349 - protein, 338 aa, unidentified
MKLYGAIDLHSNNAICGAIDSHDHVKLRKKSPCETAAILDAFAPFKQDILGIAVESTFNWYWLVDGLMDAGYRVHLVNTSAVKQYEGLKYTDDNTDTFWLAHLLRLGILPTGYIYPKELRPVRDLLRKRHQLVELRTTNILSIQNLWIRNTGVRLTSNSTKKLTREQIEKRFNDPNLVLAIDSNRLVMQALDDQIKRVEETVLKQSKLDPRYRYLLSIHGVGKILALTIMLETGDISRFEKVGNFASYCRCVGSTKLSNGKKKGAGNTKNGNKYLSWSFVEAANFAIRFYEPARRYYQRKMAKTKRVVAIKALAHKLARASYYVMRDQVPFDPAKIYR

SEQ ID NO: 372350 - protein, 593 aa, unidentified
MATAPPLDRIGVGIDTARYGHRVSFLRPDRRPAAKPLTVLENRAGYQALQERLQQLHQQNPQAHFHIRIDAAGQYAANLEHFLRGLDLPMTVSVGEPKRNKDYQKAHFPKRTSDDTESQAMARFAVVELPDATAATPPALALLREVAGRLQAKVRQSTQAINRLHNLLARVFPELANLTDDLAASWVLRLLDKYPTAERIAQARLLSLQKIPYLSEELAQQIHLAAQQSVASLHGDVAAALVDDLVAQVRHSQQAERKLHQLLAQAYADLPPSGHVHIITIPGIGTATAAVLVAKTIDIDRFATPEQFVGYFGTFPEENSSGVDKHGKPLPPGTLCMSRKGNDLVRHYLWNAARCAVRCNPAIRALYRRLKAKGKRGDVALGHCMRKLLHLVYAVWKTNRPFNPRHFDWEQISNHVMSPTPPAASTAEILAASNDKAVGHKRDEPAPEVVTTAATTVAPMPTAVNPEPSVKPPLRPKVDFAFLREQVTMEQVLERLGLLANLRGRGQQRRGPCPIHSQPNDVQRTFSAHLGKNVFQCFHADCAAQGNVLDLWAAVHRLPVYEAALHLAATFHVPRNREEEPVPGIRKLPQPST

SEQ ID NO: 372351 - protein, 362 aa, unidentified
MNQALGTHSVCSLETPPQEVIGIDLGDRWSRFCVLNEVGCVTREDRVRTSTAARAAIFGALPRTRIVMEAGAHSPWVSRLLRAQGHDVVVANPRKVRAIYESDRKNDRPDARMLARLGRVDVNLLAPVEHRSSEAQADLAVVRGRDALVSARTQLINAVRGMVKSMGGRLPRSTTSAFAGRMGTLIPVELKVSLEPLLKAIRDLTEQIHRYDDRIEQLADGRYPETRLLRQVKGVGPLIALTYVLTIDDPWRFRRSRHVGSFLGLRPQQWESGNSAPQLGISKAGNKHLRWLLIQAAHYTLSRLAPDSRLRRWGVALACRGGKNGKRRAVVAVARKLAVLLHHLWITGEVYEPFYGLPEKAA

SEQ ID NO: 372352 - protein, 430 aa, unidentified
MSYKIAGIDVHKKMLAVVVSDVEVDGEYHFEQQRFGSNPEQLRSLAAWLLEQEVEEVVMESTAQYWQPVWAALERYWKPIREKQQGASRKSGTLHLAQAQSNRGRRGRKKDFPDAERLVKRLVARELILSFVPGAQQRLWRTVTRRKYQLTRDKVRLQNQLESLLEEAHIKLSSLVSDLLGASARRMLKALADGETNPGALAALADQSLRATPEQLCDALGACTDLQPVYRRLLKMALEQLQFLEQQIGQLDQEMASLLSQHQDAVQRLAEVPGLGVDSAQQIIAEVGPTAATFPSEKCLSSWVGACPGDDESAGVNYSHRSPQGNRHLRRLLNQSANAAARTKGSIFEIVYRRSVPRLGHNQAIGAIAHRQCRLIWLILHQGVRYEERGPAVTKRSKQKRTARMIRQLRSLGYRVEPINSQLATPGLAR

SEQ ID NO: 372353 - protein, 334 aa, unidentified
MEQITTVGIDLAKNVFSLHGVDRSGAVVLRKTVRRDQLLQTMAALSPCLIGMEACSGAHEWGRRFQALGHAVRLMAPKFVTPYRKSGKNDGNDAEAVCEAVTRPNMRFVPVKSVEQQALLSLHRVRQGFVVERTAIINRLRGLMSEFGVILPLRSVTVRRQARAAAEALPDLARRVVGDLLEQLHLLDERIGGYDQEIEAQARLSEPARRLMKIRGIGATTALAIVATVGDAREFKNGRQFAAWIGLVPGQYSTGGRPRLGHISKRGDAYLRNLLVQGARSVLQSAAAHQDRMSRWILELLPRRGYYRTLVAIANKNARIAWALLAKNQTLHTA

SEQ ID NO: 372354 - protein, 341 aa, unidentified
MFVGVDSHKDTLAISGVDAAGRQQQAQVFPNTREGHRRLLGWLQAQSGVVRVGIEGAGGYGRAVAIHLVQAGLVVVEVTPSLTVRERRRLRQRGKADPTDALAIARVVAREQDLPAVRGQDLTEDLRLLVDYREQLLGERTRIANRVHADLVALQPGYQQQLPELRSQRATGLVRRLLAGQVGVRAELVCRRLDQLDRLDAEIRQLKRRIGDLVEATGTSLVQVHGVGPLVAARILGEVGDVRRFGDRHKFAAANGTAPIPASSGRIQRHRLNRGGNRRLNRALYTVAITQARSDHPGRAYVARKQRQGKTRREALRCLKRRISDAIYRQLVADLQPNPAP

SEQ ID NO: 372355 - protein, 359 aa, unidentified
MPVYVGIDVHRKRSQVAVIDEGGEVLANRNVPNGVQPVLGVIGGLPPGTPAAFEAAFGWGWLVELLEDYGFDPHLVHPLQCKAIASARLKNDKVDAAILAQLLRADLLPEAWIAPPQVRQLRALLRHRIQLVRLRTLLRNRIHAILADHGHDRPGGCWSGPGRAWLASLELPAVSREVIEDDLALIDALQVPIDRLDWEVHQHARSDPSVKVLTQLPGVGPFTALVLLAEIGDVTRFGSARKLAAWAGLTPTVRGSDRTVRHGHISKQGSVWARWALCEAAQTAKRHPDFAASYQAIARRRGKNIATTAIARKLLARAYHLLTDAQITAPAPAATAPAPAGAPTDREGVASPGRARKTA

SEQ ID NO: 372356 - protein, 416 aa, unidentified
MKNWQDLTHYAGFDWAKDHHAVVVVDKTGAVVADFEFEHSLEGWKSFVEKTAAWPALAVSIETSQGAAVDQLLQRQYTVYPVHPVSAKGYRERKAPSGTKTDHLDAWGMADALRMDGHGWKTLRPMDPLTEQLRLLCRDEVSLIQQRTALVNQLQQALAEYYPVALQAFDDWTADHAWEFVMAFPTPEALAAAGKRKWENFLHKHKLWRPETSEKRMKLFAQANQFKASKPIVLAKSQLALSLCRLLCTLGQQLALYRKQIEALFKDHPDHDVFGSLPGAKKVLGPRLLGLVGGDPDRYGSHEVLQSLAGTAPISFQSGKISKVRVRWSCDKLLRHTVHLWADCFRKASAWGQTYYEKKREEGKSHACALRCLGQRLLKILFRMIQDKKPYDAEMHALNQKKHGSWVIKLVNESAA

SEQ ID NO: 372357 - protein, 451 aa, unidentified
MALLDRTVRIVLTSLLNVWWNSQWLLYLTLKGVLTIKVVYQTCCGIDVHKSFLVATIIKTTSGVDPSYQKKRFSTFNNSILQFKNWLIENQCRDVCMESTGKYWGPVFNLLEDEMNVTIANPKWVKAVKGNKDDTKDSKWIGDLFRLGLVQGSYIPCKPIRILREFTRYRYKLTSCRTSEKNRYQNALTVCNVALDSVVSDIFGKSATSVIDYLIEQSGNSTNHEEIASRLLRSLKKKSDSVIESIEGYQMTAPQKYRMRLVRAHLDYITSTINDIDTMLDSLIAPYENAVQLLCTIPGVDRNSAITVISEIGTDMTPFSNSKRLCCWAGLTPGSNESAGKKKSVRITRAGVYLKPALVQVAHAAVKSDKSPYYKQKYERIMKRRGKKRAIIAIDRMILTAIYQMLSTGEAWNPTDLYKTDMPEPLKEKQKEKAIKQAKKLLIREGILSES

SEQ ID NO: 372358 - protein, 346 aa, unidentified
MKHSVGLDVSVKETAICIVDEAGKVVRESKVATEPQAVIAFLSSAGVEYARIGLEAGPLSQWLVNGLSEAGLPVICVETRHMKAVLKAQQVNKSDRNDARGIAQMMRVGLYKPVHVKTLASQQKRMLLTSRQLLRDKLQDMENELRGTLRNFGLKVGVVSPGHFEARIKELVAGQPPLEMIVVPLLTVRRVVREQLAKLDKMVLDQVRDDKLCRRLMTVPGVGPIVALTFRATVDQAQRFARSKTVGAHFGLAPRRFQSGERDYDGRVSKCGDAMMRTALYEAAQVLLTRTQTWSWLKAWGMQVARRRGAKKAIVALARRLAIVMHRMWVDGTEFRWRKEADTAAT

SEQ ID NO: 372359 - protein, 354 aa, unidentified
MVHVGIDLHQKTCFLHALDDQTGEICLDQDVPSERQALLDCLEPLRERGELRLIIEACGFAGYWWDQLDPLGEVVAVHPKHIKDYKGNKRKNDRRDAAFLVALSQLNRLPRAYLGSTAERDLKDLLRYRVGLVRIQTRLRVRLRNVAQRYGTVLAASDVDSAKARRLWQEWELRATHRLLVDQLLSVLDEIGRKRAVIEEQILAAARPDRRVQLLDTLPGLDYFGALLAAVEIGDWQRFSRGDAVACFAGLVPRESASGGHIQRGKITKEGSPYLRWIMVQAALHADKSPRLKRLHERVAKRRGPMQARVAVAREMLVIAWHMLRDDKPYEERAPRESGGRPTSSGKPESPLTQ

SEQ ID NO: 372360 - protein, 375 aa, unidentified
MEYTRFVGWDVHAATIAVAVADAGRDPAHFEGTLPATPEAVRQWVQRQPDAPTLLVCYEAGPTGYEMARLLIDLGVTCQVVAPGLVPTKPTDRIKTDRRDAIKLAQALRAGSLTPVRIPTPAEEAFRDLIRARTQAVEDQTRARHRIKSALLRWGVRVPVERRVWTVAYMGWIRQWKPPEAPRQMAWAELLSQLEEADARLERLTTAIELAWPTHPLARLIQALQALRGIDWLTAATLVAEYGDFRQFPHPRQLMAFLGLVPTEASSGETRRKGGLSKTGNAHVRRVLTQSAQTYRFVPSLHGLVGRRLAACGPWQTDLSAISWRCQQRLHNRLRRVMARRGKPKALAAVARELCGYIWEIAVWVRAQPEMTGVA

SEQ ID NO: 372361 - protein, 533 aa, unidentified
MVTKRNSRKSRTISPAVLGKPKGVIQARVQAVGPERFGIVAVDCAKARSKWMLCDFYGKVLIPPTVVEHQRTALEVATMQLREAIQQHGLQDHLVAVEMTGTYHRPVQRAFRKAGSETRLVHPFASRHYRLPAHADSKTDDHDLEGIFRAAVNGFGLVEPEWDDIYRHLQVLARHRRDLVQKRAKLQSQIRQALERCLPGYAALFLSDDLWTRPVAMAVARRAVRPEAIAAAGVSGVWRWLKEDKLQVQSRTVERLVAWAANAAAADPLCDHLARVWQTLYEDWQAKTRHIHRLEQDLAAILVKTPYLLLLSHPGINVVSASELAGEMGPIEHYAHAKAISGRAGLFPSRYQSDEVDRADGPLARFRNARLRAAWMRVADCLIKSNAHYRGKSELWKQRGVDPRDIHCRVANRATRTVFQMVSGRRLYQHPSRLDRQYVLDKLRVFHQEHGTPPVEILRDLHEAAAQIPKSEQAAEARPLQEACRKARRSRRAGPQAIGEILLVLLAKLGFGQVQSEAEAPSPDANVSGTGTR

SEQ ID NO: 372362 - protein, 317 aa, unidentified
MTDTTMIAAGIDTAKHKLDVAIHGDRQRFAFANSPPAFGDLIKLMRRRKVTRIGIEATGGYERDVVGALRKAGYTVVVLQPIQVRAYAQFVLCRAKSDKIDAALIAACIAHRDTLREPPDPRLVPLADLLTFVEQTEEDIARSKVRLEHARNPDQRRLLEADVKRLAKRRTQMLAKLSAKLEAHDDLARRRDLVLSIDGIGERTALAMIIRMPELGRLSREEAASLAGVAPFVHDSGEHKGERHIAGGRARLRKSVFAASLPATFFHNPQLGALYRRLVANNKAHKVALIACVRKLIIYANTVLARGTPWVKTAPAS

SEQ ID NO: 372363 - protein, 344 aa, unidentified
MDHFAGLDVSVKDTSVCIVDDTGRIVREVKVASEPEALLAVLKNPAYHFKRIGLEAGPLSQWLYSALAEAGLPVVCVETRHMRAVLKAQINKTDRNDARGMAQMMRVGLYRPVHVKTLRSQKLRMLLTHRQLLLSKAIALENDLRGTLRNFGLKVGMVGKVKFEARIRELVESLPDLAVLVEPMLIVRRVLREQIVILHRRLLAIVRDDEVCQRLMTTPGVGPVVSLTYRATVDIPARFRKSKSVGAVFGLTCAKYQSGEVDWDGRISRCGDEMMRTMLYEAAQAMMRSKKWSWLKAWAMQIARRRGMKKAIVALARRLAVIMHRIWVDGTAFRWTRQQAAVAA

SEQ ID NO: 372364 - protein, 429 aa, unidentified
MSYRMAGIDVHKRMLAVVVSDVEVDSEFHFERRKFSSSPEQLRSLAAWLLEQEAEEVVMESTAQYWKPVWEALERYWKPICEKREGARRKSGTLHLAQALSNRGRRGRKRDFPDAERLVKRLVAQELTLSFVPDAEQRLWRTVTRKKYQLRCDRIRLQNQLESLLEEAHIKLSSLVSDLLGLSAQRMLKAIAEGETNPATLAALADKHLRATPEQLCDALGACTLLNPVYRRLVKLALEELRLIDDQICRLDREMASLLGEHQDAVQRLAEVPGLGVDSAQQIIAEVGATAATFPSEKCLSSWVGACPGDDESAGVNYSHRSPKGNRHMRRLLNQAANAAARTKGSIFEIVYRRSVPRLGHNQAIGAIAHRQCRLIWLILHQGVRYEERGPAVTKRSKQLRTWKMIRQLRNLGYRIEPPNPQPSQAQAQ

SEQ ID NO: 372365 - protein, 381 aa, unidentified
MQEAIKVFVGLDVHKDSIAIGAAEPGRAPAALIGRVAHDVNKLLKTLAKLGRAEEVHVVYEAGPTGYGLQRALAKRGYVCEVIAPSQIPRRAGERIKTDRRDCLRLAECSRAGELRAVWIPDLEDEAIRDLARAREDAVHSRTQARQQLKGFLLRHDVSYPGKTSWTKSFHVWLGTLNFGPASAQTAFTEYQLAVQAADQRVERLTHALAQSIHGWRFEPVVASLQALRGVDVVTAIGLVAEIGDLARFEHPRKLMGYLGLVPSEASSGERVARGSITKTGNGHARRLLVEAAWHYYRCKPRIGQQAQQRQHALGSDIKAVAWKAQLRLARRFAALDARGVQRNKACVAVARELAGFVWAIGRRSMHATNPTAIPTSTQSH

SEQ ID NO: 372366 - protein, 349 aa, unidentified
MTMLADQVDAVIGVDTHKESHTAAVVEPTGGVVAHLTVPSDAFGARRVLAFARAHQAGRRVWAIEGTGSYGAGLTTFLLEHGEWVVEIDRPARPARRNGAKSDELDAVRASREALSREHLAQPRRRGEREALRVLLATRQGAILSRTRAVTSLHALVVNAPEGIRNQLRHLDTDDLLARCARLRTAPLQSIEHRATITALRSTARRALACEAEAADLESALEVLVKQERPELLTEPGVGTITAAAILNAWSHAGRIRSEAAFAMLAGVAPIPASSGQTVRHRLNRAGDRQLNRALHTIVLSRLTHHAETRAYASRRAAEGKTPREIKRCLKRHLARRLFGLLEHTEAAA

SEQ ID NO: 372367 - protein, 456 aa, unidentified
MKIPQSTIRLLTGRLVKILLNREVSTMKSNTQNAKIEAITEKTLVLGIDVGSETHYARAFDYRGIEYSKKPFKFSNTEAGFVTFKEWILDLKERHEKDKVVPGMEPTGHYWFNLGKFLQDNEMKPVLVNPHHVKKSKELDDNNPTKNDRKDPKVIAGLVREGRYMIPYLPDGVYADLRTASNIRFQLQAELTRIQNRISRWFNIYFPEYKTVYGNPDAKSGMLILKAAPLPEDILTLGIDGVNQIWRVAKLRAVGKARAKTLIEAAKHSVGSKEGAVSARMEIRMLLEDYESRNTRLQEVMVLIEELVRKIPMAEKRLEIKGVGIRTVSGFLAEVGDISRFNNPKELQKLAGLALVENSSGKHKGETTISRRGRKRLRYLLFEVAMSLVAKNPEFRELHNYYTTRRLNPLKKMQSLMAVATKLIRVFYAMLTKGVDYDPKKMVSDIRRPEAYLQAA

SEQ ID NO: 372368 - protein, 351 aa, unidentified
MWIIGVDYHPSVQQVAFVNTDTGECGERRLNHSDGEAEKFYRELKAAGCGVRVGMEATGHARWFERLLAELGFELWIGDPSQIKAKRVRKQKTDRLDAALLLQLLLEDRFPRVWVPSAENRDLRQLLWHRHRLVQMRTRIMNQLQAVAMNEGVRRKTALWSKSGRAQLESLSLAPWAARRRHDLLELLDRLNPTIEELSAAVEQEAKQRPEVLRLMTHPGVGPITALAFVLIIDSAERFACGKQIASYVGLIPCEDSSADRRQLGHITKQGNTLLRFLLVEAAQAVVRRDPDWRRRYTRLAMRRDKRIAKVAMARKLSVRLYWMMRKEWNYERLKKFGSYAGESEHVHGVQ

SEQ ID NO: 372369 - protein, 421 aa, unidentified
MKRADTRKVRGVRDDTLIVAIDVGMGMNRGYCTTPDGRSTKPFKFDNTREGLDTLWGMIMASKDRFKCNEVIVGYESTGPYGEPLVHYLIKKPVKMVQVNPMHTKRVKELNDNSPLKTDDKDPRVIADIIQLGHTLSIVIPEGDAAYLRRLNNSRERHVRERTALVNKLQQLVFLLFPEFKKVIKDIKCRTPLYLLKRYPTPEAISVLETHALGEEMRKKSRGKFREHHADMLITLARNTIGIREGVSGLSMDIRHILVQLEMLRNLIAEIESEMEIALGRIPYSSKLLSMKGLGIVSVAGIIGEIGDFKKFGTQPEIMKLAGLDLYEISSGKMKGQRRISKRGRSLLRKILYYAAIQTIRKNGILHDYYTRLTDRGMKRMMALVAVSRKLLGIIYAIVRDDSEYSVNFESMKRQVIKKAA

SEQ ID NO: 372370 - protein, 347 aa, unidentified
MRFATPTAAYYCGIDLHARTMYLVVLDQAGVVRLDRNYPARPDAFRAAVAPFRPDLVVASECVHSWYWRADLCAGQKITFVLGHALGRKAVHGNKTKSDPPDADAIARLLRGGNLPMAYPYPKERRSLRDLLRARLRFVRLRARTYGHVHTALRQLNLPPVSNDVKVKSKRGAIPDAIPDEHVRRGVAADLELLDPLDATIRRLERDIEVAARPHYAREMAVLQSIPGVGLIISLTVLLEIDAIERFDTRQQFCSYARLIAPPLESAGKKVGVGCRKQGNAWLKWAFSEAAVLCAQKDERIGDYFKRLTSRHGTGKALGILAHKLGRAMYHLLLKKRVFDIDQFLRP

SEQ ID NO: 372371 - protein, 343 aa, unidentified
MQAVTTIGLDIAKSVFQVHGVDAAGQVVIRRQLKRRAVLAFFQKLPVCLVGIEACASSHYWSRELQALGHSVRLMPPAYVKPYVKRQKNDMADAEAICEAVARANMRFVPTKTPEQQSCLMLHRTRHLFIRQQTAVINSIRAHLAEFGIVAPVGRKGVTELLHIVADPSDKRVPEVARVCLAALGNQLLSLKEQIVEFDRMIMVWHRSNETSKRLHYIPGVGPMLATALVASVADPRTFRSGRNFSAWIGLVPKQHSSGGKDRLGSISKQGDRYLRSLFVAGALAVIRYAKIHGTKHRPWLTALLARRPTKVAAIALANKLARMAWAMMARGERYRNPVALAA

SEQ ID NO: 372372 - protein, 387 aa, unidentified
MNVVADKSEPLTAIHTDLGAIFVSLELSRSNWLITSLSPGGGEKMSKHSVRGGDFAGLMQRFTQLQEKAKMRTGRSFRIIAVQEAGLDGFWLHRALQSEGIESHVVDAASIATSRRRRRAKTDKIDGETLVRALLAYKRGEPRVCAMVKPPTPGEEDRRHLCRERKALTAERVRHVNRIKGFLFSQGVSGYQPLRRDRRQRLEELQTGDGRALPQHLKALINRELDRLELLLKQIKTVEAARDALLAVEQTAKPATAAMLLAIRGIGPEFAAILWSEGLFRHFENRRQIAAYAGLAPTPWQSGAVDREQGVSKAGNPRLRTTLIQLAWLWLRNQPRSALSVWFHERVSRNGGRLRKTTIVALARKLLVALWKYVTAGVVIEGVTMKA

SEQ ID NO: 372373 - protein, 397 aa, unidentified
MIAVGIDVSKSKSTVAILSSSGEILAKPFDIQHIESELNSFISYLTSLDEDVKIVMEATGHYHLPILKQLLAANLFVCVMNPYLMKKYGDNEIRKGKTDKKDAMRMAVYALEKSYALTPYSIVDQRYADLKFLSRQYNQRVATKVKCNVYLLNLLDEVMPGIDKILMSKSQNPENNILYCFIEKYKNFENIKTMGQKRFLNSYIKLAEKVGSRTYQAKGLQIYELAKNSITTRGTDPYTELALTQCVKMQKLAEKDAKDLMVQMQSIAILLPEYPIVRAMGGVGDRLAPRLIAEIGDVRRFKSGKALNAFAGNDAPPYQSGQFDSSNRHISKRGAPALRKACYEVMQCLKMHKPADDPVYQFMIKKELEGKPLNVAKMAAINKFLRIYYARVMEIYK

SEQ ID NO: 372374 - protein, 360 aa, unidentified
MSYCTSIGIDTHAKKNQVFALVRETGEFETASLSDDPKELVSWIRKQGFPQPIRCCYESGPTGFVLARALNEAGIYCIVAATSKLPYRTDRQKNDRRDAEWLCRMLDSGAVRAAMIPSVEEESLRHLSRLRGEVALDLRKAKQRVSSFLLLTKTSYTLTKKRWTKTFNKWAAGYEFRCAADTFVFRMKISAVLRLEERLEGIEAEIMRTIELYPDLQEKMKRFTALYGVGKVTAFSLVCEVYDFDRFKNGAAFASFIGLVPAENSTGNKTAMGKIAKQGNSHLRRIIIEAASCYSRPIGDVRPEDTTIPEAVRAKAEKCKHRLRKRNLALRKRGVMANKAKIAVARELSEWIYHIAVMPA

SEQ ID NO: 372375 - protein, 383 aa, unidentified
MVDRKTIEHSGAGLAQLVKRLEELTRAEPGLVAVGIEASGGAIFECLIEHRFAVYSLNPKQMDRFRDRHTVAGSKDDRRNAMVLADSLRTDRPLFHRMRLDDPLEMRIRELSRAEQDVQQQQTRLANQLRDLLWRYFPQLIKLSPSMDEGWLWDLLELAPTPEKARELKRSRIEKILRAHRIRRLSGEEVEAALQEQALELAPGSAAATSEHVLLLLPVLRLLQSQHKEIARRIETVLGEMEQQEQEGEHRDVTILRSMPGAGRVVAATMLAEASEALAERDYRALRSYTGVAPVTWQSGKRKAVGMRRSCNPRLRNAVYHWSMVSIQHDERSREHYAALRKKGHSHSRALRGVADRLLAVLTAMLRTGSKYDPTLRSAASRQ

SEQ ID NO: 372376 - protein, 369 aa, unidentified
MNNYTTVVGLDVHKETVVAAVLLRGRNEVTEQVSIENHPKAIEKLVKRVTRQGPAEFVYEAGPCGYQIQRQIAGLGHHCAVIAPSLTPVRPGDRVKTDKRDAVNLARFYRTGDLTEIRVPTCEEEAARDLPRAREDVLKDRLRARHRLSKFLLRQGRVYAGTKAWGAAYKAWLKPQKFEWLTLQQTFEANMRAHDEAEARLETLEQQTYDLAQQPAYRTAVSYFRTLKGIDTLGALTLTVEAHDFRRFSKAGEFMSFTGLVGSEFSSGEKVRRGSITKAGNAHIRRVLVEAAWCQRYPDVVSLGLAERRKGCPKEVIQIAKKAQTRLHRKYLRMTGKNKLHQVTVVAVARELAGFVWSIGQHIPTAVTA

SEQ ID NO: 372377 - protein, 325 aa, unidentified
MTDVFVGIDVSKDQLDVAARPRGESWQVANTELGIATLVKRLEKLQPTLVVLEATGRLESAAVSALAVAGVPLAIVNPRQVRDFARSTGKLAKTDKLDAQMLARFADAVRPEPRLLPDETQQRIDALLVRRRQVLGMITAERNRRRRAPTMTRAEIDEHVAWLQVRVEAIEDELNKTIRSSLLWREKVALLRSVPGVGPMLAATIVAQLPELGVITHKEIASLVGVAPLNRDSGHWRGKRTIWGGRSQVRAALYMSALVATQFNPRIRPFYQRLLATGKPKKLALTACMRKLLTILNAIAHRGQPWRSPASVALIGAAILMPAGA

SEQ ID NO: 372378 - protein, 408 aa, unidentified
MEVLHPRCAGLDVHKDTVVAAVRCVTPPIHHEVQSFGTTTRGLFALADWLSSHGCSHVAMEATGVYWKPVWHLLEGRFELVLANAQHIRNVPGRKTDVGDAVWIADLLAHGLIRSSFVPPVAIQELRDLTRTRKQLVREIAQHSLRIQKVLEDANLKLGSVLSDVLGQSGRAMLDAILAGEDDPERLADLAVGTARKKKAALIEALRGRVTPHHRALLRLHLGLVDALDAALEEVDRNVGKALEPIRDLARLLTTMPGVSHVVSHVILAEIGFDMKRFPTSGHLVSWAGLCPRNDESAGKRRSTRVRKSANWLKTTLVSAAWAAVRTKDSYLHAQFLRIKSRRGAKRAILAVAASMLTAAYFMLRDGTEYEDLGADHFDRRDRAKVIRRLVKRLEDLGCAVDVSPQAA

SEQ ID NO: 372379 - protein, 370 aa, unidentified
MLNTTTFVGLDVHARSIKAVALDAMTGEVRSATFGYDAAEVAERAGSLDPAAKCVYESGVTGFDLQKRLSSMGIDCVVGAVSKMIKPSADRKRKNDRNDAEFLARMLSVGNVVEVWVPDDECEAARDLVRALDDAREDLKRCKQRLSKFLLRHGLVFSETTPSGRRRGNWTAAHWAWIRSIEFPEKADDDVLAYYIDATRQAMEDKARLERLVEAEASKPRWKRRVDSVRCLKGIDVTSAADLVFEAGEFSRFKNARSFAAWIGLTPSERSSGESVRQGGITKAGNKHLRRVLVESAWHYLGCSPHSKDLAKGQAPDPGARRHAAKGVRRLVERRRAMLERGVHKNKANVATARELACWCWAIGRMVENG

SEQ ID NO: 372380 - protein, 462 aa, unidentified
MARSKPKASRPAHSAPALPPQLAAANLHAAGIDVGAEAHFVAVPPSDAPQPVRGFGAFTADLEALAAWLVACAITTVALESTGVSWIPLFELLEARGFEVLLVDPQQVQKIKGRPKSDVHDCQWIQRLHTFGLLAGAFRPADQVCVLRSYLRQRAMLLTHAAQHIQHRQKALTQMNIKLQHVVRAITGVTGLAILRAILAGERKAETLAQLRDYRCQHDEATMARALQGNWREEHLFALAQAVALYDVYHQKITECDRHIEASLQTFADRSDGQPFPPPSRPRKRGGNQPAFAVREPLHRISGVDLTQIEGLDETTSLVILSEIGLDRTRWPTVKHFTSWLGLCPHHRVSGGKVLSRRTKPCANRAATALRLAAACLHHSQSALGAFFRRMKARMGAPKAITATAHKLARLIYTMLKYGTAYVRQGMDEYEQQYRDRMVKNMTRRAKALGYTLVKAPEGNPV

SEQ ID NO: 372381 - protein, 346 aa, unidentified
MQSTTIAVDLAKSVFQIAVSKSPGKVSESRRLTRKQFATFFARRKPALVLMEACGSSHFWARTLRGYGHEVLLLPPSEVRRYVTRDKTDRTDAKALLEAHRNEEIRSVPVKSAAQQSTASLHRLRSAWIGDRTARLNLIRGILREFGQVLPPGARQVVPQALSVLEDSSLEVSEPLRLALREACAEVRELEQRIRGVEKHLEALAAESSVFCCLASVPGIGLLGGTALEAKVGDIRRFATSRHFASFLGLPPKEHSSGLRRRLGAMSKRGDVYLRTLLIHGARAVLAAAKRKRHPDALSRWALAVETRRGHNVATVALAHKIARLAWAVWQRNTPYRAGGVAAGEV

SEQ ID NO: 372382 - protein, 404 aa, unidentified
MFYLGIDLASKAHRIRITNEKGDNVCSTFSIQNNQDGFNELLSRLDNLSVKNTDILSGLEATNNFWENIYEFLNAKGFKVILLNPYFVNKFREALRMKGKTDDIDTLVITSLLRTGEYGSCLIPDEIALTLRELVKLRYEFLKDQKNYKRQAFALLSLVFPEYRSTAIKNPFKIASMQILLQFPTAKDLALAKTKHIEKIVRSIQGNNFNITEIQGLIDCAKNSSYSGKASVARGSNLKMILTLIQNLENDINELDKQITDILSPKDPDDSFPGENLLSIDGVGKKTLAAVLSAIGLDGKSFPDAKAIIGHIGFYPKIYQSGDSCRDNRISNRGPKYLRWALYMCAVASIKHNNEMRALYQRKRSQGKTEKQSLICVAKKLAQMMLAMLKSGQPYNPARVFAVA

SEQ ID NO: 372383 - protein, 340 aa, unidentified
MKKRYIGIDLHRNRFTCCIRLDNDRTYVTEWALEALARLVKKLRATDEVAVEITSNTRLFHEAVLPHVARVVVGDTNQFRVISQSVKKTDPNDARLLSLYLSKNLLPEVRMKDKDLAQLASLRQTRDTLVKQRSALKNKVNNILSARGLNLAKEALSSEKKLAEVLGLPFDEIVRIELRVIVEQIRGLNKSIAELEKTIGEEGSKLEGHKGLSSIKGIGKITGAILLSVIGDVNDFADEGRLASYFGIVPRVSNSNQTERSGRIHKRGTKLGRTALVQSALIAANYSPYLKRFYEQVKARKGAGKAIIALAHKFLGIIYRTLKNKWVFEDFPNFVLAEES

SEQ ID NO: 372384 - protein, 343 aa, unidentified
MAIVAGFDVHRRQITFDALDTETGEVSRGRIASTPAAVSGWVGRFPGQEVEVAVEACTGWLFVCEALAQAGARPHLAEPAETSARRGTKRRAKTDRADACHLRELLCQGRLPEAWLPPAHVCEWRTRTRLRKTLVDERTRWLQRIRATLFHHGVPVADVPERLLGREGRAFLKRVELPESARERIAVALALIETLEAQLAPIERELRSLARSQPGCQALMRQFGIGELLAPTILCELGDVSRLSSSRKAVRAVGLDVGVHRSDRRSRVGRLTKQGSSVARWALYEAAQSACRQTSPDHDAYLELKRRGLSHTRRSLTIARKLTRRCFHTLRELGPTALEPVND

SEQ ID NO: 372385 - protein, 420 aa, unidentified
MAFKIFRFNCCGLDVHKTWIYACIGITDSNGRTDYKQARFSSFSKGLKELCDWLAKYNCSEVCMESTGKYWIPVFNVLEKADISVILAHPKYTKPQKGNKTDRKDAKWICNLFMCEMIKPSFIPPADIRHLRDLVRYRFKLTCMITGEKNRAQNCLTVSNLKLDDVFSDVFGKSSRSITEYMLAHPGEIFDVAPFVDGRCKTPVDEIQAAVDGAISPEQAVKLRQCLNHIDELEKHLKEIEREILRLSDKYEAALDLIRTVPGFGKRPMTAIQILSEIGGDMSVFPTAKHLVSWAGCCPRNDQSNKKIKSTRISRAGNYIKPILVQIANGLLRSKKHPEITDRYKRIKSHRGHKKAIIAICRMLLTAIWHILSDLKPYTPEGYLEPRPVKESKVLTKSQALHLLKQRGYIIKDDAEPALN

SEQ ID NO: 372386 - protein, 325 aa, unidentified
MDNKKMYCGIDVSSETLDVCFQNEAGEKQHLQVSNNSKGFNEILKICGKDLHFVMESTGVYHMGLMFFLHEKNCVYSVVNALQIRRYIQMHLERNKSDKKDARRILEYGIDRNPSPSEMPDSKYFECRTMNNAIHDLTKDITKLSNQIHALKRSGIMAVEVIKCYEKMIKTMRLEMAKLEEKLSAKLKEWQPELLEQVQSVKGIGKRAAAELIIYTKSFKGMENYKQLISYSGLSPIEYSSGSSIRGRSKICKQGGKQIRHILYMCALNAKTTNRACRELFDRLVAKGKNKKSAVIAVCNKLLKQVFGCVKNATLYQDDYAKNIA

SEQ ID NO: 372387 - protein, 388 aa, unidentified
MLLDHPSDGPTAIRTQFGAIFVSLELSRSTWLVTSLSPGHSEKMSKHSVKAGDLPELLKLFSELKQKALARTGESYRIVSIQEAGLDGFWLHRALQQEDIESHVVDPASIATPRRRRRAKTDRLDGETLLRSLLAYKRGEPRVCAMVAAPSPEEEDRRRLCRERRTLIAERIVHVNRIKGLLFAQGIFDYVPMRRNRRAALDVLRTGDGRVLPAHLKVQIGRELDRLELLLEQIAAVEREQDALLAASRPAGGTEGSNPVAMLLDLKSMGPNFAAVLWTEAFWRQFANRRQVASYAGLAATPWRSGGIAREQGVSKAGNPRLRTTMIQLAWLWIRHQPQSALTRWFNANSPRGRKRTIVALARKLLVALWKYVTAGVVIEGAVMKSAA

SEQ ID NO: 372388 - protein, 410 aa, unidentified
MRYYLGVDWADQTHAVWAVDEHGTKTAARTVPHTAEGLSEWGRELDEWRAQGIELWAAIERREGRVVDFLLDHGVVVYPVNPKALDRARDRFRQSGAKSDPFDARVLADFLRTDHAHLQVLQPSSAAAQELKLLTEDYQQQIRQQTRLVNQLTATLKAYYPRALEIAALPTPLAREFLQAYPTPEAVAALTERQWQRWARAHRLSETRTQALWNVLQEPQLPVPGHVLRAKARLMRSLVAQLTLVVAAVEEYREAIEDFFARMPAAQWARTLPIGQHGITAPTLWARLGDAPGRWESFRHLQAHAGAVPVTKRSGKQQRVIQFRFACDKALRYVIDHVAFLSLHSSVWARAYYDQQRARGHSHRQALRALAAKWLKIIFVMWQHRVPYDEQYHLATMTRQQLRHGQNQIA

SEQ ID NO: 372389 - protein, 352 aa, unidentified
MLIIGCDFHPGFQQVAIFDNRTGEIQEKRLPHRAAAEQYYRSLGGEQVRVGMEACGHYPWFERLLEEMGIELWLGDAAKIRASVVRQQKTDRRDAMQLLQLLREERFPRIWVPSLEERDVRQLLVHRHKQVQARTRVKNQLQALALSQGMQKQRKLWTQAGRAELEQLPLLTYAAERRQRLLRSLDSMDAEIGELTRRVEQEAGQRAAAVRLMTHPGVGPVTGLAMVLTLGPAERFASAKQVGSYLGLIPREQSSGGKQRLGRISKQGSSLLRFLLVEAGQTAVRYDPLLKRFYGRLALRNNRAVAKVAVARKLATRLYLMLREQWTYPQLCQAVMQVSPSHSVARQRQPGR

SEQ ID NO: 372390 - protein, 433 aa, unidentified
MQEAEDEPLFADCAAGIDIAKAGIEVTIRVPSDTRRGGRQQETRSFRTTRKDLLGLADWLRCWGVTKIGMESTGDYWKPVYFLLESEGLDCVLYHAAQVKALPGRPKTDKLDSAWLAKITERGALPGSFVPPEEIRRLRTHTRYRRHLTQARTAEKQRVEKLLEDAHLKLSSVISDIHGVSGRAMLEAIAAGERNPKPLAQLARGTMRGKIGRLEEALDCAFVTEEHAAVLSMMLAAIDYYTARIEELTAKIEVLCQPYLHQIAQLDAVPGTGVVTAQDVIAEIGADMTVFPTAAHLVSWAKWCPQVAQSGGKRKGANASGRGNRYLGAALGEAAVSAGRTQSFPGVKYRRLVKRMPKKKALVATGNSLLTIYHALLSDPQAAYTDLGTDYYEQRANIRRQVRNHVRAIQRHGYKVTIEPIDPATGELEAAAS

SEQ ID NO: 372391 - protein, 339 aa, unidentified
MQLYAGLDLHSRNTYIGIMDKEFKRVFGKRVSNNLSLIIKTLEPFQDQLQGIVVESTFNWYWLIDGLMDAGYQGLHLANPSAMKQYEGIKHTDDQHDAFFLAQMLILGILPQGYIYPKEDRPVRDLARKRLFLVRHKTSHILSLQSLISRCCGQRVSANDIRKFTVEDLQQLLAEEHIVLSAQANLDTIVFLKQQIQRLEKAIQKKVKLNKAFQQLLTVPGIGLILAMTIMLEVGDIGRFPEVGNFASYCRCVSSKRLSDGKSKGHGNRKNGNRYLSWAFTEAAHLGRRYNERFRSYYNRKLAQANTSLATKALSNKLARICYYIMRDQVPFRENPLSQ

SEQ ID NO: 372392 - protein, 415 aa, unidentified
MQKHNNSGKKSEPTSKPTKSRGPVQRDTKEVLAELVEKLKEKLDPKKVAATSGEKDERGELRPNLDRLTVGVDLGDQWSHYCILGLEGETLAEGQLRTTEEDIAEFFQALNAARVVIEVGTHSAWVQEVISGCGHEVLVANPRLMDGSKRRKRKNDRIDANKLARLGRVDPESLYPIQHRSREVRQDLVMLRARDALVAARTEIINTTRGLVKSMGTRLPKCSSRSFAQKGEEAVAVEMREALLPLVRLAATLSADIKEYDKKIEELGREKYGHTALLRQVKGVGPITALAYVLTLENPQRFVKSRDVGPYLGLVPKQEDSGESQPQLGISKAGDTMVRKLLVGSAHYILGPFGPDTDLRRYGLRLCERGGKNAKKRAAVAVARKLAVLLHRLWVSGEVYEPLHNAMSAPIAAAA

SEQ ID NO: 372393 - protein, 337 aa, unidentified
MEVYAGLDLHSTNTYVAMIDEENKVLYKQRHRNEVPAILSALDPFKKDIQGVVVESTYNWYWLVDGLMDAGYRVHLANVSAIKQYEGLKQVDDKRSSLWLANLLRLNILPTGYIYPKEERPTRDLLRKRLQFVRQRTSQVLSVKNILARNLGIRMKTYDIKKLKVSEVKALFPDKEMQVAVTSSVGLIQHFQEEIDRIETIITKKFKIRKEFARLLTVPGIGQILGLTIMLEVGHIDRFPTVGDYSSYCRCIRSIRTSNGKVTGYGNSRNGNKYLSWAYIEAAHFARRYHEPIRSFYERKMARTNKIVAIKAVSHKLARASYYVMRDGVEYHQTHFT

SEQ ID NO: 372394 - protein, 412 aa, unidentified
MLYIGVDIHKRQHEVAIVSENGTLRGKSFTIKNSHEGLRLLFQRIERVNPDREPLTFALEATGPYWLAIHSHLSDGGHRVVVLNPLRSSAYRKLNIRPAKTDRIDAWCIAEMVRLGLDEETPLLSAQILGLRQLTRQRVDLTTYLANQKRRIHSLLEQVFPEFEDLFQPMFGKTAMALLGTYPTPSEIAALGLEELTAFVQIQSNYHLGEAKAREILQAAQSSFGVTFGQEAYSIQIRLLVEQITFLKQQVKALGRDIAAVLDSIPQYLTTIPGVGPVLAAAILSEIGDVRRFKNAESLVAYTGIDPPVFQSGQFTASTAHISKRGSPFLRRVIWQAAVAATRTDPALKALHQRKMAEGKHYQVAIGAVANKLIHIIYAVLRDNKPYYCVLPAKPVSAQEQLPPGTAVPSIA

SEQ ID NO: 372395 - protein, 377 aa, unidentified
MHSENIAAYIGLDVHKETLAVAIAAPERLGEVRYYGTINNEAQAVRRLFQKLQGLYGNILSCYEAGPCGFGLYHQLTAMNIKFQVIAPSRIPKSPTDRIKNDHRDAISLARLLRAGELTPVWIPDLTHEAMRDLIRARAAAKRDSRVARQRILSMLLRTDKRYAGKHWTGKHRTWLANQSFSQPSQQIAFQHYCQSLEQIEDRILQLDQEISRLLPEWSLCNLVCQLQALKGVGQLIAITLVAELGDFSRFSNPKQLMAFLGLVPGEYSSGNSIRPRGITKVGNSELRRLLYEAAWSYRTPAKVGAWLIYYRPDSVTQYSKDIAWKAQQRLCSRYRTLTAKGKKSQVAITAVARELTGFMWDIALAAQSSFSQQKQN

SEQ ID NO: 372396 - protein, 451 aa, unidentified
MSRRTPQESDASLHIVHPHAAAIDVHSDNHVACVGPGQVRTFGAYSADLDALADWFRAAGVTSVVLESTGVYWIALFELLEGRGFEVFLIEPSQASHCGARPKTDRLDCQWLQRLHTYGLLRPSFRPPDAVLALRGYWRQRQMLVRYASHHVQHMQKALEQMNVKLTEVVSSITGVTGTAILAAILAGERDPKRLAALRHERCARSEEEIARALEGTWRPEHLFALKQAFDLYGYLHRQIEECDRQIAAELDRLPDRSKGGPIAPKPRRRGRKPNDVRFDAATRLTAALGVDLTAIEGIDAATALVILAEIGPDVERFPSEKHFASWLGLCPRTDRSNKTERRRTPRKGKNRVAQALRMAAQSVGRTQTALGSFYRRIKSRIGGRSAITATAHKLSRLVYRMLKFGTEYVTQSLTEYETQVRAKLERSLRRKAESLGYELVPRTAVPPLPS

SEQ ID NO: 372397 - protein, 346 aa, unidentified
MKQIIRIGMDTSKHIFQLHGVDAAEQPVLRKKLSRKQMLEFFAELPPTVIGIEACGAAHYWARELRKLGHEVKLMAPQLVKPYVARNKNDGRDAEALCEAMSRPRMRFVPVKTAEQQAALMLTGIRDGLIARRTQLSNAIRGYAAEFGRIAAKGLDKLEALLAQIAQDETLPALAREQLAVLGREYGRLQVDLKEIDAKLMAWHRADAVGRRLAQIPSVGPIIATMLVMKAPDPHAFRSGRHFAAWLGLTPKDHSTAGKTRLGKITRAGDEDLRRLLVVGATAVIQQARRGRGHHSAWLLALLKRKSAKLAAVALANKVARIAWKLMVTGQSYDAARMKAEPALAA

SEQ ID NO: 372398 - protein, 318 aa, unidentified
MPQKTRFVGLDVAKSKVDACIRSEGLRMSAPSTPEGRAELVAWVRANRVGRAVMEASGGYERGWAEALRAAGVEVRIVDPKRVRHFAKAAGRLAKNDPIDADTIARFAEAFPDGEAQPRDPARDEIDRLVAARTALKDVEDRIKQQGEHGPPPIVAKALAAIAKTTRAELRRLEAAIAAKIKANPGFARRAEIVTSVPGLAGQTAAGVIAWLPELGRIRNEAAAALIGAAPYDDDSGGRKGQRHIKGGRRKLRNLLFMPVMGAATQHNPVLKAYYQRLRARGKEAKVALIACMRKLIVILNTMLARDETWDPPARAAA

SEQ ID NO: 372399 - protein, 392 aa, unidentified
MIYIGIDVAKDKHDCFITHSDGEVLSKSFTISNNRKGFDSLFQKIISVSNDLSKVKVGLEATGHYSYNLLGFLLDKGLPTYVINPLHTNLYRKSLSLRKTKTDQVDSRTIATMMMSDMNLKPYSDTSYHNEELKSLTRYRFDKVKERAKLKSSVSRLVCILFPELEKLVPTLHMASVYDLLSEFPGADAVAAAHLTRLSNLLSESSKGRYGKDTAVMFREAAKSSIGSLMPAKSLELKHTIKLIHELTIEIDEIETAIKRIMDEEIQSPILTIPGISYRMGAMIIAEIGDFSRFDSADKILAYAGMSPSTYQSGQLNNCHSHMEKRGPRYLRYALYNATKYVCHWDESFGTYLEKKRSEGKHYNVALSHAAKKLVRLIFAMEKSRRAYIPVP

SEQ ID NO: 372400 - protein, 347 aa, unidentified
MSQYIGIDLHKAKSFVTRLDHRGRVLEQRELTHATGELQQYLERLPAETRIAVEATGNWMWLYELIEERHPDLVLAHPLKTKAIASARIKTDKIDATTLAQLLRADLVPAAYIPPRDVRDTREVLRYRASLVRLRTQVKNKIAAVVSKTGLQTPTRMACGVKSRRFLATVSVRSCYRLGLDGYLRTLEHLTTEIRQVSKTIETQAAAEPQARLLQTMPGIGAYSALLILSEIGDIQRFPDSRHLCSYAGLGPSVHASGGKTRLGRLTKQGSSWLRWILVELSVHAINAAPQFRSLYYRVAKKHGRNVGRVAVARAMLKTIYAMLKKQEAFRPMAKGSTGQRPGVMVG

SEQ ID NO: 372401 - protein, 356 aa, unidentified
MVARSKHHRGTTMNNYAALDVSLEASAVCVVDEHGAVVAETKLASEPEALVAFFQAQPEPPCRIGLEAGPLSQWLYAGLVAAGLPAVLMETRQVSDAFRSNPVKTDRRDARGLAQLIRMGWFKPVYCKSAAAQESRALLAARRQLRAKRHDIEMSTRGLLRGFGLKVGKTTARNFARRVRELVEDRPTLIEAVQALLSARETLAREFAGLDRRVRQIARADRRTRLLMSAPGVGAVVALTYMSAIDDPRRIARSRSAGAYFGLTQRTYQSGETDRTGRISKCGDREVRVALYEAANVILTRPIKGGALKSWAMRLAKRAGMRKAKVALARKLAVVLHRMCRDGTPFDMTKGAAMAS

SEQ ID NO: 372402 - protein, 342 aa, unidentified
MLWGKRRDSCKIVASINLQLTELLMQKPHDNSKASPAAFMQDNTLIAVIELSLSNWLVAGLIPGVSREPLKKLEPNPEDLLKLLHGWRDEAIKAGRPITRIAVAYETGRDSFWLARWLRERGIDAHVIHATSVTVSREHRRAKTDRLDTAMLKRGFLGWLRGERGHCTVAIVPTMEEEDAKRPHREREGLVHEQTRAVNRMKSALIQFGVRNFNPKLRKASVKLETVRTPEGKSLPPNTIAALRRDMERLKIIKEQIKAIEQARLQQFEQKPEALANRMVYLLVRIYGLGLETADLLAHELLSRTLRDRKAVARYAGLTGSPDESGSKRREKGLSRSGNAGT

SEQ ID NO: 372403 - protein, 320 aa, unidentified
MLSFCGIDVSKDRLDVMVLPDEYSSSVPNDPAGWAILVEQLRGFSITAIGIEASGGYERGAVRSLQAAGMPVRQVNPFKLRQFAKASGVLAKNDPLDARMIASFVGIMPTRPAQRTTPAAEQLVEMLAVRRQLSAEKTAAENASRLLENLMLQRLSRRRIARLAADIELLDKRLVEIVATDATLAHRYRLLTSMPGVGPVLACTLIALLPELGGMSRKQVAALVGVAPYAFESGALKGRRCIWGGRANVRQVLYMAAMSASNWNPVLKLFHDRLKGAGKLPKVVIVAVMRKMITTLNAMVRDDIAWADRLSGRHSVTTAR

SEQ ID NO: 372404 - protein, 346 aa, unidentified
MNANAKVVGLDIAKSVFVAVGQERDGRRVWHRNAKRGEVLRMFREMPAMAVGIEACAGSHYWARELIALGHDVKLIAAQHTRAFVTGNKNDTNDAAAIAEARSRSSTKYVPINTPAQQDLQMLHRARSALMSERVAMINRIRAFATEYGQVFDKGVARFRDGLMTWLADPENGLSGSALMTFRELKEQLDDKEQRILAYERRLNQAAKDELAQRLMEVPGVGPLTATAVLATIADPRHFRSGRDFAANLGLVPREHSSGGKQRLYGITHRGDSYLRTLLIHGARSALRCAGNKTDRQLQWASSLAVRRNFNVAAVALANKMARVIWAILAHGRSYVPVWSNTTRPA

SEQ ID NO: 372405 - protein, 475 aa, unidentified
MNIKGTKKKNQVVTANIFEQQELLKKAEVIKENLTASTWRELETNGKFDKNKKLSFISDDMLILGCDVGSETHYVRAIDTRGRELSKSAYSFNNDYEGFQSAKEWAVKIAAEHDKSQIVLGLEPTGHYWFCLATWMIANGISVVQVNPYAVKQTKEVEDNSQLKDDRKDPKLIANLVKDGNFGMPYLPEKIYAELRRLSMFRDQLNEDRIRTINRMHREMKIYFPEYKDALGKVDGAFSLELLKEAPFPDELTALGEEGIRQIWHAAKLRGRGYSRAREILQYAKASVGIKDGSIASKAAVKWFVQKIMELDVELAVIENQINQKCQEIPHTGNVLEISGIGENTLSGILAEMGDISRFDDVKEIQKLSGLGLVACSLGKHKGETKISHRGRKRLRYWLFQAAKSAVAHAEEFKELHMYYTTRADNPLKKMQSLIVIACKLLRIIYTILNTGTKYAPKKMLMDIRRPENKEAIVA

SEQ ID NO: 372406 - protein, 384 aa, unidentified
MTIQAQFVPRNYDVFAGLDVDKKSMAVIFTDHEQLMQSLRLPYSAAQLLNYVRKRFPGQRLAFVYEAGPTGFGLYDELVAAGHPCLVVAPPMVPTAPGARVKTNRLDARKLSTALRGGELKSIHVPSPKYRELRHLVQLRDTHVQQLTATKCRIKALLLYEGIAFPADEGKEKQWSQRVLDELLALPCSEAVRFKLDQLIGTLHFNFNAAAAAQKQIRHYCKKDQELRQSIAWLKSLPGIGEIVATHLVARLGDPVLITNVRQIAGFLGLASSEHSTGDKQNRGEITRAGDSRLRNKLIQSAWVTIRRDPELREFYQRVYQRHPKKVAARKAIVAVTRKLTTRIYAVLKEQRPFVLREVSTAPLTTEETAGHRERLDGQQNEQQ

SEQ ID NO: 372407 - protein, 349 aa, unidentified
MQVATAGLDLAKNIFQVHGIAPEGNIVFNRPHRRPQVLSFFERLEPCLIGIEAFGTSHCRARELTRLGHDVRLMPPMHVKPYVKRGKSDAIDAAAICEAVTRPSMRFVEVKSTDQRALLSLHRARDLIVRQRTQLINALRSLLAEFGVCIARGLARVISFAEGVVEGTDLGLPSVAQDVIRNLSQQLRTLHSQVRWQEAGGRRQEAGLRLEAKRDARVQLLQTIPGAVAVTASAIAAAIGGGPQFRNGREFAAWLGLTPANKSSGGKERLGRITKMGGQYLRQLLVVGMTSLVRQTRSHPNRASKWPTALLERKPARVAAVAMTNKTARILEPPRVCRRLHLLIRMKPQ

SEQ ID NO: 372408 - protein, 361 aa, unidentified
MAQAKTWVAFDVHTSGVVAAVLQRESGELRVQRLPAGSEAVTAFALGLPGPVRATYEAGPTGFVLARRLEAAGIECLVCAPGLIPRGATDRVKTDRRDAERLVRLLVAGELHRVVVPSVEEEALRDLVRAREDLRGDLMRARHRLAKLLLRHEVRFDGPQANWTQAHLGWLAGVRLDQPASQRALEDYRGAVAALMIRREQLEAEIARALPLSPWAQTARRLMCLRGIDTLTAAGLCAEIGHFDRYRHPAQVMSYLGVTPSERSSGERRRQGPITKSGSQHARRLLVEAAWHYRRPPRVAGSLARRQRDGEPEVIAISWKAQRRLHHVWSRMEQRNKRRTIIAVAAARELAGFCWAVATTD

SEQ ID NO: 372409 - protein, 368 aa, unidentified
MKQVTTYVGIDAHKKDLFVAMLNGTESSPVTWQLANEPKAVRRLVRKLEREAPGPVRVFYEAGPCGYALQRQVTTSRVSCDVIAPALIPRKPGERVKTNRRDARKLVELGRAGLLTAVQPPTPEDEAVRDLARARDDAREDLQRCRHRLGKLLLRRGLHYAGRNWTRGHRQWIDSLTWAHAAERAVVDDYLLAIDHTEARLLELDARLAEIAEREPYREPVGWLRCFRGIDTLTAMLILAELHDFRRFASAPALMAYLGLVPGEDSSGEKHRRGRITRTGNALVRRLLVETAWHYQHRPSVGVALTRRRKGQPGRVIAIADKAQQRLCRRFRKLAAEHKPAPKIAVAIARELAGFLWAALQPVAEPAK

SEQ ID NO: 372410 - protein, 312 aa, unidentified
MDLLVVGIDVSKDRLDVTVRPTGESVTFRRTGGGIDDLIARLKSLAPKMIAIEATGGFETVVVAGLAGAGLPVVVVNPAQVRAFAQALGKRAKTDPIDSAVIAHFAEATKPKLRQMADETTRLLAHLVARRRQIVEMIAAEGQRARRMNDKRLTKSVARLRKALEKELSELDALIGDQIRGSAVWAEKEDLLASVPGIGKTIARTLIAELPELGSLDRRKIAALVGLAPWTRQSGQWRGKSFIGGGRKSVRNSLFVGAMVAARFNPPLKSFRDKLVAAGKSKLVALVAVARKLTTILNAILRDRRPWQPIPA

SEQ ID NO: 372411 - protein, 406 aa, unidentified
MTAATSFKVIIGLDVGKTGHHACALSADGSRRYFDKPLPQDESKLRDLFTSLQAHGPVLLVVDQPNTIGALPVAVARDCSVAVAYLPGLAMRKAAALHPGTAKTDKRDAFIIAETARTTPATLRKDDHNDEALSTLKALAGFDEDITRDCSRTINRLRSALLQIHPALERVFAGGTITRSAVLDLLEHYGGPTKLRAAGKSHVTAWINRRCRGDHTDLVAAIFHALDQQTVVVPGTSAIERTIPLLASNIKMFKKQRDLIAAEVNEVVDALPLYEILTSIPGVGVGIATSILMAVGDCSDFPDATHLASYAGIAPTTRRSGTSIRGEHPSRAGNKRLKNALFRSAWISTNCHEASRDYYQRKRREGKRHNAAVMCLARRRCNMIYAMLTRKEFFRDEPRTPILAAA

SEQ ID NO: 372412 - protein, 420 aa, unidentified
MDLLVERCAGIDIGKAEVVACVRTPGRDGKGRVKQTRTFTAFTDDLDAMVDWFAAEGVTSVVMEATGSYWRPVWYLLEERTFELMLVNVRHVKILPGRKSDVLDAEWLAELLEHGLLRGSFVPPQVIRELRDLTRYRKRLTQTRTSEFQRIEKTLEDAGIKLDVVASDILGVSGRLMLKALVAGERDAVVLADMAKGVLRKKIPNLRQALNGRFREHHALLIGMTLEHAEYIEAAIAKLDIQVDDLFTANTSEAGVPFVQARDRLDTIPGVAQRAAESIIAEIGVDMSRFPTAGHLASWAGMAPGNNITGGKRRSGKTTKGDKWLGEILNQCAWAAARQRDSYLSAQFWRLARRIGKKKAAVAVGHSILVISWHLLTDNCDYDDLGGDWFARRTDTDKRRDFLIRQLHDLGYGVALTKVA

SEQ ID NO: 372413 - protein, 424 aa, unidentified
MPYRIAGVDVHKRMLAVVVSDVEVDGEYEFERRQFGSSPVQLRWLAAWLLEQQVEEVVMESTAQYWKPVWGALERYWKPICQKGEGARPMSGTLHLAQAQSNRGPQGRKKDFPDAERLVKRLVANELTLSFVPDAEQRLWRTVMRRKYQLTRNRVQLRNQLEGLLEEAHIKLSSLVSDLLGASARRMLKALAEGETIPATLAALANRKLRATQEQLRDALGACVELNPVYRRLLKMALEELQLIEEQIGQLDQEMATLLSHHQDAVKRLAEVPGLGVDSAQQIIAEVGATAATFPSQGNLSSWVGACPGDDESAGVNHSHRSPKGNRHMRRILNQTANAAVKAKGTIFEIVYRRYVPRMGHNQAIGVIAHRHCRLIWLILHQGVRYEERGAVVSKRSKQQRTARMIRELRRLGYRVEPATSQTG

SEQ ID NO: 372414 - protein, 343 aa, unidentified
MQAITTIGLDIAKSVFQVHGVAADGQVVIRRQLKRRYVLAFFQKLSSCLIGIEACASSHHWSRELKALGHTVRLMPPAYVKPYVKRQKNDAADAEAICEAVTRANMRFVATKTPEQQSCLMLHRTRHLFIRQQTSVINAIRAHLAEFGIVAPVGRNGVEELLDVVADPSDKRVPEIARACLFALGAQLRRLKEHILEFDRRIMAWHRANETSKRLDEIPGVGPALATALVASVADPKAFRSGRNFSAWIGLVPKQHSSGGKDRLGSISKQGDRYLRSLLMVGALAVIRYAKIHGTKHRPWLTALLARRPAKVAAIALANKIARMAWAMMAKGERYKEPVALAA

SEQ ID NO: 372415 - protein, 348 aa, unidentified
MLADQLDFVVGVDPHRDSHALAIVHVVSGAVVFEANVAASSGGYADALKLAERHAAGRRAFAVEGTGSFGSGLTRFLTGQGERVLEVGRLRRERRSGGKTDALDAVRAARSVLTQQRPATPRAGGERQALQGLVAAREGAVNAKRAGLCQLRDLLITTPEPLRSELRPLTRARLLQRLAATRPGGGRDPELRGSMLALRSIARRLLQLTAEERELAHEIETITRKLAPQLLEQPGVGPHAAAQLVLSWSHQGRITSEAAFARLAGAAPIPASSGQTIRYRLDRSGDRKLNRALHMILVTRKRSHPATIAYIERRIQEGKTRREATRCLKRYLARNLYRLLEHGPPSAT

SEQ ID NO: 372416 - protein, 440 aa, unidentified
MKTKLRIINPNAGGIDIGAEKIFVCANDAGYKSFDTFTQDLHRAADYLKVNTIDSVAMEATGVYWLPVKDILEAEGIEVVLVRAGDANQLPGREKTDGEDCQWIRTLHQHGLLRPCFIPEEIIRELRTIIRLRQDHIEMAAAHIQHIQKAFTLMNLRLHQVISQIQGVSGRRIIEAILKGDRDAETLAILCDKQILHNKKEEVVKSLNGNYRSEYLFMLEQAYKAWSFYNQLIRECDKKIESWFIRSNENKPEVDSITPEKAIRHHKPEIENFHVKILRLTEGKDASQLPGLTDYSVIRIIAEVGLDLKEWKTEKNFVSWLGLAPKRYSSGKMRRRYKGKQQTAAGQIFKEAAQSILNSKYIGLGSFARKIKSRKGPQIAIKATARKLAVLYYHAITKGMEYVEKGIIEYNKQAKYTEEQRLRKQAYRLGFSLTEIVVHQ

SEQ ID NO: 372417 - protein, 400 aa, unidentified
MMTPDDIDVWVGLDVGKSAHHAHALDHDGNTLYDKPLKQDEKAIRTMLGKLSKHGRVLLVVDQPNTIGSLPLTVARNMGIAVAYLPGGAMRRTAQLLPGDAKTDRRDAHVIAWAALKLPETLRDAGPDDETLAALKLLAGHDEDLAHESTRHVNRLRSLLLQTHPAFERALKGERITRDATLALLERYGGPMGVKRAGIEDVKDWAKSNGLRAGRIIDDMFKAIGEQTVTVPGTLMAETIIPSIAHDIKTIRDRRREVGRQVEKLLEDHPLLTVLTSMPGIGVRTASNIPLGIGGDIANFKSAAHLAAYAGISPVTGQSGTSIKGERPSRRGNKRLKNALWQTAFVASTKHPPSVAYYKRKREQGKHHNAAVICLARRRCDVIYSMLKNGTLYQEPALVA

SEQ ID NO: 372418 - protein, 387 aa, unidentified
MQKPHDDSKACRTAFVQDNTLVAVIEMSLSSWLVAGMIPGVSRGPVKKIAPDAEDLLQLLYRWRDGAITAGKEIIRIAVAYETGRDSFWLARWLRERGIDAQVIHATSVAISREHRRAKTDRIDTAMLRRGFLGWLRGEPGHCSMAIVPTVTEEDAKRPCRDRESLVHERTSIVNRMKAMLIQFGVRNFNPVLRKASEKLDAVRTPEGIALPPNTVCALRRNMERLHLIKEQIKAIEQAQLQTLQRDPTEKMNAIIFLLVRIIGLGVETAQQLAHELLFRNLRDRKAVARYAGVTGSPDESGSKRREKGLSRSGNGRVRKILIQLSWRIVKFHPESDLVIWFKTRTQNARGSRKPMIVALARKLIIALWRYVNTGVVPEGFKLRPAS

SEQ ID NO: 372419 - protein, 357 aa, unidentified
MRRPKAKSNDKLIAGIDLHGNNLVIGVINQDGTRLMQRKLDCRLEQVEEFLRPLRPRLQSMAVESTFNWYWLVDGLRAQGYPIDLANPAKIEQYSGLKHADDKDDAFHLAELQRLNILPKAHVYDPELRPVRDLLRRRTNLVHQHTALLLSLQSLYARTTGQRLDLGQAKKMEPKQAPKLYEHPANQLIAQVQVEHIGALAKSIHRIEKAVLDCAREIPLYEKLLTLPGIGRILGMTITMEVGDISRFKTAGDFASYCRMVDAKRWSNGKCKADNNRKCGNQYLAWAFVEAANFARRYDESCRRWYDRKAAKAGKIIATKALGCKLAKAAWHVMAQQCNYDEQRMFPELANKPLKTS

SEQ ID NO: 372420 - protein, 451 aa, unidentified
MTRPKRSRPMRDISPTHLDAAAIDIGAKMHVAAVPPDRDADPVRTFGTFTGDLHRMADWFESCGVRTVAMESTGVYWIPAFEVLDQRGFEVVLVNARDAKHVPGRKTDVSDAQWLRQLHEYGLLRASFRPKGELATLRAYLRQRERLLDYAASHIQHMQKALMQMNVQLHHIVSDITGATGMRIIRGIVAGERDPAALAAHRDRRCHASAEEISAALAGNWREEHIFALGQALDLYDLYQAKVAESDARIEQVLARLRTASERPACRLPPARHRDNSANAPAFDARAILYSVLGIDLTQIHGLGPSLVLKLVGECGTDLSPWPDAKHFTSWLCLAPSNKISGGRVLSSRTRRSGSRAAALLRLAAVTVGRTQTALGAFYRRLSARIGKAKAVTATARKIAGLFYNAVRHGMVYADPGASYYEERYKARVLANLRRRATSLGFVLQEAPSSA

SEQ ID NO: 372421 - protein, 355 aa, unidentified
MGRFIGAYAQMTIIRVGVDIAKSVFHVHGVDRHDQVLWTGKYSRQKWLDALCKRVPAGAEVGIEACASVHHWARELQARGYHVKLIAAQFVKPYVKSNKNDRVDAAAICEAMSRPHMRFVSVKTVAQQDIQAMHRIREELVGQRTAKANQIRGLVGEYGIVAPVGIQELRKALPCWLEGADNGLTDAFRCLLNGLAEDLRHLDDRITSLDERISQSVQQDPIASKLMTLRGVGPMTASALAGALGNGEAFRKGRDFAASLGLTPRQHSTGGRDRLLGISKRGDSYLRKLLVHGARSVLCHVGEKDDNLSQWIKGLRARKHVNVSIVALANKTARMAWALVRHDMEYDPRLAAAAL

SEQ ID NO: 372422 - protein, 382 aa, unidentified
MATTRTTQDTTRTGTLYLAFELGQSRWKLGFSTGLGQKARERDINARHTNGVLAEIAAAKKRFKLPTDARVVTCYEAGRDGFWLHRFLTNNGVDNVVVDSASIEVNRRSRRAKTDRMDVRKLLSQLIRYDAGERKVWGVVHVPSPDEEDRRQLHRELQTAKRDRTRVTNRIKGLLANQGLMMDLKGDWLLRLDTRQLWDGSPVCPGLRARLAREWRKVEVLNEEIATLENERKEKVQAAADRSTRMVKQLFELKGIGLNSAWLYVMEFFGWRDFRNRRELASLAGLTPTPHQSGDLRRERGITKAGNRHVRSMAIEIAWCWVRFQPQSALARWFQRRFGGGGSRQRRVGIVAVARRLLIELWRYLETGALPDGAELKPQLRY

SEQ ID NO: 372423 - protein, 350 aa, unidentified
MQQFIGCDAHKRYSVFVAVDDRGNATSPVRIEHVREDYAHFLSQLPERSEIAVESTGHWYWLVDEMERAGHHVHLANPMEAKKRMGRTNKTDALDAKGLAILLRNGTLPESWIPPGSLRDQRELLRTRMALRDLRSSLKHRIHAAVDRYGLHTDSLTDLFGAKGREYLAARLAEFPPATARMVEVQLCALDELAAHIETIEQRIHAEIAPTAEVQLLRSVPGVGEILAPVIGLEIGDVNRFPRAENLASYAGLVPRVFSSGGHTRLGGISRFVNQYLKWAFVEAANCAVRLKAHRHSHVGCLYQRLLAKRGHGRAIVAVARHLAEASYWILRKQQPYRAPRQNNTSSRNG

SEQ ID NO: 372424 - protein, 346 aa, unidentified
MEHYVGLDVSLKLTAICIVDRTGKIVREGVVTSDPETIVAFIKSHAPHVARVGLETGATSTWLWTELNKMGLPVICIDARHAKAVLKMQINKSDRNDAVGIARIMQCGWYKEVRVKDLDSHATKALLVSRALLVKIKRDLENQIRGLLKNLGLVIGRAKMNVFATRAAELAEARPELAAAVEPLLKAREAVERQIADLDRKVLRLARNDAQVRRFMTAPGVGPITALCFLATVDDPTRFKRSRSVGAYVGLTTRRYASGEIDWTGRISKCGDAMLRSYLYEAANVLLTRIAKWSTLKAWGIRLAKRSGLRKAKVAVARKLAVILHRMWIEGTEFKWSSKEAANQPA

SEQ ID NO: 372425 - protein, 351 aa, unidentified
MSEYIAFDSHKRYTWVDREDHSTRKNSGHRLEHAPGAVRDYLSGCEPGTAVAVEATGNWYWIIDEIEQAGLQPRLVHPRKAKLMMGLTNKTDKLDAQGLNRLQRNGTLPTVWIPPGPLRDLRELTRTRLVLVAQRTRLKNRLSATLAKYGAPASEASDPYGKRGRAELEKHLERLPEQTRWVSGQLLAQLDFVSAQVRQLEQRLNELVEVTPEMQWLLTMPGVGVILAATIALEIGEVQRFPSAMHLASYAGTTPRVHASGGKVRYGPLRADVNRYLKWAFAEAANSVAVNHGRCPERHVSQLYRRLRQRKGHPKAIGAVARHLAEAAFHVLRQKQLYQDPSLGRGRTSQA

SEQ ID NO: 372426 - protein, 330 aa, unidentified
MLLHAIDLHKRVLQVASMRADGEEVLQEARIPASREALSAYLAQWPGSRHRVVVETTGSWYWVADELRERGAELKLAHATKLEAITSAKVKTDGVDTRSMLTVMRINMVPEAHVISPELREPRDLLRLRLRLVEKRTSTMNSIARLLEKYNRATVGALPELAQVQAGIHQEQIAMLNAQIRGLEKRIARELKMNETVARLRRIPGIGRVNAWTLYLEIDGIERFATDRNFFSYCRVVPGSDNSGGRTKNKRSRAGNRYLKLALSHAAVRAVQRYAEIGAAYRKKLRKKNQPLALAWVRKELARIVYYVMRDGIDYDNTFRGVALSRPKKA

SEQ ID NO: 372427 - protein, 350 aa, unidentified
MKTILAIDLGKRNSVFCRLESGSLKPEYFKAKTGPQTFHNIFAELDGGNSIVLFEVGSQTGWLCDMLRAMRIEFKVANVNHSAWKWSNNPNKSDKTDAHRLAMMYHHGFFPEVYVPVKPVRQKRSLIYHRQRIVKRLTQLKNGIRALLTTQAIDLPAGKVCWTKKHRRQLEQLARPFETIDDPCQLWRGQLHMELQQIDALQGCLDKTTGKLDELNKEKKSVELLETIPGIGPRTAEAIVAVIDDPARFKSCRQICNYVGFTPRRYQSGQMDRTGRISKRGNPLLRALLVQASWAALRYDWAKHIYKRVSRGSVKRRKIAIIAVARHLLMRCWAMLRDNKPWQYKKQMRA

SEQ ID NO: 372428 - protein, 349 aa, unidentified
MQDITTVGVDLAKEVFAVCVLDQTGAVVYSKVLKRDAFISWAEQLSPSSVAMEACGSAHHWGRWFAARGHTARLIAAEFVQPFRKSVAAKNDRNDAEAIAIASRQSTMRYVAIKSVDQQSILAWHRMREGWKEERTALLNRLRGLLGEFGIWPDRSSDKLIRALPGLSEDERLPLGVRAMVIETREHLTALHTRLAHCDQEIAHHAHTHPGAKRMKEIVGIGTLTASAAAATVVDARSFRCGRQFAAWLGLVPRQTSSGGKTRLGRISRRGDAYLRSLLVQGAKSALQAALRQPPEKTNRLQRWIVDVYGRVGYHKTLVAIANKHARMIWAMLAKDEGYDPSAWQRLSM

SEQ ID NO: 372429 - protein, 351 aa, unidentified
MLSQTTAVPKLFIGMDVHKKSWTVHFKTDLFDNKTMTMPADPLSIMRYVEKNFPDHEVSCCYEAGCCGYWIARELKEKGWKVKVVNPADVPRNNKQDWQKTDKIDSRNLCKHLSDGNLKGIYVPGEEQEQLRSLFRRRIHLSRHLRSIKNHIKSQLLYYGIKLPEQYDNPNWSREMKTWIGNIKWKYSSADETMKSRLRQLEFVWYEELHISNELRAYCRKHYRKDYYLYKSIPGIGGITAAAILSELGDIRRFNRLDELAAIVGLVPGIHQSSENKIDLGMTKRSNRQLRSLLVEASWVGVRTDMSLQQYYRKHAHKEPNKAIIKVAHKLLSRMRAVIISEIPYQTGLIK

SEQ ID NO: 372430 - protein, 415 aa, unidentified
MKNNAARKLKQVPKGYLVMGVAPHKKKHAAVAVTQDLTTRSKFKFNNSREGFEMVLERTRAELARTDSRGVIFAIETGGHYWRNLAYFLDERGIPFHFINQFTLKRRREGKDLNRRKNDYRDSEVAAQLLCTGEFTDTKLQHGVYAELRASHNAYRRLVKERTRITNLVKGLLDGIFPEFTQVFKDTCGLTALSVLSICPVPNIIAQMTEEEFVNDIRAKHQGRLMRRKVCALHHAAQVFIGIEAEAQSVSSEISFLVEKLCLIRRQIRSIDETLARLVDKTEEGKYLLSIIGLNYISVAGLLAELGSFSSYRSAKQLIKMAGSNPTESESGGKRSAHTPMSRKGRPRLRYCAWTAVIPMLRFNPDFRAWAKKLRERPVYANPLGGREIVGAALNRLLRLAFALGKNQAFYQVPQ

SEQ ID NO: 372431 - protein, 355 aa, unidentified
MDNRKYIGMDVHKEAIAIAVLNAAGKLVMESIIETKANTILEFLKGLRGELHLTFEEGTWASWLYDLLQPHVKRVVVCNPRRNALLKEGSKSDRVDARKLAELLYTKMLRPVYHRDNGMRAVKELGRSYVTISKDQARVMTRVKALYRSWGIACSGKQIYTVRHRASWLGKIKEPSVRRRAEFYYQQLDGLRSVRRQVRRELLLESGKHKASKLLRQIPSIGPIRAALLLALVQTPHRFRTKRQLWTYSGFGIETHDSAEYRYVAGQLERSKKPQQVRGLNRNYNHDLKNLFKSAATNAVAKSGPLQEFYLALVKRGIRPEMARLTVARKIAAITLAIWKKGVSFDAEHLKQQTA

SEQ ID NO: 372432 - protein, 373 aa, unidentified
MGAVARTQLRETPVKQNRTCVGLDVHARSVWACTVDDDSGEMCTARISPKTAEIVKWAKALPGVVEVAYEAGPTGFGLARALAAAGITCEVAAPSKLIRPTGDRVKTDARDAAHLARLLHLGQITAVTIPSASQEAARDLVRAREDCRGDLMTARHRVSKLLLRQGIVYSGGTTWNRDHERWLRAQRFDNPALQLTFEAAFDAMLACRDRRTRLDDAITAMAADSEFTPVVHRLGCIRGIATLTAFGLAVEVGDWHRLTGRSIGAYVGLVPCEYSSGDSRSQGGVTKTGNGHARRLLVEAAWHHRSPYRPSEQLRGRWGLACPAARARGQAANRRLHARWRSFDARKKRSVVANVAIARELAGWCWSLAVMPD

SEQ ID NO: 372433 - protein, 389 aa, unidentified
MYYVGIDISKYKHDCFILDQSGEIIVNDFVFANSMEGFESFKTLLQSIASPDEMKIGFEATGHYTSNLKRFLENAHYSFMESNPALISKFIHAQTLRKTKNDAIDSQSIARWLMTVDYKPYPKGFYHTYSLKSLTRLRDTVVRQRSLYMVKLTNILDHIFPEYKPFFKEHFSTTSIFILEKYGTPERISAIPDEDYETIRCISRGKFSYAKLISLKELAANTVGESNPIFETQLTSILTLYKTADAEVTRIESEIIPLVEELNPRMLTIPGIGPITAAVIASEYGDFNRFSSASQMLSFAGLEPGYYQSGTMEFHGKMIKRGSAQLRYVLMNCVVPLIRFDPIFASYYHKKRLEGKPHRVALSHTAKKLVRVIYTLETQGIDYNASKLR

SEQ ID NO: 372434 - protein, 350 aa, unidentified
MTRHYIGLDVHCQFTEFAVVSSCGRVTKRGRCATTIPALVEVIESVKRPRQVAFEEGPMAEWLYRSLLPHADGVTVCEPRRNRWIAQEGEKDDPLDAAKVAQLLRGGYLKAVHHPESEHRSILKGHVSLYHDRVRQLVRTANRIIAQFRSHGVVICEEDFATRAQREQLLRRLPCDRLLHKDLQLLWESYDLAALQVEDLRRSLEQLGRNCEVLKRFQAVPGIGAVWAATFYVYVDTPWRFRSKEALWKYMGIGLERRRSGNGPAQVRVPKCVNRRLKCMILSAAQAAIHDLDSPFAAQYMRGRNAGLPHHSARRNVARTLAATLWGMWKSGHQYHPEWVGRGCNGRSGQ

SEQ ID NO: 372435 - protein, 345 aa, unidentified
MTSIIYVGMDVHTTNYTLCCYSMEDDRFFAEVQVEPDAKNILKYLAHIEKQQSRDCRIVCGYEAGCLGYSLYHQLHAHGIDCVILAPTTMMTKPGKRIKTDRRDARLISKCLAFHTYSPVYIPTEVDDAVKEYIRMRDDANSALARVKQQIIAFCIRHGKIHDGKSYWTNKHLEWLSSLDLGNKILSEVLQEYLIRYYQLREQVDMYDMRINELAQAEPYRQKVEKLGCFRGIAAHTALSFCVEVGDFRRFATAQQFASYLGLVPGECSSGDKQQYTGITKAGNSHLRKLLVETAQVFGRSATKSRKSVALKERQARCDSLTVAYADKANARLKKNTLKLQCDQR

SEQ ID NO: 372436 - protein, 363 aa, unidentified
MKYQEVLRMPESIPYLSVGLDVGADLIWMPIMLPNGTLTGKPFKILHSDPDSRNLAVAKIKEAQETYSLESRCFLESTGIYHIPLLCFLRDKGFDCSVINPIITKNTTNMNVRKLHNDKFDSKKAAKVGLDVSLKTSIIPDDEVVDLRNLVRDYYYFKDLQSAIVLKLNAELKVSFPAYLGVFSKVTTQTSLKLLESYPLAADMLAAPKDEIVKIIRTTARFGEKYAMAKYNALCSAARDAAVFGRALPSNAVRIRLYIDSYREYQKHLDTILEALHESVGKLQGTAVYNRIRPLQSLRGVGFLSAVVLIAEMGSFGLFPSPKKLYAYFGLDPAVKQSGKFSFYCLFVPQTEIWATITSQLFS

SEQ ID NO: 372437 - protein, 340 aa, unidentified
MNLTALGIDLAKTSFSLVGMDQHGKVVLRKTLSRAKLLPFIAQCPTCLIGMEACSGAHYWAREFTKLGHKVGIIASKFIAPFRKGGKNDNNDAEAICEAVGRANIWFIPIKTAEQQAQLCVHRVRQGLVSERTALINQLRGLLSEFGIVMPKGRYPAQREIPLILEDANNGLPMLARQMISNLWDRIKIANEQVLFYDRELHKQAHHHPVAKRLLTIPGVGEQVASAVVASVPDPSLFKDSRQFAAWFGLVPRQHTTGGNVRLGRITKQGDRYLRMCLVHDARSVLANLKDKQDKISCWARELIARRGYLRAVVAMAARNARLIWTLMVKQEDYKVIAAN

SEQ ID NO: 372438 - protein, 361 aa, unidentified
MAGTMTWAGLDVHARSTHAAAIDSMSGELTRARFGPGVEAPVAWLAGLPGPVRACYEAGPTGFGLYRAAEAAGVEVAVIAPGKTPRGPADRVKTDRKDAELLARLLLAGSLTAVVVPPAELEAARDLMRAHDAARRDLMTARHRVSKLLLRHGRVYPESSTWTVRHRSWLARQSFEHVGTELAMLDALACVDGLTTRKAALAERLSRLAEDEQWWPTVARLRSFHGIDTLTAFALHLELGGNWHRFERAPQLAAWLGLTPSLTQSGESSRQGSITKTGSTLARRLLVEAAWQYARRPGEGLVLRRRQAGQPDHVIQIASRARRRLFRVHARMRARGKPGNVTVVACARELACFLWAAATAD

SEQ ID NO: 372439 - protein, 311 aa, unidentified
MSTTYLGLDIAKLTLDLSPHPAVRARQYPNEAAGHRRLITQLQRLPGPLHLVCEATGGYEHDLLAALHQAGITVTLLNPRVVRDLARAKGLLAKTDRIDATVLAEYGRLFAPPPTLPKSPAQQRLSALISRRKEVLQMRVQEQCRGEHQHDPFVVRQGRRLVRVLTAELARIDAELQALQAAHPELDQRVRRLTAIQGVGRGTAWALLAALPELGTLARGQAAALAGLAPHNRDSGPWRGQRHISHGRPLARRALYMAALVASRCNPVLRLLYQRLRAAGKPAKVALVALMRKLAELANLLLKNPAVQLAV

SEQ ID NO: 372440 - protein, 319 aa, unidentified
MSRTPIGVDIAKAKFDAAAYLNGKYKTKGFANTPAGITAFQAWLAAFTEPHVCLEATSIYGEALSERLADAGVQVSVVNPARVAAFAKTELARTKTDKGDAKLIARFCALHTPELWQPQPRSIRELRALVRRLENLLEMHQMEDNRLQTADLAVHDSLRTMMTALQVQIDLVRAQIVQHIDNDPDLRGRRDLLDTIPGLGKATIPVLLSVLAEPGRFASAKQCAAFAGLTPSERQSGKYRGQTRLSKTGDALLRKALYLPAMVAWRHNPVIRPFCERLKARGMNGKAIVCAAMRKLLHIAFGVLKSNRPFDPKIALVRD

SEQ ID NO: 372441 - protein, 343 aa, unidentified
MNVFIGLDVSLASTAICVLGPQGRIVEELQAESEPEALVRAIASLSYSIDAIGLEAGPLSQWLSKGMEEAGFDVVMMETRLVKAALKAMPIKTDRRDAQGIARLLQMGWYRPVHRKSVSSQEIRALLSARKSIQQAIINLELSMRGVLRNFGLKLGHVTRIRYEARVRELVEQNEILSASTEALLRARAQLRVELAELDAKIADLAKQDDVCRLMMTMPGVGRIVALTVKAAIDDPTRFVRSKDVGPWVGLTPRRTQSGEMDIVGQITRAGDRALRTALYQAAMILMHRGSPNWLQAWALRVAHRRGSKRALIALARRIGVVLHRMWRDGTPFRHAQSCPATV

SEQ ID NO: 372442 - protein, 315 aa, unidentified
MTTKSETYVGIDVSKDRLDLAVLEEKRIEQYTNTERGIKELVDEMKALKPALIVVEVTGGYERAVLKALFEAGLRVARVSGYRARQYARAKGLLAKTDPLDAMNLADYGKHVQPRVYEAKSEEGQYLAGKLARRRQLGEMVQAEKNRLRLAYGDIGPSIERVIKFLQGELKQLEEEIRAYLDANPVWLEQEQLLRSMKAVGPVTAATLLAELPELGKLDGKQIASLVGLAPINQDSGKRSRYRKTGKGRPSVRNVLYMAALTGLRYNPVIKKQYDGLVFRGKVKKVALTACMRKLLTILNAMVRDQKPFGYAAMS

SEQ ID NO: 372443 - protein, 389 aa, unidentified
MKIYVGIDIAKLNHFAAAISSDGEIILEPFKFTNDADGFQLLVSKLESFDKNSIIIGLESTAHYGDNLVRYLVAEFYQVCVLNPIKTCQMRKNTIRKTKTDKVDTFVIAKTLMMQDDLRFVSFYDLDMMDLKALGRFRQKTIKQRTRLKIQLTTYVDQVFPEIQYFFKSGLHQHAVYALLKEAPSPKEIASMHMTHLANLLKVNSHGHFTKEQAKELRVLAQKSVGANDSSISIQITQTIQQIELLDSQLEKIEAEMTDIMRFNDSVIMTIPGIGYINGGMILGEIGDIHRFSNPNKLLAFAGLDPSVYQSGNFQAKTTRMSKRGSRVLRYALVNAAWNVVRNNATFKAYYDAKRAEGRSHYNALGHCAGKLVRVIWKMLTDEVEFNLE

SEQ ID NO: 372444 - protein, 349 aa, unidentified
MGCWEWQTLVTNKEETSRRFYTQQHPFYCGIDLHARTMYLCILDQAGATLLHRNRPAPPEALLKAITPSRDQIVLAAACMFTWYWLADLCADHGIPFVLGHALSMQAIHGGTAKNDKIDAHKIAVLLRGGMLPHADVSPAEMRATRDLLRRRMPLARTRGALLAHVHHTNSQYTLPAMGKKIASKANRDGVAERFADPAVPKRMAVDLALITSDDALLRDVERTIVTTAKHHDAQTLSLLQTVPGIGKILSRVLLYDMHDIARFPRVQDFASYCRLVKCAKASAGKRAGTSGSQIGNAHLTWAFSEAAVLCLRDHPAAQKFLARLEHTHSKGKALTILAHKLARAVYDM

SEQ ID NO: 372445 - protein, 339 aa, unidentified
MNVIYLGIDLAKNVFQLCGLNQAGKPVYKKRTDRKTLLQTIANIPACLIGVEASTGAFYWQREFEKLGHKVKVISPQYVKPFVRGQKNDGNDAQAIAIALMQPTMQFVPPKSPEQQDIQALHSARQRIVNHRTATVCQIRGLLLDRGITIGSAVSRVRRAVPLILEDAENGLSVRMRRTIAELYDLFNDLGRRIGFFDKEIDAVFRQSEACQRIAKVKGIGPKTATAVVAAIGKGTEFKNGRHFAAWLGLVPRQHSSGDRQVLMNMTKKGDKHLRTLFIHGARAVVRVAANNNEGYLNQWVNQLKERRGFNKTTVAVANKNARIIWSILHNETEYRLAV

SEQ ID NO: 372446 - protein, 405 aa, unidentified
MCILSPDNKIFAQEKIYHDETSINRANALLQKAERLCFSKPVIVMESTSHYHLILFQFFSEHGYNVIVVNPLQSNSMKDFSIRKRKTDRVDAFKLAMMYRTKTLRPSQIPQTATRALRQLCRHRAELLNDVSSYKNRLTALLDQTFPGYDKVFSDVGGITSCAVLVRFPTPTILLVEEESELVEVIAAASKSGYSFAKKKAGLLISAAQKAQTLGIHSCADETLIVCTIQMLRTLSESALQIETAIDNLLAQIKELRNNVSLLQSIPGIGSHSAALLLGEIGDISLFKKPKQLAAYFGLDPTERQSGSFRGTKNKLSKRGSPYARAALHMGVVNSICKRGKDSAANPVLLSYYEKKCKNKPAKVAQAASMHKLVFIIFAVLRDQKPFELKTPEQHAVEQGFAKAA

SEQ ID NO: 372447 - protein, 342 aa, unidentified
MKYVGIDLHTNRFTCCYLFDEHGNKQTITFNLDKDGLNDFYSSIDKDTYVLVEATINTFAFVSLFKDFVKEVIVANTYQLKSVGIPGKKTDKIDAFKLAEKLKAQVVSGVQQIVPVIVPPKEIRDLRALFATYGTLRKEIGRTKNRIHSLLKENLFPFTKEYIFGKKTRKGIRVLSDDTVLSFQINLLMDTLEYLEGTFDTLVIQIKKAGAIFMSQIKVLTSMSGISVITALAVIADVFDVTRFKNSKHFASYLRSAPRVESSNEKTIIKSTNKAGRKLSIVLLSQSLNHFRDNNRTLCNWYEKAKVNKKKGVVRMALCRRVITEIYQKENVIFRDILSNAA

SEQ ID NO: 372448 - protein, 356 aa, unidentified
MFNNSTVFVGIDLGDKFSYIVILNKDGEVIEESRIPTTRNAFTRKFSSFQPSRIAMEVGPHSRWVSQTLKDFGHEVIVADARKLRLIYENPRKEDKVDAEYLARLARLDPKLLSPVYHRGQKAQAHLAVIRSRDILVRTRTKLICHVRSMVKSTGARLPSCSTTSFHKQVPEFIPHDLLPALTPILDHIATLTKQIYAYDRQIEKLCAESYPETKLMRPVSGVGSLTALAYILTLEDPRRFRKSREVGPCLGLVPKLDQSGEHDPQLHITKTGDSYLRRLLVHSAHYILGPFGEDSDLRRFGLKIAERGGKNAKKRAVVAVARKLSVLLHHLWVTGEVYEPFYSSRNSVEIQLESS

SEQ ID NO: 372449 - protein, 323 aa, unidentified
MQVVHPICCGIDVHQAQLTACLRRVDADGQVTQEVREFATTYDALLTLGTWLTEEQCPVAALESTGVYWRPVYHVLEGMVEVLVGNAQEMRRRPGHKTDKADARWIAELLAHGLIRPSFIPPPPIGALRDLTRTRVTLLQSRAQAKNRVIKVLEDTNIKLTSVVSDLFGRSGRRMLAALLAGERDPKALAALALGVLRRKQSQLELALTGQFTEHHAWLIQGALELIDLLDRQITDLDQHIGELMAPLAPQLEQLTSIPGVEATAARAILAEIGTEMRHFGSAGRLASWAGVCPGNDESAGKRRSGRTRKGNRYLRRVLVQCA

SEQ ID NO: 372450 - protein, 344 aa, unidentified
MLVKVTTLKHDKIMEIKDTIGIDISKLTFDVRIHSNQMADVFENSGKGFKKLVEWAYGNSPFPKDRILFIFEHTGLYSQALALFLAERNIPFALVPGMEIKKSLGMARGKNDRVDAARIALYGYRPRDEIEPSELPQKDIADLGRLLSLRDRLVKQRAGYKTSLKEQGRVLPRKGNKVLFETQERMVVYLSKQIKSIEKEMADIIGKNKQLGQLYQLATSVKGVGPQTAMFMIVYTNGFTKFKNWRKFASYCGIAPFPNSSGTSIRGRTKISHLANKKIKSLLDLCAKVAIRHNTEMKRYYDRRISEGKNKRSTINIIRNKILSRIFAVVQRKTPYVDFMKYAA

SEQ ID NO: 372451 - protein, 457 aa, unidentified
MAPRYKSKSRKSKSSTHPAPPILHPHAAGIDVGAREVYVAVPPGADPRPVRCFDTFTADLLAVRDWLQACGVDSIALESTGVYWIPLFQILEAAGLEVVLVNARHCKNLPGRKTDVQDCQWLQYLHSVGLLRPSFRPADEVCAVRSILRHRDSLVQGAARCVSHLHKSLTQMNIQLQHVISDLTGVTGLAILEALLAGERDAVTLARLKDHRIKATREVIAKSLQGDWREEHLFTLRQSYELWKTHQQLITACDRQIESMLQKFDTRAEKDAALAPAKTSHKKPQKNEPQFLAREECFRVLGVDLTAVPGFQTPTVLVLVCELGPGFAEKFATAKHFGSWLGLCPDNRITGGKIYSAKTRDVKSRVATALRLAARSLHRAQNYFGDLYRRWKARLGGPKAITAMAHKLARVLWHLLKYRQEFDWKVFAREEEKMKRKKVARLFHMAESLNYQLVPKQ

SEQ ID NO: 372452 - protein, 324 aa, unidentified
MEIIKQVFGIDVSMDSFVSKVGTIATDQQTEIGTLRDFKNTIQGFRPFYKFAQSKQIEGVPQYFLMEATGVYYEALAYFLKSKGAHVIVVLPNKAKYFAKTLTMKSKTDPIDAHMLTQMGLEKRLSEWEPPSELMKELKLLTREHLSLKELKTDAMNRIHAKTHSFKPGKDTVKRLRREITLYETLIKEVELSIRSLLQRDFKMWVKIQNILRVNGVGLMTIAKVLAETNAFALIRNGKQLTSYAGLDVVFNDSGKHQGKTRISRKGNKHLRQSVYMPAISAIKSNPKLKTYYDRMLEKGKPKKVGVIAVARKLLLLIYFLWIN

SEQ ID NO: 372453 - protein, 358 aa, unidentified
MAVIEGVCRIVGGVDTHKDLHVAAIVDEQDRIIGTRSFATTRQGYRQMLAWMRSFGELQRIGIESTGSYGAGLLRFMQQAKVTVLEVTTPDKQDRRRRGKNDDLDAQNAAHAAFAGQRTVTPRSRNGMIESLRVLTACRKTAVSARRVALQMIHNTIVCAPDGLRDQLRSLTRMQLVRTLASWRPDLTAYRDLDSAYRIGLKSLARRYLELHDEIADLDVMIAAIVDELAPNLVARNSIGHTGAAQLLLTAGDNPERLRSEASFASLCGVSPVPASSGKTVRHRLNRGGDRAANSALHIIAIGRLRTDQRTKDYVFRRLAEGHSKLDAIRALKRYLAREVFTLITQRRKEINATQIAA

SEQ ID NO: 372454 - protein, 411 aa, unidentified
MRIIRKRCLGLDLHKKQITGHLRVHRGSEAEPERIDIRFGTMPADLLRLREWVVEHQVMDVVMESTSVYWMHVYELLESVTMPAVVNAAHVKKVPGRKTDVCDAQWLSELHAHGLLRLSFVPPKEIRELRSITRYRTKLVAMRTAARNRTIKMIEIAGIKLSSVVCDSFGKTGRAILDALSEGAVEASTVVKLAKGSLRKKTVELHAALQAPLSENQRELLTMHLRAYDAIDAQIAETEIKLTERAKPYAAAIEKLDAVPGINPLAAITVLAETGVEMSVYRNAHHLTSLAGLAPGNSISADKRRRIAMPKGNRYLKRICVQIAWAGSRKNGSFLRSRFNRLSYRIGRNKAIVATARHVLIIVYLILAGDHPYKDLGSEFYEARNKERSIKRHMQRLEKLGFTVELKPTAT

SEQ ID NO: 372455 - protein, 346 aa, unidentified
MLYAGLDLSRQRLDVHVLDEEGRTLEVTAVHPDADALRTLATHVLLQGQEVTAAIESMTGARFVHDQLERWGWDVAIADAVKVKGLAPLAAKTDKIAAWVLAELARRDLVPAIWLPDPTIRAERERARFRLHLVHHRTSLKNRIHATLMTFGYSVPVSDLFGTQGREILGRLTLPEPWAGTLTTSMRMIDDLNVEIAAAEADLRGLGPDHPYIPLLLSVPGVGPLLAYTIASEIGDIARFATPKKLTGYTGLCPIVRQSGPKDRRGPLAKNGPKYLRWALIEAATHAARDVRYRDRYERTKHRLGRQRGAKVARVDIARRLSEAIWHVLTKNEPFAPAGPAITLVA

SEQ ID NO: 372456 - protein, 430 aa, unidentified
MRRKAYRSTEVKHVELELVLSRGPQGPVTVGLDVGKFVIYVVVRWSDGSFERPWRVENPSEIESLVRLLVALAASRKMTVAMESTGTYGDALRGKLAAAGLVLHRVGGKAASDYAEIFDGVPSQHDGKDAAVVAELAAIGKSRAWPCRQPSDADAAMAYWVDWLDAQQSIQKLWTGRLEALLARHWPECTRMIKLTSVSLLSALGHYGGPAGMADDPAAQAQMAKWGHGGLSKAKIELFVGSAARTVGLRQGPRDKERMQQYARLALAAYRECQQAREELAKLALENEVIQRQARAVGEATACVLWVALGDPRSYSSGAAYRKAMGLNLKERSSGRYQGHLKISKRGPSIVRRWMYFASMRAVQDYGRAWYEAKKAKDNDRGMGALIAVMRKLALATYVVGARDEMFDPARLFPGKRGKQRRAAEATTKS

SEQ ID NO: 372457 - protein, 347 aa, unidentified
MNNPSQDSRTTVFCGIDVSAATLAAAVIEQDQVTKQREFPNQPAGHKQLLLWLAKNQARVRVSLEATGIYSLDLALALDAAPQVEVAVLNPKLVNRFAQTLSRSKSDAADAVVLAQYSQRMPFIPWPAPSSSGLALRTAARHIHALVAQQTREQNRLHAVKASLTAPRAVVNDLAQALRSLACRIARMRKAAREIIRADAALNERFHLLVAMPGIADVSAIYLLAETALLSPELTARQWVAHSGLDPTHHNSGTSVHKRPRISRAGNRHLRRALYMPALAAVRWDPHMKAFYEALQQRHKTKLQALIAVARKILHAIYGIFKTRTPYDGRKLFPQLEIATELQSASR

SEQ ID NO: 372458 - protein, 339 aa, unidentified
MPLYSGIDLHSNNLTAAIMDETGKRILKKRLANDPELVLSMLEPYRTELVGIVVESTYNWYWLVDALMDHGYQVHLANPSAIQQYSGLKYLDDNHDAFWLANLLRLGTLKEGYIYPKEDRPLRDLLRKRFHLVKLRTSLIISLKNILSRNFNLQMRSSRIKEESIDTFISGLPTEDNVTLVVQTSKASIDFLTVQIDEVESAVLKQAKNKPFYVKLQELPGVGKILALTIQLETGPVDRFPKVGNYASYCRKVESRWWSNEKTKGRGNAKNGNKYLAWAFSEAAEHARRSDSASRKFYNRKLNQGNAAMAHNALAHKLARAAYYIMRDNVAFEEAKMFA

SEQ ID NO: 372459 - protein, 407 aa, unidentified
MPRDYIGVDWADTEHAIWVEDESGTQVAALTVPHTAAGLSEFGRWLYERQAQGIECWAAIERPEGRVVDFLLDHGVVVYPVNPKALDRARDRFRMSGTKSDPFDARVLATFLRTDHPHLRPLRPSSELAQELKLLTRDAQRLIRQQTRLLNQLTATLKEYYPRPLEVLGELTTPLARAFLTAYPSPDALAALSRAQWRRFARTHRLSEARTMALWTALQPPQLPVPAHVVRAKARLVRVLVDELSATVRAVEEYRQAVDDFFATLPAAEWARSLPGGKSGTTVPTLWAELGDAPDRWQSFAHVQAQAGAVPVTARSGKSHHVRFRFACNTHLRAATHTLAFLSLRQSEWARGYYKQYRARGHRHHEALRALGAKWLKIIFVMWMHHTPYDEQYHLANMARQHLRQAA

SEQ ID NO: 372460 - protein, 351 aa, unidentified
MIIIGCDFHTRFQKIAMVDTETGEITKRRLEHGNGDARAFYAALPGPARVGMEATMNAQWFERLLQEYHHELWVGDAAQIRAAAVRKQKTDDRDALHILDLLVRDKFPRIWIPSPENRDLRQMLRHRHKLVRIRTSVQNQLHALAMSQGLCRKAKLWTKAGREELERLQLDPWASRRRQELLQLFDQLNPQIDKLDKVVIQEAERRPAAVQLMTQQGVGPVTALAFVLTIGPVERFPTSKKLVSYLGLNPSENSSGGRQRLGAISKQGNSLMRHLLSEAAQTAVKFDPELRRDYLRLKFRRGISGVAIVAIARKLAVRLYWKLREAAQPNTAARMQGSPTSPMVEESPSRI

SEQ ID NO: 372461 - protein, 341 aa, unidentified
MNHKFTNKKYFIGVDISKDTLDVAVLNEDSYGSYQDLVVENNFSGFDKIQNRLAKQKIDLKDCMFCMEHTGTYGLLFFAWLDQMQIDYCVEAGTQIKKSIGMARGKNDRVDARRISDYAYTNRMKLKPFQLPSAIILQIKQLLTYRRQLIKIRTSLKNSLKSHNQYERVSGLKSISEQIKAQIKEYDIKVDHIEKQIIEVINTDEELKKNYKLAKSVRGIGPIITAFMIVTTNNFTAFENGRKYACYSGIAPFDNLSGTSIKGRSQVSNLANKRIKTLLTNGANSACVWDPEIRNYYKKKISEGKEHNLVINSIRCKLVNRVFAVIKRQSPYVNIYQQNFN

SEQ ID NO: 372462 - protein, 405 aa, unidentified
MSDIEQHESVEVFIGLDVGKGAHHAVALDRKGKRLLDSALPNDESKLRALIGKLKEHGQILLVVDQPATVGALPVAVAQAEGVWIAYLPGLAMRRIADLHAGESKTDARDAYIIAEAARSMPHTLRSMRLADNEVAELTMLCGFDEDLAGQITQTSNRIRGLLTQIHPALERAIGPHLDHAAMLDLLERYPSPAQLASISEKQLANRLVKLAPRMGKTWAAEIVQALSEQTVVVLGTQAATIVLPRLARQLAALRAQREEVAKEVERLVLAHPLHPVLTSMPGVGVRTAARLLIDVASRAFKSAAHLAAYAGLAPVTRRSGSSIRGELPSRRGNKPLKRAMFLSAFAALRDPVSRAYYTRKINQGKRHNQALIALARRRCDVLFAMLRDGTLYSPSRPEISLTTT

SEQ ID NO: 372463 - protein, 339 aa, unidentified
MNVTTIGIDLAKNNFSLHGVDSHGKLVFRKVLNRAKLLPFLAQQPPCLIGMEACSGAHYWGRELKKLGHQIGIMAPRFVAPYRKGGKNDGNDAEAICEAVGRPGMRFVPVKSDEQQAILSMHRVRQGLIKERTALINQLRGLLSEFGLIMPKGRYSAQHHIPDILEDAGNGLPLLARRLLHDTYQRLRVLNEQILAYDRELNHLVKDSEPAKQLMTVPGIGAMTATALLASVGDPKQFKNGRQFAAWLGLTPRQYTTGGKIRLGRITKKGDAYLRTLLIHGTRAVLSTVEDKQDKLSLWTKTLIERRGYKRAAVALAAKNARIVWAMMVRGEAYQLKSV

SEQ ID NO: 372464 - protein, 344 aa, unidentified
MEHYAGLDVSLELTSVCIVDAQGHIVRETKVPSDPEDLVRYFQSLKFPIARVGLEAGPLSQWIHAGLVAAGFEAVLLETRHVKAALSAMTVKTDRRDARGIAQLLRLGWYRSVHAKSASAQEVRALLTARKLIQGKLLDIESGIRGVLRGFGLKVGPISRGRFEARILDLVDGNAMLETVIGSMLSARTALQQEFTRLHRALLTLVRDDPVCRQLMSVPGVGAIVAITFKSGVDDPTRFRRSRDVGPHFGLTPRKYQSGELNVTGRITKVGDRMVRTALYEAASVMLTLTVRFSSLKAWGMAVAKRRGTRKARVALARKLGVILHRMWVDGTTFRWSNEEAAIV

SEQ ID NO: 372465 - protein, 413 aa, unidentified
MDVVYPCCCGLDVHKASITACVLWAEGGGRARKEKRRFGTFTADLLELTDWLRTCGVTHVAMEATGVYWKPVWNILDGSFAEVLLVNAQHIKAVPGRKTDQKDSEWIADLLQHGLLRGSVVPPQPTRELRDLTRYRVSLAQECNRIANRIQKVLEDANLKLASVASDALGASGRAMLRAIIGGEDNAATLAEMAKGLLRHKIPALREALTGRVTAHHRFMLRELLDDLDHAEAKMMTVEQEIDRRLRPFQDDVARLCTIPGVDRVTAWGLLSEIGFNMDQFPSAAHLASWAGMCPGNAESAGKRLSGKTRKGSAFLRRHLCQAGWAVSTKKHSYLSALFRRVARHRGTKRATMAVGHAILVIAFHLLKRKTTYMDLGPDYFDRRNADAVRRSLVKRLQNLGHSVTLAPAPVFS

SEQ ID NO: 372466 - protein, 344 aa, unidentified
MEHYAGLDVSLELTSVCIVDVQGGIVCEAKVASEPEALIGFLRARALPIVRVALEAGPLSQWLHAGLVHAGFDAVLLETRHVKAALSAMTVKTDRRDARGIAQLLRLGWYRSVHAKSASAQEVRALLTARKLIQAKLLDVECGIRGVLRGFGLKVGAISRGRFEARILELVDGNSTLEMVIGAMLAARTALAAEFKRLHRELLALVRDDPVCRQLMTVPGVGAVVAITFKSGVDDPTRFKRSRDVGSHFGLTPRKYQSGEIDVTGRITKVGDRMVRTALYEAASVMLTRTVRFSSLKAWGMAIAKRRGTKKARVALARKLGVVLHRMWVDGASFRWSNEEPAIA

SEQ ID NO: 372467 - protein, 331 aa, unidentified
MSNYSNAIGIDVSRDKIDVRDYKVENHKEYPNNESGFKQLLSKARKDHGNELKGIIICFEHTGLYSLPLSVFLSQKKIAYTMVSGLEIKKSLGMARGKNDKIDAYQIARYAYLRREEIKEFELPSEDILKLKGLLSLRERLVKHRASYLGHLKELKAFYQKGKNPLLFKTQQDMVKELSIQIKRIESELLEIIKNDPELKRLYSLVSSVKGVGLIVGVTLLVYTNGFTAFETWRKFATYAGIAPFSDESGTCRKKPMRVSHMANKRVKALLTNSATCSILHNPEMRIYYEKRISEGKSVMSTINVIRNKIVARVFAVVKRGTPYVDTLGYV

SEQ ID NO: 372468 - protein, 339 aa, unidentified
MKYTPIGVDIAKHLIQVHFINEYTGEVVDKQLRSKDFLAFFSNREPCLIGMEACGGSQYWARELEKLGHKVRLMQGRFVKAFVMGNKNDVMDARAIWMAVQQPGKAIAVKTEEQQSVLVLPRSRRQLVKFRTAQINALHGTLLEFGETIHKGRAAMDRELPAALERMKTKLPPYLITVLEDQYNRLSELDSLINGLEKQLNSVAPQNETCKRLMEIPGVGPLIATAAVATMGEASAFKSGREFAAYVGLVPKQTGSGGKVRLLGISKRGDTYLRTLFIHGARAAALLVKEPGPWITELKKRRPTSVAVVALANKLARTVWAIAAHDRKYDKNHVSIRPY

SEQ ID NO: 372469 - protein, 326 aa, unidentified
MTLSHLTDNTFVGIDVGGAGLDVAWHRGDSAHYANRPDAIATLVERLRTGPEVTRIVVEPTGGYEKALVKALRQAQLPVEIIHTMRFNAYRALVGVKAKSDTSDARLLAAYAAAPDEIRGRKAGHVELPQDTIREALSELASRRDQLKHMIHAETCRLGTVRMDELRQAITAHLEALRTEDKRVHRMMLELVRQRTDLRRDQRLLKTIKGIGVKSALSLLASVPELGRIDNKAAAALIGVAPFVRKSGTMIAPARIHGGRAAVRSVLYMAAVTASRHNPVLRPFYERLIAKGKPPKVALIAVLRRLVVFANAVLRSGQAWKGAAPT

SEQ ID NO: 372470 - protein, 343 aa, unidentified
MQIHSVGIDLGKTTFHLVALSAAGKVLLRKKFTQKQLIAFTANMQTNLIGMEACSGAHFLGRVLRDQGHDVKLIPAQFVKPFVKSNKNDFLDAEAIAEAVDRQNMRFVPIKTDDQLDLQGMHRVRDRLVARRTSVINQLRAFLLERGMVFAKTPFKLKQAMPEILENADANLTPRMRNLVSMLWSEWKDLEQQIVAMNGEVEQIASSDPACQRLRQIPGIGPLVATAIVAAIGNGAAFKKGREFSSWLGLVPRQHSTGGKARLFGISKRGNSYLRKLLVHGARSAVLIVKRERSPFGPWLDSLEQRAPVKVVITAAANKLARVAWAVLSSGEEYRAPTTATAA

SEQ ID NO: 372471 - protein, 387 aa, unidentified
MQVAERRSEALTALRVDLSAIFVSLELSRSKWLVTSLSPGAGERMSKFVVTGGDVPGLLACLAELQRKAKARTGSSFRIVSIQEAGLDGFWIHRILEREGIESYVVDPASIATSRRRRRAKTDKIDGEALVRALLAYKRGEPRVCAMLRVPTPEEEGRRRLVRERKALTNERVRHVNRVKGLLFGQGVSGYQPLNRDRRKRLEELVTGDGRPLPSALKAQISRELDRIELLIEQIKAVEKARDDMMVAAQTSSPAPALLLNLKGIGPQFAAVIWSEGLSRHFDNRRQVAAYAGLAPTPWQSGKVDRDQGVSKSGNPRLRTTLIQLAWLWLRHQPDSALTAWFKERVTQNGGRQKNATIVALARKLLVAMWKYVTAGVIIEGAVLTAD

SEQ ID NO: 372472 - protein, 322 aa, unidentified
MIKPSLGIDVSKLDLSLSLLIDNKHYQTKIDNNQHSFKSFEKWIKKHNIQHVKACMEATGSYGRSFAHYLYNNQHDVHIVNPLCINAFAKSKLSRHKTDKVDSKLIAEFAQQNDLPLYSPREKNLQVLQDLYRCLQNLKHQAKQVQNYLENKKHLANSVCKAYARLAKSISKETIAVEAEINTLIDKTEDIKNKVTHMQTIPGIGKLTAVAILAEAPCLDNFTNARELAAYAGLTPKHKTSGTSVRGRSTISKMGSSTVKKALYFPAIVAKKHNPIFVKLNQKLASKGKPTKLILIAIMRKLLHIIFGVVKHNKPFDPNFCS

SEQ ID NO: 372473 - protein, 382 aa, unidentified
MQPINTVNPTIYLAIELSASTWLIAARLPGSEKPHLHRIEGGDTAALFALISSLRARVARRLDAAIGVVCCFEAGRDGFWLHRLLTAHGVASYVLEPTSILINRRARRAKTDRLDAIGMLRVLAAYLRGDRQSCSMVRVPTPEEEDAKCIHRERENLVQEKLRIENRIEALLFTQGIRKRPSLRSWERDLAVLRTGDGREMPRHLRAELDRLRRRLVTILELIREVEAERDEVVTTNPEHQTSRKIVALCRIRGLGENFAGVLTREVFYRSFDNRRQIASYVGITPMPYQSGSMDRDRRISRAGNPRARTTMIQLAWLWLRYQPGSELAEWFRKRVGTLAGRTRRIAIVAMARKLLIALWRYVETGVLPAGAEIRPESVAAA

SEQ ID NO: 372474 - protein, 321 aa, unidentified
MTYVGIDVSKATFVVAYSSAKGSEAKTFKNTVKGIREFIQTISPKENHCVLEATGNYSMLLVYLLSKAGFVVSMENPLKIKNFARVMLSVVKTDEIDARLIALYGERMQPAPFKLRNDSILLLKQKRTVLRQLKKQLTANTNLEGSLKVLPFIDSKSKKVLEKTIKFLQKQIKEMEEELTSLAEIEYKKQMDLLTSIKGIGATLAAALIIATGGFTYFDNAKQLTRYLGLSPTYQQSGTSVNVKGHINRNGDAHLRSQLYIGAMASLRCNTECKACFDRLRSNGKPGKVAIIAVANKLIRQAFAVVTQEKPYVDGYKSVKP

SEQ ID NO: 372475 - protein, 343 aa, unidentified
MNVTTVGIDLAKNVFSVHGVDAHGKVVLKKTVSRGKLLECFANLPPAIIGMEACSGAHHWARALRSIGHDARIIAPRFVIPYRKSGKNDGNDAEAICEAVGRPAMRFVPVKSVEQQAVLCLHRIRSAVVAERTAQINQLRGLLSEFGLVMPRGRYPAQHHIPDILEDAENGLPGLVRRLLHDIYQRIQALNQQILAYDREIENLARHSESARRLMSLPAVGAVTATALVASIADPKQFDNGRQLAAWLGLVPRQYSTGGKTRLGRITKQGDKYLRTLLIHGTRAVLAALRDKQDRTSYWLRELIVRRGYKRAAVALAAKNARIIWAMLVRGEAYRITPAGQTA

SEQ ID NO: 372476 - protein, 366 aa, unidentified
MKKVSTAAANEIRNFSEQKLTIGLDLGDRSSWYCVLDATGEVVLEQRLSTTAKAMKEVFRAMARSRIALETGMHSPWVSRGLSELGHEVIVAHARNVRLIGESRKKDDRLDARTLARLARIDPQLLCPVKHRSARAQADLTVIRARAGLVRARTALINTARGLAKSYGERLRSCNPRNVNPEKASGLSPELQSALEPLLAAVESLSEQIREYNEGIEQLVQQSYPQVALLKQVKGVGTLIALTYLLTLEDPHRFRKSRDVGCYLGLQPGRRNSGQSEPQLHISKEGDPYLRTLLVQGAHHILGPFGADSDLRRWGLKLAERGGKNGKKRAVIATARKLAVLLHRLWVSGEVYEPLRNSSQLMPAAA

SEQ ID NO: 372477 - protein, 334 aa, unidentified
MENIALIGIDLGKNSFHIHCQDHRGKAVYRKKFTRPKLIELLATCPATTIAMEACGGSHFMARKLEELGHFPKLISPQFVRPFVKSNKNDFVDAEAICEAASRPSMRFVQPRTESQQAMRALHRVRESLVQDKVKTTNQMHAFLLEFGISVPRGAAVISRLSTLLEDSSLPLYLSQLLLKLQQHYHYLVEQIKDLESQLKRKLDEDEVGQRLLSIPCVGTLTASTISTEIGDGKQYASSCDFAAATGLVPRQYSTGGRTTLLGISKRGNKKIRTLLGQCARVFIQKLEHQSGKLADWVRELLCRKSNFVVTCALANKLARIAWALTARQQTYEA

SEQ ID NO: 372478 - protein, 370 aa, unidentified
MLDTTTFVGLDVHARSIKAVSLDVMTGEVRCATFGYDAGAVAEWVRSVDPKARCVYESGVTGFDLQKRLSGLGVDCVVGAVSKMIKPSADRRRKNDRNDAEFLARMLSVGNVVEVWVPDDECEAARDLTRALEDARDDLSRSKQRLSKFLLRHGLVFDERTPTGRRKGNWTRAHWSWIESIRFAEGADNDVLAYYVDAVRRAAEEKARLEGLVEAEARKPRWRRRVDSLRCLKGVDTATAADLVFEAGEFSRFRNARSFAAWVGLTPSEHSSGESDRRGAITKAGNKHLRKALVEAAWHYLTCSGRPKDPARGQDPDPGARRHAAKGVRRLVERREALLARGVHNNKANVATARELACWVWAVGLMAEEA

SEQ ID NO: 372479 - protein, 387 aa, unidentified
MPDVVIGMDPHKHSATIEIIDTRERVLEHGRFATTTTGYRAMLAAGRRYPRRRWAIEGCNGIGRHIAQRLVADGEKVVDVPSKLSAQVRVFATGQGRTTDPIDAHSVAVAALRSTGLREVAADDATVALRLLVDRRDSLGRTRTDLVNRLHVFLLDLIPGGAKKDLSARQARALLSGVEATDLVGCTRRQLAGELVEEIETIDAKIKAADRQLTQLVKISGSQVQALHGIGPSGAARLLGDIGDITRFASRGHFAAWNGTAPLDASSGQQRRHRLSRAGNRRINRVLHIMAVVQLRHDTEGRRYYDRRLAEGKTSMEAMRALKRRLSDVVYKQTLADATAAGAGPGGHPGATLTSSAASPIPTAGTSEQSPPGPASNHHRTNPAATP

SEQ ID NO: 372480 - protein, 337 aa, unidentified
MIVVGLDVHKHSLTAVAVDELGRVVAEHTGPVDAQVVAWACSFDSEPLFAVEDCRHVTRGLERTLLGAGERLVRVPPRLTAPQRRRGRVRGKSDRIDALAVARAALQEPQLAGPRAGEERLRELKLLVDHRDDLVSERRRCQQRLRWHLHERDPSLHIPLGALDRKIWLDRLGRQLARHEQTTQLRIARDLLGRCRTLTRQVGALDRELQARTETIAPRLLELAGCGPLSAAKLLCEIGPIERFRSDAQLARHAGVAPLDASSGKQQRHRLDRGGNRQLNCALHRIAITQGRVHAPARSYLERKQSEGKSRREAIRCLKRQLARTVYTTLKAESALT

SEQ ID NO: 372481 - protein, 362 aa, unidentified
MAQVRSWVGLDVHRASVVAATMDRDTGELRVRRLPGETREVVAFCVALPGPTRVAYEAGPTGFGLARALVAAGVQCVIAAPGKIERPSSDRVKTDQRDAERLLRLLMIDGLHAVRVPSSEEEALRDLVRAREDIRGDLMRARHRMSKLLLRHDVRFDGTAAAWTTHHRRWLGAVDLGDRGAQITLLDYLGAIDALLIRRDTLEHTIDELVPDSPWADTIARLRCLRGIDTLSAVGLCAEIGDWQRFPKAGHVMSYLGLVPSEDSTGQTRRQGSITKTGSGYGRRLLVEAAWHYRRAPAKGQALKRRQAGQPAHVIAISWQAQQRLHRTWRRLDTERGKRRTIVAVAVARELAGFCWAAANAD

SEQ ID NO: 372482 - protein, 385 aa, unidentified
MVYIGIDIAKFKHFASVVSSDGEVIVKPFPFENSRQGFMKLVEEIENFQDCLIGLESTGHYAENLIYFLYERGYQIGVINPIQTDALRDSNIRKTKTDKIDTKLIVQCLMLKKYSLVNSQDINIIKLRRLSRFKLETIQQQTRIKTQLTACLDIVFPELSSFFKGNLHLKVSYALLEKYSSAKAIAHCRIDGLTNLLYENSRGHYNQDKALQLKELAKQSIGLDNPAIELQIQCLIKQLRLYQKQIKDIDLSIMTLMDLLNSPILTIPGVGYTLGAMIISEIGDIKRFSNPSKLLAFAGLDPVVKQSGDFQASSMKISKRGSTYLRYAIYRVAFLIIYNNETFHNYYISKRAQGKTHRVALGHVCNKLVRVIFKILTDETPFNLS

SEQ ID NO: 372483 - protein, 310 aa, unidentified
MGTVNVAIEVGKHELHIALGSAGELFSEPNESRAVKRVARRLAELDCARVLIEGGSYQNMLVAALRAAELPVVIVNPRRVREFARSIGRLAKTDHLDARVLALYGERIEPPIRELPDEQTQGLRALWVRREQLIEMLVMEQNRLEHAPKALRHSLRAHIDYLRKEIKHADDDLDREVRDSALWDKYELLSSVPGVGRVLSAALLCDLPELGRLNRREIAALAGVAPFNHDSGSLHGTRAIQGGRPRLRRVLFVATLAAVRCNPVLKPFFQRLRAAGKPHKLALVAAMRRLLLILNAMLKSKSPWRPPCPA

SEQ ID NO: 372484 - protein, 407 aa, unidentified
MVVADVEVEDEYPSERRWYGSNPEQLQRLAEWLREQQVEEVVMESTAQYWKPVWGALERYWKPSCEKREGAGRMSGTLHLAQALSNRGRRGRKRDFRDAERLVKRLVSQELTLSFVPHAKQRLWRTVTRTKYQLRRNKVRLHNQLEALLEEARIKLSSLVSDLLGASARRMLQALAEGETDPAALAALADQRLRATSTQLRDALGACTELNPVYRRLVKMALEELQLIEQQIGQLDQQIASLLHQHQDAVQRLAEVPGLGVDSAQQIIAEVGAKAATFPSAKNLSSWVGACPGEEESAGVNYSPRSPKGNRHVRCLLNQAANAAVKRKGSIFEIVYRRLVPRLGHNKTIGAIAHRLCQLIWMILYKGVRYEERGPAVCEQSKRVRTVRMIQTLRKLGYRVELQAHPA

SEQ ID NO: 372485 - protein, 345 aa, unidentified
MKKDITIGMDLGDKKHQVCILDKTGKIITEEKVAGTRTAMASFFKRYCGAVVAMEAGTHSRWVSQMATAAGLEVLVGNARKLRMIWQSRQKSDTRDAVMLARIARMDPELLCPIRHRGEQVQMDLEIIRARDLLVRERARMINHVRGVVKNMGERLAASSAASFGHKAKIPEALNEALKPMLEMIHELTKKIHGYDLMIKETAANKYPETEQLRQVGGVGPLTALAYVLTLEEPERFAKSRMAGAYLGLVPRLDQSGQIDKQLRITKHGDGYLRRLLVGSAHYILGPFGPDCDLRTFGLKLMQRGGKNAKKRAVVAVARKLAVLLHALWRSGKQYEPKRINPLAA

SEQ ID NO: 372486 - protein, 339 aa, unidentified
MKYTPVGVDIAKHLIQVHFIDEHTGEVVDNQLRSKDFLTFFSNREPCLIGMEACGGSQHWARELTKLGHQVKLMQGRLVKAFVMGNKNDVMDARAIWMAVQPPGKAIAVKTEEQQSILTLHRVRRQLVKFRTAQINALHGTFLEFGETLHKGRASLAKELPQAIERLKVRLPIYLTNLLEKQYQQLAELDSQIDDIERQLMAIARQNEVCRRVMDIPGVGPLIATAAVAIMGDTSAFKSGREFSAYVGLVPKQTGTGGKVRLLGISKRGDAYLRTLFIHGARAATLVAKEPGKWITDLKARRPTAVAIVAMANKLARMVWAIAAHDRKYDKNYVSIRPY

SEQ ID NO: 372487 - protein, 405 aa, unidentified
MMIFVGIDWAEAHHDVCVLDADGEVLVTCRIPEGLEGVSRLHALLGEHADEPRDVVVGIETDRGLLVGALLGAGYLVHAVNPLSASRYRERHTTSRAKSDRGDARMLADLVRTDRQHHRTVAPDSELHGAIKILARSHQNLIWARQRQLNALRSALREYYPGALIAFEELSHSDALAVLAIAPDPERGRRLTEARIMTALRRGGRQRNLERRAKEIRTALRAPQLAAPPLVAEAQAANTSALVAVITTLNEQITKLEAELTEAFGRHPDAEFLRSLPGLGDILGARVLAEFGDAPDRYTDARARRNYAGTAPVTRASGTSHVVVARLARNKRLFDATYQWAFCALTRSPGARAYYDAHDPGPHTAKVARRKLANKLVGILHGCLAHHASYDEELAWPRPSERLAA

SEQ ID NO: 372488 - protein, 389 aa, unidentified
MLQLSDLGRSFTALDQDSTLIVVIEMGLSNWLVSGMVPGLERQPLKKMNTDENELLKLLGRWRDEAVAAGREIQRIVVAYEAGRDGFWLARWLRERGVEAYVIHPSSVAVSREHRRAKTDRLDTQLLMRSFLGWLRGERRHCSMAAIPTIEEEDAKRPNREREKLIADRTRIVNRVKSTLFRFGVRGFKPTLRKAEQKLGDLLTAEGKLLPENTLAELRRDMARLRIVRDQIKEIEQERLRKLEAAPVAENGPHSMIRLIARVVGVGVETADMLVNEILTRRLRDGKAVARYAGLTGSPDESGRRRREKGLARAGNARVRRGMIQLAWRFLMFQKDSALAEWFRRRAADGRRGTRKTMIVALARKLLIALWRMTKTGEIPEGVKLRPAA

SEQ ID NO: 372489 - protein, 409 aa, unidentified
MEVVHERCCGLDVHKETVVACVVVPSAGKQPHKEIRTFNTMTADLLQLADWLTAQGVTHVALESTGVYWKAPWNILESSFTLLLVNAQHIKQVPGRKTDVRACEWNADLLRHGLLRASFVPDLPQRELRELTRYRTTLIRERAAERNRIHKTLEGAGIKLGSVASDVLGSSGRLMLEALVEGTTDAATMADLAKGSLRTKLPQLERALTGKVGAHQRFLIAHQLAHLDGLDELIDQLSQEIAERLRPFQNKLERLDGITGVGLRSVEVFLAEIGTDVARFPSAAHLASWVGICPGNNESAGKRKSGKTGKGDVWLRTALTEAAQAASHTKDTYLASQYQHLAARRGKKKAIVAVAHSILRIVWHLLDHDCEYVDLGSRFLEERDRQQIERRLVRRLERFGYTVKLEPAA

SEQ ID NO: 372490 - protein, 356 aa, unidentified
MAEGTWVGLDVHARKTVAGVLVASTGELRSLRAPTLPMETVGWLQQFPRPVRVAYEAGPAGYGLARACAQAGIACTVAAPSKIPRAPADRVKTDRRDAERLARLLRLGELVAVRVPEPHEEAARDLVRAREDARGELMRARHRLSKLLLRHGLVYDASAWTLAHDAWLRRQRFDRRPLQLALEESYAAAMQAKARRDLLDRAIVELAAEPPFAETVGRLCCLRGVSTLTALALTVELGDWTRFRPQALGPFLGLTPSEDSSGERRRQGGITKTGNTHARRLLVEAAWQQRRPLRESATLAKRRQGQPAAVRARADRGARRLHQRWHALERRGKRRTVVAVAVARELAGHCWALATM

SEQ ID NO: 372491 - protein, 346 aa, unidentified
MVHVGLDLSRTRLDVHVMDEAGAPLAVTTAVPDRGGLAVLAERVGGFGGPVYAAIESMNGARFVHDQLELAGWQVEIADAQKVKGLAPLACKTDKIDSWVLAELSRRDLVPAIWLPTPTVRAERERARWRLHLVRHRTALKNRIHATLLAFGHPCPVADLFGVGGRELLGRLELPEPWAADTTAAIYLIDELDRQVGECERALRRLGADHRYVPLLMTTPGVGWVLGYTIAAEIGDLTRFASPTKPAGYTGLCPRVYQSGGKDHRGPLSKNGPKYLRWALIEAAVHAARHPVYAERYRRTKTRLGRQRGPKIAQVDLARRLAEAIWHMLCTNRPFAPAGAANALVS

SEQ ID NO: 372492 - protein, 358 aa, unidentified
METTNLRQKVDFTDKNIFAGMDVHEKSWNVSIFLEDMFLRSFTQQPSVEALEGLLKRDYPGAKYLCGYESGYCGFSIQRKLTKLGIACQVLHAGDIPQTNKEKLLKRDPVDSKKIGEALSTKKAKPIYIPDEESEQDRGLVRYRDRVQKDLTRCKNRIRSILYEFGIYLPERFAKGWSNRFIQWLEETEQVIGSTRTTLNHMIEQMVAHRSLLLKVNRDIRALQNSPKYKQQAHYLTSIPGIGPLSAMIILTELMDIRRFGSFRDLNSYVGFYPMEHSTSDKEHKGGIMIRHNKHLRKLLVEDAWVAMRHDPALSLAFNQWSIRMTGKRAIVKVARKLLSRIRYVLINETVYSKGIVK

SEQ ID NO: 372493 - protein, 408 aa, unidentified
MQVLYPRCAGLDVHKDMVMARVRCVSEPLHDEVRSFDTTTSALLELGDWLAEHGVTHVAMEATGVYWKPIWHLLEERFELILANAQHIKNVPGRKTDVNDAAWIADLLAHGLIRSSFVPPAPIQELRDLTRTRKQLVREIAQHSLRIQKTLEDANLKLGSVLSDVLGKSGRAILAALVKGETDPERLADLARGNARKKRTELVEALRGRIRPHHQELLRIHLNLVDALHQALADVDARVGKTLAPIKDSARLLTTLPGVSELTAQVMVAEIGVDMERFATSAHLISWAGLCPRNDESAGKRRSTRVRKGAPWLKTALVTAAWAAVRVKGSYLQAQFLRLKARRGAKKAILAVAASMLTAAYHMLKNGVEYRDLGADHFSRRDRSKAIQRLVRRLNDLGCEVHLLPQAA

SEQ ID NO: 372494 - protein, 438 aa, unidentified
MEQVEDEPLFAERVAGIDIAKAEVMVTIRVPSDARRDRRQQETRAFRAVRKDLLALADWLRAWQVTKAGMEATGDYWKPVYFLLEQEGFDCQLYHAAQVKALPGRPKTDKLDSVWLAKITERGSLPSSFVPPEDIRRLRTHTRYRRHLTQARTSEMARAEKLLEDAHLKLSSVISDIHGVSGRDMLNAIIAGERNPKVLAQMARTRMRGKIRQLEEALDCSFFTGQHAFVLAMMLANIDHLTAQITELSARIDVLCEPYAHQIAQLDAVPGFGILTAQDIIAEIGVDMTVFPAAGHLASWARRCPQVTSSGGKRKGSNATGRGNPYLGAVLGEAAVNAGRTQTFLGAKYRRLVKKMPKKKAQGALSRSQLVICHALLSDPQAVYTDLGTGYYEQRMNIRRQVRNHVRAIERHGYKVTIEALSPDPDPETSPLPVTKTS

SEQ ID NO: 372495 - protein, 440 aa, unidentified
MPIIRPNAIRIKRFRELKATLRTNRERLLVGIDIAKAQHVAQVRLAHTRLLDKQLVIPNTQAGFAQFWAHLQARQRETGVAEIVCAVEPTGTYHQALATFLEGHGVEVVFVCNHVAALNRRTLDRTWGKSDPKDAHNLCDLLERGLVLFYSLPGDRIATLRRLVRLLRHARTDLAAGKARFRNTLCPALGPAGEPLPAAVAAALPAPLQALLPPAQRGDGPGADLPPALAFELTDLAARLVSVRARIAQIEAELGTVAAPLLAYRLLRTLPGVGPTLAAILVAEIGDIAWYTKVSQLRKLAGLDIIRVESGQWAGTARISRCGRPLLRWALYQAALGTARTPFGRAWRAAMREKRHGDPHAFFKANVELAAKLLRLVWGVWRSGRPYDPVRGEARPAARPVAISTADQGRSAIGHPRACQTGRLSAARALDRKTRPCERT

SEQ ID NO: 372496 - protein, 415 aa, unidentified
MSHPLFVGLDVHSQTNRVCLMDQAGEQWGRRFSVANNRPGSQLLIVRLLEALRQGAFDSLRLAVEATNWYWLPLFQTLQQDPQLSQWPVALFTFNPRLIARYKETFSDQDKTDDSDAFLIADRLRMGRDLPAPFQLEAQYLALRFLTRYRFHLVKDLVREKNHCLSILYLKASEYRQDHPFADVFGATSLALLQEFATLDEIATMPLDELVTWLDAKGKGRFPDPAKVARELQQVSQDSYPLASQLQQPVNYVLSWSFQLVTFLERQLQRVNTASAEAVGQIPHTLDTIPGIGPVFAAGIIAEIGDVARFDHDEAKVAQFAGLHWRKTASAKFEAEDTRLTKRGNAYLRYYFCEAANAVRMRDADYAAYYQRKHDEVPKHQHRRAVVLTARKLVRLVVRLLTTNQPYRPRSVPSG

SEQ ID NO: 372497 - protein, 348 aa, unidentified
MNQVTTIGLDIAKSIFQLHGVDAAGRSVLRRRLSRSRVLEFFGKLPRCLIGLEACASSHYWARELIKLGHEVRLMPAQYVKPYVKRGKNDAADAEAICEAVAMPTMRFVGVKTTEQQSIMMLHRVRLILMRQRTQLSNALRSHLAEFGIVSPIGREGLDRLLKIVADTDDARVPAEARASLEMLAAQLEGVKAKVLENDRRIISSARATEVGRRLLEVPGIGPVLASAFVASVADPAIFKYGHDLAAWIGHVPRQNSSGGKERLGGITKAGNRYLRQMLMVGAMAVIRYAQRNSARRPWLVQLMGRRPAKVAAIALANKTARTVWALMTSGERYRDPQVVQAAVLATA

SEQ ID NO: 372498 - protein, 328 aa, unidentified
MFYLGMDVAKAKLDCTLLLNDASGKGKTKVVNNTKAGAADLLAWAAKHNVSREELHVVMDATGVYHEQVALALADAGVVVSIVNPAQVKDFGRGLAVRTKTDGVDSFVLARYGALIKPAAWTPPAPEARMLQALLARRDAIAQDLQRERNRREKADATDTPELIQKSLEDSIEFLAKQLARLQQDIDDHINRHPSLKKDMNLLQSIPGVGPQVGGNMLSVLSSHLFESAEQLAAYLGLVPVERQSGSSVLGRAKLSKAGPARIRAVLYMAAVAAKRCNPHVKAVYDRMLARGKCKMSALGAAMRKLVHLCFGVLKTQMPYQRDYAKNA

SEQ ID NO: 372499 - protein, 340 aa, unidentified
MSIITVGIDLAKNVFAVHGVDDNGKPALVKPKVARNKLLELVANLPPCLIGMEACSGAHHWARQFRTYGHTVRLMAPKFVSPYRLSGKRGKTDAADAAAICEAVTRPHMRFVPVKEEHQQVILCLHRTRNGFVEERTAVYNRLRGLISEFGIVLPQKVANLRQQIGEHLEDLPGYANLCVGDLLAHADVLDARIAEYDRAIALAARGDARSKRLMELPGIGPTTASALLASLGGGHDFKNGRQVAAWIGLTPGQYSSGGVARLGRITKAGDRYLRSLLVMGARAILSGLGDKQDRFSRWARSLVERRGYWRAVVAIAAKNARLAWAVLRFGEEFRLHAGA

SEQ ID NO: 372500 - protein, 229 aa, unidentified
MQTPTSVLNVGADVAKDEFVVACSEGSFSTRPLANQRSALQAFLKKLPAGSCIGMESTGIYHELFANLAHKLGFVVFVLNPKDARHYAKGVGMRGKTDRVDAELLARMIAHEHTKLHAWLPPTPEQYEIDQLIKRRAKLSSLRAALGMSLKGVDGFGPVVSAALVNTLERVPLQNSDAFVAFTGLDPRPDDSGHHRGKRRLSKRGPSELRRLLFLAALSAAKTKAWHPL

SEQ ID NO: 372501 - protein, 343 aa, unidentified
MSEVTTIGLDLAKNVFQVHGIDASGQVVVRRQLRRSQVLSFFERQHPCLVGIEACATSHHWAREIAKLGHEVRLMPARYVKPYVKRNKNDAADAEAICEAVTRPTMRFVAVKTEEQQSVLMLHRTRQLFVRQRTTLINAIRAHMAEFGIVAGVGRNGVERLLRLIDEGSDERVPPVARECLQALRTQLVLVKRQILEADRRILAWHRSNELSRRLETIPGVGPLIATALVASIPDPHAFGSARDVPAWIGLVPKQNSTGGKERLGSISKAGNRYLRSLLVVGALSVIRRAKQVGYTRRAWLAELMARRPVKVAAIALANKIARIAWALMVSGTRYREPVPQAV

SEQ ID NO: 372502 - protein, 438 aa, unidentified
MIFIGAKVYKKTDIFYVWLIKKVKTMLIFTGRNEVFGFPQPQSLMFNGLKIPIKCMPMKTVCGLDVHKDSVFLCILHENGEKIQHKFGILTDELECMRDLMLSEGVEECAMESTSIYWIPIWRVLEGHCRLYLANPYFIKQLPGKKSDVKDAEWIATCLSNNLIAGSYVPEERIQRLRQYDRRIFDLTASISRNLVKLDACVQRCNIRLSNYVSTVDSKSYRTVVKMISEGQTDPQVLMGAIHGRTVNKYGKQTILRSLTGVINETDIDIISQLVEEIELQQRQRDAAQQKMTSLTKEWFPEQFDNLQTIPGVKERSATSIIAEVGTDMSNFQSPKKLVAWVGLRPRNEESAGKIKSRRIVHGNKYLRKTMIECSWSAAKTKGSFYNTFYHHQTVVRRKNKMKIQVAVARKLLTVVWYVLSENCQYKPYDHTAAGEES

SEQ ID NO: 372503 - protein, 399 aa, unidentified
MLAVGIDISKSKSVAAILNQDGSMHTSPFEFHHTQPELDAFIKYILNSNQSATILMENTGHYHYPVLKAFREAGLPVCMVNAYQIKKFGDMDLRKAKTDKKDAVRIARYALEKSYSLVPYTSMEQKYEDLKFLARQYNQRMLTLKTNKVFLLNLLDETMPGITNILPLTTRTPETSLSVLFINRFKSYDRIKKMGKSRFLDAFEKITRKSRNRQTKTYGLAIYEAALRNITTRGENEYTLAAQDQCLELVCESQKAADSIILKMQTLAETLPEYAVLRSMAGVGDRLGPLILAEIGDIRRFHSGKALNAYAGNDAPPYQSGTFESHNRHISKRGNAALRKYCFEVMQALKLTQPQDDPVYLFLLKKEQEGKPYNVAKMAGVDKFLRIYYARAMETLKQQ

SEQ ID NO: 372504 - protein, 352 aa, unidentified
MIIIGCDFHPSFQQIAMLDTDTSEVRQMSLAHKEEARAFYTALQGKEVRIGVEACGYTGWFEQVMAQLGHPLLMGDAAAIRASMTRRQKTDKRDAEHILKLLVEERFPQIWVPSPGERDVRQLLVHRHKRVQMRTRVKNQLQALALNQGLRLRHRLWTRAGRQQLEALELMPYAAQRRQDLLALLDQLEPSIAALDQAVQREAQARPEVVRLMTHPGVGPVTALAFVLTLGDVRRFHRARQVASYLGLIPCEDSSGGKQRLGHISKQGNALVRFLLVEAGHSAVNYDRELKRCFYRILRKHHPGVAKVAVARKLALRLYWMLRGNLGYAQLPSRSRAGEPESFRGRSVRPAA

SEQ ID NO: 372505 - protein, 323 aa, unidentified
MSASSMVVGIDVAKAHVDVSVLGAQFDAQRFDNQAEAHSALTAGLKPLDVALVVMEATGGYETELACALQAAGLPVAVVNPRQARDFAKSMGRLAKTDRVDARMLAEFAAVLLRRDDLARFLRPLAEPQQQWLAALVTRRRQLLAMLLSERQRLQITPKGLHPSIEAIVAAIKAQLDEIESQMVGHVREHFTELDRLLQSASGIGPVASATLIAELPELGRLNRREIAALVGIAPMANDSGSSKGRRRIQGGRFDVRRVLYMAALTASRRNPVIKAFYERLIAAGKLPKVALVACMRKLLTTLNAMVRTRTAWQADPASIAKT

SEQ ID NO: 372506 - protein, 337 aa, unidentified
MDTSKHFFQLHGVNAAEKVVLRKKLRRKEMVAFFKALAPTVIGIEACGAAHYLARLLGSFGHEVKLIAPQLVKPYVKRGKNDGADAEALCEAMSRPSMRFVPVKTAEQQAALMMVGLRDRLIRNCTQLSNAIRGYAAEFGFSAAKGKAHLVPLLERIQADESVPVLARELFTAQAEEYARLQAQIDAVDAKLLAWHKADESSRRLVKIPGVGPIGAVLLMLKPPAPELFRSGRQFAAWIGLTPKDHSTAGKVRLGGITRAGDEALRSVLVVGATSVIQHVRRGGRGSPWIVNLLKRKPPKLAAVALANKMARVAWKLMVTGERYAAKSVPAALANAT

SEQ ID NO: 372507 - protein, 363 aa, unidentified
MEQQNRRFVGLDFGVRTYEMCMYDENGKIIRSNGLTTPEGRQKLFSKLKPTDRVGIEMCSLTMKVAREMKSAVGCDVLLLHAGKLAVIYKSLKKTDKEDALKLARLVKTHDDEELPVVPLPSETDLKRRRMIREAKQLRSDRTKEVNRLHALFVECGVTDIKKKNLATKTSREKSLLSLEKTQKKQAERICQVINLIESQIAEVKKEIAIEVESDNNIKNLQTVPGIGELTAVAYSGFVGDGSRFDNGSQVSNYLGLVPKLDISCDQVHYGNITKAGNPEVRSLLIMAAWSHVRFAKEDTVLKSKWQYLTQVRGMSKKKAIVCIARKMAEMMLAILKSGKPYSPKKFSVDQYSELAEKALKSA

SEQ ID NO: 372508 - protein, 389 aa, unidentified
METRTVNNLPPAATHDDAVRCLFAIELSKKSWIVAVNTPLSDKVSRHTLKPCDGKELLDLCERIRTRVARETKQRVEIISCYEAGYDGFWLHRLLEAHGIRNYVIDPASLQVDRRARRAKTDRVDVERLLRSLMAYLRGEPKVWSVVRVPSVAEEDNRRLHRERGRLINERIQHVNRIKGLLAIHGIYEYQPLRRDRMQQLERLRTADGRSLPPRLMAEILRELQRLELVIGMIKTIEAERDAIASAKTEAEHTSAKKIQDLAIIKCIGPEFANTLVGEVFYRSFDNRKQLASYVGLTPAHFQSGATCRDQGISKAGNAKARTVMIELAWLWLRHQPDSPLSIWFRDRVGKLKGRIRRITIVAVARKLLIALWRYLETGLVPEGTALKV

SEQ ID NO: 372509 - protein, 367 aa, unidentified
MEKSSKVFVGMDVHKESIDITLAERGGEVRRLGQIGGDRGSLLKMVRKQQSKGGERVFVYEAGPCGFWIYRELAALGERCMVVSPALVPKRAGDHVKTDRRDSERLASLARAGELKAIHVPDIRDEAIRDLVRGRDDAVIAQRRVRQQLKALLLRNDIRYVGKTSWTGAHRRWLSELKLPEPAQRIVFEEYVDAIAVATGRIERLTRAIETEVLTWRFAPVVGSLQAMRGIQFVHAVTLVAELGDLTRFGSARALMGYLGLVPREDSSGEHRRQGSITKAGNSYARRALIEAAWAYRHPARVTRIIATRQAGIPKAVCDIAWRAQLRLSTKYRRLAARHLHHNKIVVALARELSGFVWAIGQSVKPQ

SEQ ID NO: 372510 - protein, 365 aa, unidentified
MASVTSAAGPIHLGMDTSKNTIVVAVLRPGEEVPVLDRIWNEEGSVRHLVGRLGEVGALRACYEAGPCGFELHRLLSSRGVACDVVAPSLIPRRAGDRVKTDRRGASRLARLHRAGELTAIRVPAEAEEAVWDLVRARAALMADRRRARQRITAMLLRHGRAWRGTSWTEAQERWIAGQRFGEPALALALAHYRAALDTRRAELGAVEAELAAWAGKPPLGAAVARLGCYRGIAELNGLTLAAEVAGWRRFPLARAFMCFTGLVPAEYSSGERTRRGSITKAGSEPVRTALTEAAWSYRFRPAIGVTLRRRQHGAAPGTLARSWQAQRRLHARYKTMTARGKPAAVAVTAMARELAGFVWAEMTS

SEQ ID NO: 372511 - protein, 318 aa, unidentified
MMSHDLWFVGIDVSKDTLDLAFVRGEEEMTCQVANSPTGWAELVAVCKKRCVDRIVLEATGAYERRAVAELLAAALPVVVINPRQARDFVKATGRLAKTDRLDALGLARFAEAIRPPIRPMPDEKTAELQEKLARHRQLVHMHTAESNRLAQAYSKPVRRSIEAVVKIIEQQLEAIDQDIDQRIEECPAWQDKDRILQSVPGIGRHTARTLLCSLPELGQCSRQQIAFLVGVAPLNRDSGKMRGMRSIYGGRGQVRQALYMATLAATRFNPLIREHYQHLLGLGKRKKVAIVACMRKLLCIVNAMLREHETWNPKASP

SEQ ID NO: 372512 - protein, 317 aa, unidentified
MARAGVGIDVAKEWLDVASTETPATWRVPNTAEGLSALVTQLGDLDVHRVVLEASGGYETRALERLHRAGFAVVLVQPIRARHFARALGQSAKTDAIDAHVLARMALLAVEDTPRWEPVADQVADLKALVARRQQLLTLRDGEQKRLRFARAIVRPDLERTVAALTAQVAELEQRIDVLVAGNHRLAEEVHVLESVRGVGRLTAAALRVAIPELGTLTRQQVAALVGVAPMNRDSGSKTGRRYICGGRAIARQALYMAALAGARWNAVLRARYAHLVATGKKPKVALVACMRTLLIHLNSLMRQHRFGPTPTPIRVS

SEQ ID NO: 372513 - protein, 394 aa, unidentified
MATIGIDVGKLQHIAAIHHQGEREARKTVLRFAADRAGLAELRDWIARQGGVERAVLESSGHYHLNLAAALQRQGLPVAVINPLESKYFGKRRLQRTKSDPADARTLATLAMVDEPVVRDVLAGAELREAARFAMGLVDQLGRIDQKICRLVELGFPELEEAYDDPTCVSALAVLRAAPTAAAAARKHSATLAQAARPGGGRRIGPTKAAQISALAKDTIAAPELAAQIGFQMRLLIAQHDLLEAQIAEAEAHLATLLDGELVRRLRTIPGAGPAIVATLIAEIGDIARFSEFDKLVAFVGVHPAEKSSGEKGKNPETSWRMSKAGNSYLRTALYRMAIVGIQHNPLIRAHYARKRAQGKSKMNAVGHCMKKALAIVWGVWRSGTDFAAPPSHP

SEQ ID NO: 372514 - protein, 313 aa, unidentified
MTTSGAWIGVDICKKFLDVGSTAGTPVRVANDADGRIALARRLRCENVRGVIVEATGGLERALVKALEAEGVAAAIVNPARVRKFAEGTGQLAKTDRIDAIVLARYGAYMQPAPTLLADPPRQSLRDLIAYRSQITREITARSAQIRLYAGPGLLERAKAAIEALRSERKALEREMEALIKSQDAMRVLYRRLVTVPGIGLIGAATLIAELPELGRLSRRKIAALAGVAPFPNESGDRRGYRAIRGGREEVRQALFNCARVAIEHNPVAKPFYERLRARGKGHKVALVATMRKLLTILNAMLKTNTDWTCKPA

SEQ ID NO: 372515 - protein, 392 aa, unidentified
MVWTGPHPAISEAEASVEDDSTVYVGLDVHKDSITVAYAIGMGDVELLGKIGTTKTDIDRLCMRLQSKGKRVRIVYEAGPCGYGLYRQLVQKGFDCMVCAPSLIPRKPGERVKTDRRDAIKLVRALRAGDLSAVYVPSVDDEAFRDLARAWVSAKDDLKRARQRLKAFLLSHGVHYTGRADWGPAHRRWLSAFSFDSLWQQLAFDELRRTIEDRLAQCDRLEAALREAVLSWRFYPAVLAMETMRGVQFTTAVGMLAELGDLSRFAHPRQLMAWLGVTPSEHSSGEKRRLGSITKNGNSYARKLLVEAAWSYQHPARVSPEIQRRHEGIPKPIVDRAWDAQVRLCRRFRRLVARGKEKNIAVVAVARELSGFIWDINRLAMSLAMPRDVVTA

SEQ ID NO: 372516 - protein, 344 aa, unidentified
MNKNWFIGIDVSKKTLDASIFVAGEVVNKFPHVQMRNDRQGFKDLLRWAKEQGVKTKDTLFGLEFTGYYSDALEQFLTKKQICYTMLPTTVVKHYQRGPHDKNDKIDSAKIADYLFRFNGTECIKLRVLPSKAMQELKALKSERKFLVQQRVACENRQKVAKSKGEEKHLQKLIDLYKTEIEQVEQQIADVIVLDEEIYTTYRLLNSIPGIGFVNAVNTIANTQNFTAFETARQYAKYVGVAPSEHSSGTSVRWRRRPSPHADLQAKADLSMAALHAIELSAEIRQLYERKLGNRTKDKDMQKKALNAVKFKLIREMFSVVKQAKNFELRGLDNAQTEAHSTEE

SEQ ID NO: 372517 - protein, 385 aa, unidentified
MSELNDLSRSLTSLEQDKTIIAVIEMSQSSWLVAGIVPGIERHPLKKLEPSEEELVRLLMRWRTEATKNGHTITRFAVAFEAGRDGFWLARWLRARDIETYVIHPTSVAVSREHRRAKTDRLDTGLLKRVFIGWLRGEPDHCHMAAIPTLAEEDAKRPNREREGLVRERTRIVNRMKSCLARFGIRNFKPTLRKAPERLATLATPEGVPLPPNTLLELRRDMARLRFVMDQIKEVEEARAQRLEQAPQEKTHAMVRLIARVIGVGIETADMLVHEILSRQLRDRRAVARYAGLTGAPDESGNKRREKGLAKAGNARVRRGMIQLAWRFLVFQKDSALARWYRTRTESAGKKRKTMIVALARKLLIALWRLVTIGEVPAGVVLRAA

SEQ ID NO: 372518 - protein, 402 aa, unidentified
MFYSVGIDVSMGKSTIAIISTDGEVISEPFEIEHTKSGFNLVLEKIKDIPKDNVRFVMESTGNYCKSLLKIIIDNGYFATVENPLTIKKYCDINIRKVKTDKKDALKIACYGSERWHKLIRYTPSDEIYSELRFLSRQYDEQMSLKVMKKIHLSGLIEVTFPGLKKIFNGDSLYMLMLDIYKKYYHPSLVLSKSKSSFIKDIEKISKKTGHRIGTRVAEEMYSLANECIPSSPCNESTQLAVSNCALLLQNLEEITNNIIAKMDELARKLPEFETVSNMSGVGNKIRARLIAEIGDVRRFKNSNCLIAYAGIDVPPFQSGQFVATNRRITKRGNKHLRKVGYEAMKSLKTVKPTRDNAVYLFIVKKEDEGKGSITAKIAGLNKFLRIYYARVMEVYKNLENT

SEQ ID NO: 372519 - protein, 348 aa, unidentified
MKISRVGIDLAKNVFQVHAVDDRGKLVWKRQLKRDNWLRVLVERIDTDCEIGMEACGGAHHWARELQSRGYQVKLLPPQYVKPYVKGNKNDASDASAICEAMGREDMTYVAVKTVEQQDIQAVHRVRASVMGRRTASSNQIRGLVAEYGLVAPKDLGPLRRAIPDWLEDAENGLTDQFRRLLHALWQELLRLDERVVALDREIAVIAETHVDAKRLLKLRGVGPLVATALVARFGDASHFKRGRQAAASVGLTPRHHGTGGKNRIYGLSKEGDRYLRSILIHGARAVVSQAKRRDDRLSLWVTDLKERSHMNVAAVALANKTVRMAWSMLRNGTDYEPELAAGERYRG

SEQ ID NO: 372520 - protein, 386 aa, unidentified
MSVIVGVDIAKSKFDYRIITEGNDRLSKGSCQMTHEGFHEFIADPNITKDTMFIMESTGLYHIPLHSFLISGGYDAHCVNPLLIKKQVMADSLRKTKTDSADALAIAKYGRLHYDVLREQKDRMDEEVKAIARRRQQIVEDISRTKTQLKADLTVAWPEILERYVFSESMLSFLSVFGCADEVLVATDEEILSALHHSGRGRSISAKPEDFRKLAENSIGVPYRSDMVKDSAQKLIQLNAREKKITEVLYTHEKEVHSKEIDILTSVPGIGDTTACQFMAEIEDIRKFSSYQKLIAFAGTDPGIYQSGQQNSTGHITKHGNANLRRVCYIMATKCVAWNPIIGDYYSKKRSEGFSHRKAMIAATNKLLKIIYVLLSRGERFQIQER

SEQ ID NO: 372521 - protein, 328 aa, unidentified
MNIIGVDVSKGKLDCALIDNSTHRKLKFKVVFNSDEGFVTLIDWLAKHTKSSISAYHFIMEATGVYHEKCAYWLFDSGARVSVVNPARVKYYGQSLGVRSKNDKKDSVVLAHYGLTQTPMVWQPEALEIRILKALASRLDAIEKDILREKNRHEKSSINPSSQTILNSIETILFTLNKEKLHLEKLIHNHINQYEYLKNNNALLQTIPGVGPVLSRYMLIVLGGRTFQSASQCAAYLGLVPIQNESGSSLCGRSRISKAGSPVIRAKLYMATISALQHNPDIKIQNQRLLKNGKSKMSALCAAMRKLVQICFGVIKHQQPYHVQAKFL

SEQ ID NO: 372522 - protein, 358 aa, unidentified
MVDKVTEAAVVGGVDTHKDLHVAAVVDQNNKVLGTQYFSTTRQGYRQMLAWMTSFGTLKRIGVECTGTYGSGLLRYFQNAGLEVLEVTAPDRMARRKRGKSDTIDAECAAHAAFSGIRTVTPKTRDGMIESLRVLKTCRKTAISARRVALQIIHSNIISAPDELREQLRNMTRMQLIRTLGSWRPDASEYRNVTNVYRISLKSLARRYLELHDEIADLDVMIVAIVDELAPELIKRNAIGYESASQLLITAGDNPQRLRSESGFAALCGVSPVPVSSGKTNRYRLNRGGDRAANSALHIIAIGRLRTDDKTKEYAARRVAAGHTKMGAIRCLKRYISREVYTLLRNQNRQVNSIPITA

SEQ ID NO: 372523 - protein, 347 aa, unidentified
MTIVEAPPSITGGVDTHLDVHVAAALDPLGRLIGTESFTTDAAGYRDLLAWLSGFGEVTKVGVEGTGSYGAGLARFLRRQGVHVTEVNRPNRQARRNAGKSDTLDAVEAARAALSGRASGHAKTKDGAVEAIRVLVVAKRSARQARVKAIVQMRHLGVSAPDELHQQIKGLSVTALVHDSARLRPSRSPDPVTAATKSSLSSLAHRIQSLDAEIASLDEQIASLVHAAAPDLIGLFGVGPDTAASLLVAAGDNPERLHSEAAWARMCGVAPIPADSGKVTGHHRLHQGGDRQANSALWRIVMVRIAHDPDTRVYFERRVKEGRTKRDVIRILKRYVAREVYRHLPRG

SEQ ID NO: 372524 - protein, 400 aa, unidentified
MLSIGIDVSKGKSTVCGMKPGGEIVYAPFEVQHTREGMSELVSLLRSSGEEVRVVLESTGSYHCPVVAALLENGIFVSVVNSLRMKRFCSQSIRKVKTDRIDAMQIALYGLAYWQELQPARLPEDTYRELQLLARQYYQMTSMLIKAKVDLNAICDQVLPGMQELMSDHAGRHKLSDFVLRYHHTAHILKMGETRFRKDYCKWAEKKGYRNCERMAALIFATAQNGIPVLPNAPSTQIVITEAIRVLHTVEASRDAILTQMQALAKTLPEYSLVREMPCIGDTLAPRLIAEIGDVRRFHSKRALIAYAGIDAPPYQSGKFCANNRHISKRGNRYLRKTGYEVMQSYVMHKPANDPIFTFIEKKRGERKSGKLAMVAGLNKFLRVYYGKVTELYRSLPAIE

SEQ ID NO: 372525 - protein, 269 aa, unidentified
MTLTDGFDAITDELRKYPVVLVLIEATGGLEAAVACLFQAEGFDVAVVNPRQARDFARTMGYLAKTDRIDARVLAQMAEVINRHPGRERFICAMLDAELQVLAAMVVRRRQLTAMLIAERNRLYPVHPQSRKSINIIIKELAARLSSIKGVGTMTVAALLVEVSDLGSLSRRAISALVGVAPINRDSGTMRGRRTIFGGRGGVRTALYIAALVATRFNPVIKAFYTRLLAAGKAKKVALVACMRKLLTILNAMLRKNEEWDESYHHVSL

SEQ ID NO: 372526 - protein, 408 aa, unidentified
MIFVGHDWSEDHHDVVVLDVEGRRVTSARLEEGVDGVARFHALVVDLVSDPGEVVVGTETDRGLFIGALVAAGYEVYAVNPRAVDRYRDRHRMAGGKSDASDAKVLADLVRTDRHLHRPVAADSELGEGIKILGRAHKDLIWQRQDQVNRLRSSLREYYPGALAAFGADLAHPDAVAVLSSAPTPGDGRRLSRARIATTLRRGGRQRNIERRASEIHAALQETQLAAPAGVSAAFGAATKAAVAVLVTLNEQITALETELAHGFEQHPDVEIYRSLPGLGVVLAARVLGEFGDDPNRYQSAKSRKNYAGTPPVTRQSGKLRIVSARRARNQRLADACYRWAFCSLHASPGARAYYDELRARGKGHHGALWQLANRWVGILHGCLHSRTVYNEATAWSHHLPETKADAA

SEQ ID NO: 372527 - protein, 349 aa, unidentified
MEVTTIGIDIAKRIFQLHGVNNNGKTVLKKRLMRDQVLIFMSNLPKCLVGIEACGGSNYWARELSKLGHEVKLMAPQFVKPYVKTNKNDEADAEAICEAVARSNMRFVPIKTVEQQDMLSIHRVRARLVKNRTALANEIRGLLLEFGIIIPQGINKIVDKLTEVLDSDQLSGISYQTFSDLKEEYITNDKRVKELENRLKILSSQCSLYKRLQEIPGIGLITGTALIASIGNASCFKNGRQLASWLGLVPRQNSSGGKTKLLGISKRGDVYLRSLLVQGARAILNAKLRYISKKDQIHANCSKFTEWICNLSERCGSNKTVVAIANKLARVIFAVLSSGNAYLEQKVCN

SEQ ID NO: 372528 - protein, 365 aa, unidentified
MNATAALPVVGIDVAKSVFQLAVADGAWRVIEEHRLTRTQMERWFANRAVGLVVMEACGSAHHWGRWLNALGIEVKLLPALYVRAYVKRNKTDAADACALIEAARCADIVPVKIKSIEQQALHGLHRARSLWMGTRTSRINALRGFCREFGIDIAQGARLGLERIERVLADPHSAVPELIRGTMKLLVEEIRLLEARTAQLERELTILARQSPACTTLLSIPGVGLLTATAMVAATSGSVQHFKDARHFASWFGLTPKERSSGTTRMLGRISKRGDRYLRMLLTHGARSVLHAAHRATLAGKQLDPLRQWALGVQGRTNHNKAACALANKLARICYATLRDAQPYGEPVRRPNKKIQRTSFALAA

SEQ ID NO: 372529 - protein, 344 aa, unidentified
MKLSYVGVDLAKNVFQLHGIDRHGQAVWRRRLRRNQWLKVLLETAEPGCIIGMEACASAHHWARQLQAKGYDVRLVAPQFVKPFVKSNKNDRNDAEAICEAITRPHMRFVAVKSVEQQDIQAIHRVRGTLMSQRNAKANQIRGLVAEYGIVAPQQMLSLRRAVPAWLEDDENGLSTCFRALLHDLWMDLQHLQERLAELDRQIEQIAKDNPVTRRLQQLRGVGPMVATALVATVGDGSHFRKGRQMAAASGLTPRQDSTGDKRPLLGISKRGDAYLRTLLIHGARAVVSQAKRRDDPLSLWVTGIAERSHTNVAAAALANKTVRTAWSMLRNETDFNPALAVAR

SEQ ID NO: 372530 - protein, 342 aa, unidentified
MNEVSIIGLDLAKNVFQAHGAGADGSVIFRRKLSRVQLLKFLTQQPSCVVAMEACASAHHWGRVIGDLGHEVRLIPPAYVKPFVKRQKNDMADAEAIAEAASRPTMRFVAVKSEEQQGAAMVYRTRDLLVRQRTQTINALRAHLSEQGIVAPTGPAHVGRLAAVIDGDDGALPAAVRDLARLLLDQIAGLGEKVADLDAELRRRASVDDTARRLATIPGVGPITAAAITTFAPPMETFSKGRDFAAWVGLTPRQHSSGGKERLGRTSKMGQRDIRRLLIIGAVAVVRWAARKGAPEGSWLARMLERKPKMLVAVALANRMARTAWALMRKGEDYKDPAMATA

SEQ ID NO: 372531 - protein, 369 aa, unidentified
MTTSVALSTGPIHLGLDTSKNAIAVGILRPHELSPDTEKIFNDEASVRRLIDRFADRTVLRVCYEAGPTGFGLYRLLRSMGVACDVVAPSLVPRSPGDRVKTDRRDCRRLARLHRAGELTAIRVPTEAEEAVRDLCRARADMVADRTRTRHRLGKFLLRHDRIWRGGDAWTVKHEQWLTGQRFDDAALRATYGHYRAMLVARDAELAALEADLAHWYTHGPFAAAVARLAAYRGVAQLAGLTIASEVGDWRRFATARAFIGFTGLVPSEYSSGESVHRGRITKAGNAHLRTQLIESAWCYQHRPNLGATLRRRQQQASPATAARAWATQQRLCARFRRLAARKTSRNVVTVAIARELAGFLWAEMTATD

SEQ ID NO: 372532 - protein, 427 aa, unidentified
MKKLDFLSTLFVGIDVSSKSNVVCALDFSSNKLLDFSVSNNHPGALDMAQKLYNFLTINPKFKTVIFALESTSIYSIHIANFLSSHEQLLPFQPYVYCLNPKMIANYRKSFIAMDKTDPLDAFVIADFARVGRINTQPWRGSQFLALQRLTRHRLHLVESLTREKTYMVSNMFLKFSELAILEDSERPFATNYGATASAVLTEFLSTEDIVTMPIESLVNFLCEKGKNRFTDPNHTASLLKQAARNSYRLDQCLYEPLTISLASSFNCISAYETEIKSIDKAIEKAIKGLNPNEYQSLLSIPGIGPVYAGGILSEIGTVSAFTSQEAIAKYAGLVWRQTQSGNFKADDTKLSKAGNRYLRYYLIEAANSVKNHIPEYTDFYHKKFSEVKTHQHKRALALTSRKLIRLIFGLLANHQLYSANRVNQIP

SEQ ID NO: 372533 - protein, 309 aa, unidentified
MDVFVGIDVSKARLDVHVLPWGEAFSVDTEAESLALLADRLVGLGPVVVALEATGGFEVLAAGALASAGLPVVVVNPAQVRSFAYALGRRAKTDPIDAMVIARFAEAARPEPRPLPDADQRLLADLVARRRQILQMLTAERLRLGRASDLRLKKSLQRLIRALEKELGEVDGEIDQAVRASPVWRRKEVLLQSVPGVGRVTARTLLAEMPELGSLDRRQAAALAGLAPFTRQSGQWRGKSFIGGGRTHVRTALFMAALSAARFNPALKVFHQRLIDAGKPKMVALVAVARKLLVILNAVLRDQKPWQSA

SEQ ID NO: 372534 - protein, 423 aa, unidentified
MLEEARDTGEIIERVAALDIGKAELVCCVRVPDESRPGRRLQEVTPHSTMTRSLLVLADRLRGLGVTRVVMEATSVYWKAPFYLLEAAGFEVWLVNAKDVKHLPGRPKTDKLDAVWLCKVAERQMIRPSFVPPPEIRRLRDLTRYRISLVVARNAEKQRVEKLLEDAQIKLSVAASDIFGVSGRTMLAALVGGQRDPRVLAEMACGRMRSKIPMLEEAFTGHFTSHHAFLLAKMLARVDELDADIADLDTRIEAEIGPFADRVERLDAIPGIDHTAAQAIIAEIGVDMSRFPTPAHLASWAKFAPGVKESAGKQKGRGATGHGNRYLARTLGNAVAGAGRTQTFLGARYRRLARRRGNKTAVVAVGRSMLVIIWHLLSDPDLEYVDLGADYYELRTTDPARKKREHIRHLEALGYKVSLEPAA

SEQ ID NO: 372535 - protein, 320 aa, unidentified
MNKERKYVGVDISKEYLDMAVVEPDNKWRFGNNAYGIGKAVERLKKLSPVFVVFEATGGLELSFWEALTEAGIEAAPINPRQIRDFAKAKGKLAKTDEIDAAVIAYFGQAMQPRSQPFPTTQEIKEMMSRRSQIVEMITAEKNRLNWARSSRIKEDIQLHIEWLERQKDEVDKNLKQVINIDPAMREKSKILQSTPGVGPTVSASLLTQVPELGTLNRHQIAALVGVAPLNRDSGHWRGKRSVWGGRSRVRSALYMATLVATQHNPVIRVFYQRLLDENKPTKVALTACMRKLLVILNAMIKNKTSWTTSVAQVSSIACP

SEQ ID NO: 372536 - protein, 275 aa, unidentified
MSELFAGIDVSGHRLDVAVTEATAPWQVSNDTLGIDELVGRLRALSPALVVLEATGGYEFEAACALQAAGLSVAVVNPRMARDFARALGGLAKTDALDARMLTSERLRLRVAHVAARPSLQRHIAYLKAELDESDGEVASHVQRHHAELAQALSSVPGIGAASVAVLLAELPELGQLDRRRIACLVGVAPLNHDSGRMRGQRHIWGGRATVRGVLYMATLTAVRHNPVLKAFYQRLVAAGKSKKVALVAAMRKLLTILNAIVKHRTSWCPSMQNT

SEQ ID NO: 372537 - protein, 382 aa, unidentified
MQLIKTWVGVDVSAKTLATKRRRKNEDKDEAREFSNDAAGHRELLKWAGKGARVCMEATGVYHLQLALMLAAARVEVMVINPRVAKDFGRALMNRSKTDRVDASTLLEYVWRMDFVAWEAPRAAVLELRELGRRLSELVHAGAEEKNRFHAKNVAAISRTVIRDVEAHVVQIEKRVKQIEKAAAVVIRSDAGLSEQFAILTKIRGVARRSAILLLTELAVLDPAMTVKQIVGHAGLDPREYESGSSVQKPARISKLGNARLRAILYMPTLTAIRHDRGARLFYAQLMARGKKKMQAIVAVMRKLLHGIWIVLQRRMTFDSSILFAASLAKAESSDSAVAANQPEPSQDHPKGRSEAEELRQQLDPGSAEATRSRRRKRSKAA

SEQ ID NO: 372538 - protein, 342 aa, unidentified
MQVTTIGLDIAKNVFQVHGIDAAEKVVVRKQLRRGQMLAFFKALPPCLVGMEACATSHYWARELTKLGHQVRLMPAKDVKAYVKRNKNDAADAEAICEAVRRPTMRFVQIKSVEQQGQLMLHRARDLLMRQRTQLINALRAHMAELGIVAAQGREGVKELLKIIASEQDARLPVDAHASLVVLAAGLQALQTMIGSIERRIIAQHRSDEASKRLRSIPGIGIVGATAIAATVPDPKVFRSGRDFAAWIGIVPREDSTGGKHKLGPISKRGDQYLRRILVVGAHAVLKRARHQPEKYPWVTRLLERRLFRVVAVAVANKMARVAWALLARGGSYRAPALAAAA

SEQ ID NO: 372539 - protein, 343 aa, unidentified
MKLIRVGVDLAKNVFQVHGVDRNEKVVWRRKLSRENWLKVLLETVEPGCEIGMESCGGAHHWARKLQAHGFRVRLIAPQFVKPYVKNNKNDANDAAAICEAMSRRHMRFVSVKTVEQQDIQAMHRIRAELTKQRTAKANQIRGLVAEYGLVAPKELLQLRRALPCWLEDAENSLSARFRRLLNGLWGDLQALDERMSELDREITAIAQNDPVAKRLQQLRGVGPITATALVAAVGKGEQFANGRQMSAAFGLTPRQQSSGGKERLLGISKRGDAYLRVLLIHGARSVLRNSKDKDDRLSQWLTRLAARSHPNVAVVAMANKTTRMAWAMLKNGTDYQPTVLTS

SEQ ID NO: 372540 - protein, 312 aa, unidentified
MTQIVCGVDVSKRRLDAHVEPSGVFKSFGNDAAGIAELACFCRSHGVQLVAMEASGGYERTAFLLLWEAGVACGMGNPGSVRHYAKAMGFLEKNDRLDAGIIARYAIAKGLKPTEPPTPRQQRLKALVVRLRQVTDDLTVQKQRRSSAVNDEMVASINEVIALLKRQSRSLEGEIASLIDDDPLWAHLDAALRTTKGVANRTVARLLAELPELGIYSNKAVVKLAGLAPLADDSGARAGKRHIRGGRAGIRSILFLIGRIVCRFDQSLDAFRRKLTEAGKPKMVVRVAIARKLLVRLNAKAREARAQYAAAT

SEQ ID NO: 372541 - protein, 411 aa, unidentified
MELLYARCAGLDVHARTVVACARIASAGAVTYHHRTVATTTQGLLELADWLAAQGCTHVALESTGVYWKPVWHMLDGHFELTLANAMHVRNVPGRKSDMKDARWLADLLAMGLIRSSFVPPAPIQDLRDLTRTRKQLVREIARHTQRIQKTLEDANVKLTEAISDILGTSGRAILKALMTGETDPERLADLTAGRLKASRAQLIEVLRGRVTAHHRFMITLHLTQIEALETAVTTIEARIGDALVPFRAALTLRITMPGLSETAAAVILAEIGDNVSPFPTAGHLVSWAGLCPRLDESAGKRRSTRTRQGAPWLKTTLVQTAWAATRRKDSYFRAQFLRLKSRRGPKKAILAVAASMLTDVYHMLRDGVEFHDLGGQYFVQHDSDKERLTKRLLRRLRELGVEVEVTGKAA

SEQ ID NO: 372542 - protein, 353 aa, unidentified
MIMIGVDAHKHIHMAVALNERGQVVGQWQGDNSADGWDALARWALTLDEERRWGIEGGGGYGRGLAQHLVAMGDRVYDINPRLTAKERRRSRRMDKNDACDAQAIALVVQREEDKLPCVAAEDETVALALLTAERDDAQAEATRLRNRLHHLLLQLDPEYHLHLPALTSVIGVQAAETYTTTSGSLVQQERAAVVRRLAGRLRLAMEQVAELGRRIEALAQARYAPLTCLCGVSLLTAGSLAGILGPGRRFASEAQLAAYAGVAPLETSSAGRVRHRLNRGGNRRLNAIVYRIALVQARWSPEAKAYLARRVAEGKTKREAFRALKRYLVRAIWRLWQECLSSAGVEPAYHTA

SEQ ID NO: 372543 - protein, 444 aa, unidentified
MFLGETLWLRQVVASLGVSALSLRKGGVLAARNRGLSGEGQSRILSPAGARSVDVTMEYSPPAHQNLMSKPILYIGMDVHADSISIAIAEPERKGEVRLYGKISSDLHSVEKLVRKLGHPGKELRVCYEAGPCGFVLARYLLKMKICCTVVAPSLTPKGKGDKIKTDRRDALMLARLHRAGELTAVHIPDAQDEAIRDVCRARTDAVGDLRRVRHQLKFFLLRNGYRYSESTAWSEAHMRYLRELSLPLPAMKIVLEEYLQAIDGAKERIERLEVHMGELLENWSQAPVVRSLMGLKGFRLVAAMIMVSELGDIHRFKSPTQLMAYLGLVPGESSSGGTRRVGSLTKSGNGHLRWLLNECAQHYRLPPKVSTDLSKRQLAIAKLHRDEVKKISWKCQNRLHEKGRKLAARLKLRQKVQIALARELCGFVWSVMRVVQPQPTPKA

SEQ ID NO: 372544 - protein, 473 aa, unidentified
MSKGSGGSGMTRGDRRRNARRERLRKLLPRGGAVIGIDLAEDKQALAVIDHDVRVLARKTVRVKAFRLGEALDWAVGQARVKGFEQVTVACEPTGPRWMQVQRLCAERGLPLVCIQPLVSHIAREQQDYTTHKTDESDCVMIARLAVELHCYIPEELDETWAHLRHLGRRRAQLITAATASAQRIQDFLSVAWPTVMQTCAQPLLSNTWLAALQIVTARCGGDPGKLARMGEQAFTAAVRGAVAGWGGKKAWGTISARIFAALTDTEGVVVSSRRGLLRRVADELGDLQRTRGQLRAAEADMAGVLAELGLSRLADIPALTAVGAAAILAESGDPRRYDSSSSLVKHAGLAPADNASGAFTGQAHISRRGRPGLRLAVWRAVWPMLQFNPVMAAKYQAMTGGPDAAAAGMGPQHGTAAEGAARARRAKARVACAASLLRWIYCLVVHDTSWDPAVASGAGSCHDAPHNRAEAA

SEQ ID NO: 372545 - protein, 386 aa, unidentified
MNQNAYATFSNGPDYDRTLILAVEISNRSWVVAAQVPSLRQKSTKQQLAPEADALMAAVEGHKRRAAAAGMAVDRVIVAYESGGNGFWLARWLQRRGVEVHVIQPSSVPVDRRMRRAKSDRIDVDMLLRTLLAWLRGEPRVCSMVPVPDEVTEDARRPVREREELIRARIAIVNRIEAVLTVLGAGEYNPLRRDCRERLEQLRTALDQPLPPHARAQIERLLDRLDLVRKQVTELEAQRDQAVEGEAAGQAEKMVQQLARLRGIGVQTATVLVHEAFVRSFRNARALGSYAGLTGTPYSSGGTQREQGISKDGNRRRRAALVELAWMWLRYQPGCALSRWFHNRSGGSRGRLRKVRVVALARKLLVALWKYLEDGPVGQGMELKPA

SEQ ID NO: 372546 - protein, 337 aa, unidentified
MEKIRELKQFSESVGIDVSKLTLDVFLYVRKKHKQFANTPKGHIVMQKWIKSETESLKNIIYCFEHTGWYCLLLSHFLHDQSLYYSCINPLDLKRSMGFKRGKTDKTDSYEIARFAWLRKEELEPSVPISLRLLELQRLMSVREQFVKQSTALKNLEKGLLVTIKKLSSDIGLKLIRRSIQQLEQQVVKIEKAMEELIKEEQDMKTNYKLAKSVKGVGKILSIQMLLHTHNFTRFAEWRQFAAYCGLVPYPFQSGTSINGRKKIHAISDVKMKSLLSMSAISAIQHDLELKLYYQKRVEEGKPKMVALNIIRNKIVSRIFATVKRGTPFLELSKFAA

SEQ ID NO: 372547 - protein, 323 aa, unidentified
MQGKVSPERSAITPVYVGIDVCKDRLDVYIHPVGLRLEFANSPEGIKRLKRSLKLHQVALVVMEATGKFHRAAHRSLHAAGFAVAVVNPLRSRLFAEAAGALAKTDRVDCRMLAILGESLEPDAVAPPSALMESLQDLVRCREAASYARTALLNQLGATTVRPAVAEINRQLRAAETAIENLGAEIERQIAADPFLTRRMAILTSIPGVGIATAIALIVGLAEIGSLSAKEAAMLVGLAPIACDSGQSSGPRHIKGGRAHVRRALYMAALSAARFNPALRAFHDRLIKKGKLAKVALTAVMRKLLVLANTLVRENRKWEPLHA

SEQ ID NO: 372548 - protein, 355 aa, unidentified
MTIISHLYAFVVGVDTHAKNHVYSVLTHTGEHVDTSTFPTTKAGIKRALTWVGRRTRGDLNTLWVIEGIGTYGAILADHVADAGYTVAEAASVNARDRHATGKDDRIDARRIAGTVLPLDESRLRFPRQADGPRQGLRILVKARESMTGEKTRTINALTALLRTHDLGMDARRKLSVVTIQTVAKWRLRNESVALTEARREAIRLAKRVVDLDVEISDYAMRIEALVKDSPGAVLLAEPGIGPISAAVFYLAWSHHGRVRSEAAFAKLAGVCPIPASSGNVVRFRLNRSGDRRLNSALYMVAITRLSHHQRSQEYMAKRLGEGETKKETIRCMKRHVARSVYRILEATKPIGQAA

SEQ ID NO: 372549 - protein, 428 aa, unidentified
MNVEESIRLEEFCQLKKEIRGSEEHLIIGIDIAKDKHHAFFGTATGKTLLRRLIFENNIEGFGRLRTRTEAIKVQHRLSKVVFGLEPTANYHKPLAEYLIKCGHNVVLVSGVAVNKNRELLDGRWDKHDTKDSANVADLISQGKCLYYDYPSMPLRDLRNLLSLKRRLKKQEHGTRIRIRNHLLAQYFPEFDRYFGKGCSESLPIVKWCLNPSMISGMGYEEFVQLVAPRIKTMGQEKRLKSIWRMAVDSIGCEVGQALDFEAKLMVEDLQQIKDSIRAVDEHIEDICLGFPEYSYLLTIPGFGPDVSSKVLGAIGNPSRFDNGKQVLKLAGYDLGANRSGKTSDSAVPVISKRGKAYLRYALYQAAFIASTSNRYFIIYYTNKLRGREREKGIKTKMKVKLAAKMLIIAWTLMKKKEPFDPEYLNID

SEQ ID NO: 372550 - protein, 324 aa, unidentified
MTKNIKYFGIDISKDVFDVCDNNETYYQFKNSISGFKKLMKLLDSDTICVMEATGYYHMRLAYHLLENDFKVSVVNPLKIKRYIQMELSKIKTDKSDSKMIQFYGKEREPVLWFGQSKTQQDSLQLSRLLSVYSKQSTQIKNKLHGEAILGEPSKTVVRSLKRQLKSLTKEIKMLETTLEKNVKSEYQESLTLLKSIPGIGNKTALMLLVFTDGFNRFENSNKLCSYAGITPIIRQSGSSVKGRSRISKMGNPKLRNLLFMCSFNACKYNKACKALFDRIVAKGKSKKLALIAVCNKLLKQAFAIVKNGIPYDNEYRGTLVKIN

SEQ ID NO: 372551 - protein, 347 aa, unidentified
MLYAGLDLSRQRLDVHVLDEEGRTVEVTATTPETFGLHELVARLSRYGEEVTAVIESMNGARFVHDQLELYGWDVEIADAVKVKGLAPLAAKTDRIDARVLAELGRRDLVPAIWLPDPTVRAERERARFRLHLVRHRTALKNRIHATLIAFGHPVPVSDLFGTKGRELLASLAIPEPWATTLLRSLHFVDELDAQIAACEAELRAAGADHPYVPLLMSVPGIAWVLGYTIAAELGDIGRFASPKKLAGYTGLCPLVRQSGRRDDRGPLAKNGPKYLRWALIEAATHAARHPAYRDRYEHTKKRLGRQRGSKVARVEIARELATAIWHMLTRNEPFNPGRSPARPLVA

SEQ ID NO: 372552 - protein, 400 aa, unidentified
MISVGIDVSKGKSTVCILKPYGEIVSKPFNITHTQKDLSELSSMLFRLNDEVKIVMEATGIYHLPVLTYLQEKGFFVSVINPYLMKSYRNESLRKAKTDKIDSRIIANYGIDHWFKMKEFQISRVIYEELKLLGQQYRHYMKLHLLSLAELTHLLDLTMPGIKNLLASWNETNRKDKRSDFVERFWHYDVITSMSEQEFTEKYILWAKEKKYVPSQEKAKVIYTLAQESIPTLPSETSSVKMLVTEAVRVLKEVDATLGLILSRMQEIAKTLPEYSVVREMGGVGNTLAPKLIAEIGDVRRFRNGKALVAFAGIDPPPYESGQFVGCNRKISKRGSASLRKVGYETMRSLKMRSRPEDPVYRYVVKKESEGKSKKSAKIAGLNKFLRIYYARVTELYKNI

SEQ ID NO: 372553 - protein, 394 aa, unidentified
MKLIGIDIGKNKHFFCIMDQQTGEIISQPVSFSNDKEGFDFLIQKIKSYPKDSILIGMEDTGHYHFALLKYLLDLQYTVALINPKTTDFNRKMQGGITKNDKLDTINICDVLDTPERKKQYRITKVNSFDLYEQKQLTRHHHNLKEEENVYKNRLQKCIDIVFPEFNKLFNSKYGTVYMNILKTFGSAENIANTDIRTIRKCFEIEGRGNRISLTPERLKGCAGSSIGISSSAEVIQIKHLTAQIELIEEQLTEIDKKIEEFSIQNNSPILSIPGISHFSGTSILAELGDISNYSKPSQIIKFAGVAPLHYESSQFNAQHTAITKKGSKYLRKTLYQIILPVIRHNQVFYKYYQLKISQGKGHRCAQGHCVRKLLRIIYHLLKTNQQFDPQLLR

SEQ ID NO: 372554 - protein, 475 aa, unidentified
MGFPVGKIYLFQNAIGLPTSLLKVDGRMTTKISLAVMDPLAAFVDVGSEQMHVSIAGESAEVFGTFTTELHRLRDWLRERGVKSVAMEATGIYWLPLYGVLESAGLKVSMVNGKQTRNLPGRKTDMKDCQWGATLHAHGLLQAGFVPPAQIRRLQDYLRLRGDHLSCAAACVQHQQKALERMNVKLHDVISSLVGESGIRIVEAILAGERDPERLLALCDKRIQNKKAERVKESLRGTWAEEHLFALRQAVENWQHYQRQIAACDQQIERVLRQISGPDESGGTEIKTKPLKRGGINAPQIEDLHHMLRKLCGGKDLTVLPAHTDYSLLQLLSEVGTDLSGWKTEQHFTAWLGLAPGSHQSGKRKGSVRRKRNRAGRLFCMMARSLAQSKNIALGGFYRRMAARRGGLIANIALARKLAELFWRVMVKGLDYAEAGLKAYEEQVLETKRRALSRLAKQLGRIVLPSLAELQATKS

SEQ ID NO: 372555 - protein, 412 aa, unidentified
MDLLHPHGAGLDVHKDTVVACVRHQPPQGRARQEIRTFATHTAGLLELADWLAAEGVTHVAMESTGVYWKPVFHILEGQFEVLLVNAQHLKNVPGRKTDRADSAWIAKLLQHGLRRASFVPPAPLRALRDLTRQRTQLVAEKTRLANRLQKVLEDANIKLASVASNVLGVSGRGMLRALIAGKTDPAELADLAQRRLRDKIPALQQALAGRVTEHHRFLLELLLDQVEQLEGLIGRLEARLTGELVPFGEKVQRLIEIPGISRTVAEVVLAEAGPDLETFPSAGHLASWTGLCPGNHESAGKQHSGRARKGNRWLRTMLVQAAWAASRTKGTYLAAQYRRLAARRGRKRALVGVAHSLLGIIYHVLKEGKEYAELGGDYFDRLQGERLTRHLVKRLESLGHRVTLEPLPKAG

SEQ ID NO: 372556 - protein, 402 aa, unidentified
MNCVGIDVSKGKSTIAVMRPFGEVVVSPFEVRHTDSELSELARRLKSLNGETRVVMEATGNYHAPVAKLLHDAGLYVSVVNAKLVHGYGNNDLRRVKTDRKDAVKLANYGLDRWLTLPRYVPEENTRLLLKNCYRQYRQYSKVQTVLKNNLISLLDMTFPNANRLFVSPARADGSEKWVDFVAEFWHCECVSERSLKSFVNKYWRWCRKHGYNFSEEKAHAIYDEASGHIGVMPKSETTKLLVEQAVSQLSATSAALAALKQEMQSLSSQLPEYPVVMGMFGVGPILGPQLIAEIGDVRRFYSKKALVAYAGIDAPPNDSGDVIGRHKSMSKVGASSLRRTLFLIMSAYLQNSPPNEPVYQFMDRKRSEGKPYRVYMMASANKFLRIYYATVKAYLETLEQF

SEQ ID NO: 372557 - protein, 362 aa, unidentified
MLYTGADLHRRLIVVCTVDDNGTVVARSRMKTDPALVTEYFRRYPDQQRAVVECTTGWYWFSDLLRSLGIDVVLAHAKYLKAISYAKVKTDAVDALTLAQLLRMGYIPEAHQLPPEYRAMRDLLRQRMVMEHKRTNIIQRVTSILAQFNITDLPFSPCQPGFADFLNQCSIPDEYRMTLMLYHQQCLQVTEHRKQLEKHFKARLRPTSAVQLLMSLPGIGDITGSIIAMETGDIHRFADAKHYCSYCRLVPGAKDSGGKHSHRSGSKDGNQYLKFAFTESAIKAMRFYPQIKHFAARLERRATKAIARTVVAKELAKISYYVLSRQQEFKTFKGIEINKLRNWPRARKPVRLTGGVVNPPSA

SEQ ID NO: 372558 - protein, 342 aa, unidentified
MSKVECCGLEVSARELLVALGGKQEESVLRRFANTAAGRKELVQTLTRGGRRVSVCLEATGLYGLEVALLLSTAEGIELMVANPRAVRNFARAMMRRSKTDELDAVVLREFAERMEFRAWVRPSAAALALWGIARRLGALAEEHAAEKNRMHAACLTGAIPGCVRRSIARMLRFQEREMEQLRAEARERIAGDALLRRRYEMLRSVTGIGEVSALQILAELCMLPEDRDVRQWVAFAGLDPRQYSSGTSVHQRPRISKVGNRRLRKALFMPALVASRREPHLRGFYQHLLERGKKKKPALVAVERKLLHAIYGMFRNQQNYDGNRVFPLATRNIQVATANCR

SEQ ID NO: 372559 - protein, 348 aa, unidentified
MDFYAGLDVSREATNICVVDDGKVIREAKLDTDPDAIELLLAEWGIRLKRVGLEAFSYSAWLFTALAEKGLPVICIETRHAKAALNAMLNKTDRNDAKGIAQMMRTGWFRAVHVKSEGAQTLRALLVGRKAMLGKVLDMENMIRGLLRPFGLKVGEISVGRFDARVREIMAGKKELEAIVAPLLDARAAMRLQLAKLHRLALAAARSDSAVRRMMTVPGVGALVALTFRATVDDPTRFKRSTNVGAHFGLTPRRYQSGQTDRVGRISKCGDELTRAMLYEAAIAILTRIPKNFKLRLWGLRLARKKGLKRAATAVARALAVLLHKIWIDGTTFRFGAGGKRGRVAAAM

SEQ ID NO: 372560 - protein, 454 aa, unidentified
MQRKVPRSKIGTLTPKVSEPKKQEVPEMNNTQNEKIAQVTNDTMVIGIDIGSEKHWARAFDNRGMELSKKAFWFMNTAEGFASFEVWYENQRRAAGLKRIMVGLEPTGHYWFNLNQFLAENGVRVVLVAPQHVKHSKELDDNTQRKDDLKDPRVIAKLVTEGRYFLPYRPSGVHADLRDGFNRRCGIVESMTRAKNRLHRWFSINFPEYLHAYGSVTAKTGLMVLKKAPLPKDIVELGVDGVDKIWRDAKVRGSGKKRAMTLVALAEQSIGEKTANEAARLELWQLLEDYEHFAHQFEVIEEMLKRKVHEVPHADNLLAIPGIGYFTVIGFFAEVGAVDRFDDPKQIQKLAGLAVVENSSGKRKGVPGISKRGRDRLRWVLFQAAMSAVKNNQEFREIHRYFTTRKDKPLKKMQSLMAVAGKIIRVFYGMVRTGAAYDPERLLRDIRRPEKDAA

SEQ ID NO: 372561 - protein, 369 aa, unidentified
MADRITYVGLDVHKDSIVVAVAVGGLRGEVREYGRIANTATALDRLLRKLGGDGMTLRFCYEAGPCGYGIQRRLSTRGHECVVVAPSLIPKRAGDRVKTDRRDAASLAKLHRAGELTAVWVPDARHEAMRDLVRARLDAVHSLRRARQQLSGFLLRQGCHYGRPAWTRLHRRWLAGLKFEQSVHHIVLEDYIAAVEAAAARRNRLTAQIEAMLPDWTLAPVVAALQTMRGMALVNAASLIAELGDLSRFANPRQLMAYLGLVPSEHSSGASVKRGGITKAGNAAARRLLIEAAWSYRFPARLSRELLLRQERQPRLIRDIAWKGQLRLCARYRRLARTGKAANIVTTAIARELSGFVWAIARQVAVTTE

SEQ ID NO: 372562 - protein, 425 aa, unidentified
MSEKIVVGIDVSKAFSDICILSPNNDIIKRLKISNDITGMKSLIYVLEKVEDEYKDTAVIIMEATAHYHQILANFFRKHNYEVIVINPIQSGALKNINIRKIKSDKTDAYNIALLYRIKNYNETITHSDTVNSIKKLCRQHKELMDEIVEHINRLIAFLDISFPDFKKVFTDLQGKTPLSLLEKYPTIQEVLSPENKQDIIQLIKENSHKSSSYAEAKYEKLFKAAEKSIEVCIVSLSSAVLIQTTVRVIFSLQEALKAIDDEIKRLSLLDEKFHKEIVLLQSIPGVGEYTACVVLSELGDISNFSKPKELVAFFGLDPGVSQSGTYNRKNNKISKRGSPHVRSILHMLAKSNVYPNRNREYLNPVMRAYFEKKIAEKPYKVVMCAIMRKMVQIIFAVLRNQKSFELRTPEEHQKLIREKSKLVA

SEQ ID NO: 372563 - protein, 379 aa, unidentified
MADCISYIGLDVHKESIAVAVASGGLRGEVRQYGWVTNTARALDRLLRKLGGAGVRLRFCYEARPCGYGIQRRLAANGHECVVVAPSLIPKRPGDRVKTDRRDATSLAKLHRAGELTAVWVPDIGHEAMRDLVRARLDAVHSLRRARQQLCGFLLRQGCHYGRPAWTKLHRPHGTSPWAEGSRLAGLKFDQAVHHIVLEDYIAAVEAAEARRDRLRAQIEAMLPDWTLAPVVAALQTMRGMALVNAATLIAELGDLSRFANPRQLMAYLGLVPSEHSSGASIKRAGITKAGNGAAPRLLIEAAWSYRFPARLSRELLLRQESQPKPIRDIAWKGQVRLCARYRRPARSGKPANIVTTAIARELAGFVWAIARQVTIPAN

SEQ ID NO: 372564 - protein, 447 aa, unidentified
MGPRHQSKEVTFTLVHPHAAGIDIGSQFHVVAVSAERDQEPVRTFRSFTGDLHRLADWLEAIGITSVAMESTGVYWIPVFEILQSRGIEVLLANARDAKQVPGRKTDVKDAQWLQQLHQYGLLRGSFHPTSEIATLRAYLRQRERLLEYAAAHIQHMQKALMQMNIQLHHVVSDITGATGMRIIRAIVAGNRDPEELAKYRDTRCKASEATICKALSGNYRNEHLFALRQALQLYDSYQANVSACDHEIETVLAALQSPKQPEVPLPKARHRTRQPNALNFDVRKALYAIIGVDLTQIHGMGPYLALKLISECGSDMTRWATAKHFTSWLCLAPGNKISGGKVLSSKTRRSSNRATALLRLAAVNVGKTQTAMGAFYRRLAARIGKAKAVTATARKLAIQFYNVLRYGTEYCDPGVDYYEKRYHQRVLRNLKERAKQFGLVLLPEGT

SEQ ID NO: 372565 - protein, 412 aa, unidentified
MEVLHNRCCGLDVHKSSITACVLLEQGHKPQRHLQRFGCTTRDLLELVSWLKGFGVQYVAMESTGVYWKPVWNVLEEHFQMLLANAQHIKTVPGRKTDMKDCQWIAELLRHGLLRGSYVPSLLIRDLRDLTRTRATLSQEQSSVGSRIQKVLESANIKLSSTASNTMGKSGRAILDAIVSGEDSAERLADLALGKLRSKISQLQLALEGRIRDHHRFLLDSLLRQFRFLEAEITALDLRLEHLGKQHKELADAVARWITVPGVERVAAWAFVAEIGFDMAQFPTAAHLASWAGVCPGNHESAGKRLSGKSRKGSPWLRRMACQSAWAAARTKNCSLSAQFKRLAARRGSKRAIIAVAHSLLVIGYHLQKNCCVYQELGGNYFDHLHAEGLKRHLVKRLESLGLSVTLHPQTA

SEQ ID NO: 372566 - protein, 310 aa, unidentified
MTIAHRLIGIDISKAHLDIHDDVTGKSERIANASAAIAAALARWPRAGLRVIFEATGSYDRVLRSALEAANVVYVRVNPARARDFARATSALAKTDAIDARLLAAMGRALALTPSQATDPLRERLTGLQRRRDQLVATRADDKKRLATTEDDEVRASIMTHIAWIDAEIARLQDVIDRLVAGSAELATLRKRLQTAPGVGPVTALTLIALMPELGQRSGKTIAALAGLAPFNNDSGALRGQRHIKGGRGRVRRALYMAALAVIRKVPRLATHYRNVVARSGHAKVGIIAVARKLLVALNAMLKKGEPFRV

SEQ ID NO: 372567 - protein, 322 aa, unidentified
MGSVTTIGLDLAKNVFQVHGVNAEGVAVIRKRLTRGRMLKFFAKLPRCLIGIEACATSHYWARELVALGHDVKLMPAQYVKPYVKRGKNDAADAEAICEAVTRPTMRFVGIKSPEQQSAMMLHRVRLILNRQRTKLSNAMRAHLAEFGIAAPIGRNGIEQLLDVIADPTDERVPADARFCLEMLAAQLRIVKEQILENDRRILASARETELGRRLMEIPGVGPLLASAIVATVPDPAIFRSGRNLAAWIGLVPRQNSSGGKERLGGITKAGHEYLRQMLIVGAMAVVRYAKRNGAKRPWLVQLLARRKTKVAAVALANKNAQ

SEQ ID NO: 372568 - protein, 322 aa, unidentified
MEQFYLGIDVAKGKLDCALQLPNGKFRSKAGLPNTLKGFAELDHWLQAHQVSRVHVCMEATGIYWEAIAEHLSNAGHTVSVVNPFQIKSFAGSCLARSKTDKIDARLIARFCAERRPEPWRAPSVSEQTLKALVLRLESLQAMRVQELNRLQVSREAVRGGILAHIAWLDGQVKELLQAIRQHIDSDPGLKSKRGLLGSIPGVGEHTIALLLAFSIAPGRFDNARQAVAFAGLDPRQHESGSSVHAKARLSKIGHSFLRKALYMPAIVTLYKTRWGQQFRLRLAAGGKPPMLIIGAMMRKLIHVAFGVLKSGLPFNAALHGA

SEQ ID NO: 372569 - protein, 353 aa, unidentified
MESIGIDVHKVNSQVCVVDENGEVIDERRIRTDRERFATALGKRGRARVLLEASTESEWVARCVEELGHEVIVADPNFAAMYATRSKRVKTDRRDARTLAEACRLGAYRRAHRTSEQQRRVRAGLAVRDALVRTRTRYISVVRALLRREGIGVRSGGSSSFVARVGALSLAPWLEAEIAPLLGVMEKLNDEIRAADDRMARRAKNDAVVRRLCTAPGVGVVTAVAVRATLDEAARFRGAHQVECYLGLVPREMSSGEKQHRGRITKSGNARARWLLVEAAWAVWRSRTAETAALRGWAQRIAARRGKRVAMVALARKLAGILFAMWRDETCFEPRKIRALEPGKIRLVAPNAA

SEQ ID NO: 372570 - protein, 386 aa, unidentified
MKNINLNVACAGMDVHYKFSNVTFRDSGGKVVSRQRLDHPDRNQLTMRMNHWPKGIPVVLEASFGWGWLSDLLIEAGLEPKLSNCYKLEQMRKARGWVKTNKKDADMLSLLPFEATDWWQVWRAPVEVRNRREQMRFRGDLVGLQTVVKNRIHAIFHRQGIFHEFSDLFGGKGRKFLAELCLENPAKLSSEALMALRGQVMLLDHLRRQLADVARILRKQLIKSPLIKRLKTIDGVGLILAHVLTAEIGRIERFRTHKALASYSLLAPRSDDTGQDDPARSPLGRHLGTHGNRTLKWAFIEAAHGAVRSGGRWRAMFDRVTDGGKKNRNRGYIKVARELVKVVYVVWKKGVDYQPVAPARPGCRRKKKSRSGTGQLLHPMVHALTA

SEQ ID NO: 372571 - protein, 407 aa, unidentified
MDLLKTVFGIDVSSRKSNVCIMVNGQKVNDYAISNDMVGFNRLLGDLKQVTKPQIIFEATGVYSRRLQAFLDMHELRYVMMNPLEAKRKTKDDLHQNKTDKLDALYLAKLQSEHPQRLAYVQNKEYQELMANNRIYEQASHDLITNRNRLHKAIQLTFPEIEHLMVNPRGKNYWSIVLRFPHPDIVLETKEADIIDFLKGLTGIGKKRANDIAQSLIRLAKVACPAVKKNSAHIRGLKMAINNILSAEEECQTALQEMAKLAPKRDLEILTSIPGIGENTALRIISELGDIRRFNNPSQLNAFVGVDPQVYESGNLTAHLSISKRGTAIGRKVLYLTINQIQSAKKAGNPCHIADYYEKRKRSSETASHKKAAIASIHKLLRTIFALIKNDQLYSYDVAKHNQRLLS

SEQ ID NO: 372572 - protein, 338 aa, unidentified
MSIVMGLDQHRGQITGEWLDTETGEVRCARVTPADREHVRRWLSRFAGRELEVALEATTGWRFVVEELRRVGAVVRLAEPAETADLRGSKKRAKGDRQDARHLRQLLMIGRLPESWIPPEHILDLRARVRLRHTLSEQRGEWQQRIQATLYHHGCPQRRSLMTGDGREWLAAQPLPAAAREQVTVAVAMIDGIETQIAPIDKELRAYAHRQAGCKALMAHYGIGPLVAVTILAELGDCTRFSSSRLAVRYAGMDITVYQSDQRRAPGHLSRQGPPALRWALFEAAQNACRQGSPDREYYREAAERLGHNRACLSVARKLLKRSYHTLRELGEEALAPA

SEQ ID NO: 372573 - protein, 429 aa, unidentified
MCYRIAGIDVHKKILAVAVSDVEVEGEYQFERRMFGSSPDQLRSLAAWLLEQAVEEVVMESTAQYWKPVWEALERYWKPLRQKREGASRRSGTLHLAQAQSNRGRRGRKRDFPDAERLVKRLVARELTLSFVPDAEQRLWRTVTRRKYQLRRDHVRLQNQVESLLEEAHIKLSSFVSDLLGASARRMLKALAEGETNPAALAALADRKLRATPEQLCDALGACTDLKPVYRRLLHMALEQLQFLEKQIDQLDQELASLLHPHQDAVQRLAEVPGLGVDSAQQIIAEVGPTAATFPSEKCLSSWVGACPGDDESAGVNYSHRSPKGNRHMRRVLNQTANAAARTKGSIFDIVYRRSVPRLGHNQAIGAIAHRQCRLIWLILHHGVHYEERGPAVTKQSKQKRTARMIRQLRSLGYRIEAPNPQPSQAQAQ

SEQ ID NO: 372574 - protein, 341 aa, unidentified
MSDYIGLDVSLEDTHLCVVDGLGAVTARAVARTDPDDLAKVIRDLAPKVKTVVLETGGQSAWLQQGLEARGIPAVILDARQAKKALSGRLNKTDSNDAEGLAQLARTGWYREVLAKRPETRRIRAVLMARELLVRQRRDLSSQVRGLLRGFGLAVGRIGHAGFEARVRELAQAEPALLAALEPLLAVRRVLDRQLDALTRQLGAIARASDEARRLMTVPSVGVMTALGFITAIDQPHRFARSADVGAYLGLTSRRYQSGQVDWSGRISKQGDSLARSLLYEAANVLMTRVKRWTRQKAWAVRLAGRRGGAKARVALARKLAVMLHRIWVDGTTFNWANEPA

SEQ ID NO: 372575 - protein, 335 aa, unidentified
MKHDMHVLGIDIAKRVFHAVGMDDRGNIVYRKRLSRHDLIPYIAQLPPVRIGIEACGGAHYWARRFRAHGHEVKLMAPQFVKPYVKSNKNDSRDAEAIAEAVTRPTMRFVPIKDVDQQDLQALHRVRERLMGARTALVNEVHGLLHEYGIIISKGVAKFRQAVVGKLESEKDKLTSLSREMFWKLVDEFALLEKQLAYDQEKRDTVATTHPECQRLMTIPGIGPFTATALVAAISDASAFKNGRQCAAWLGLVPRQHTTDGKERLLGISKRGDTSLRKLLGHGARTTLRWVGRKTDRRSQWMRQLLERRGKNRTAVAVANKNARMVWALLTSHQD

SEQ ID NO: 372576 - protein, 344 aa, unidentified
MRIVGVTGGVDTHADAHVAAAIDRNGSLLGVESFPADAGGYESLLGWLVGFGEVEQVGVEGTGSWGVGLARFLHDQEILVVEVDRPNRQKRRKQGKSDPTDAVTAARAALSGEASVIPKSRNGPVEQMRVLMVARRSAREQRIQSLNQLRHLVFCAPEPIRVRYKNRYKTGLVTEAANMRPNRGSDPVIYTTNLMIRILAKRVKRLNTEMAEIDRLLTVLLEQTAPGLFELHGLGTDTAASLLVAAGDNPDRIHSEGSWAHLCGTTPLPANSGKVTTRYRLNRGGDRNANAALYRIVLTRMSSHDETRRYVTRRREEGLNTAEIMRCLKRYVARQTYKHLPHMI

SEQ ID NO: 372577 - protein, 355 aa, unidentified
MNDEKYIGLDVHQSTIVVAVMDSTGKLVMESILETEAATILQFFAGLRGTLSVTFEEGTWSVWLYDLLNPHVDKLVVCNPRKNSLLKDGNKSDRIDARKLAELLRGNQLKPVYHGETGVRMLRELSRSYLTIVQDLSRVMNRLKAVYRSWAIPCAGRDVYYRRHRAQWLAKIREAGVRRRAERLYEQLDMLQQLRQQARRELLAESRKHAITARLRQIPYLGPIRSALAVALIQTPHRFRSKRQLWAYSGLALETRISAEYRLVEGQVRRSKKLLSIRGLNKDHNHDLKGLFKGAATMASVRPGPFQDFYQAALAKGIKPTMARLTLARKIAAITLTLWKKGENFDAEKLKSQAA

SEQ ID NO: 372578 - protein, 488 aa, unidentified
MKNKSIFTRQNQTLIDLFRDAQHPDKVLCVPIDYAKQTHMALFCNGSGRQLKKPFPVKNNPEGIAFLLDAVKRICRKHHIKREHVFFGGEDCGTFADNFIYALREAGFVVMGVNAADAARQRENLQASTDKLDLLGIAKMLLDMQGSLAGGQIGKEYALRSLTRHRSQQVQMRTATGNRIHQLVDQLFPGFLDERLSGIPPFSEASLYLMEDRFSPRQIARRQDKALLRQLKARGLQHPEATMAKLKVHARQVLEHPPKLAGTLQASLAGQVSLRRCLGRNIELTNREIAQQLALIPGAMLTTIRGIGITLAAGVAAEIGSPGTQPSTRRLCSYAGIVPRVKQTGGPEKGARTGSVSRRCNHILKNFIVQCGNHLGQHGPADLKEDHRRRGANGQHADFGMARRCLRMGMRLMRNQEAYIPPGLRLLHDEADIQNLRAYYLELWPKLLDKWVKAKAADTAFHKDNPLGQWRERIQAIYEIELPLPKKK

SEQ ID NO: 372579 - protein, 353 aa, unidentified
MYIGVDTHKRSHTMVLLDATGQTVDTLTIANTPEAWLTALTWARALTTTRCWGIENSGSLGKGFAQFLLGQGEGEVREITPHRTAQYRRRGRTQDKTDTADALAMARLLLVEHVDLPTVQRDDASTELRLLSDQRDNLVAERTRLINQLHAQMLQIAPDYKERSGRLTAERGVRYCRDLQLPTAPALVQTRLLIAHQLADQVLRLCADIATLTRELTRRVNALGSPLRQLRGLGPVLIARLLGELGSALRLPSAAALAALAGIAPLTVASGGRSGHRVNRGGNRQLNRVFHLLAWCQRRWEPKAQAYYAKKRAEGKTERAALRCLKRRLVDVVFRLLRPPAQTVVPAEVVLAA

SEQ ID NO: 372580 - protein, 314 aa, unidentified
MAPNVFIGIDVSKQRLDVALRPTGAKWSVANDAAGVALLVERVRALAPVALIVMEATGGYEMAVAAALTAAELPAVIVNPRQVRDFARGMGKLAKTDAIDAEVLAHFAEAARPAVRPPVNDLAALLHGWLGRRRQLLEMLSAETQRLVMAPPALRREIQAHVQWLRARLRDIDGELDRLLRSSPVWRAAEDLLRTVPGVGPVLARTLLGDVPELGRLTRKQIAALIGVAPFNRDSGAYRGTRHIAGGRAPVRAVLYMATVAAVRCNPALRAFFTRLCAAGKPKKVALTACMRKLLTILNAMMRTRIAWKPALAI

SEQ ID NO: 372581 - protein, 338 aa, unidentified
MGTYAGIDLHSSNNYIGIMDQDHKRLFGKRLPNSLDKILMVLEPFKSDLKGVIVESTYNWYWLVDGLQENGHRVHLANPSAIKQYEGLKHTDDKWDSFWLAHMKHLNILPEGYIYPKEQRAVRDLLRRRLFFVRHRTANILSLQSTITRNLGIKMSSNEIKKLDMDDACDLFDSSNLVFMAQNNISTIKHLGKIVKGIEKEVKSQVKLRKEFVMLTTTPGIGLILGLTIMLEVGDVGRFFKVGNYSSYCRSVGSKRLSNGKKKGENNKKNGNKYLAWAYVEAAHFAKRHIPKAQRFYQQKLAKANGAVATKALANKLTRASFFIMRDQVPFDEDMLFR

SEQ ID NO: 372582 - protein, 447 aa, unidentified
MQMVHPDAAAIDVGATMHMAAVRADRAPEPVRSFGTFTADLHRLVDWFTECGVETVVMESTSVYWIPIFELLDARGFNVFLVNARDAKHVPGRKTDVSDAQWLQRLHSFGLLRASFRPKGQIAELRAYVRQRERLLEYAASHIQHMQKALTEMNLQLHHVVTDITGVTGLRIIRAILAGERDPEALACLRHYSCRSSAETIAKALTGSYRAEHLFALEQALALYDAYHEKASACDARIEAVLKELSFHRGHGHGSAPRVSRRRNRTDQANAPAFDVREALFTLLGKDLTAIDGLGPYLSLKLIAECGDDLSSWPSAKHFTSWLGLAPSNKVSGGKMLSSRTRRSGGRAAALLRLAAVTVGRTDTALGAFYRRLSARIGKAKAVTATARKIAVLFYNAVRYGMDYVDPGASSYEMRYRTRVVNNLHRRAKAFGFVLHPLEPKVDAAVS

SEQ ID NO: 372583 - protein, 344 aa, unidentified
MKHYAGLDVSVKETSICIVDEAGRICREMKVVSHPEDLLAVLCDPAWRLERVGLEAGPLSQWLFSGLAEAGVPAICIETRHAKAFLKAQVNKSDRNDARGIAQMMRVGLFRPVHVKTLASQKRRALLAARKILEEKALAIENDIRGLLRNFGLKVGIVGVVGFEQRIHDLVEGVPELADIMEPLLAARRVLREKFAKLHRKVLLLARDNEVCQRLMTIPGVGPVVSLAFISTVDVPARFRNSKAVGPSLGLTPVLNQSGESHRVGRISLCGDEAMRALLYEAAQVMLTRVQKWSWLKAWAMNIAKRRGQKKPIVALARRLAVIMHRMWSDGTEFRWTREMAPTI

SEQ ID NO: 372584 - protein, 393 aa, unidentified
MICVGIDVAKDKYDCFILSSEGEVLADVFTIPNNAEGFDTLLQTIRRCARPEDKIKAGLEATGHYSYNILGFLLNEGLDTYVINPLHTNLYRKSLSLRKTKTDRVDARTIAAMLMSDVDLKSYTDTAYHNEELKSLTRYRFDKVRERAKLKQSVSRLVTILFPELEKLVSTLHMASVYALLSEFPGAKQVSEAHLTHLKAVLYDASKGRYGSDMATTLRDAARCSVGSVMPAKSLELRHTIRLIHELDAEIEDIEAAIQSMMDEIQSPITTIPGMGVRMGAMILAEIGDFSRFDSPDKILAYAGMSPSTYQSGQLSLSGAYSHMEKRGSRYLRYALYNATKYVCLWNPTFAAYLAKKRAEGKHYNVALSHATKKLVRLIYALEKSKRPYSTAA

SEQ ID NO: 372585 - protein, 337 aa, unidentified
MIHIGVDLHQRFCYMTAMETSGKMRQQGRVANDPASLRGYFGQWREPVEAAVEACSFWPAFFAAVEPLGVRLVLVHPQRVKAIASAKLKNDRVDSATLAHLLRARLLPEAWAPPPATRALRQQVRLRVSLGQQRTRLKNQVHAVLHQQGLRPPVSDLFGRRGRQWLAAVELPAAARQGVNTYLALLQSYDEQIRAWERSWAQDEEGEARVQWLETIPGFGGYAARLVLAEIGDIHRFASKRQLYSYAGLVPRLRESGQRQRRGGITRSGSPRLRWMLVQAAHSAVRSSPAARAYFQRLARHKHRQVARVALARKLLGAVWALLRHGVCFDEEVFAAR

SEQ ID NO: 372586 - protein, 379 aa, unidentified
MPAYADPTPKPISADTIFLAFELSGTSWLVALHAPDADKVERHRLPAGVAAEVLGLIARTKARVTRRLGTTPRVACCYEAGRDGFWLHRVLEAEGIASHVMDPTSLQVDRRARRAKTDRLDAQALLRALMAWSRGERQVCSMVRPPSPEHEDERRLSRERGTLLKERLRLSNRIKGLCAAQGIYDYEPLGADRRERLARLVTGDGRALPGRLAAEIGRQLDCLELVLRHLAEVEAVRDARAAQAREEGGSKLAALLRLKGIGPEVATVLELEVFHRHFANRRDVAAYAGLAPSPYASGGTSREQGISKAGNRRARKALIELAWLWLRHQPESALARWYRDRVGTTTGRVKRIAIVALARKLLVAIWRYVETGLVPAEAE

SEQ ID NO: 372587 - protein, 350 aa, unidentified
MNKHSKKANVKVLGIGLAKQSFQLHCVDESGHTVFRKKLTRNKLSQCIAQLPPCLIGVEACSGANHWVRVFKSFGHTVRMIAPQFVKPYVKSNKNDAADAEAICEAVSRPSMRFVPEKSIEQQDIQSVHRIRSQLVARRTAQGNQIRGLLSEYGIVVPKGIQYVRRQIPRILEDAENGLSDLFRELLNELYEELVHLDERVGALDKKLLRISQQNEDCRRLETIPGVGVLSATALVAAIGDIGAFKSGRELAAWLGLVPRQHSTGGEPKLLGISKRGDTYLRTLLIHGGRTVVRVAHKYQDRKNRWISELEQRRGKNISAVAVANKNARIAWALLTKKTSYQTKDLVAQP

SEQ ID NO: 372588 - protein, 347 aa, unidentified
MRFYNEQRQFYCGIDLHARTMYLCIVDQVGNVLLHKDFKAQPAALLRGVGPYREGLVIGCECMFTWYWLADLCAKEEIEFVLGHALYMRAIHGGKSKNDRIDSGKIARLLRGGTFPLSYVYPAQMRSTRDLLRRRTFVMRRRSEALGHIQMTYQQYNLSSPKRRIRYAGNREAITEPFEDGSVKKMLAVDLAVIERYDQIIKDLELFLVRHAKMDDGQTFFLLRSVPGIGKVLALTLMYEIHDIGRFPTVGQFISYSRLVNCPHTSAGKLCGSGGRKIGNAYIRWAFAEAVCLLIRELPQAKRWIDRKEKKYGKGKALALLAAKLGRAVYWMLRRKEVFNAETFFQS

SEQ ID NO: 372589 - protein, 391 aa, unidentified
MTGLTAESAESGFQRGKIFVPIELSKVKWVVALRVPHLDKVSLFEIAGGDAERLLGLLDRARATVAAQGCDAPEIYTCYEAGYDGFWLHRLLVSRGIRNSVLDSASIQVSRRRRRLKTDRTDAESLIRVFMAWHRGERQACSVVRVPSPEEEDMKRLHRSRANLLRERVRHVNRIRGLLHLQGVVHIHPHRAGWTSGLKDLQTRDGRRFPEQLMSEIKREAKLLETVKKLLREVDLELIALVRTQRSRRPSPAREAAHPIASKLVRIRGIGPTLAAVLATELFYRRFDNRRQVASYVGLAPTPYSSGATSRDQGISKAGNNRARHNAIELAWLWLRHQPESRLTAWYRDRVTNAQGRIRRIAIVALARKLIVALWRFLETGLIPEGVLLKA

SEQ ID NO: 372590 - protein, 318 aa, unidentified
MPQPGRIVGIDVSKRQAEACLRSPPARLAQPSTPEGRQRMIAWLRERDVALAVMEASGGYEREWAEALRQAGVAVRIVDPKRVRYFARSAGRLAKNDPIDAAMIAWFAETFTAEAAPAEDPERAAVDRLMTARAMLVRLESQIKQLGEHRQPPLVERAQRAIAKAILAQRSKLEAAIAAKIERHAGFAARAGILRSVPGLGPRFTAGAIAWLPELGTIANRAAAALVGVAPYDDDSGARRGERHIKGGRREIRELLYMATFAATRCNPVIKAHYQQLRARGKKFKLALVACMRKLIVILNTMLARGQRWTPPAATAVA

SEQ ID NO: 372591 - protein, 341 aa, unidentified
MEQYAGIDVSLECSSVCVVDGTGKIVREAKVASEPQALIAWFGSLGSGLERIGLEAGPLSQWLFAAMKAAGLAVELLETRHVRKAFEAMPVKSDRNDARGIAQLMRLGWFRPVHCKSISAQETRSLLTARKLVQSKLRDVENSLRGILRGFGLKVGKTTGQKFAGRIEELVTGHPHLQMITKALLTVRAVLRSEFAAFEKQTRRMVQSDKQARLLTSIPAVGPIVALTYASAVDDPARFKSSKQAGAHFGLTPKKYQSGETDYTGRISKIGDASVRTALYEAAHIMLTKPVKGCSQLKSWAMRIKRRAGMSKAKVALARRLAVIMHRMLADGTPFNAAAAA

SEQ ID NO: 372592 - protein, 339 aa, unidentified
MNVIYLGIDLAKNVFQLCGLNQAGKPVYKKRTDRKTLLQTIANIPACLIGVEASTGAFYWQREFEKLGHKVKVISPQYVKPFVRGQKNDGNDAQAIAIALMQPTMQFVPPKSPEQQDIQAMHRARQRIVNHRTATVCQIRGLLLDRGITIGSAVSRVRRAVPLILEDAENGLSVRMRRTIAELYDLFNDLGRRIGFFDKEIDAVFRQSEACQRIAKVKGIGPKTATAVVAAIGKGTEFKNGRHFAAWLGLVPRQHSSGDRQVLMNMTKKGDKHLRTLFIHGARAVVRVAANNNEGYLNQWVNQLKERRGFNKTTVAVANKNARIIWSILHNETEYRLAV

SEQ ID NO: 372593 - protein, 414 aa, unidentified
MTSSVNISAGLDVHNKFILATILWSTGQLIQERFERTKDGLLSLKAWIMLQKCEVVACESTSDFWVPIYDLINDSIPVIVGNARDIKALSHKKTDKVDSEMIARLALHGMIQPSRVFCGEHREFRKILRLRHRLVEKRTSFKYQVKGILNAEMIRLSSVLSDVFGKSGMMLLTGIINGMQLNDIIPTLPKRAQEKKDKIIEVLGNNISKDALFQIKVLLDVIRCLDEQELLLKNSALHFAYKNYPREMGILMSVPGIGEIGAATLIAEIGDINDFPSGDKLAGWLGMVPNVYQSAGKLRTGSITKRGSVHARWILTQIAHAAARCRHNSLRFYYERKSGLIGKAKATIALARKIVTIIWHLLKNNEYYDDPLFPRKKVQTMNKVMVPKEVSLEQLLEIIAKADILIKAPDPDIL

SEQ ID NO: 372594 - protein, 368 aa, unidentified
MTKVLYIGLDVHKESIVIATALQDDTEAKLYGKIGGTLDALDKFIKKLAKPELELRFVYEAGPCGYVIYRHLQKRQYHCVVVAPSLIPTKASDRVKTDRRDARQLARLFRAGELRAIYVPDEEDEAVRDLVRARDRAMVDQRKGRQRLKGFLLRLGHRYLGKGNWSAAHLRYLSSLHFSHAAQQIAFQEYLEAITVASERLGRLTKAMETALPTWKREPVVRALMSLRGVALLNAMTLVAEAGDLTRFASPTPLMSYFGLTPSEYSSGEKRQQGAITKAGNGACRRALVEAAHQYRFIPRVTPAIQQRQEGQSQEVRAIALKAQQRLHARFRSMSARHKKPVVVAAALARELCGFVWALPARSVRQGN

SEQ ID NO: 372595 - protein, 379 aa, unidentified
MDHAITDTSAETVLRGALELSKNSWLLALQLPDRAQLSLYPIRGGDTEGLMAKLTAARERCAKVSGKAPSIVLCYEAGYDAFWLARFLKARGVECLVVDAASMQVNRRARRAKTDRIDVGMLVRALIAWGQGDRHVWSVVRIPSVDEEDLRRSHRERDRLVRERTAHINRIKGLLFGQGIRGINVKSKYKTLQIDKLVTGNGRQLPPRLASEITREIARLALVQEQIVALECERDQAPTPCKATEKKRVQLMCLTGIGPAIAAVMTREVYYRQFDNRRQVAGFLGLATSPHDSGDVERSQGISRAGRGQVRGIMIQAAWLWLKHQPKSAITRWFVQRTAGQSGRIRRSMIVAVARKLAIALWRFLEQGLVPQGAMLATR

SEQ ID NO: 372596 - protein, 407 aa, unidentified
MRVVGLDVSRTFGEIAYLEEGQVRPGGRVMLQHEPLQRFAQGLQPSDAVVLEATGNTAAIVTALKPHVAKVVIANPVQVRLIAEARVKTDKIDAAILAQLYASGFLPQVWMPDDRTQALRRQVARRSQIVRHRTRLKNEIHSVLAAHLIPQCPAADLFGRKGRVWLSEQPLPMDERLAVEQRLRELDRLEEDLEAIDRLLCEAVLQDDQLKRLLTITGVNCIVAIGLLAAIGDISRFAAPEKLVSYFGLNPRVRQSGLQPAQHGHISKVGRAHARAMLVEAAWSAANAPGPLRAFFLRIRGRRGQQIAAVATARKLAVIAWHVLAGQEDFAWSRPALTAKKRRELELRAGMPAKKGHRGPAAEYSLKEVRATERAAAQVAEQAYVRFVANWRPKKPSPSRTEEASRR

SEQ ID NO: 372597 - protein, 344 aa, unidentified
MTSMLHPAQSSQADADDTEVILGVDTHKDTHVAAVLNSMGALLDSRCFAATAAGYQQLLGWAQAFGTPRRAGVECTGSYGAALSRHLQAAGVQVLDVNQPDKATRRRRGKTDAIDAEAAARAVLAGRATATAKTGAGPVEMARLFKLAKDSAIKSRTQAINQLKAVLVAADPALRESLSGLSSRVLIRRCAQLDPAAPTDATSAAAKITAAVTAHTPQLLACNGVGPDIAVTLLITAGDNPERLGSEAGFAALCGVSPVEASSGKTQRRRLNRGGDRQANAALYRIALSRLRWDHRTRDYRNRRIAEGKTPREVIRCLKRYIARELYQLITKPQPTPIADPSAA

SEQ ID NO: 372598 - protein, 418 aa, unidentified
MIIPFRFPYQATVGLDWADQKHDVFVRFANGDSYRRTIDSRPEAIQEWLLELRSTCGEGKIAIALEQRCGALFFQLCTHLSWIDLYPINPHSLASFRKTFFSSRAKDDPVDSQLLEELLRTHPERLRSYQSEPTAERKLDQYCRHRRSLLNLATKTELKLISTLKQYFPLAVHLFGEVGLKSDIALNFLSRWPTLDELRKAKAQTLRCFFYAHNSRSQSLIEERIQLIAQAHSVTDDLALIEPLALTTKCLVAQLRQFNKAINEFDHKIKELFKSHPDHFLFESLPGAGEQLAPRLLSLFGSDRSRWADATDIQKYSGIAPVVERSGKSLWVHRRLARPLFICQTFHEFAQQSTKRSSWADQFYRRQREKGKSHHSAIRSLAFKWIRIIFACWKTDKPYDESFYVDAIAKRNSASSST

SEQ ID NO: 372599 - protein, 371 aa, unidentified
MNDFSKYVGLDVHKETIAVAVADANGGEVRYYGEIPNTPEEVVKLVRRLRKEGARLSFCYEAGPCGYGLHRQLKDLHQDCQVVAPSLIPKKPGDRVKTDRRDSLTLARLLRAGELTSVWVPDEAQEALRDLTRAREDMKHLQRVAKQRLLAFQLRHGKNYPGKKNWSQAHFRWLETLKFDQQVQQIVFQEYIDTVQALTKRVAIFDAQIETAGVESAFSLQIEGYMALRGIDRLTATTIVAEIGDLRRFPDAPALMKYLGVVPSEHSSGATRSRGGITKTGNGHVRRVLVEAAWTYRHPARKSPLLQRRAERTSEAVQEIAWAAQKRLCVRYRMHEGRGKKKVQACTAIARELTGFIWAIGQVLPPPAVKA

SEQ ID NO: 372600 - protein, 526 aa, unidentified
MPYHVRSSHRVLRKSNKPKRQSLQKPNGVISPRVRKVGGERFAIVCVDPAKHRSEWMMADYFGNLLIQPRTLEHQGRFFKSAVELIRQAQELHNIEDMIVVVERTGNYHLPPKRAFASAGFETRVVHPFATKQFRMPADPGNKTDETDLYAQHRAAVAGFGLCEYELESPYRELQLRARHRRNLVERAAAIACQIREHLHLAMPGYAKLFDRLFESPTALAIAHHCDSPAKLLQLGQAGVSKHLRKNKIRHQVRSIVKVLTWAAQVADDNIQDGPMHHAIWTDLHELYQHFQRKISILEQELAGDLVQTPYVRLLAIPGINVVSAADLAGEMGPMTRYANSNAITGRAGLYPSRHQSDQTDHDSGPIIRQANRRLRCVLMRIADNLACHCAYYRGQADVDQKRGVDKRASRVKIAKRFSRLALACVAGDQPMRHPCFQQAGSILEKLRQFHRLHGTSLEQLLADLETAVEQLPDSTRHREAEMVAGLLAQQTTRQRAASAIGDVLPAVLARLNLKTTKESENRDRS

SEQ ID NO: 372601 - protein, 347 aa, unidentified
MRYFAGLDVSLEETAICIVDDAGLIVREARAVSEPEALVTFFRGCGLVMERVGLEACSLTAWLHQGLTEAGIAAICIEARQAKAAMGAMPNKTDRNDARGIAQIMRTGWYRAVHVKNPSCRSWRALLTARRMVLNKRRDVENGVRALLREAGLKIGTPSRKNFAARVGELVTDDPVLAGLAESLLSVIDVMTREVDRLTKRVLDEVRVEPTCRRLMTVQGVGPLTALAFRATIDRPDRFRRSRDVGAHLGLTPRRYQSGETDVQGRISRCGDELARTALYEAAHSLLIRSTKWSVLRAWGMNVAKRRGMARARVAVARKLAVILHRVWSDGSKFRWGKQIATPAAAA

SEQ ID NO: 372602 - protein, 372 aa, unidentified
MGHHNGAFIGIDTSKLRNAIAVAEEGRGGDVRFLGEIDTTEAATRKLVTKLATKYRQLTFCYEAGPTGYGLYRLIRKLGHDCIVVAPSLIPKKPGDRVKTNRRDAVGLAKLSRAGELTAVWVPDERHEAMRDLSRAHEAAQKDLRGKRQQVSSFMLRLGRHYPGKKTWGRAHMNWLMQQKLEQREQRIALEELLGAVRQESERVERLEQAIRDATPEWSLAEVVTALQAMRGLDLVAAVTVLAEVGDLSRFQTPRQLMGYLGLVPCESSTGDTVNRGGITKAGNGRARRILVEAAWSYRHPPRVSLKKQIKVAASPQAVREIAWKAQTRLCRRFRSLTQKGKRPNVIVTAIARELSAFIWAINREVMAGRLT

SEQ ID NO: 372603 - protein, 329 aa, unidentified
MQDFLIVGVDVSQDTLDIHFKPSGNSLRIENETAGFKRLLSALRKESTSHPRLMVVMEHTGHYSHRLEKFLLANGIDFCKLSALHIKRSAGLIRGKDDKADARRIAEYGWLRRDELQPHVMCTTEVAALKNLMSLRAKLVKDRAGYKTRLKGMLTTGTCTTGDLLFSVQNTVIKELTVHIKVIEQQIKAIIVASPLLKNNYELLCSIKGVGFVIAAYMISCTENFQKFASARKFNCYAGLAPFKHESGTSIKGKSKVSHLANKEAKALLGLAANSAIQYNEELKAYYNRRIKEGKLAWSSKNIVKAKIVARMFAVVKRQTPYQPLPKAA

SEQ ID NO: 372604 - protein, 428 aa, unidentified
MNYNQNQRLNQLDENILIIGVDVSKKFHVARAQDFRGIEFKRGIKFDNSRQGFVEFEEWKNALQVENNKTKVLVGMEPTGPYWLPFARWLRTEGYWTVTVNPAHVKKSKELDDNNQAKTDYRDARVIAQLLKDARFSEPNLLEGVYEELRNAKNIRKVMVNDLKRIKNQMANWLDRYFPEYKKGYANWESESFLYVLDKYKFPAKIAELDTDEVYSDVRKKFPRGVGQKKIENLINASKESIGITEGCRMAEKELDYLLKRYKELASDIEEIESTIESLCEELPEVQKITQIKGIGITTASGVVAELGNIKEYKTPKQMIKMAGLSLTENSSGQKKGKMSISKRGRKDLRKILYQAVVGMIRTNAAFHELYQYYRYRAKNQLTGKQAIIVLVNKLLRIIHTIVVKDIDYDEAKMLGAIKHPDEFSFAA

SEQ ID NO: 372605 - protein, 344 aa, unidentified
MANLNQFCDFTKLIGIDIAKSVFQIYSCDTQTGEITNVQIKRDKVLESLANCGKCLIGMEACGSSQYWARKLQALGHTVRLMDPKLVKPFVRHNKSDKADAEGVYHALVSGVRAVAVKTETERDIQTLLTMRALLVKQRTARINHVRGLLAEYGHVMPRNVNQFDNKVDECINSLEGDAVQLVINMMRDTVKSIRDDQDRIKTLQREISRLANQTRNAKHFLTVPGVGETIMAYMCVLLADPTQFSLARQFAAYLGLVPMHTGSGGKTVTTKIPGRCDKALRAVLVQGAHAVARSKCRTDWVKNILAKKPKKVAMVAIANRMARQCWAVASKGQDWRRMPVTAA

SEQ ID NO: 372606 - protein, 344 aa, unidentified
MNIPPKETASNTKPPLFAGIDVGAEELVLVIRKNNKSLNPQKFTNTPSDRTRLVSKLAKLSGIIVCLEATGVYHFDLSIGLHDAGISLMVLNPKASHNFAKVLMKNSKTDAVDANTLAEYAERMAFVAWTRPSTEKIALRSLARRIHSLSKQKAAAKNHLHALTATTETPKAVLKDANLAISQLEKRIDNLTTAALLLIAKHPELARILHLLISIKGIAETSAIALMGELLLLPPDLSHRQWVKFAGLDPQAFESGKSVHKKTRIAKSGNAHIRAALYMPALSAKEHDPHVKAYFQHLVDNGKLPLQAVCAVMRKLLHAIHGMLKHNQPFDNSRFYAIPILENS

SEQ ID NO: 372607 - protein, 323 aa, unidentified
MTLVVGIDIAKRTFDLAILQPNGKHRTKSKLSNDQAGFAVFEDWLQRHAEPGAWIVMEATGIYHEALAEHFHALGYRIAVLNPAQIARYAQSQLQRSKTDKLDAKLIATYGQRHLDHLRAWQPEPRSLRQLRALTRHLEDLQALRQMELNRLDVSRENVKDSIQAIVQRLNEQIEWTLKQIKQHIDDDPDLRGKRDLLVSIDGIADKTAALILAELGEIERFTHSRAVTAFAGLDPRLQESGAFYGRTRISRTGSARLRSALYLPAVVAMTYNPAIKAQVERLRARGKMGKQTVCAAMRKLLSIAYGVLKSGKPFDPALAIAH

SEQ ID NO: 372608 - protein, 347 aa, unidentified
MTEGYDGRQVVGMDLHRRRSVLVRMTEDGRKLETVRITNSPAALRAVIARAGKDPRVVIEATYGWYWAVDVLEAAGAEVHLAHPLGVKAYSYRRVKNDERDASDLADLLRMGRLPEAWIAPPEIRELREISRYRHQLVKARTSLKDQVHGVLAKLGIPVTHTDIFGVHGQAWLDELAMPQPYAGKVASLRQLAGELTVEITLLDTVLGDLLAGHEGYAAIQQLPGIGPVLAAVIVAEIGDIRRFPGPGQLASWAGLTPRHYESDTKVIRGHVTKQGSRMLRWAVVEAIQRQPAGSRPRQVKDAIIARRGKQAKNIAKIAAARELLTLVYYGMRDGRIRRAAPSGQAA

SEQ ID NO: 372609 - protein, 402 aa, unidentified
MTSYSYFAGIDWASQSHSVCVLDAAGGVELRLDVPHNKEGIERLIRQLRSFAGIVIAIERPSGLLVDALVEAGLRVVPIHPNVLKASRPRYRSAGKSDPGDAYMLADILRTDGHRFRALEPQSDEIRALRALVRTRDELVDSRVALANQLRSLLESFWPGAAEIFYQIDTPIALAFISRYPTPQSAAHLAEKRLAAFLAQHSYCGRRPVAALLERLRAAAIGRAGELEAEAKGELARSLASVLEPLVAEIAKLSARIEHTVANLADGQIIMSFPRSGRICAAQILAELGSVRERFPNQEQLAAEAGVAPVTYESGKHRSVAFRFACNHRLRRALTCFADQSRHANRWAADVYQRARSRGCDHPHAIRVLARAWARVLWRAWFSRTPYQPHLHRSAAAFAATG

SEQ ID NO: 372610 - protein, 408 aa, unidentified
MQVTFGIDVSKSNSTVCELIGESKNELTITNDRPGFIQLLHELAAFSKHPQIIFEATGVYSRRLQAFLENYGYEYVVLNPLKAKKEMNMGLRYNKTDKTDAYHLALIQRLYRHPVNQSESQTYKQLNALSRFYDQLTSDLVIAKNRLHQALQSTFPEIENLFSIARGKNYWHIVARYPHCDLVRKDDKKQIINWLMKLKGIAFNHAQRTTDKLIELAHLAYPVVSCSDIEVQQAQYYARRLLNLSNQRQRIITKMVKLAKTLPNHDLENLESIPGFAQTTAVRVLAELGDLRRFSNPNKINAFIGIDPGRYQSGEMDSNLSITKHGNAVARKLLYRAIGQIDNAAKTNPCHIADYYESKKLSSQTKGFKKIAIASIHKLIRTIYALIINDQPYDYNVATHNQKDFSRN

SEQ ID NO: 372611 - protein, 347 aa, unidentified
MFPFYLGIDLHLKRSYLVLMNAEGEVIDKRRLKNTEMASYISKNIPKETYAVMEATRNWPFFYDLLAKHVDRVELAHAKGVRMIAAAAVKTDQIDASVLAHLARLNFLPIAYAAPKEIRDLRQHLRYREWLIDERRRAKNRIHAVLAGYNLASPVTDLFGRAGREWLQEVAEKELRPTSRKVVLETLTMIDQLDTQIKELAKDIPLPEELKQKAELLTSMPGIGKLLSAVILAEIGDISRFNSPKALCNWAGLTPRVHKSDTVVRHGRISKQGSRYLRSAMVCAAMTACRISPRWYGVYEHLAMKIGRRAAKVAVGRRLLTVVYYMLKRNQPYEEDYEQRRAAEQGA

SEQ ID NO: 372612 - protein, 400 aa, unidentified
MMTPDDIDVWVGLDVGKSAHHAHALDRDGDTLYDKPVRQDEKAIRSMLGKLSKHGRVLLVVDQPNTIGSLPLTVARDMGIAVAYLPGTAMRRTAQLLPGDAKTDRRDAHVIAWAALKLPETLRDAGSDDETLAALRMLAGHDEDLAHESTRHINRLRSLLLQTHPAFERVLKGERATRDATLALLERYGGPAGMKRAGIEDVKDWARSNGLRAGRIIDDMFKAIGEQTVTVPGTGMAETIIPAIARDIKAIKDRRREVGRQVEKLLGDHPLLTVPASMPGIGVRTASNIPLGIGGDIANFKSAAHLAAYAGIAPAAGQSGTSIKGERPSRRGNKRLRNALWQSSFVASTKHPPSIAYYKRKREQGKHHNAAVICLARRRCDVIYSMPKNGALYQEPALVA

SEQ ID NO: 372613 - protein, 457 aa, unidentified
MAKQRSKGKKPTAKADATQGLPPLNLHAAGIDVGSAEHYVAVPPDRDADPVQKFGSFTADLHRMARWLKACRIQTVVMQSTGVYWTALYDVLESHGLEVNVANARHTKTLPGRKTDVQECQWLQKLHTFGLLNGSFRPAEEIRVLRGYLRQRENLVAAAATCIQHMQKALTEMNIQLANVISDISGTTGMAILRDIVGGERDPERLSLHKHSRIRASRQEIARSLEGTWRQELVFVLEQSLDLYQTYQKKIQTCDQRIDEQLRSMEAKVDPLSDPIPEPRRGKDARRHASGFDLRGQLYRITGVDLTQIDGIEVQNAQTIVSEVGVDMSRWKTEKHFASWLGLCPDNRISGGKVLKRGTRQVVNRASTALRLAASALLRSRSALGAKFRRLRSKLGAPKAITAMAHMLARLVYRMLKFGHEYVDRGIQFYETKYRQQQLRWVAKQAAALSMQLVPST

SEQ ID NO: 372614 - protein, 337 aa, unidentified
MKVTLIGIDLAKTIFQVCGVNQAGKTVFNRQLRRNKLMAFLMQHPEATIAMEACSGSNYWGRELEQKGSTVMLIPPQHVKPFVKGNKNDRNDAFAICEAACRPDIRCVQPRSLAQTDTMLIHRILERRVSERNSLMNQIRGLLNEYGVVVARGKEKLRNELPFILEDAENELTETARYYLHRQLLEWRELDSAITELDKAIAQQVKSSEQSSRLKKIKGVGNKISSAAEAFMGNGSGYRSGRHFAANLGLVPKEHSSGGKQRLGSITKRGNAYLRRLLIQGAWSVIRYADHSEDRLSRWAKQLIERRGKHKAAIAVANKLARIIWAMSYHQTEYRAN

SEQ ID NO: 372615 - protein, 346 aa, unidentified
MSHYVGLDVSLKEVSICVVDADGKVLNRASVPTEPDTIADYLAQEAPNTERVVHESGILATWLTRELERRGVPITCIDARMAHKALSARLNKSDKADAEGLAQLARTGWFTKVHIRSEASDRVRALVAARERLIRMRKDIEAHIRGVLKTFGIRMGPVLRAHHRQGFRDQLAEAGGCDPMLGLLAQTMIPIHKTLCASAEALGDELMHIAKQNTLARRLMTVPGVGPLVALNFIATIDDASRFRRSTDVGAFLGLTPRRYQSGEIDRSGRISKCGDAEMRRLLVSAATSLMTQVRRFSPLKSWAIRLSARKGFKKAAVATARKITVILHAIWRDGTEFTWTKEPLT

SEQ ID NO: 372616 - protein, 412 aa, unidentified
MDISLDDVKVHILDQDGIDACSRFSIDNNPSGCNILVSHILDCCNKYNIQKVFIGLESTSVYGWHIQYYLADHASLKPFNPSVTTFNANTVKAFKKSLGNLPKNDWVDAFVIAEKLRFGRLPKSCPVDFRYLALQRLTRHRFHIVDSIVREKNYFLSNLFLKFSGLCQTKVFSNNFGTTATEIFNEFLTLDDIAARPLEDLVAFLVDKGRDHFNDPNATAKLLQEAVRKSYRINANVNDSLNFVIKSCLDNIQYLEKQKKASEKTIANEVKGFKNQFLCLTSVNGIGPTIAAGLISEIGGISRFDNDNALAKFSGIYWSEYQSADFKAEDTYLKRTGNEYLRYYFIQAADQLRKYCPEFSQYYARKFNESKTHKHKRALVLTARKAVRLVFALLREEKLYKPPAMKGDDCKE

SEQ ID NO: 372617 - protein, 310 aa, unidentified
MDAIYVGIDVSKDRLDVHVRPSREAFVVARDGKGLEELIERLQALSPRLIAIEATGGFETIAAAAIAGAALPLAIVNPAQVRHFAQAVGKRAKTDPIDAEVIARFAEAVKPEPRPLPDEQARLLAELVARRRQIIEMIVAERQREKRAENVRVRKSLARTIKTLEKELPEIDGDIDTLVRGSPAWREKEDLLVSFPGVSNILARIFLAELPELGRLSRREIASLAGLAPYTRQSGRWKGKSMIGGGRAALRTALYMAALSASRCNRPLKVFYQRLLSAGKPKMVALIAVARKVLTILNAMVRDKKEWQIA

SEQ ID NO: 372618 - protein, 336 aa, unidentified
MQELLEFVERTTDKVLRATGRPVRIVSCYEAGYDGFWLHRVLDARGIINHIIEAASVHVSRKARRAKTDRLDAENLVRVLIAYWRGEPKVCSVVRPPSIEEEDAKRQHREREFLMKERVQHIGRIKGLLATQGVYAFQPSRRDWRSRLSKIVTGDGRPLPPRLAREIDRHCQRLVMVNAMLKEIDEARDAASETSTAPSIPSAQNVQRLLQLKGIGPQVADVLATEVFYREFKNRRCLGSYLGLTPSPFQSGGMDRDQGITKAGNPRARTMSIELAWLWLRYQPGSALARWFHDRTNGAKGRMRRILIVAVARKLIVALWRYLETGLAPDGAELKA

SEQ ID NO: 372619 - protein, 397 aa, unidentified
MYIVGIDIAKRKHEAAVIDGEGAVIIKPFSFTNNCSGYNRLLAMLAKAKLPLDEGSFAMEATGHYWLALFTRLQKEGFRVQVINPVQTNSIRSFYIRQAKTDPRDALLIAEVIRFGHFSESTLHPENIYELRELCRGRHAIVSMQADVKRKVVALLDQVFPEYETAFTNMFSDTSMAILQTCPTPKELSEMPLEDLCHLIEVSSRKRFRMAKAQELQELARNSFGFAMAGDVFSTMIRLYAKHLDFLKQQVREMDRKIAEIMDTLDTPITTITGIGPTLGAYILSEIGDISRFSSAAKLAAYAGIDPTMRQSGEYNGVRNRMSKRGSPYLRHAIWLAASSAVLHDPALKLYFQKKRDEGKPYMASVGHACRKMVSIIYAVMRDNKAYTPYIPNEISA

SEQ ID NO: 372620 - protein, 320 aa, unidentified
MAQPNIVSAGVDTSKDKLDVAIHDRKGGFIVPNDAAGWTVLAARLHEAGVGRIGIEATGGYERGALRALQKAGFEVVLLQPLQVKAFGRLRLQRAKSDTLDAALIAHCTHVMDAHNKMPPDARFDAFGDLLTYIEQIGEDIVRFKTRLEQIRDVRVRKMVQDQIRSFQKQKITELKRLRALVLAHEDLAARYKLVLSIPAIGVVTALSLVVRMPELGQISREEAAALAGVAPFVHQSGKRKGETHIGGGRERLRRALYMPAFTGAFLWNPALMTLYRRLLARGKSHKCAIVACMRKLLIFANTVVARGTPWLANRTIAPI

SEQ ID NO: 372621 - protein, 336 aa, unidentified
MNTISTVVGIDISKKKLDVALLVNGKIKAKVVENSAAGHQCLLDWLDKSKIQRAGLHVCMEATGVYYEAVATALHDAGLMVSVVNPGCIKGFGQSENLRNKTDKADAALIARYCAAMSPKRWTPPPLEQRQLRAWSQRIQALKDMRQQESNRLESYTVSGMNEVAEHARSLIAWLDAQIKQLEVDMDDHINRHPGLKHDVELLTSIPGIGNTTAARLLGQLGDIRRFGSAKRFAAFLGVTPRQRSSGTSIKGRTMMSRTGSLSLRAALYMPGMVASRYNPLLRPFALRLAATGMAKKAVIGAVMHKLAHFIYGVIKTNKPFDPNYLAKGLAIQDGI

SEQ ID NO: 372622 - protein, 343 aa, unidentified
MKIYFIGIDVSKEKLDLCLHSNEKILKEWILPNTVSAIQSSFKSLQKDYDVETSVFLVCAEHTGQYTYPLACACDETGFDLWLDNPAQIKHSSGIKRGGNDRLDARKIAAYAARFQDKARLFSLPQKNIASLKQLVSERDLYVSDKGKFRGQLTDQKRFMNEDDYAKKSKRLQALIESLDEAISVIEQEIEQLIKGDDALSNQYALLCSIDGIGKQIAVKMIVETNAFNDFDNGRKFCCHAGVAPFQYTSGTTKRSRNKVSHRADKSIKALLHMAALVVATRKKDGEMREYYLRKVAEGKNKMSVLNAIRAKLVLRMFAVIKNNKKYDKKWNEQKVDNEQKVD

SEQ ID NO: 372623 - protein, 342 aa, unidentified
MQITTIGLDIAKNVFQVHGIDAGEKVVVRKQLRRSQMLAFFEALPPCLVGMEACASSHCWARELTKLGHQVRLMPAKDVKAYVKRNKNDAADAEAICEAVRRPTMRFVQIKSVEQQARLMLHRARDLLVRQRTQLINALRAHMAELGIVAAQGREGVKELLKIIASEEDARLPVDAHTSLVVLAAGLQALQTMIRSIERRIIAQHRSDEASKRLRSIPGIGIVGATAIAATVPDPKVFRSGRDFAAWIGIVPRQDSTGGKQKLGPISKQGDQYLRRILVVGAHAVLKRARHQPEKYPWVTRLLARKPFRVVAVALANKMARVAWALLAKGGTYRAPALAAAA

SEQ ID NO: 372624 - protein, 338 aa, unidentified
MPTDQTVPTYTLFVGVDIAAQTAMVATQRPGAKASRSFTIEQTPEGYTSLLRQLQATGFVPGQVLVVMEATGSYWISLATRLVHEGFAVSVINPAQAHHFAKALLKRAKTDAIDAQTLAQLAMILQPEPWTPPPQIYYALQQRLAQRDDLLNLRQQVRNQLHALVQHPEVIAEVRARMESLLATFASQLTEVESEITAALSQDSAWAAAATRLQSIKGVGWVTAAWTLVTTLNLTSCDTVDSLTAYAGLAPMPRQSGSSVWHRPSIGHTGNGRLRTAFYMATLSAAQHNPVIKAFYTRLREVGKPEKVARCAAARKLLHIAWAVVKKDQPFDPNYALG

SEQ ID NO: 372625 - protein, 336 aa, unidentified
MSHYCGIDLHSNNHVVVVIDEEDKRVLEKRLSNDLSLTLKALSPYRKSLQGIAVESTFNWYWLVDGLQEQGYDLQLVNTAAVKQYDGLKYSGDHQDAFHLAHLMRIGILPTGYIYPKEQRAIRDLLRRRLSLVRAASTQLISAQSQIWRSTGIRIKSGELRKPVFVPPPVDDYTRQAVHAVLAVYQAIQCEIDGLEKSAYQAVKLTEDFAILQTITGIGKILGLTIMLETGDIHRFAGAGNFASYCRCVDSKRTSNGKNKGVGNAKAGNKYLSWAFSEAAHFAVRFEPLAQRFYERKKAKTNGIIAIRAVARKLARATWMMLKHQVPYDARRMFPG

SEQ ID NO: 372626 - protein, 341 aa, unidentified
MKPAMNVLGIAIAKHVFHAVGMDNTGEIVFRKRLSRHDLMPFMAKLPPVLIGMEACGGAHDWARRFREHGHNVKLMAPQFVKPYVKSNKNDSRDAEAIAEAVTRPTRRFVPIKDVDQQDIQALHRVRERLRGERTALVNEVHGLLHEYGIVIPTGVAKFRQAVIGKLESEKDKLTSLSQEMLWKLIEEFAGLEKQLASYQEKLEALATTHPECQRLMTIPGIGPLTATALVAAVSDASAFKNGRQCAAWLGLVPRQHSTGGKDRLLGISKRGDSYLRKLLVHGARTTIRWVGRKTDRRSQWIRQLVERRGKNRTAVAVANKNARIVWALLTSHQDYQLATG

SEQ ID NO: 372627 - protein, 412 aa, unidentified
MQALIERGCGLDVHQATVVACLLMVRRDGKVQKQMRTFGTTTRELVGLREWLLSEGCTHVAMESTGVYWKPIYAILEGALEIVVANAQHIKKVPGRKTDVKDAEWIADLLCHGLLRSSFVPPKPIRELRDLMRYRRKLMESQAAERNRLLKVLETANIKLANVATDVFGMSGRLMLRALIAAKATPQEMAELAKGLLRKKIPELQVALEGKLEEHHRFLLELQLQRLEEAEKDLAALEQRIRQKLEPYAAQMALLDEIPGVDWTLAAVIIAELGVDMNVFGSVSQLASWAGVCPGNNESAGKRKSSRIPSGNVYLKSGLVEAANAAARAKGTYLRDKFFRLKARRGYKRAVVAIAHKILVAIYHMLSQQVSYNDLGDLYLDKLNKNHLTRNLVHRLERLGYTVTLTLQQKAA

SEQ ID NO: 372628 - protein, 318 aa, unidentified
MARIICGVDVSSISLEAFVAPQGATGGFPNTVEGVSALLEFCQQQQVELVAMEATGGYEKKAVQMLWAEGVGVAVLNPRAVRQFARSLGLLEKTDRIDAQVIARFAAAKKCEPSVPASAEQQCLKALSRRLQQLSRLAADQKNQRHLVSEPRVHRTFDAVLKIAKQQMREVEAEIATLLASDPLWQKLEEALRSIKGVAGRTVARVLADLPEIGTLSNKAVSKLAGVAPLAQDSGKREGKRAVRGGRRNVRAILYVVAGVVRRYNADFAAFAERMAAKGKPKRVIRVALAHKLLIRLNARARDARAAFSCAGLVEQNA

SEQ ID NO: 372629 - protein, 321 aa, unidentified
MSDRTSESDRIVIGVDPHKASWTAAAVGPGLRPLATIRVQVDPQGYRDLRRFAARWPAAVWAIEGAGGLGAPLATRLAADGIAAVDVPAKLAARVRVLSTGHGRKNDDADATSVAVAAQSAAGLRTATVDEAVTALRALVEHRDDVVKTRTQTVNRLHALLTQLLPAGAPRQLTADSATQLLRPVRPRSIAARTLRRLAAELITEIRHLDRRISVANTEITHAVQASRSTLTELRGIGHLNAGKILARVGDVHRFRSAAAFASYTGTAPIEVSSGDVVRHRLSRAGDRQLNCCLHTMAITQLQRDCPGRTYYLRKRPLQGC

SEQ ID NO: 372630 - protein, 553 aa, unidentified
MAMKVLVKAAATSSIPFGRLHSFLLQRPDRGGGINSRQEQPQHRLMKTKPTRAKPPGPTSTAAKRKLRLEKVTKAGKGRVVDVTALDHMKQINFHAAGIDLGAAENFVCVPATSTALGESPVRAFGVFTEEMDALVEWLRVCQVTSVAMEATGIYWMVLYDKLEAAGMEVVLVEPGSVKSVDGRKSDVLDCQWLQKLHTYGLLSRSFRPDAPVRRLRTLTRHRAILVECGTDHLRRIEKALVQMNLQLNLVVSDINGETGLRILDAIVNGQRDPKELVKLRDPRCRKSTVAQMEAALTGHYTDDLMFLVEQNLAGWRFFQKQMEECDREIEKALAHIPTAKVENIPPPPPQAVPAASAEEQAAHAKRKKKSAANRGNNALTLDAVSLCQQLQRICGVNLMNVCGLNLLSVLMIIAEVGTDMSRWRSAKAFCSWLGLCPGTKISGGRILSRRSRRVVNRASTILRMAALVVGRTDSWLGRFYRRKKAHLGAPKAITATARKLACVIYHMLKYRDEFVPLDVMVYETKAAEHRLRRLRRDAQAMGLELVKKEHAA

SEQ ID NO: 372631 - protein, 388 aa, unidentified
MLLPIDLSKKSPTTFEQGATLVAVVELSLKSWLVAGIVPGIDRHPLKKFEASENRLLALLGHWQQQALNAGSRIKRIVVAFEAGRDGFWLARWLRARGIEAYVIHPTSVAVSREHRRAKTDRLDTELLKRAFLGWLRGETHHCRMVAIPTLEEEDAKRPNREHDTLVRQRTRIINRIKSGLVRFGIQNFKPTLRKSAERLAKLMTPEGMRLPPNTVAELHRDMERLRFIRDQIKAVEQARIKNLKTAPKTQSNAMVLLIARVFGIGIETADMLVHEILSRNLRDRRAVARYAGLTGSPDESGDRRREKGLARAGNARVRRGMIQLAWRFLRFHSDNPLAQWYHKRTADARGSTRKTMIVALARKLLIALWRMVTTGEIPRGLKLRAAA

SEQ ID NO: 372632 - protein, 366 aa, unidentified
MREQDEGNRITIGLDLGDRRYRFCALDGKGQVVEEGTLSNKRESLSELSRRYRRALVVMEAGCHSPWISRHLEGAGCEVVVSNPRKTRAIYQHERKSDRRDALMLARIARMEPALLYPVQHGSAQAQQDLLRIKLRDSLVRARVGVINSLRFTLKSLGYAIANPSTERFHKVIQEQVPESVGSVIAPSVQALKELSLRIKLLDREIITLARSKYPETTWLEQIPGVGPITALYFVLKIQDPARFERVRDVGAFIGLCPRRDQSGENDPQLRISKRGDAYLRRLLVSAAQYILGPFGPPSALRQYGLALASGGTPRAKKRAIVAVARKLAVLLLTLWKNKSLYQAFPLSRDGEKMRTSDLERLRCIA

SEQ ID NO: 372633 - protein, 366 aa, unidentified
MKKISTVQAFGNEIFKEQKLTIGVDLGDRWSFYCVLDEAGKIILEQKLPTTPDAMKQTFSRTPQSRIALETGTHSPWVSRLLTELGHEVIVAHAQKVQLITKSNRKDDRHDARTLARLARIDPELLGPVRHRSVQAQIHLTVIRARAELVSVRTALVNAARGLVKSYGERLPKCGTEQVSRELAAALSTELRDVLEPLLKEIESLNERIKEYDERMEKIAKEVYPEVSLLKQVKGVGTQIALTYVLTIEDPHRFLKSREVGCFLGLKPGRRNSGESEPQKKISKTGDRYLRTMMVQGAHYILGPFGEDSDLRRWGRKLSERGGKNAKKRAVVAVARKLAVLLHRLWVSGEVYEPLRNSQRAMQAVA

SEQ ID NO: 372634 - protein, 343 aa, unidentified
MQTIATIGLDIAKSVFQVHGVDAAGQMVVRRQLKRRQVLAFFAKLPPCLIGIEACASSHYWARELQALGHTVRLIPPAYVKPYVKRQKNDAADAEAICEAVTRPNMRFVPIKTIEQQGCLVLHRTRHLMVRQQTATINSIRAYLAEFGIVAPVGRRGVEQLLEIITDASDARVPEVARSCIAALGAQLRQLKAQILELDRRITAWHRSSELSWRLNEIPGVGPLLATALVASITDPKVFRSARDFSAWIGLVPKQNSSGGKDKLGNISKRGDRYLRSLFTAGALAVIRYAKIHGTKHRPWLVALLARRPTKVAAIALANKLARIAWALMTKGSHYRQPAALRV

SEQ ID NO: 372635 - protein, 457 aa, unidentified
MPRKTVRKSKAVGRMLPLLHPDAAGLDIGAEEIFVAVPADRAADSVRSFGTFTRDLHELADWLQACHVTTVAMESTGVYWIPVYQILERRGLQVFLVNAQHVKNVPGRKSDVSDCQWIQYLHSVGLLKASFRPPDEVCVIRSLWRHRESLVQMAAEHIMHMQKALSEMNLQLHHVLSEITGVSGLKILDAILAGERDPLKLASLCNWRVRSPREVVAKSLEGDYREEHLFALQQSLVGYRFYQTLIAEVDVKLESKTQELPRAAGAPEQMPPRTKEWVYQRAGNEPTFDLRSEMFRIAGVDLTDVPGISALTAYTILMEVGPDVSRFRNASSFASWLGLCPEKQVSGGKVLYSRSRKVKNRAAIALRLGAHCLYRAKNYLGEFHRRMKWRLGGPEAVTATAHKLARIVYHLLSTKEAYSEQVLIRCDRLTSQRAEIRLRKQAANLGYQLTPVPEPET

SEQ ID NO: 372636 - protein, 482 aa, unidentified
MKKKNIFQNQSQEILTLFEMAGDRSKVMCIPIDYAKKYHVAMFCNGNGKIIRKSFSIKNSLDGKNYLIDQVTKSCRHHGISLRHVFFGGEDCGSYADNFITALRSEDWLVAGVNAHDAKTHRENMQASTDQLDLLGISKMLLSCRGNCSPAQSGIYLNLRMLVRQRRKLVNMTTGAKNRIHTIVDRIFPGFFDEKKSGFAPFSKCSLLLMEDRFSPNQIHRRRRSTLTKLLSRQGVQHPDRQAEKLQKYAVQVLRPPEKFVAALQISLKQQVKLFSCMQESIQQLEKEIAEILAQTQGAFLTSVRGIGIILAAGVSAEIGDPNKQKSINNLVSYSGIIPKVKQTGGPKGKTQIKKVGKRCNRILKDYVVQSASHIGKHGPDELMSDYKRRDAQDQHADFGMARRYLRMALCLMRSSQTYLPPKYRNTNVKMEKRAEYYLMAWPKFHEKWQRANALDIAFNSEMPLGQWRNMIQELYRIELKL

SEQ ID NO: 372637 - protein, 440 aa, unidentified
MRTNLRIIDPNVAGIDIGSTEIFICANDDGYKSFGTFTEDFILAAEYIKKNNVNSVAMEATGVYWIPLKDVLESEGLKVDLVKAGDANQLPGREKTDGADCQWIRTLYQHGLLRSCFIPEENIRELRAIIRLRQDHIEMASSHILHIQKAFTLMNIRLHQVISQIQGVSGRRIIEAILDGERDPERLVLLCDKQILKNKREEVLKSLNGNYRTEYLFMLQHAYRGWDFYNELIAECDSTIEFWLKKNNNSKPEFNNEKPTKQIRHHKPKIENFHGQTLKLMDGKDVSQLPGLTDYSVIRLVAEVGLSLKEWKNYKRFVSWLGLSPKRRDSGKMKRRYKGKQNTIAGQIFKEAAQSLLNSKSIGLGSFARKIRARKGPQVAIKATARKLAILYYNAVTKGNDYVEIGVKRYDEKAKHTEFMKLNKLAKTLGYSLNEIVVHQ

SEQ ID NO: 372638 - protein, 381 aa, unidentified
MTQATQVEEVSAKSVVLYMAMELSLKQWKLAFTVDGRKKRQVTIDGGDLVALGEAIERAKEKLGLAKEAAVYSCYEAGRDGFWLHRTLTTWGIRNVVVDPASVEVNRHARRAKTDRLDVQMLLEKLRRYRQGDQVWRVVRVPSEEAEAGRNLHRELEKLKAERGRHTNRLKGLLFTQGIRVDKVGGPNWAERVEAFRKWDDGPLAEDFKGQLLREGERLELLNRQIKALEEERERRVTAADAPGPLAKVQHLRQLKGIGPVAAWVFVMEFFGWREFRNRKEVGALAGLVGTPYASGSTYREQGISKQGNARVRTLAIEIAWLWLRYQPDSALSQWFNERFAKGGSRHRRVGIVALARKLLVALWRYLEKGVVPEGASLKGV

SEQ ID NO: 372639 - protein, 316 aa, unidentified
MNSKTQVEINVGIDTSQSQLDIYVRPTGDYFSVENTSEGAKKAASRIQKYQPTRVLIEATGRLELNFVCAAHKAGLPVVVCNAGQVRQFARSTGRLAKTDKLDAQDIARFGEALQPVLTIIKPEKLRQISDLITVRRQCLDMSTMQKNRLLRMPKNVQSPIQRILKAIQKEIERVDQKLDKLVDAIPQWREQRDLLMSAKGVGKVVAYTLMSELPELGKLNRKEIAALVGVAPMNRDSGSHRGKRRVSGGRSKVRTVLYMSMWSSIQHDPKIKATYERLVAAGKPKKVALVACMRKQLTILNTMMKNGTHWNEKLA

SEQ ID NO: 372640 - protein, 370 aa, unidentified
MKLITTYVGLDVHKSTISVAVAEDGRRGEVRHYGVVENRADVVIKLAARLGRRGERLHFCYEAGPCGYGLHRLLSGLGHDCTVVAPSLIPQKPGDRVKTNRRDAAMLAKMHRAGELTEVWVPDTAHEAMRDLVRARATAARTLTKARQHLGGFLLRHGKIYAGPRAWTVAYRRWLTTVRFDHPAQQIVLQDYIHAVEDAEKRIARLVEQIEQLLPHWSMAGVVKAIQAMRGVAFINAVTMVAEIGDFSRFSNPRQLMAYVGLVPSEHSSGDSVRRGGITKAGNSQARRALIEGAWTYRMQARVSRKLHDRLEDLPQGIRDTAWKAQVRLCARYRRLVAKGKPKVVVTAAIAREMIGFIWAIARQVPLQPV

SEQ ID NO: 372641 - protein, 348 aa, unidentified
MERYIGLDAHATSCTFAVLSERGRRLESAVVETNGRALVEFLRGVPGSKHLCLEEGTQSAWLYEVLRGHVSELVVTHAYESKRGPKDDQRDAFHLANSLRLGAVSPVYKDGGQMGELRAHADVYAKLVTDVVRAQNRLKALFRSRGVQVVGGAVYTQRDRQAYLQKLARPYRGSAELLYSELDALRTIKKEAEKQLIAQSHKHSISAVLQTCPGMGPIRVAQTIPILVSPHRFRTARQLWSYSGLAIVMRSSSDWVKTPQGWERAQTVKTRGLNRNYNRRLKNIFKGAATTVITQRLEPMVGDYQRGLEQGTKPPMAKLTLARKISATLLAMWKNKEVYHPERYRPTP

SEQ ID NO: 372642 - protein, 380 aa, unidentified
MARRNDMAVREEDATKTPTIYMALDLGRRRWTVGILLPGDRDARLFQIAGGDREALLELIRRRRQMIADPAVRVVSYYEAGRDGFWLHRWLRDQDIHNRVLDPASLEAPRRRRRVKTDRVDTLGLLRVLLRLERGETEMTRVVWVPAPAIEDARRHTRERERLVSERTAHRNRIQGLLAVQGVTAIKVGARDWLDQLAGARTGDGRTLGVALLAEIRREAERLALVERQITEVEAAQHAALRADTALVARACKLKRLKGLGEVFSSGLTHEAFWRDFGNRRQVGGAFGLTPWPWDSGDMHSEQPISKVGNRRARTLAIECAWMWTFHQSGSALTRWWQQRFAGGGRRLRRIGIVALARKLMVALWRYLKEDLIPEGAVLA

SEQ ID NO: 372643 - protein, 352 aa, unidentified
MQYVGIDWAYRRAAWCAKSRSGEIRNEGVVSADEDGLAKLALALGPEVSACLEMMSGAVWVRDRLQAAGWQVEIADARKVKAVAPLACKTDKVDARVLAELCRRDLVPAVWVPSLSDRELRERLNRRAHLIRLRTATKNRVFGTLSQWGLPIPVRVLRAGDAAALLEQRGLPEVWRRSVAEALAVIDILDARIAPLDAELRPLARADQRVQLLSTIPGVGEHLALVMAAEIGDVARFSSPRKLIGFAGLAPRIAQSGQSSRTGPLSKAGSRALRWAAIEAAQSAWRPTNPWYRLYCDVKQRTGKSNPAKSAVARKVLIAAWHVLGRKESFKPSRPGLGNDPVPASSHFHLAA

SEQ ID NO: 372644 - protein, 352 aa, unidentified
MTEIKYIGMDVHMAMTVIAVLNGVGKVIAEAIVETKARAILDFLKGQRGTLNVTFEEGTQAAWLYDLIRPHVASVVVCDPRKIPPQNNKADKPDAKHLAELLRTHGLKPVYHGEHSTQPLKEFVRSYVAIMRDGSRVKNRLKALFRARGIACQGSGVYAEEEREQWLSKLSNGAACARASRLWKELDFLAELRDEAEEDMTAEARKHPATKILKSIPGIGFVRAAVILGIAGTPHRFRTRKPFWTYCGLAVRSEISAEYELVDGRIGKSKKRVLVRGLNRNYNRALKEVFKGAATIAAKGIWKSQFDAMVADGMEESLARLALARKIAAITLALWKKGELYDEKKLNFVHAA

SEQ ID NO: 372645 - protein, 345 aa, unidentified
MKIVGCDLHTRYQQIAMLEEETGELVERRLEHESGEARAFYAALSAPVRVGIEATGHTRWFERMLGELGHELWIGDAAQIRASMVRKQKTDARDASHLLDLLLSDRFPRIWRPTLEERDLRQLVWHRQKLVWMRNAVGNQLHALAMGEGVCRKKKLFTKKGRVELESLKLGPWASHRRQELLKMLDALDPSLQQLDRAVQQQAEQNAEAVRLMTHPGVGPVTSLAFVLTIGPVQRFERSKQVVSYLGLNPREHSSGGRQRLGAISKQGNPMMRSLLVEAGHTAARLDAELRQDYQRMKLRRGSGVAKVAMARKLAVRMYWMLRNQASYAQLVRMQGSPRGTLVGR

SEQ ID NO: 372646 - protein, 270 aa, unidentified
MTYVGIDVSKVTFVVAYSSVKTNKTRTFKNTVNGVHEFVQTISASEHNCVLEATGNYSALLVYLLSEAGITISLENPLKIKNFARVMLTVTKTDEIDARLIALYGEKMQPAPYKLRSDAILVLKQKRTVLRQLKKQLVATRNLKGSMEVLPFFDPKCKKTIEKTITFLEKQIKEMEEELASLAQGEYKKQMDLLTSIKGIGVTLAAALIVATGRFSYFDNAKQLTRYLGLFPTIRYVSQCQRPHQPKRGFKPQKPTLCSRILIAQVQYRV

SEQ ID NO: 372647 - protein, 337 aa, unidentified
MKFSGIDLHSNNSVVVVSDEEDRIVYQKRLPNDLGQIRAVLEPHRDELAGVVVESTYNWYFLVDGLMDAGYRVHLANTTAIKKYEGLKYSGDFADAAYLAQLLRLGLLPEGYIYPRAERAGRDLGRKRMQLVRCQTMQILAIENILARQTGGRMSSERVKRLTAKQVEGLGLVPDVALALEANRAVSEALQQQIAVLEKRLKQRAKLRPEYRLLKTVPGIGETLATTIMLETGTITRFASVGNFSSYCRCVDSRRESNGKKKGEGNAKNGNKYLAWAFVEAANFALRYCPEAKRFYERKKRKSNRIVALKAIAHKLARACYHMLREQKPFDVQRCFM

SEQ ID NO: 372648 - protein, 463 aa, unidentified
MKHKKSTRKAARSSRPLLERVNPNAAGIDCGSAMHYVAVPLDRDPEPVQCFKTFTDDLHRLADWLVACRITSVAMEATGVYWIPIYEILEARGLEVLLVNARHVKNVPGRKSDVTDCEWLRELHSVGLLRGSFRPTAEIAALRSYLRHRETLIQSAATTINRMQKALVQMNLQLHVVISDIAGATGLRILRDIVDGKTDPRHLATHRDARCQASEAEIAAALTGHYRAEHLFVLRQNLELYDAFQRQIESCDTQIEVHLKALATSATQPAAPLTASRSRRRPRSNEPRFDVRASLHQLSGVDLSQIDGIGPYNALRLISEIGTDMSRWRTEHHFTSWLTLAPDNKVSGGRLLSSRTRPSANRAAAVLRMAAMSLGRTQTALGAFYRRLAYRVGKAKAITATARKLAILVYRCLKGELVYQDPGAAEYDRKHRDAVLRRLRQRAAVLGFHLVNGQTGEILEGVS

SEQ ID NO: 372649 - protein, 391 aa, unidentified
MTKPKTKTVNDFSRCLDPLDMDATVIAVIEMSQSSWLVAGIVPGVERQPLKKLAIDEHALLNLLNRWRAEAEKQGRRITRIAVAFEAGHDGFWLARWLAAQGVEAHVIHASSVAVTREHRRAKTDRLDTELLKRGFLGWLRGERGHCKMVAVPTLAEEDAKRPSRDRATLVGEASRIITRVKSAFVRLGIRGFNPKLKAAAARLEALRTPEGEPIPPNTLAALKRDLERHQIVKKQIRELERTRLESLAQAPAKGPNVMVLLLARVIGIGIETADMLVQEVLSRTMRDRRAVARYAGLTGSPDESGAKRREKGLARSGNARVRHGMIQLAWRFLLFQKDSALARWYRQRTADAPSIRKTLIVALARKLLIALWRLARDGVVPEGVRLRPAA

SEQ ID NO: 372650 - protein, 366 aa, unidentified
MKKGSTAAAKQSTIFSQQKLTIGLDLGDRSSWYCVLDERGELRLEQKLSTTAKAMRQVFSAMPHSRIALETGVHSPWVSRLLGELGHEVIVAHARNVRLIGESRRKDDRLDAQTLARLARIDPQLLCPVKHRSAKAQADLTVIRARAGLVRARTALVNTARGLAKSYGERLRGCNVRNMNPEKAEGLSPELQAALQPLLTAIESLSERICDYNQRIEALAEQSYPQVALLKQVKGVGTLIALTFLLTLEDAHRFRKSRDVGCYLGLQPGRRNSGQSEPQMHISKEGDPYLRTLLVQGAQHILGPFGADCDLRRWGLKLAERGGKNGKKRAIIATARKLAVLLHRLWVSGEVYEPFHNSKPLMATAA

SEQ ID NO: 372651 - protein, 429 aa, unidentified
MKGGDPMNTLFVGIDVSTKNNQVCAVNFDQDVFFNLSFPNNPDGCDLLITTVLAFVDKEKFDSIIIVTESTSIYDYHICAYLSSQLAIVGTSVVIYSVNAKSIANYKKSYIEMEKTDPGDAFLIADFARVGRCKKLRPFKAAQHIALKRLTRERYHLAEQLTREKNYVLNNIYLKVSGLMTLPHKDLPFSDNFSASNTKFLTDYTSPFDLAERPLDEIIEYFKSASQNRCDDYDKIASLFDKAIRSSYRLDKTAYDPITISITASINLIQCIESQIKMVDKAIEKEMRGLYPNGYQSLMSITGIGPVFAAGILSEIGDISYFKSDASLAKYAGFHWKKNDSGNFIADEKHAANSCNKYLKYYITQATQMSVMHGFDYTTPFYRKKYNEASTHKHRRALVLTSRKLVRLIYVLLRDSKLYVSVSHDTVIE

SEQ ID NO: 372652 - protein, 343 aa, unidentified
MKLIRVGVDLAKNVFQVHGVARHEKVVWRRRLRRERWVETLVDKLEPGCDIGMEACTGAHHWARRLQEKGFTVKLIAPQFVKPYVKSNKNDATDAEAVCEAMSRPSMRFVAVKTLQQQDIQAVHRVRSALIEQRTAKANQIRGLVAEYGLVAPRELVQLRRAVPLWLENVENGLSSRFRRLLDGLWQDLRALDDRVRELDREITSIAQSDPAAKRLQQLRGVGPIVASALVAAVGDAHHFANGRQMAASLGLTPKQHSSGGKERLLGISKRGDRYLRSVLIHGARAVLRTAKDKDDRLSLWASALAQRRHANVAAVALANKTARIAWAMLRNETNYQPDLLRG

SEQ ID NO: 372653 - protein, 320 aa, unidentified
MRNAVGLDISKLTFDATAIVGNAEYSAKFDNDSKGLDQFSDRLKSLGCQNLHICMEATGNYYEEVADYFAQYYSVYVVNPLKISKYAESRFKRTKTGKQDAKLIAQYCRSAQESELVKRQKPTDEQYRLLRMTAAYAQIKSECAAMKNRYHAAKDEEAAKAYAEIIKAMNEQLEVLKEKIKEQTEKPNCKEGVKRLETIPAIGRMTAAVLFHHLTSSKFETSNKFAAFAGLSPQQKESGTSVRGKGKLTKFGNRKLRAVLFMPAMVAYRIRAFPGFIARLEEKKKPKKVIIAALMRKLAVIAYHVHKKGGDYDPSRYKSA

SEQ ID NO: 372654 - protein, 360 aa, unidentified
MKKSNRETEWKERPDRTVGVDLGDRFSRYCVLNSDGEVIEEGRVRTNEESLRRHWEGEARQRMVMETGTHSPWVSRLLKELGHQVIVANARKLRAVTENESKSDRQDAEMLARLGYCHPRLLAPIQHRSVERQRDLNLLRARDTLVRARTMLINSVRGLVKSGGGRLPACSADYFARRVPAAVPVELVTATKPLLEQIAALTLQIRGLEQKIEALAQRYPEIVILRTAPGVGPVIAAAYVLTLDRVDAVAHSRSVGAFLGLRPRQSQSGDSDPEHHISKTGNIYLRRLLVQAAHYILGRFGPDSALRRWGLKLAWGGKRAKKRAVVAVARKLAVILHRMWRTGQNYQPFPEPTTAAAGAA

SEQ ID NO: 372655 - protein, 418 aa, unidentified
MSKRLLSRPLGRCVGLDVHLDFIEIAICEEGKVFSAGRVPSTPEGIKTLADSLLSTDRVALEVTGSSWEIVRLLEPHVSKVIVVSPGDTGIAQARAKTDRLDARTLAKLLWTGELEAVWVPPEWIVRMRRRLSRRQQLVGARSRAKNEIHAVLMRRLKGRPPASDLFGVKGRQWLRGLELPLEEAETVQAALRHIEFLDTEIEQVERLICQEALKSRQVRRLLTVPGVNVICAAAFLAAVGDIRRFKGSRPVVAYLGLDPRVYQSGSAPARTGRISKQGSPQARWALVEAAQSVAQQPGPMHAFYERISARKGHNKAIVAVARKLAVLFYCMLTREEDYAHQQPSLTAQKLRRLELAAGAPVRKGKPSGVWATRQRMRHAETQLAQQAEASYKRTIADWQATSPKKDKAGASVTAERA

SEQ ID NO: 372656 - protein, 420 aa, unidentified
MEVIYRRCAGLDVHEKSVFVCARIMRGKEVEIIEATFPTFTQDLEELKAWLLRNRIHRVAMESTGVYWIPVWNILEHPRGKFDLVLLNPQHVKALPGHKTDRVDAARIAELAQYDLVRPSFVPPPEIRELRDLMRRRLHVVQDRNRVSNRIHRLLELQNIKLSSVLGKVTGVTSRSILEALATEGTMKPEAFALLATHKRVRSKREQLARALRCQPTEHFRFLLRELLEELDHLTGKIKLLEIRIAERMQPYQELTERLCQMPGIDRITAWTVISEIGVDMSRFPASGNLASWCGLCPGNAASAGKRHSGRTSKGNRYIRRVLVQAAWAAARINRKRNFFTAFFYRISNRAGMKKAAVAVAHRMLTIMYCMIRNGSSYRENGPDYFDRLHPERTKNRLTARLERLGFLVSLEPKISPGIG

SEQ ID NO: 372657 - protein, 342 aa, unidentified
MSFYCGIDLGARESQICIINKRLKKVLEVKTANKLEQIKQLLTPYQADLQIVVESTFNWYWLVDGLQEAGFQVVLAHTLGLHMITAAKVKTDRRDAFGLAKLLLAGMIPAAYIYPAETRPVRDLLRRRARLVQVRAGEYGSLRRLLLRQGILSRQQQEIKKAEEADLEKWFAHPLVRLYASQELERIRLYSQQLKELEAIILEQAKKEWAFAQLQQLPGIGPIIALTIFYEMGELGRFATEKDFSSYCRVVPGVAQSGQSTQRGRGSKQGNHYLKWALSQAAVHAVRCYPRVRRYYERQLRRHRGRARQMVVYNIIAHKLAQGIYHILKERTEYREELLFGR

SEQ ID NO: 372658 - protein, 356 aa, unidentified
MEQAHTTLGVLLKRTMQTIKYFTGFDISADDFSASCITSPDNPVFPTQKFLNNFDGFNEFLSLLNKHSIKQSEVIICMEATGVYSENLSYFLASKGFTLCIEAPHKIKNKTKDSPRKNDFIDAVSIAEYAFRYSDKLSFWKPKDEIIEQIQVLLSIREHLSIQMTANQNALKTLKYKYYQTPLANQIYEKTISKFKEHIKQIDQEIKSLIDKDDSFKNKISLAKSVPGVGLLLAANLLVLTKGFTEHINYKHTAAYTGICPYEQRSGTSLYKPPRSRKCGPAKLRKLLYLAALSVRTHNQTFKKYFLRKVAEGKNKRLIINNIENKLLKIIFAVINSGISYTDNYKSINPALLKTA

SEQ ID NO: 372659 - protein, 309 aa, unidentified
MGVDVSKERLDVALRPSSECFCEANNERAVRGLIKRLKALNCERVVVEATGGYETVLVAAMWAAELPVVVINPRWVRAFAKSIGWLAKTDRIDARLLALYAERAELKVQELPDQATRRLRELCARRMDLLQMIDAERNRLEHASGEVRREITGHIDYLHKRLKRSDRDMDRAVRGSELWRHTNELMDSVPGVGPVLRSSMLAWLPELGRLNRVEVAKLVGIAPLNDDSGKFRGYRHIAGGRAPLRRVLFMATMGAMLNNPYLKAYYARLRAKGKLHKVALVATMRKLLLILNAIIKTNTPWSELCLASA

SEQ ID NO: 372660 - protein, 411 aa, unidentified
MNYNVAGIDVHKKVLMVVVTDATAEELTFEGRRFGTTASEREHLVAWLQERGVQEIVMESTAQYWKPIWLDLEPHFGQLRLAQAHSNRAPKGRKHDFADAQRLTRRLIAGELILSFVPGSEQRSWRTITRAKVQLVRDRVRLQSQLEALLEETRIKLSSVISELLGLSGRRILRALAEGESDPAELAKLGDFRLKCSTEELTDALRGQWQPLHRQMLKLFLERLDLLDRQRQQLDQMAAAAMQPYEDAVIRLAEAPGFGPDSAHQVIAEVGAQAQSFDSAAQFASWAGVCPGREESAEHNHSSRSPKGNKFLRRILTQAAQAAVKKKGSHFQIVFRRWIPKLGYQAAIWAIAHKLARLVWKILHDQVHYIERGHESDPKVQRRRANKMVQALRRMGYKIEISFLNPQPAQG

SEQ ID NO: 372661 - protein, 366 aa, unidentified
MNPIYIGVDFHSRQQTICYLKTETGELVIKELLHKDKEQIRAFYQQFQGHVIIGIEASGYSLWFEAMLERLGCAVWLGDATEIRRRARWRQKSDRRDAELIWDLLVHNEFPRLHQPAPESREVLRMLRYRQKLIKVRTMLKNSLQAIALQAGLAKGKQLFTAAGQQELGKAEMSAVLQWQRDHWLELMKPLNQQLLETMVWFKQQSKDDVQIKRLRTHPGIGLLTSLCLLHTLQPVSRFRNQRKVVAYAGFDPMIRSSAERAIYLGISKAGSRMLRYLLVEAVHTAVRYDEDLKRFYKRVAERRGRAKAKVATARKLLIRAYIMLRDEIDYAEFRRRAVAVRLARRGQGPVPVPEVLIGQSASPGV

SEQ ID NO: 372662 - protein, 366 aa, unidentified
MLIIGCDYHPSVQQINWVDTETGECGEKRLMHSDGEAERFYRELKQKGVQVRVGIEATGHSRWFERLLAKLGFELWVGDPAEIRATRVRKKKNDREDARLMRKLLLENRFPRIWVPSPENRDVRQLLLHRHRLVGMRTRVMNQLQAIAMNEGLRRKSGLWSKKGRARLESLSLAPWASRRRQELLDLLDRLSPMIDELSKAIEQEAERRPEVQLLMTHPGVGPITALAFVLIIGTPERFHCGRQIASYLGVIPCEDSSADHWRLGHISKQGNALMRFLLVEAAQTVARCESEWRQHYFHLLLRRGRAIAKVALARKLAVRLFWMWRKGQDYQQVKKFGSDAGQLETPNGVKSITVKLMERPAPSMA

SEQ ID NO: 372663 - protein, 351 aa, unidentified
MYLIGVDYHPSFQEIAFFVEETGECGEQELNHSDGQAEKFYRGLKERGICVRVGMEATGYSRWFERLLAELGFELWIGDPAEIKAKRVKKQKNDRNDARLLRRLMLEKNFPQIWVPSPENRDLRQLLWHRHRLVQMRTRIMNQLQALAMNEGYRWKKKLFSEQGRALLEKLSLAPWASRRRQELLELLDRINPTIEELTTAVEREARKRPEALRLMTHPGVGPLTALAYVLIIGTPTRFQRGKQIGTYVGMIPSEDSSAGKQRLGHISKQGSSLLRYLLVEAAQAAARNHPDWRRRYIRLAMRRHKSIAKVAMGRRLAIRLYWMWRNGCEYSPSLEFGSYAGQLGTVHGVN

SEQ ID NO: 372664 - protein, 396 aa, unidentified
MKVVYPICCGVDVHKTFLVATIITTTGITPHYAKKRFSTFNNSILQFKQWLIANNCLDVCMESTGKYWMPIYNLLEDSIRMTVANPKWVRAVKGNKDDTKDSRWIGDLFRLGLVPGSYVPPRPIRELREYTRYRFKLVSCRSSEKNRFQNALTVGNVALDAVVSDMFGKSAASITDYLLSTDSFDPQYCATLLQRSLKKKADQVIEAIEGYQMSDNQKDRALLVRSHLAFVEQIITRLDQKLDTMIIPYESAVQLLCTIPGVDRSSAITIASETGTDMTQFGSSKRLCCWAGLTPGNNESAGKKKSVRITRAGVYLKPALVQVAHAAVNSNKSSYYKNKYERICKRRGKKRAIIAIARMILTAIYHMFTTGEVFNPSDLYKIDMPQEMLQKQLAGR

SEQ ID NO: 372665 - protein, 392 aa, unidentified
MVQNNDDEKLEPEPAVQTTLNAIFFSMELSRSVWMITSILPGGGERMSRHVLKASDVAGLLERLELLRKKAKKRTGSEFPFVAVQEAGLDGFWIHRMLEQHGIESHVVDSASIATSRRRRRIKTDRLDGEMLLRALLSFKRGDPRVCAMVVPPTPEEEDRRRNSRERKTLVVERVKIVNKIKGLLFCQGVVGFEPLGRYRRKRFEELRTGDGRSLPPHLKAEIARMLDRIELILLQMKAVEKTRDELVASAPVDEKVPGCAASLMQLKGIGPDFAEVLWSEGLYRHFDNRRQLASYAGLTPTPWQSGSISREQGVSMAGNPRLRTVMVQISWFWLLHQPTSALSKWFQERVKLDGGRRRKPAVIALARKLLIALWKFIRHGVVIEGAVMKAV

SEQ ID NO: 372666 - protein, 333 aa, unidentified
MFFSSLLGLGKHYSQFAVVDQNGHLLAQNRVDHQPGAIRTFLETLPEGTPVALESVGNWYWIADEIEAAGCIPLLTHAAKAKVMMGNVNKTDKLDAKGLAKLLHLDSLPTVWLPPMEIRDERELHRTRMALSKLRTALKNRIHATLAKYGITNSEHSDIFVGAGRDWLESVLSQLPPETGRCVTQELEALDSLQQQIAQLEDRIRERIALTPSIQLLKTLPGVGNILAIVIEREIGSIERFDTSGQLTSYAGLVPTVHASGGKTHFGHMRKPSNQYLKWAFIEAANVVVRHRHHPAWKATYVCQIYDQGVPAQGPRHRRGRCRSCSLTAWLVI

SEQ ID NO: 372667 - protein, 367 aa, unidentified
MKKSSTVAIEGIQIFKDNQLTIGLDLGDRTSHYCILNEVGEVILEQALPTTAKGIEQVFSKIPRSRIALETGTHSPWVSRQLTELGHEVIVAHARNVRLISESSRKDDRLDARALARLARIDPALLGPVRHRSAKAQIHLTVIRARAALVSARTALVNAARGLTKSYGARLRKCGTEQMNREIAKELKPELREALNPLLAEVESLNERIAEYDRRIEQMAKEVYPEVARLQQVKGVGPLIALTYVLTLDDPHRFRRSRDVGCFVGLRPGRRNSGMSEPQLHISKEGDRYLRTLLVQGAHYILGPFGQDSDLRRWGLKLSERGGRNAKKRAVVAVARKLAVLLHKLWVSKEVYEPLRNNNRKQMAAVA

SEQ ID NO: 372668 - protein, 343 aa, unidentified
MKDTIYDQYIAIDWSIENMAIARMTKKSNKITAIDVPSDIVDLQAYLKNLKGTKILAIEETTTSQWLYAELKDYVDTIFICDPNRNKLLNEGPKTDKIDAAKLVQLLKAGLMKEVYHSGDKFLYLRRVTSGYEDLVKAGVRLKNQRHALFRACGKVGNEKKDINLGSQGEQFVLECLDRQIEAYEREKQCYENEFERLARKNSAIKHQKSLPGIGTINAVKIVTRVVTPHRFSDKGHYLSYTGLIKLDKISGGRSYGKKNPRFSRQLKSVYKSGILAAIGGNNPMNDYYEHLIQEKGYPEHNARHKACRRLAILSLGVFKSGRKYQPHRRDHVKGGKEETSGL

SEQ ID NO: 372669 - protein, 392 aa, unidentified
MVVSVGIDVSKDKHDCFIVSSEGEVLADAFMIPNNIDGFHCLLQRIQDCATPQDKIKVGLEATGHYSYNLLGFLLDNGLTTYVLNPLRTNLYRKSLSLRKTKTDRVDARTIASMLLSDAGLKPYTNTAYHNEELKSLTRYRFDKVQERAKLKSSVSRLACILFPELEKLVPTVHIASVYALLEEFPGAKQVASAHLTRLKALLETASKGRYKRDMALAIRNAARNSIGSRMPAKSLELQHTIRLIRELDTEITEIEEQIQSIMDELHSPITTIPGLGFRMAAMILAEVGDFSRFDSPDKLLAYAGMSPSTYQSGQLKNCYPHMEKRGSRYLRYALFNATKYVCHWDTNFAAYLAKKRAEGKHYNVAISHAAKKLVRLIFAMEKSGIPYHLTV

SEQ ID NO: 372670 - protein, 359 aa, unidentified
MFSERTSVGLDVHARSVVAAAIDGVTGEVFKARLTPDFQSVLRWVRGLPGPVAATYEAGPTGFGLYRALTGAGMRCEVAAPSKLQRPSGDRVKTDQRDAMHLARLLRLDEVTSVTVPSLEREAARDVVRAREDARGDLMRARHRLSKLLLRNGIVYSGGQAWTGRHDAWLRQQHLPTPAARLAFDSDYDAVLTVAARRDRLDAAITVMAGDSEFTDVVHRLGCLRGISTLTGFALAVEIGDWSRFTGASIGSYVGLVPSEYSSGASRVQGGITKTGNGHARRLLVEAAWHHQGRYTVGKTMRERWDLAPAPARGRGDAGNRRLHKQWVRFNDRGKRHVIANVAIARELAGWCWSLAVMD

SEQ ID NO: 372671 - protein, 343 aa, unidentified
MDHFAGLDVSVKETSICIVDDAGKIVREVKVASEPEALLAVLKNLVYHFKRIGLEAGPLSQWLFSALAEAGLPVICVETRHMRAVLKAQINKTDRNDARGIAQMMRVGLYRPVHVKTLRSQKLRVLLTHRKLLQSKAIAIENDLRATLRNFGLKVGMVGTVKFEARIKELVESLPDLAVLVEPLLIVRQVVREQLGILHRRLLAIVRDDDVCRRLMTIPGVGPVVALTYRVTVDVPARFRNSKAVGAVFGLTPCKYQSGQNDRTGGISRCGDEMMRMMLYEAAQSMLVRSAKWSWLKAWAMKIARHRGIKKAIVALARRLAVIMHRMWVGGTEFRWTREVAVA

SEQ ID NO: 372672 - protein, 355 aa, unidentified
MDSKKYIGMDVHKESISIAVMNGAGKIVMECVIETKASMILQFIDGLRGDVHVTFEEGTSAAWLYDLLKPQVTKLVVCDPRKNASMREGSQSDKIDARRLAELLRLNHLNPVYHGEHGLRSLKELVRSYITITKDLGRVMSRVKAIYRSWAIACTGKQVYAPRHRAEWLGKIGEPGVRRRAEFYYQQLDALRCLRQEVRRELLAESKKHQAWKRLCQIPSMGPIRAAVLLGILQTPHRFRSKRQLWTYSGFGIETQSSADHRRVDGQLQRAKKPSSIRGLNRNCNHDRKNLFKGAAIVASSKPGPFQEFYAALLTKGMRPEMARLTLARKIATIVLMVWKRGACFDAQHLKPQTV

SEQ ID NO: 372673 - protein, 391 aa, unidentified
MSMYFVGIDISKYKHDCCIISAADQQIVSKFTITNDKDGFEHLLISLNSLSNPEDIKIGFESTAHYALNLELFLENAHHSFMEVNPVLIKEYKKSTTLRRTKTDSVDCESIARWLMTVEYKPHSKGFYHAYSLKSLTRLRDRLIRQRSFYLVKITNVLDHTFPEFKPFFNERLSKTAIYLLENYGSAEKMAHMNSASYDKLRCISRGKFSIQQFLRLKELAANTVGVNNSIFDIELNSLLTLYNSLCKEIKVLETEITRLIEEVHPHYMSIPGIGPISAAVIYAEYGDISNFSNPGQMLAFAGIEPGIDESGTESHGGRMVKHGSSQLRYVLLNACLPLIRFDITFATYYAKKRAEGKKHRVAITHVAKKLIRVIYALERQDIDFNAQKLR

SEQ ID NO: 372674 - protein, 365 aa, unidentified
MTSMTDQALEVTGGVDTHGRTHHAAVIDRIGRHLADREFPATGVGYRQLLAWLSSFGTVTAVGVEGTGAYGAELARVLRRAGLTVIEVDRPDRKTRRMKGKSDPIDAYAAAQAVASGRASGTPKTRDGIVEAIRTLRVVRRSAVKSRTQAVNQARQLLVTAPENLRAQMRGLSTTALAQTCARLRPGDDLADPVQAVKAALRRLGKRILALTDEADELDTQLKKLTAQAAPDLLALKGVGPDVAGQLLATAGDNPDRLHSEAAFAHLCGVAPIPASSGRRDRHRLNRGGDRAANHALHTIVVSRMRWDERTRAYVERRTTEGLAKKDIMRCLKRHIAREVYRVLQRSMRSDTSHQTTQSDLTEAA

SEQ ID NO: 372675 - protein, 309 aa, unidentified
MKQSVVYIGIDVAKAHLDVAWAGTFRRLPNERSGHAVLVRWIKQSATPVQLICEASGGYEQALLESLEKSEVKVTLVQAVRVRQYARAAGILAKTDQMDAKVLAAFGRAMQPPPTPPLCAEQKRLRQYEAQRRHLSRVLVAEQNRLAQLSCAELRTLSRGLISKIKKQIETIDTRIGDLIAQDQTLREKAQKLTAIRGVGVRTAALLLAQMPELGQLNRRQAAALAGLAPFNHDSGSIRGKRAIFGGRRALRSGLYMAALSAARFNPILSRFYRRLRAKGKPHKLALTAVMRKLLLALNQTLKPIPSLA

SEQ ID NO: 372676 - protein, 338 aa, unidentified
MKIATIGLDIAKAIFHLFAVNKTGRLVKKKQLKRGQVLAFMANLEPCVIAMEACGGANYWARELIALGHEVKLIAPQYVKPFVKGNKNDYNDAEAIAEAAQRPRMRFVPIKTVEQQDVANFHRQRERIKKDRTALVNQIRGLLAEYGVVINKGVAAVRKGLPEILEDAENGLTTRSRELFAELLEELLTLEQRFDQCGQRIAAMNQGNEVCERLDEILGIGPLTASATYAAAGDGKDFVNGRHFSAWIGLVPGQHSTGGKTVLLGISKRGNTYLRTLFIHGARAVLRHSAGKTDRFSLWAQAVLARRGHNKACVAVANKMARMAWVIMAKGERYRIAT

SEQ ID NO: 372677 - protein, 404 aa, unidentified
MFTLGIDVSLKSHRCALLDSEGEKVGPSFSIDSSPEGFQKLIETLRERSIDLSQVTAGLEATGHLWENLFSFLERKKIKAVLLNPFQTNRYRELLSKKAKTDDIDAFCIAGLLRSGEGRACYVPDDQVQGLRDLVRTRNSFLANLQNYQRQAISLLQVVFPEILDLVKDPFGKAISEILTRYPTAKDIAAIHPRTLEKIARSFQGNTFDRKKAQEIVERAKQSIYSGKASSARGQVLVSLIKQITDLKAAIVRLDEAIAESLDTSTGQGPSEIDLITSIPGVGPKTAAVLIAEIGDISRFASANHLVGYFGFFPQIRESGGKILGTPKISPRGPKHFRKALYMAAVACLKHNREMKAVYDRKVSQGKAAKQALIAVARKLLATVYSLLRYQTTYNPLRLNIAAS

SEQ ID NO: 372678 - protein, 344 aa, unidentified
MGEVSTVGLDIAKSVFQVHGVDGAGAVVIRKRVGRAKVLELFSTLPPCLIGIEACPTAHHWSRKLQALGHTIKLMPPSYVKAYVKRGKNDANDAAAICEAVTRPSMRFVPTKSEQQQSGLMLHRSRQLLVRQRTMLSNAIRGHMAELGIVSAKGRNGTAELLTIIANTEGDQIPRDARFSLDVLARQYSALAMEIGAIEKRIHAWHRSCEASRRLEEIPGIGPIVATALIAEVGDWKTFSSGRNLAAWIGLVPKQHSTGGKERFGGISKQGNRYLRWLLVAGAMAVIRYARQHGTKRLWIARILERRPIKVAAVALANKIARMAWAMMVSGERFKEPTLLPAAA

SEQ ID NO: 372679 - protein, 387 aa, unidentified
MEVRMVNTPSADSNNEPVACYVAIELSKSGWLVGFLTPLSDKTSRYQVKAGDAQALLDLIERVHTRVVRQLNRPVEVMSCYEAGYDGFWLHRVLEAHGIHNHVLDPASLQVNRRARRAKTDRIDVDRMLRALIQYLRGEPEACSVVQVPRVEEEDAKRLHRERKRLVAERVQHVNRIKGLCAAQGIYNYAPLRPDRWSQLDKLRTGDGRSLPARLKSEIVRELKRLELVLEMIETVEVERDAIIKDPRSRHLNADKIKMLARLRAIGPEFATSLTGEVFYRKFANRRKLGRYVGLDGSPFRSGSVERDQGISKAGNPVARSMMVELAWTWLRYQPDSALSIWFRERVGNLKGRPRRIAIVAMARKLLVALWRYLETGVIPTGAVLKA

SEQ ID NO: 372680 - protein, 320 aa, unidentified
MEKIIFDQVVQVGCGIDVHKENIVATIRRSEKDFETKEFSSFTSSLTELREWCKSQGVTHIAMESTGVYWKPVFNILEEGDFEIILVNARHVRNIPGHKTDKRDSRWLSKLLLSGLLQASFIPPVEIRDLRDLVRYKKKVVAQASSEKNRIIRILEDANIKLSCVLTNVDGAVGSKIIDDLIAGKTDINGLMQHYHGQIKASREEFRKALQGRLTKHHQFMLRVLKESISDKEKLIDKIEKQIDELAAQYSVEIELLQTIPGVAYDSAVGIISEIGADMKQFSSDQHLSSWAGMSPGNNESGGKKKAQPPSTGTNTCNRP

SEQ ID NO: 372681 - protein, 408 aa, unidentified
MNTLYVGIDVSSKSNVVYLMLPNGDKHSNFSVANSHEGSTQLVKRILSALASHSLDTVLIGLEATSVYGDNLVYFLREDATLAPFNRKIHVLNPKQVKKFHDAYNDLPKNDYVDSFVIADCLRFGRINKAVYMGDYRYKALQNLTRARFFAVQNLVKEKQRFMNVLFKKYSTMTQEKIFSDTFSTTALAVYDEFESAEALANMDLHELTDFIMEKGKNRFPDPDAVAKAIQKAARSSYRLPKTMNDSVNQVLSISITSMKALESQIKEFDKAIKAQMELLPNVLISIPGIGPVYSAGIMAEIGEIDRFNSQAALAKYAGLAWKQHQSGGFEAEVTRLIPSGNRFLKYYLCEAAFSLVRCDKEYSDFYHLKYKEVNRCQHKRALALTARKFMRLVFRLLKDNRLYCPAK

SEQ ID NO: 372682 - protein, 374 aa, unidentified
MEKTIKYIGLDVHKDTIQVAIAEEGRKKPVMSYGNILNTSLSIDKLIRKLKSGGHELSVVYEAGPTGYGIYRQLKAQNIECAVVAPSLIPQKSGDRVKTDRRDAINLARLHRSGDLTKIHVPDEEDEAIRDLTRAREDARICAKKAKQRLNSFLLRNNRTYSGKGRWNKTHLAWLSELSMPHPAQQIALQEYIDTLQESLQRIDRLTNQIKNIVEHWRLKPVVKAIQSLRGVSMIVAVTTLAELGDINRFENPKQLMAYLGLVPSEHSSGLKTNKGSITKTGNGHVRRVLTEAAWAYRFNPKKSLHILRRQKDIPKSVCDIAWKAQLRLCNKYRALVNRKVTQVAVTAVARELIGFIWAICREMDSIEDNRLAA

SEQ ID NO: 372683 - protein, 343 aa, unidentified
MTNYVGLDVSQKSTTLCVVDGDGRRLWRGQCTSSPEQIAGVVRQHAGVGASIGIETGPMTPWLVHELRSRGLDVVCLDARHAKAALRMQLNKTDRNDAEGLAQIMRTGWFRAVHVKSFDAHRARALLGARLQLVGMVTRLSNHIRGVLKTFGMLPGLARGRSFAERVEALLVERLDVAPIVRPMLAAWSKLREQIAAFDKAIRDAVKRSPECRLLMGVPGIGPVTVLAYVSTLESPDRFRRSRLVGAHLGLTPKQYQSGEVDRSGHISKCGDTLARLCLYEAATVIMTRVQRPLALKIWAMKIAKRSGTNKARVALARKLAVLLHSIWRTGEPFRWDKHEMAV

SEQ ID NO: 372684 - protein, 340 aa, unidentified
MNIYCGVDLHSTNSVIAVVDAAGRPLWRRRTPNDIETILKVLEPIRSRLQGVVVESTYNWYWLVDGLMDAGFKVHLANPAAMEQYSGLKFSDDNSDATWLAEMLRLRILPEGYIYPKEDRPVRDLLRKRSQLVRQRTADILSIQNLVARNTGRGVKANEIRRWTSEDIEGLFSDQLLVAAVEATHAVVCCLSEEIHELEKMVLSRARLRPEYKALTSVSGIGRILALTIMLETGNIRRFPSVGDYSSYCRCVESKRVTNGKKKGRGNAKNGNKYLAWAYIEAATFAVRYDRVIRRFHQRKIAKRKLNVVATKAVAHKLARACYHMMKNQTEFEVGRAFAC

SEQ ID NO: 372685 - protein, 340 aa, unidentified
MVHVGVDLHKRVSQIAVLTAEGVLTQHRIANTPDRVHRFFAQLPSPARVAIEASGTWWWLADLLEGLGHQPILSHPKHTKAIAAARLKNDRVDAARLVHLLRGDLLPQVWIPPPAVREARELLRHRVALVRVRTGIKNHLFALLARRNLHPTSATRWCTARGLRECQDLPLGPLPTMVKEGCLALLRVLDEQIRDLDHELTRRWGADPRVRRLMSIPGIGPFVAIALVLELGDIHRFPTAKHVASYVGLVPRVRDSGERVRRGHIVKEGNRLLRWALVLAATQATRRPGPLRTWFRTMQQRKGKMIARVALARRLAEIAYRVWKEDCDYLALLRHGAVQG

SEQ ID NO: 372686 - protein, 290 aa, unidentified
MEQYAGIDVSLEASHVCVVDAQGKILKEAKVASEPEALIAWFAAHGTPMARIGLEAGPLSQWLFAGMKAAGLAVELLETRHVRAAFKTMPVKTDRKDARGIAQLMRLGWCGDLVAHHDTLQTIADALLSARTVLEQEFKAIEKRLSGLARANGPTRRLMTTPGVGAIVALTFVSAIDDPARFRSSRMVGAHFGLTPRKHQSGETDVTGRISRIGDHGVRVALYEAANVILTRAVKGSDLKSWALGVAKRAGMKKAKVALARKLAVVLHRMLADGTTFMASKVAPSAAVAA

SEQ ID NO: 372687 - protein, 477 aa, unidentified
MVVAHPAALNRKQRKALARRLRVEDPGLDVMHPHAAGIDVGNSAHYVAVRPDRDPDSVRRFECFTADLHRLADWLQQCGVTTVAMQSTGVYWIPLYEILDARGLEVYLVNARHTKNLPGRKTDVQESQWLLKLHTYGLLRNSFHPPAEIRIVRTYWRQRGDHVHAISTCIQRMQKVLTQMNIQLANVISDLSGWTGQRIVRAILAGERDPQTLAALSHPGIHATQDMIAKSLEGTWQPDLLFVLQQEVAMYDAYQHRITECDQALEQHLKDVPDKLAGPAPESEPSPSIPRERRSGPKRRRKAGSHTPQFDLAGELHRISGVDLTRIDGIDVGVAQTVISEVGLDMTRWNTEAHFASWLGLCPDNRITGGKVIRKGTRHVVNRAATALRLAATTLLRSQSYLGAQYRRLRGKLGAPKAITAMAHKLARLVYRLLKWGHEYLDKGLQYYEDRHREQQVQILTQRAAKLGLQLVAAEVA

SEQ ID NO: 372688 - protein, 354 aa, unidentified
MNTTQNSTKSKIVKVIGVDLAKDHCDVIGYDENGKICLRLDGCSYAKLREILANLPQAVVLMEACKGSMFHARSIADLGHEVRLVKGTDVKALRNVNHKNDLRDAAYIANLYFVPGIKYVYIKSQQQQSLQFLQNEYKSLQELRIQVGNQIHAGLEEFGCPVRKSSKFIKTRMVAHLEKHAELIPEDVMASFKRRREIWLNLLQQEEEAKRRLEQVAATDANAKRIMTVPCVGPQTAVGLLVHVGVDFGRFKNSRQFAASLGLVPKQNSTGGNNTLNHITKCGPKRLRSNLVQCAQLVLMYAEKWKGNFGDWVRKMRDSGKKHGVIVCAIAAKLARIIYRLMKDKVDYTPVLSC

SEQ ID NO: 372689 - protein, 336 aa, unidentified
MAIVKVFVGLDYHDESVQVCVMNFKGKILVNRKVANDWRAITGAAGRGRRVAQAAIEACNGAAHLADELIHQASWPVELSHPGYVARLKQSPDKSDFSDAQLLADLARVGYIPKVWLAPPEVRELRRLVRFRQQLVDERRNIKLRLSALLREHRPPSPPGKPWTLAWRYWLQALELPEQTHWIIRQHLRRFAMVALDIGEVESRLAKLAERDRLVQFLLTLPGVGLVTAVTLRAEIGRFDRFRSGKQLSRFCGLSPRNASSGNRQADAGLIRAGNPQLRAVILQAAHRLKRYDPRWRALATRLRRRGKPGSVIAAAVANRWMRSLYHQVKHWSMAS

SEQ ID NO: 372690 - protein, 413 aa, unidentified
MLKIVYPICCGMDVHKSFLVACIASTNNQGVTTYVSKRFSTFTGDLRKCSAWLANHNCKDVCMESTGKYWIPIYNILEPTCNIVLAHPKYVKAIRGKKTDKKDAKWIADIFKHDLVSGSFIPPADIRQLRDLVRYRWKLTNFTTGEKNRAQNCLTVSNIKLDDVFSDVFGKAATAITTRLLEAPSEKLTNVSAFRTRGMKATDEQILAAVDGEMCVEQAEKLRIIRSHMDGLDLCKANLESLILSVAQKYLSQLELVMTVPGIQAFAAIGIISEIGVDMSVFPTSKHLCSWAGLTPQNNESAGKKKTTRISRAGAYIKPLLVQCALCAIRKKSNPEIRNRYNNLKKRRGHKKAIIAIARMLLTAIYNILKKNEPYNPELYAHINTPPEHRTVSVEEAIFILQRQGYLVTPSAT

SEQ ID NO: 372691 - protein, 428 aa, unidentified
MLNKLDRLQQFQDLRGTIRGSDSILIIGVDVAKDKHYAFFGTSNGRTLWKKLIFDNSIQGFNKLLSMTQDLSIQHSLNARVFGLEPTATYHKPLAEHLIKKGEQVVYVSNVAAKNNRALLDGRWDKNDTKDAANVADLVGQGRCQYYDLAEDSLRELRSLLAYRAKLKKQEHALRMRIRNSLLAQYFPELDKQMPQGGQDGLILDIIAHDFAPARIAALPFEVFRQQYQMEKRHLIQEQRLRTIWEISQSSVGCALPASAAWEGRMLVEHLRQIRQTKRELEKQLKEVGQTFPAYAYLLSIPGFGPIVSAMTLAAIGDAHRYTSRKQVLRLAGLDLSASRSGKSSNNAIPVVSKQGKAGLRYALVQAAQIASYKDDVIRSYFTGLLKGRELERGIKLKMRVKLAAKMLVIAWTLMKRNEYFDSGYFRT

SEQ ID NO: 372692 - protein, 339 aa, unidentified
MANYRFFVGWDVSQDTLNYCIHTQQAELIHEGLIPNEPEAIKQWCGQLPTLLSCAPKEVFCLVEHTGLYSHLLVKLAHRAGLSVCLEDALRINKSASRQLDKTDAGDARSISIYGLERAYRLQLWVPDRKVLAQIEGLQRRRRNLIKNRQSMATSLKNSLALDKEPLDKAVSRAIQQAIAKLDKVIALVEAKVQELIETDGELQPIYRRVRSCFGFGPKNTVVVLLETGFLQKISTAKACANYAGLRPNEHRSGTSIHRKARTSKKVNLSLKTAFHQAAFSAMTNSPIHRAYYQRKRQEGKTHLQVLNALRNKLCRTIYACVKNEEDYQINYTSALHKS

SEQ ID NO: 372693 - protein, 426 aa, unidentified
MNEVDIIRLEQFRQLKKVIRGSKEHLIVGIDVAKDKHNAFFGTATGKTLFKRLVFENTREGFERLLIQTDTLKTQHALTKTVFGLEPTANYHKPLGEFLIKGSHVVVLVSGVAVKRNRELLDGRWDKHDTKDSANVADLISQGKCLFYEYPSMALRDLRNLLSLKKRLKKQEHGLRVRIRNHVLAQYFPEMDSYYGQSESDSLEIVKWCLNPSVIAGLEYEQFLQLVAPQKRGIWQQNRLKAIWKKAVGSIGCDAGESLEFEAKAMVEALEHTRETICATDAKIKEICLQFPEYSYLLTIPGFGPDVSSKVLGAIGNPFRFKTGKQVLKMAGMDLSANRSGKRSDAAIPVISKKGKADLRYALYQAALIASIRDRHFIVYYTNKLRGREKEKGIKTKMRVKLAAKMLIIAWTLMKKKEVFYTPQAY

SEQ ID NO: 372694 - protein, 354 aa, unidentified
MSQTPNTAIAVIGIDIGKNSFHVVGHDARGAVVLRQKWSRGQVEARLANIPPCLIGMEACVGAHHLSRKLASLGHDARLMPAKYVRPYSRGQKNDFNDAEAIAEAVQRPTMKFVATKTAEQLDLQALHRVRERLVSQRTGIINQIRAFMLERGIAVRQGIGFLRTELPTILATRTDALSPRMLRVIEELAGDWRRLDQRIDGLSGEIEALARQDQACSRLMTVPGIGPIISSAMVAAIGTGDVFSKGRDFGAWLGLVPKQISTGDRTILGKISRRGNRYLRVLFVQAAWVVLVRIKNWERYGLKSWIEAAKRRLHHNLLAIALANKLARIAWAVLAKGSAFELTRTYDASVRPG

SEQ ID NO: 372695 - protein, 370 aa, unidentified
MEKDTTYVALDDSKRKIVAGISRPGDAQPELRESANDPRLIRRLFERLKREGRAVAACYEAGVSGYDLYRQITALGVECVVIAPALTPRRPGQRIKTDRRDAAKLVRLFRAGELTAIHVPAEAEEAVRDLVRCRDDLRRDVLRWRHRVLKLLARHGRAYLAGKNWSQAHWRWIREQRFDQPPLQRAFEATVFTLEQALARQAELDKELEAVAGTAPYREPVGWLRCFRGIDTLSAIILLAEVVDFQRFRRPRELMAYLGLVPSEYSSGETQRRGALTKAGNSHARRVLVEAAWHYRHRPTIGRALAGRSQGQPDEIVGQAWRAQQRLHRRYRHLIGHGKRTPVAVAAIARELVGFIWAAMTRHESRHQAA

SEQ ID NO: 372696 - protein, 424 aa, unidentified
MKETITSYVGLDIHKDSIAIAVAEAGRSAPRFIGTTPPELATVCKALTRCAKRAHTLVVYEAGPCGYGWARYLTAQGWRCEVISPAHITRKGAEKLIKTDRLDAVLLARESRAGNLVKVALPDERDEAIRDLSRAREDAGTARLRARLQLKAMLLRHGRAYHGKSSWTAAHERHLANIEFDHAAQQIAFDEYRQAVKDAHERVERLTQALREQCEQWRMKGVIKALMCLRGIDLVAAVTLIAELGDLSRFAHPKALMKYLGLIPSEFSSGNTRRQGPITKAGNKHARRILVEAAWTYRFNPRVSRPIQVRQEGQPKAIRDIAWRAQLRLAYRFRKLNAGRKMTQNKCCVAVARELAGFIWDIARQVKIPRLNRWPSHPTDQGGGASPAPASFQAQHRNGNATRETDEGNPRRVLYGRPCDDPRL

SEQ ID NO: 372697 - protein, 407 aa, unidentified
MRLFVGDDWSEEHHDVELMDSAGRRLSKARLPEGVAGIARLHAMIGDQLSDNVDESEVAIGIETDRGPWVAALVAAGYTVFAVNPLQAARFRERSGVSGAKSDAADAHMLADMVRTDSHQLRPVTGDSPEAEAIKVVARAHKTLIWERTRHTRRLRHALREYFPAALEAFDDLDAVDALELLGKAPDPASAARLTRGQIAAALRNARRHDIETKTDRIQAALRGEHLGRAAVITTAYTATTRSAVAVLSTLNHEIKALQGQVDAHFGRHPDAEIILSQPGMGTPLGPRVLGEFGDDPERYATAKARKNYAATSPITRASGKKKVVAARFVHNDRLVDALSSQAFSALQASPGARAYYDKQRDRGLDHGPALRQLANRLVGILHGSLKTRTRYDEATAWAHHVEKAAA

SEQ ID NO: 372698 - protein, 466 aa, unidentified
MENNYILYVGMDSSKGKADAAILKVSDRRSVKPKFLRKKLSFKFVKSEVTSFLETVRSYSDDNCTSICFALEVTGIYSTNVYNFIKDNLNDNESIKFLNTDFVNQWRNAHNIAKSDPLDAQTISTIIGTDSDVQYVNDNVFENKNGYQDLKALVHRHYQIKKIYSQEINRLIAQCDCLFPELQYVFEPKSAAFIAVLSSYPTTHDIINASRLEVFNVVYEATKHRCSMDKIDKLFDLCHDTLVPDNISSYGRSIILDLVENIKNIKGQLKMIERYIRDVASLNPAYKLLLTITGCGPLTAATVIAETGDIKRFKNADCFVSYSGTSPRNKRSGTSVETMGKISKKGSRYLRHAIYMIAEFARRHNPVLKHQFERIKNGNKKRHKLANIAIANKIARYIYSIMKNESSFVIFHEHIMKLPEETQNTFFNSISLDFPKNTRKQIYQYSDINGEVHRFVYTKSEEAMSI

SEQ ID NO: 372699 - protein, 406 aa, unidentified
MEGPIITVDVSKGSCHYQPFIENGHPMRKPKSLSATNDGFQKLGQTIKDLEAKTEREDIPVIFEATGVYHRPLQKYLEDHKIRYYIISPLLSATYRKTDLHSNKTDALDCAHIAKAYYCEKELRQYQAQPQEYKRLYQLSRLYESELVHLRKRKVSLRSMLDIIYPRIDRTFKGNQNLYDPIPMEILKRYPHPSLLLSHREDTIVKTVGHRTGHLKGYTERIVHKIYEKAKECYSGCDIDDIEVVKLPSLIENVQEQKKKCDSLLKEMIEIARTCPYFASIVSIVGIGENLAARIIAELGDVNRFDNRAAIVAYAGLNPKIQQSGDIDGLHLKISKKGNKHLRCLLYLGAQCNYRLRKEDPLYEFTKKKRQQTQCPLSSKAAYTASAHKLLVIIYSLCKNGTLYHS

SEQ ID NO: 372700 - protein, 355 aa, unidentified
MSQEKYIGMDVHQATISVAVMDGDGKLIMECLLETKAATILEFIQGLRGTLFLTFEEGTSAAWLHDLLKPHVSRLVVCDPRKAALLKQGNKSDRIDARKLAELLRTNQLTPVYHGEHGIRTLKELGRSYLTVTKDLTRTMSRIKSLYRSWAIPCPGTTVYAPHHRLEWLAKIVQPGVRVRAEHLYEQLDTLQPIRQQARRELLLESHKHPAVKLLRQIPSIGPIRAALLVALLQTPHRFRTKRQLWAYSGFAVETHDSGEYRYVRGKVQRNRERITVRGLNDNHNRDLKNLFKGAAISASTRPGPLHDFYVARIAKGMRPTMARLTLARKIAAITLTMWKKGVSFDPQQLSRQAV

SEQ ID NO: 372701 - protein, 354 aa, unidentified
MDKDVYVGIDVSKTELVVAVRPSSESFTLAYHRAGLKQLVGRLGELKPKLVVVEATGGLQRQVVGALWTGGIAVAAVNPSWVRSYARGGGLLAKTDRIDARLLALFAQREQPVPRPPLDAETQALQELATRRDQLLEMRVAEQQRLKRSSAQVRKELRQHIAYLEGRITQIDDDIDKTVRRSEAWRRKSEVLRSFPGVGKVFCTTVLAKLPELGTLSGKAAAALVGIAPFPDDSGGRRGRRVIRGGRYPVRSKLYMCALSAIRCNPVLKQFYERLRARGKLEKVALVAVMRRIIVILNPCSRPILSGGKHPRLRSKKTRQTARCSQVHRRDAPLDPRACGPCEQRALLHLQHSC

SEQ ID NO: 372702 - protein, 348 aa, unidentified
MIVGIDVHKRSHTAALVDERGAPIATLTIANSRVGVARLCRWLLEHRANGVVVGIENAGGYGRLLCAVLVAAGHEVLNVPAWRVKRERVHEGPGKSDPADAIAVAQCVLRHQDKLGPALEPPLIRALALLETHRRQSVTRRTDAIQRLRAVWGQLDPEAESATSNVATRRALRHLKEIDFGDGLAERAAARCIHDLAREIEALNGRVAELERELAGLLAAPGDPLADVRGAGLATTVTLIAESGDVRRFRSDAAYARFGGSAPIPCGSGSTAGRHRLHRGGNRQVNACLHRIAVTQARVDPRARAFLERKMVEGKTKREARRALKRHLSDVVYRRLYTWAEHALPSAT

SEQ ID NO: 372703 - protein, 390 aa, unidentified
MLIGMDVHKHSVFVTEMEEEGNVKDQYEMSNDDESWESFLSRYSVYGNEIALEISTTGKFIARKLRNMGFSVHIADPVKLDLIFNTTKKNDREDSYKLAKLLRLGELPEVHLPSKESDDLRSITRYRKSIGEEITMLKNRIHALLSSYGISIEATDIFGKKGTAEIDKVSKILSESDRFILSSILDRIASLFHQERSVEDQISRMVLNNRNVARIMTIPGINVYSAAVLISEIDDISRFATKEKLASYAGLVPRQDQSGNRDIKGHITKHGPSMLRFILVNAAHIVIKYSKRLRSKYLSLVRRLGKNRSIVAIARILLEMIYTMLKNGEDFVDEIDSLTERKMISMQIRAKNPSPVRKLEELMKSIKKNKDTMKFINEKMIRGAPKELFS

SEQ ID NO: 372704 - protein, 349 aa, unidentified
MNRTILATDLGKFNSVLCWYELATQPAAFRTVKTTPDELRQELTRLPVALVVFEACSQAGWVLDLCEELGLATLVASTTGAAWQWKRVKRKTDRDDALKLARLAAVGEIEGVAIPPRAIRQWKSLIGLRKRLVSERVRGQNRIRGLLVCQGLPAPMGAKAWTAVGLAGIGQFAQPLAACTTDELWRGELHLLLERLHFLDAQSRVVEAKLDSLAKSDSRVSLLETVPGVGARTAEVIAVHLPDARRFRSADEISAYAGLVPRQYQSGETDRRGRITRRGPKLLRAALVECAWCSLRYNVWARDTWLRLQANGLSKKKAIVALARKLLVRCWAILRTGQPWQTPARPAAG

SEQ ID NO: 372705 - protein, 326 aa, unidentified
MAKHKHPQEVTFEEVVERGCGLDVHKKEIVATVSGTGIESETRTFQSTTRSLTELKEWLLALGVTHVAMESTGVYWKPVMNVLEPGGFSIMVVNARHIKYVPGHKTDKKDSAWICKLLRAGLLKGSFIPNRNQRDLRDLTRYRRKLVQQQSAEHNRMIRIFEDANLKLSSVFSNIRGKMCTRVIDAVIAGETDPQKLAALCTHRCLKASKEEIALAVEGCFTEHHKFMIRAIRTSISNIEAEIDHLDKEIERRMQPFEAHIQQLCEIPGMDVTSVNELLAEIGVDMEVFPAAEHLTSWAGLAPGNNESAGKKKAHTPTTATKPQKR

SEQ ID NO: 372706 - protein, 384 aa, unidentified
MSKDTLIFIGLDTHKEFTEVATVTDERGSSVEHYGKILTTKPALIKLARQLVSQHPKATLHFVYEAGPCGYWVYRLLTSLGHCCYVVAPSLIAKKPGDRVKTDKRDAIMLAERLKLCDLTPIYVPEPEDEAIRDLSRARETAMMDLNDGRYQFKAFLLRNNIRYEGPANWSLKHLRWLTELVLPHPCQQIVLQEHLQTIMERQKRLERLDNELEHQVKSWRYYPVIKAIQAMRGVRLRVAVGVIAELGDLTRFDHPRKLMSYLGLVPSEHSSGPHRRQGPITKCGNGRARRLLVEGAHSYRYSAKIATELQKRQEGVPKAIVDIAWQAQLRLCRRYARLMHRGKHRSVVVTAIAREMIAYIWAISREIVLNKVDPKQRISRVPA

SEQ ID NO: 372707 - protein, 370 aa, unidentified
MRSVALDFGVRQITLCEVKEQKVIERATVRSIGALEKYLGPNTLPATVAIEACREAWSLHDRLGQWGHQVVLVDTTRVRQLGIGQHGRKTDRIDAERLAMALERGSIPRAHVLAPHRRQLRLQLEVRRALVETRAQYITTIRDLIRANGEQLRGARSEKFLEVLKQAPLSEPTRALMAPLSQTIAVLDEQITQSEAKLLGLCQQEPVIELLTTVPGVSLITAAAFVSVIDQARRFDDAHQVESYLGLVPSENSSGGKRRVGSITKEGNTYLRALLVQASWGILRGRGDDPLTLWGQIVADRRGKRVAVVALARRLSGVLWAMWRDQTVYEPARVGRPSAQGLERQAQSVKFQAQMMAQAARKVRRQYGAP

SEQ ID NO: 372708 - protein, 340 aa, unidentified
MKLYGAIDLHSTNNVTVVIDEQDRVVYQKRLPNDLALILMELSVYQTELQGIVVESTYNWYWLVDGLMEQGYKVHLANTAAIQQYEGLKYTDDHSDARWLAHLLRLGVLPEGYIYPRADRPVRDLLRKRSQLVRQRTTNLLSIQNLMTRNTGSSLSANQIKGLDVQQVDELLPNGDLALAVKANLSVMCSADEQTKIVERTVTQRVKLRPQFSFLKTVPGIGQILALTIMLETGDIRRFPSVGNFASYCRCVGSQKISNGKKKGKGNTKNGNKYLAWAFVEAANFAIRFNSKIKSFYQRKKAKTKGVVAIKAVAHKLCRACYYIMRDRVPFNITKAFGQK

SEQ ID NO: 372709 - protein, 399 aa, unidentified
MTGAAHEEPRSETRRFDTTVPGLKRLRNWLNEERVTDVVMESTGSYWIPVFNLLEGHVRVVLANPEEVKNRKGHKTDRKDAGHLADLLRHNHVKSSYIPAEPVRQLRDLTRRRVQLTQDATRERNRVQKLLEQVNVKIGSVLTDVFGVSGLHMLLALLDGRAAPEEIAGLARGSAKRKTPQLIEAIEGNRMSDHVRFLIRGCLRHLACLEEEVEELDTEILRRMQLSTFQKAFTLLQTIPGVGQLSAATILAETGPDLDSFPTIEQMASWAGLCPGNRESAGIQKGPQTTHGNPYLCTALVQCAWAATRKRDSVFRSRFQRLAPRRGEKRAIIAVAHHMLIILYCMLKRGVPFLGAEHAPKQRRRERRAHHHLRCLRRLGFSVAIRLSSESTPPDTISR

SEQ ID NO: 372710 - protein, 361 aa, unidentified
MPRIAEEGQLVTGGVDTHADMHVAAVVDVVGRVLGTGQFPATGAGYRAALAWMRGHGELARVGVEGTGSYGAGLARHLAAHGADVVEVIRPNRQARRLRGKSDAADAVAAALAALNGEACGAPKSHDGAVESVRMLKVARRGAIKARTQAANQLRDLIVTAPGQLREQLAPLPAARRVQLAARFRPKDLTSPAEGAKAAMATVARRHQALSAEIARLDDALTELVTHAAPREFLARQGIATQSAGTLLATVGDNPHRLRSQASFAALCGASPVDASSGKQIRHRLNRGGDRQANSALWQIVMTRMSCDPRTKAYVTRRTAQGKTIKEIMRCLKRYVARQVYKDLVLHAEAHKEIIRGHAAE

SEQ ID NO: 372711 - protein, 365 aa, unidentified
MQNINTMRTKAKNIFKGQLTIGLDLGDRSSAYCVLNEAGEIVLEHKLTTTPEAMKQVFGSMPRCRIAMETGTHSPWVSRLLTALGHEVIVGHAQKVRLITKSRRKDDRLDARTLARLARIDPELLSPVKHRSAQAQLHLTEIRARAVLVSARTALVNAARGLVKSSGERLRKCHTQQVRREMTGGLSAGLREALEPLLQEVESLNERIQEYDRRIERMAKQTYPETALLKQVKGVGDLIATAYVLTIEDPHRFRKSRDAGCFVGLQPGRRNSGESEPQMRISKEGDAYLRTLLVQGAHYILGPFGEDSDLRRWGLKLSARGGKTAKKRAVVAVARKLAVLLHRLWVSGEVYEPLRNSQKAMTVAA

SEQ ID NO: 372712 - protein, 448 aa, unidentified
MKDKSKTKRTLPVVHDRAAGVDIGSRFHVVAVPPDLCDDPVRTFDSFTGDLHRLAAWLIELGVTTVAMESTSVYWIPLFEILQEKGLEALLVNARTVKNVPGRKTDINDAQWIQQLHQFGLLRGSFQPAKDLASLRAHLRHRERLLEYGAAHIQHMQKALMQMNLQLHHVVTDITGATGLRIIRAIISGNHDPKTLSEMRDIRCKESRETIENALNGNYRSEHLLALRHALELWETYQQKVGECDAEVEVILKLMQKEQPKPEAPLPKKRTKTRQMNEPKFEVREPLYQILGTDLTQLHGFGPYTALKLVGECGTDMSRWPTAKHFTSWLTLCPGSKISGGKVLSAKSRRSNNRAATLLRLSAVNVGKTDTAIGAFYRRLAARLGKAKAVNATARKLAILFYNALRYGMAYQDPGASYYDIAYKERVIQNLRKRAKHFGLELREASVG

SEQ ID NO: 372713 - protein, 411 aa, unidentified
MADSYDFYIGIDWGTERHQVCVLDAAGRRVAEQTIAHSGAGLAAWLAELAGYAPAERLAVAIEVPRGAVVDALLAHGCHVYALNPKQLDRFRDQQTVAGAKDDRRDAFVLATAVRTERGAFRTPPPEDPRLAPLRELTRLTRELGTESLRLTNRLREQLVRVFPQVLTLCPAADEPWLWTLLEQAPTASQAARLRPPTLRALLAAHRVRRFTTEELYACLHAPPLPAAAGTIAAASEHIAFLLPRLRLAFQQRGRCHRRLEKLLDALAAEAPAPGQPLEHRDVTILRSLPGVGRVVAATMLAEAWPALATRDYQRLRTHSGVAPVTRQSGKTRVVRMRRSCNGHLREAVFHWASNSLRLDPRCRAHYDRLRQQHGHARALRGVADRLLGLLVTLLRAGTLYDPARRHVAAA

SEQ ID NO: 372714 - protein, 348 aa, unidentified
MRFYTTTHQHYCGIDLHTKQMYVCIINQAGETVLHCNMKASPEPLAAAIAPYREGLVISVECLFTWYWLADWCVQQGIPFVLGHALYMKAIHGGKAKNDRIDSEKIAHLLKAGMLPQAYAYPARMRATRDLLRRRMMFVRYRADLSAHVQNTVSQYNLPPLNLRTDKRSDLPLIPDHFPDPVVRQMVTLDTTVIDHLDEQLRVLEQDLAMQAKAHDAFAYHLLRSVPGIGRILALVILYEVENIHRFPTIGQFASYARLVKCASESAGKKSGYSGKKIGNAYLKWAFSEAAVLFLRGNPDAQKAIARLANKHGKGKALSILAHRIGRAVYVMLTKRQPFDKDRFMASL

SEQ ID NO: 372715 - protein, 452 aa, unidentified
MQMKNRTCRKHQDNKKMISGKRVAGIDPAKEKHQVTVLDREGLQAGSSFSIPVSYEGYNERLWEGLDRRLGQYSPEDLVFAVETSCNLWKTLVVYLSKRGYTVLLVSPLVTYKTRGVINNDFSKTDPKDAYLVADNAHKGNYNRYRTYGAESNELHSLCIAYDKLVKDRSRNKARLRALMEEIFPEYLQCLNVDIDTSLYLLGKYFLPEHFQALNIKEEAANIYRISRGNHGLETLQKLKEHARHSIGVEKAGEEAGVRLVLDAWTAEIRQLDKSIDVISGRMIELAQRSEYIEILTSLMGISDISAARFIGECRDLSLFKHYKQIEKMAGLNLRISDSGGGVGMRHINKLGNKRLSKLIYQMTTQTARFIPEVRIKFLNRQLKKKCYKKNIIAAASNLLKLLMALIKDKRKYEFREDKVKEMKLLEHKYEKVEQKNTRKKKTDKPKTKKAA

SEQ ID NO: 372716 - protein, 412 aa, unidentified
MTAINQFTAHIGLDWADKKHDVCVQFNNGERVFHVIEHTPEALDTWLKALHKKVKGRIAVAIELKKGPVVFALQKYPFITVFPVHALSLARYRQTFWPSGAKDDPQDAELALELMLRYPKKIKAIEPDNADIRLLQQLVEQRRQLIEDKRRFVNRLINTLKQYYPQLLEWFSHRGSLLLCELIMRWPSLQQLKRARRDTIRNFLNAKGGRATVLTEQRVASIDNAIPLTTDPSVIEANALMATALAAQIKVVSEIIKTYDERIETLFDTLPDAELFKSLPGMGPCMGPRMLAALGDNRDRFNSAEEIQNYAGIAPVTERSGQKSWVHWRWQCAKFVRQTFVEWAAKTVNSSYWSRLYYQSLRKKGKSHQSAIRALAFKWIRIIYSCWKNRTCYNEAKYLLALEERKSPLLKP

SEQ ID NO: 372717 - protein, 354 aa, unidentified
MSQKLDTSPAVIGIDIGKNSFHIVGQNHRGAIVLRQKWSRGQVETRLANLPPCLIGMEACVGAHHLSRKLQMFGHDARLMPAKYVRPYSKGQKNDFRDAEAIAEAVQRPTMKFVATKTADQLDLQALHRVRDRLVGQRTGVINQIRAFLLERGIAVRRGLRSLRSELPGILATRTDVLSPRMLRIIEDLAGDWRRLDERIEGLSNEVETLARQDKACERLMTVPGIGPIISSAMVAAIGTGDVFSKGRDFGAWLGLVPKQISTGDRTILGKISRRGNRYLRALFVQAAWVVLVRVKCWERYGLKSWIEAAKKRLHHNVLAIALANKLARIAWAVLNKGRAFECVKTEETASRPA

SEQ ID NO: 372718 - protein, 419 aa, unidentified
MSYRISGIDVHKKVLAVVVSDVEVDGEFRFERRMFGSNPEQLRTLAAWLVEQAQYWKPVWEALERYWKPIREKREGARRKSGTLHLALAQSNRGRQGRKRDFPDAERLVKRLVARELTLSFVPDAEQRLWRTVTRRKYQLTRDHVRQQNQLESLLEEAHIKLSSLVSDLLGASARRMLQALAEGETNPTALAALADERLRATPEQLCDVLGACTDLKPVYRQLLKMALEQLQFLEQQIGQLDKEMASLLSQHQGAVERLAEVPGLGVDSAQQIIAEVGPTAATFPSEKCLSSWVGVCPGDDESAGVNYSRRSPKGNRHMRRLLNQSANAAARTKGSLFEIVYRRSVPRLGHNQTIGAISHRQCRLIWLILHQGVRYEERGPAVTKQSKQKRTAKMIRQLRSLGYRIEAPNPQLSQAQAQ

SEQ ID NO: 372719 - protein, 355 aa, unidentified
MNDAKYIGMDVHQATVSVAVLDSAGKLVMEAILETKAETILQFIHGLRGSLHVTLEEGTCAAWLHDLLKPHVTQVLVCDPRKNALIKAGNKSDRIDARKLADLLYLNKLNPVYHGETGIRALKEVARSYLALTRDTTRVMNRLKALYRSWAIPCAGQRVYAPRYRSEWLVKITEAGVHRRAEIYYQQLDALRSLREQVRRDLLAEGRKHSAMKLLRQIPSIGPIRAVLWIALMQTPHRFRTKRQLWAYCGLALKTSTSGEYRIVEGRLKRSKKFLAIRGLNANHNHDLKNIFKGAATRAAAVPGPFQEFHAGLVARGMKPTMARLTLARKIAAITLIVWKKGVGFDAEHLKQQAA

SEQ ID NO: 372720 - protein, 391 aa, unidentified
MTKPKTKTVNDFSRCLDPLDMDATVIAVIEMSQSSWLVAGIVPGVERQPLKKLAIDEHALLNLLNRWRAEAEKQGHRITRIAVAFEAGHDGFWLARWLAAQGVEAHVIHASSVAVTREHRRAKTDRLDTELLKRSFLGWLRGERGHCKMVAVPTLAEEDAKRPSRERETLVGEASRIITRVKSAFVRLGIRGFNPKLKAAATRLETLRTPEDEPIPPNTLAALKRDLERHQIVKKQIREIEQTRLDVLKQAPEKGPHAMVLLLARVIGVGVETADMLVQEVLSRTMRDRRAVGRYAGLTGSPDESGAKRREKGLARSGNARVRHGMIQLAWRFLLFQKDSALAQWYRQRTADAPSTRKTLIVALARKLLIALWRLARDGVVPEGVRMRPAA

SEQ ID NO: 372721 - protein, 346 aa, unidentified
MAISLVAVDLSKSVFQLSLADAQHHIISRKRLNRAQFHRFLAQSSAVRVIMEACGTAHYWGRTAQLLGHEVKLLHAKYVKDYVRRTKTDAADADALILADRDESLHPIPVKPEQRQALQGLHRIREQWKSARTARICEARALLAEFGVCIPKGARGIGRRLTAGAEHAPDLLQATLLDLIREIDELQQRIKSVDHRLAAYADTDCDVEMLLGIHGVGVTIATAAVARVPSIHVFKRGRSFASWLGLTCREYSSGSTRRLGGITKQGDRYLRMLLIHGARAALVAARRKAANGKQLTRLETWAVNTQMRIGHNKATVALANKMARIMWAVWTRHERFNGDDALRFAA

SEQ ID NO: 372722 - protein, 347 aa, unidentified
MNSVGIDLHRNRSHVAVIDGNGELAVSRRIVNGRETFLELLGGLEGETQIAVEATYGWEWLADLLEDAGYEIHLAHPLRTRAIAAARVKTDAVDARTLAHLLRADLLPEAYVAPRELRDLRELLRNRIGLTGMRSALKNRVHAILAKHGITRQHSDLFGKGGREFLAELQLREAPQRRLHSLLALIDDFDREIEATSDEIEQRAKADDRVDVLTQIRGVGRYTAMLIIAEVGAIERFPDARHLCAWAGLTPTVRSSDGKARLGHISRQGSPALRWALVEAAQKCTTGGGPLRESYERIAKRRGAKVAKVAVARQILTLSYYGLRDGEIRCLARRSRASAKEKLAATP

SEQ ID NO: 372723 - protein, 344 aa, unidentified
MTYFTGIDVSLRSVSICVVDDRGEVRHEGKVPAQPAAIAECLRRFSTDVKAVGLEAGTLTQYLTYGLQAAGFEVICMEARQVKNTLAAMRNKTDRNDARGIAQILRTGWYSRVHIKSMHSHRVRALLASRKAILKKCVDLENELRGLLRVFGVCLPPRVGHGGFDTEVRQTFASDEMLACALNPLLDARTVLYKTYLKLDNAIKRLVKADPVCKLLMSVPGVGPVTALSFKAGVDDPGRFKSSRTVAAHFGLTPRRFQSGESDNPGHISRAGDADVRSALYVAAHSLLTRNEQWSSLKAWGMRLAKTRGHRRAVIAVARKLAVILHRMWTDGTAFRWSAQEVAA

SEQ ID NO: 372724 - protein, 345 aa, unidentified
MELHTIGIDLGKTVFHLVGLNLRGEVVVRKKFSRKQLLHFTANLQAKLIGMEACGGSHFLGRALREQGHEVRLMPAQYVKPYVKTNKSDYIDAEAIAEAVGRPKMRFVPIKSDDQLDLQSLHRVRERWVMRRTAVINQIRGLLLERGITLRQGRGHVDAALPGILEDASAMLSGALRMLLAQLKLELDHLQMRIDEADAMINKAAGENEACRRLVAIPGIGPVTATAIIAAIGNGAAFKKGRGFSAWLGIVPGEYTTGGKQKLLGISKRGNSYLRRLFVQGARAVLQQSAKQSSGLSAWLAQLTTRTHSNVAAVALANKLARMAWAVLAKNEPYRPPMLAAAATT

SEQ ID NO: 372725 - protein, 490 aa, unidentified
MFGFWFWSSELTEENVVSHGKVLSRGDRRRNERLARLRLIVRRDFAVVAVDLASAKQAVVVTDHDSMVLGRRMFAGDAWVIDDILDWAEPIAAKAGYAGVVLGCEPTGHRWKPLLDRSRARGLELVCVNPMLVHRGREEEDFTRDRSDFKDATIIAKRVAELRCYVPYVMEGHWCRLRHLGARRADQLVAVGSARQRLRDLLECAWPAALSVASDPLDALTWRAAMAVSTDPGRIVAMGFDAFADAVREQLPRWGGTRRNLRVLRAIFDAAHAPGGVETERAAACERAAYALADWHYALDQVTDVEHRMVEVLDALDLYELVTTITGLSVVGAAAILAETGDPARFDCARTWAKHAGLCPRANESGNFHGSTKVSRRGRPGLRLAAWRALWGALRHNPVYAARYTHLTTRADNPLCDGQARAAIAAALLRQLFVVVTRRVAWDPAIAAGTGGCRRLLSATLVAGGANPTPLWVKPDSEQGRPAHPPPELA

SEQ ID NO: 372726 - protein, 346 aa, unidentified
MQHYVGLDVSLKQTAVCVVNQAGKIIREAMVTSDPDAIAQFIAAHAPDVARVGLETGATSTWLWTELNKLGLPVICIDARHAKAALKMQINKSDRNDAAGIARIMQCGWYKEVRVKALDSHAVRALLNSRALLVQMKRDLENQIRGLLKNFGLVIGRAKMNTFTAKTLELIDGQPLLAAAVEPLLKAREALARQIADLDDKLLRLARSEPQVRRFMTAPGIGTITALCYFATIDDPERFKKSRSVGAYVGLTTRRYASGETDRTGRISKCGDSMLRCYLFEAANVLLTRVARWSTLKAWGMRIAKRTSLNKARVAVARKLAVILHRMWIDGTEFCWSVQDPVLREG

SEQ ID NO: 372727 - protein, 480 aa, unidentified
MSQQKKDSQVPGESIPAGKGKRGRKRKGMCLEDRPILEANAAGIDIGAREIFVAVPPDRDEEPVRVFSTFTEDLEKMAQWLVGCGITTVAMESTGVYWIPVYDVVEQHGVKACLVDARGMKNVPGRRTDWHECQWIQFLHSVGLLRAAFRPDGDVCAVRSMMRHRTELVEMTSQHIQHMHKALTQMNVQLHHVISDLTGLTGLAIMDAIIAGKRDPAVLAQLRDPHIKASEETIRKSLVGNWRAEHLFTLKQSRESYTHYQEQITVCDEQIEKMVVAFVARVDPAERPLPPDRKSKQRGRKKKNVNPKTGFDLRTESYKLFGVDLTQIPGLMAMVLMLFSEVGRDMSRWPTAGHFVSWLALCPDNDISGGRVLWRGMRRVHNRTGDLFRMAAYALHHDATPMGDYLRRMKSKLGPAGATTATAHKIAIIFYTMVKKQVEYDGTIWAERDAAREQRFEAKLKRQAQQLGYKLVPIEEKPAA

SEQ ID NO: 372728 - protein, 344 aa, unidentified
MDTHRDAHVGAVLAVTGAVLGTDEFPATAAGYRDLLKWARKSGVVRRAGVEGTGSYGASLSRYLLAQGVDVLDVNRMDRADGRRRGKSDPLDAQNAARAVLSGRARAQAKAGDGPVQIARMYKLTKVSGVKARTQAINQLKAVLITADPALREELAGLGNAELFRTCAGFADLSSHQGVGEESVLQATRITLGLLADRIGQLSQQIREVDARLARLVECHAPQLLEVVGIGPDTAVALLIAVGDNPERLGSEASFAALCGVSPVERSSGRRQFRRLNRGGDRQANAALHRIVFTRLRVDPRTQTYYERRIKEGKTRREIIRCLKRYAAREVFHLIEQPQPEPCA

SEQ ID NO: 372729 - protein, 411 aa, unidentified
MTKEDFIYVGIDLHKETHTAVMIDCYNNKLGEITFPNRPADFPKLVTKVKKCNTDAKEVVYGLENAYGYGRALAVWLIDKGYFVKDVNTAISHRQAKHRGAMYRKSDSDDAEAIALATLNMLDKLPDACPNDAYWSLGQLVHRRDNIMKQRTRLVNQLHEQLCIAYPSYKSFFNDISRPTALYFWEHYPSKKYLKGKSVEDLRAELVPVSHNKCSTKTCEKILDAVASDKVKNNAYQDARDMVTLSIVSDLQHYDKQLAEVDKMLEQMYKMLGCTLTTIPGVNVITAVKILAEIGDIKRFSNANKLAQFAGIAPLHLSSSGKGKDVATKQGNRRLQATIYFLAIQMVQVSSKGTPRNSVVRAYYEKRKAEGKTSQQARICISRRLISIIYGMLKNGTEYRMPVVENAGENR

SEQ ID NO: 372730 - protein, 387 aa, unidentified
MARKRTLSTLDTSIAYEAVGLDLAKTDVALAAFDSDHKEPYLIDRIPYDKLYELLADMAPTLVAMEPCSGAHQIAEQIEALGHEVMMISGRHVQAWVKDHCNGQKTDLNDAFAILNLAYDRWLTPIRGKTREECRLLALQASYRQLKGQRTKTMVHVKATLHAWGFPIRAGSFNQKVLHELIDTNREAFGDEVVETLHLMINRVRDLDHDIATVLKLLTEATKRDPRASLLRSIPGFGILTTSRWCAVIGDIARFDSPKQTMAFVGLVPNNRITGHHMETSSGREARGQGKMSKRGDKMLRSLCILGAGALCLMVRNDRLPDCPFVASIKERLASPRPWFKVLVYVAAKLVRIATALLKYGETFSFEKAGISKAVLKQWELEQAKAA

SEQ ID NO: 372731 - protein, 350 aa, unidentified
MDKELYIGVDVSKQTLDLAYYDGESIDWKKAHIKVSNNNAGFKKIGSWVAKVSKRFDIVLFCMEYTGLYTQNFRLWLEEKHYIYRMVEPRKMHRFEPDLDDGLRSLDRIKTDELDSFRIAIYCEQNHRKILRNPSKLPPPVYFKLKRLLAERKQTVKQSVLYKQQLHDICAYDTDLSVERKNGQLKTLNDALKGIDNEIDMYIKEDADINKNFSLLTSIPGIGRVVALETIVLTENFMAIDNPRKYACYIGVAPFKKESGTSVRKGSSVSKKGFKQAKADLSIACLVCMQHIPNIRDYWERKRKEKCSGIVFNAIKFKMILRMFAVIKRGTPYVETDNYRNGKNKQPGVN

SEQ ID NO: 372732 - protein, 402 aa, unidentified
MWYAGIDWADQHHDVVVIDEAGRQVATRRVAHTQEGLTALTQLLVGIAKTPDQMACILETNQGLLITALLEAGFPVYPVNPKTVDRRRNAAGAKTDQIDAYLLAKTGRSDLADLRRLQPDSPVVQELKLLTRDQDALIASQTRLVNQLTACLKAYYPVALELFAKLHQRSTLVFLQTHPTPERARAASVELLEATLRQGGHSHSKQAAPKIWQQLQQPHLQADAVTTRAKARLMLALVSQLLPLVEQIAQYDKEITRLFLTHADSDLFGGLPRAGKRLAPRLLAEWGDERTRYTSSSSVQALAGTAPVAFASGNYAKAHKRYACLKPLRNALHQFAWQSTLRDGWALRYYQRKRAEGKSHSMAVRALANGWVRIIYAIWSQHARYDTAIFEAAQLAHHQRAA

SEQ ID NO: 372733 - protein, 355 aa, unidentified
MDSKKYIGMDVHKESISIAVMDAAGKIVMECVIETKASMILQFIDGLRGEVHVTFEEGTSAAWLYDLLKPRVTKLVVCDPRKNASMREGNQSDKIDARRLAELLRLNHLNPVYHGEHGLRSLKELVRSYLTITKDLGRVMTRVKAIYRSWAIPCTGKQVYASCHRAEWLGKIGEPGVRRRAEFYYQQLDALRTVRQQVRRELLAEGKKHQAWKRLCQIPSIGPIRSAVLLGILQTPHRFRTKRQLWTYSGFGIETQSSADHRSVYGQLQRAKKQISIRGLNQNHNHDLKNLFKGAAMVASSKPGPFQEFYAALLTKGIRPEMARLTLARKIATIVLIVWKRGACFDAQYLKPQTA

SEQ ID NO: 372734 - protein, 394 aa, unidentified
MKKVCGLDVHKDTIFLCILAENGQSFVKEFGGNTPDIIAMRDLLKANQVREVAMESTGIYWIPIWRIFQGHFELKLVNPYFIKQVPGRKTDVKDSEWIATCLQKRLIRGSYIPGKNIQELRQYERRYVHLVGQITRIEQAIDRQLHRCNIRITNYTSKIGSVSVMNVVRALINDEATPEELIKHVHGRITNKHKENIKAALTGYISDSDRMIFRQNYEELELFTRQQQECVKEMERICDTLYKQEVELLCTVPGIQKLSAMTIIAEVGVDLKSFATAASLVGWAGLRPRNEDSNKKVKSRKITKGDKYVRRILVQCAWAMTRSKKSWLSKKFNDLAKRISKKKALIAIARKLLVIIWNILSKHESYKDYKPILSRDQKKRRIAWLEKQILELQA

SEQ ID NO: 372735 - protein, 337 aa, unidentified
MKFCGIDLHSNNSVVVVTDETDRVLLSRRCPNELTKILPLLEPHRAELLGVVVESTYNWYWLVDGLKAAGFEVKLANPVAMQRYDGLKHSDDQDDAAFLAHLLRLGILPTGYIHPPQERALRDLARKRIQLVRSRTQHILAVENIMARQFGHGLSCNEVKGLSATSVDRLGLTTDVALAMKTNVAIIQAVQAQIDILEDRLLHEARLRPEFCLLKTMPGIGEVLATVIMLETGDIERFADVGNFASYARCVKSAHYSNGKKKGEGNTKNGNAYLIWAFIEAANFARRFSEEAKRFFEKKKAKTNAVVATKALAHKLARASYHILKEKQPFDAKRCFA

SEQ ID NO: 372736 - protein, 325 aa, unidentified
MNQAKYIGMDVHQATISVAVMDSSGKLILESILETKDSTILQFIDGLCGSLLVTFEEGTSAAWLYDLLRSRVANVLVCDPRKNALLKDGSKSDRIDARKLAELLRGNHLSPIYHGESGVRTLKELARSYLTITKDLTRVMSRIKAVLTIPHDDAVDTRLAKIVEPGVRLRAERLYQQLDALEPLRQGARRDLLTESRKHPAVKLLRQIPYLGPIRSALLVALLETPHRFRTKRQLWAYSGFGLETHDSGEYRYVRGQLRRNRERVTVLGLNQNHNHDLKNIFKSARYLPVLGRDRSRSFTLGFWPKGGGRRWRVSPWHGRSQRSL

SEQ ID NO: 372737 - protein, 262 aa, unidentified
MHVATLGIDLAKQLFQLHGVDDRGQAVLSRRVRRSQLMEVVRSLPFCVIGMEAYASAHHWGRVFEQCGHTVKLMSPKYVKPSVKTNKNDGRDAEAICEAVGRPTMRVVAMKTVDQADLQAVHRSRSLLIKTRTALLNQIRGLLGEYGVVIARSPERVRPALVGLLNDEQTGLTPFARDTFSEFYDQLVELEQRIVRVNQRLDRVFRAHPVCRKLAAVPGIGPLTATALLAAVSRPDVFQNGRHLAAWLGLVPRQFSSGGHAR

SEQ ID NO: 372738 - protein, 348 aa, unidentified
MEIDIIGIDLGKTVFHLVGVNRSGEVVVRRKCSRSQLLRFTANLRVRLIGMEACAGSHFLGRSLREQGHEVRLMPAQYVKPYVKTNKNDYIDAEAIAEAVGRPKMRFVPIKSDDQLDMQSLHRVRDRWVGRRTSVINQIRGLLLERGITFRKGRRYAVASLPGVLEDPENGLSGALRMLLAQLEGELRQLQSQIDEADALIARAADEHEPCRRLMAIPGVGPLTATAVVASIGNGASFGKGRSFATWLGLVPGQYSTGGKQKLLGISKRGNGYLRRLLVHGARAVVERRDKQSPGLSAWLNQLAARTHSNVVTIALANKTARIIWAVLSKAEAYRPPLLACPTNAVPR

SEQ ID NO: 372739 - protein, 369 aa, unidentified
MERFCVGVDVSSRTMDIAYRGPKGRTVGQVFENTRAGQRALIKHLKKHRRSIRVVMESTGIYWIALFEVLEERGFDVKLVDAHQARQVPGRKTDVKDCQWLQELHTYGLLRGAFRPEDEVCVLRSYLRQRSMLVAMASRAVQHMQKALEQMHLKLTEVVSDITGKTGMTIIRAILTGERDPQVLATSRDKRCKHDQGTIAKALTGHWRAEHLFALQQAVDQHDFIAQQLRACDGQIEGCLQAFVPDVEAASPQSTPGRLWRSSRSNPLSFDVQTYLNTMTGVDLTQIDGIDSLTALKVISEIGLDMTRWPTSKHFASWLGLCPGNKVSGGKRYRIRSKPSANRAATALRLAAQGVANSHSALDLLYLSA

SEQ ID NO: 372740 - protein, 357 aa, unidentified
MTNKVTRIGIDIGKNTFHLFGVDETGQPLLRKRLRRTQLLAFLANIEPCLIGLEACSGSHYWARQITVHGHDVRLISPQFVKPYVKSNKNDYNDAEAICEAVGRPTMRFVGVKSVEQQDVQALHRIRQGIIKARTAQANQIRGFLTEYGIVIPEGINYLRRRLPEILEDAENGLTARFRQWLSELYEALCALDERIQRYTQEIMTLYHADEACQRIGAIEGVGPHTATALVSAYGQAREFRTGRQFAASLGLVPRQHSTGGKPRLLGISKRGDIYLRTLLIHGARSVVRRAPNKTDARSRWIQRLVTERGTNRAVVALANKNARIVWALLSRGDQYRAAASENEWPGRLNESVSPAT

SEQ ID NO: 372741 - protein, 407 aa, unidentified
MSITCGIDWAEAHHDVAVMDDAGRILGRLKIDTGVGGFGRLMLLLAEHSDDPVSVPIAIETDKNLIVAALQAGGFTVYPINPRAVARYRERHGQAGKKSDPGDAALLADVARTDLHQHRALPAVSHGGQAVKVLARQHQEAIWSLHQTTSRLRSVLLEFYPQALHAFPNLQHKAALTVLAAASTPELGAKLTAPRIVTLLRRCGRRNDPALVGQILGDLKTPALRQPSQVEAALGTTVVSLLVILTAMHAAVESLEKALGVEFAQHPLEAVLRSAPGLGPILAARVLAEVGDDTTRFITAGGLRAFAGTAPVTRASGRSRYVKARKVRNKRLGDACHWWAFAMLTKSPGAREHYDRRRAAGDHHNAALRNLANKLIGRLWWCLQHNEMWDEQAAWPHLAEPPVAAAA

SEQ ID NO: 372742 - protein, 467 aa, unidentified
MWLLRENMKEEKKHSPRRTPGGQLQSIQPQVAGIDIGSREMYVCGPPEPDGTCPVRTFATTTREIQACAAWLKQREVQSVAMESTGVYWIPVLEILEGAGLETLLVDTRPLSRVPGRKTDVEDCQWIQTLHSHGLLQSSYRPTEEISQLRTIVRQKAALVREQADWVRRMHKCLDQMNVRVHHAVSDTQGVTGMRIIRAIASGERDASKLAQLRDPGCRHSEAQIAEFLTGHWRSDHLFNLEQSLLMYDGIGDRIASYEKEIQQRMDRLTPVPRKNDVAPPPLNRNKRKAMKRRDQEEKRQKLYRMVGADLTTIDSVGVETAEVIISEYGVDLSKFSTEREFVSHLKLAPYRPVSGGAVLKKKRKPSKGTRSAEALRNAAATLKRSRSALGAYFRRIARHKDSSVAVFASARKIATLIYRMLRWGQKYVDIGQEAYEKHRQDLKLRALTSTVAQLGYQLVKTEAATS

SEQ ID NO: 372743 - protein, 338 aa, unidentified
MNKFSGIDLHSNNSVVVVSDEADRIVYQRRLPNDPVQIQAALAPHREDLVGVVIEATFNWYWLVDDLMKEGYVVHLANPAAIRQYDGLKYSGDFADAAYLAQLLRLGLLPEGYIYPPQGRQVRDLSRKRMQLVQCRTAQILAIENLFSRQTGGQMQGERVKRLDEAQVSGFGFAPDVTLAMQANLAVMQTLQEEIGIIEKRLMERVKLHPDYALLNSVPGIGPVLASTIMLETGTISRFAEVGNFSSYCRCVDSRRESNRRKKGEGNTKNGNKYLAWAFVEAANFAIRSCPEARRFYERKKRARNRIVAIKALAHKLARACYHMLREHKPFEIARCFG

SEQ ID NO: 372744 - protein, 348 aa, unidentified
MSKSNQYVGLDVSLKETSICVIDDAGKIVWRGRVDSTPEAIATAVKQHAPQAVRIGLESGQLSSWLFHELKGAGLPVICVDARHAKAALSLKVNKTDANDAFGLAQIMRVGWYREVTVKGLDCQAVRALLVARAQIVSQITTLKNCVRGILKTFGRVLPKGLRSQFPARVRAAIDGHPVLGTIIEPTLRVLEATRVQLRVYDKAVIQRARSDDTARQLMSAPGVGTVVALAYITGVEDPARFKRSSSVAAYFGMTPRRYQSGEIDHAGRISKCGDGMVRSLLFEAAKVLLSRSARPSALKTWGDALGKRIGAKKATMAVARKLAVILHRMWTTGTTFQWNAEAASSAA

SEQ ID NO: 372745 - protein, 489 aa, unidentified
MSQGKRSVPRAASSKVKAEARPKAASCPGGAPAGALTVLNRNAAGIDVHSDMHMVCVPAERTSPEGEGASGDLPANVRKFGANSCDLAAIAAWLAACGVTTVAMEATGVYWIALFELLEARGFEVYLVEPGQLAHCGARPKTDVLDVQWIQRLHTYGLLRPSFRPANSIVALRGYHRQRQMQIRYAASHVQHMQKALEQMNVKLTEVLADITGLTGRRIIEAVLAGERDPRKLAALRNVQCHNDETTIAKALEGTWRPEHLFALRQAYDLYRFHHQQIAECEQMIKTEFAQLPNRAGDKPFSPKPRKGGRKQNDLTFEACGPLFKALGVDLTEIEGIDVRTALVILAELGVDVSRFPTEKHFASWLGVCPRQYESNHNKKKRGPRKGKNRIAIALRMAAQGLGKTKSPLAMYYRRIKSRIGGKGAITATAHKLACLVYRMLKYGKEYVTQSMEEYESRIKQQLERSLRRKATALGYELVAKPAPEPAPA

SEQ ID NO: 372746 - protein, 432 aa, unidentified
MNESIPAASLEGVAAYIGIDWADQKHDVVLRSAAEPNNVEHRVIEQKPGALMEWIGQLQRRFGGQGQILVCLEQSRGALIYHLMGYEFLELYPVNPLQLARYRETFSPGGAKDDQPDAGLLCELLYCHRDRLRAWKADSELTRKLAFFNEGRREAVDQRTRLSNAIKSQLKVYFPLALELLNQDTSTALAADLLLRWPSLETLQKQIPHQLRKFFYAHHCRGESRMLERLQLVQQAQALTQDSGVIEPAAFRVQMLARQLKNLLPDIARYDQKIAELFAAHPDRFLFENLPGAGRALAPRLLSALGSDLNRWESAQEIATLYGVAPVRRASGKKSGKKGEKKASVHFRQACPKFLRQSFHEFAGCSIRYCCWARAHYEAQRAQGKGHHAALRAVAFKWIRILFACWKQRIPYDPQRYLQALQQRASPYANAC

SEQ ID NO: 372747 - protein, 408 aa, unidentified
MKRYYIGVDWGDRLHQVYVGDEEGKKVREMKVQESPQGLAEIGRWLDEKRAEGFELWAAIEKPAGRIVDFLLDHGVEVYPVNPKAVDRVRDRYRMSGSKSDAFDAYVLAEFLRTDQAHLKALRPSSEKAQELKMLSRDQRRVGRHKTRFLNQLTTTLKEYYARPLEVFEDLETEIALDFLKQYPTPAHLSALKRKEFNRFATKQHHLSKQRCEQLWEKLHKPQLAVPEHVVRAKAQLLEVLIEQLRASIKAVKIYNHRVESFFASSPAAQFAKTLPGAKSGTLVAAIWAELGDAQGRWESSGHLQAEAGAVPVTKASGKSRVVHFRFACNKPLRHTMYWFSFVSLNQSEWANLYYRAQRDNGHSHHQALRALGAKWLKIIFVMWRDHKPYDENYHLANIARQKLRQAA

SEQ ID NO: 372748 - protein, 333 aa, unidentified
MTDTTTDASLSAPRVPVYVGIDVAQDKLDLARTDADAVPTFANDPAGVAAVVGLLSPLRPAVIVVEATGGLERPLLDALLEAGLPAALVHPGRVRYFAKGMGVLAKTDRIDARVLAQFARLAAPRLAQKRSANQAELAALVVCRRQLTLARADQSNRRRATASKAALRSIDAVLATLDKQVDALDRQVRDLLDADDDFKHLDGLLRSVPGVGPVLSATLAAELRELGRTDRRQVGALVGVAPFNCDSGKLKGRRAIRGGRTAVRCVLYMATLAATRCNPVIRAFADRLKRAGKLNKVVIVACMRKLLALLNAMLRDNLTWNQLEVVKKLAPTG

SEQ ID NO: 372749 - protein, 476 aa, unidentified
MGKCKRNSTAEVKQRKPLRAAKARISAPETTVRAQYRSAIGIDVHLNLLVCNFQTQLDDHREIRESREFYADRTSLDEFAQWCSEKKPEIILMESTGVLWYSPYEALEHVGFQNSQLALINARDAKAAAGRKTDYKDAARLSDLARAGHFSRSFVPPKAFRIQRLLARDIQKNKADLSRCINRYQKMLNSTGCRASTVFSDVRGKAANAILEAKISNAPNLEDIIKKNCRRLRATPEEIHSALNFVIDSAISEQLAAIRKKIAQLEGYDADAFSRLAELQKPYAKDIKFLMSISGIQERSARLIYAELGPNLLEYFPDSEHFCSWLGICSGSNTSAGRQSSGKCPKGNKWLRRTLIECANGLSLSKNFAGMDKFFAHKLVRGRRRAIVELAHFLARVIFSVLTHQKPYEERTTTAVRDVLVKRFNRVARQLSGRTDLVVQGDCLVEKATGAILAKISEFSPKPRSEPNVIEVIEPS

SEQ ID NO: 372750 - protein, 319 aa, unidentified
MAHNDLIVVGIDVAKDKVDACIRSLSLRQSSPSTPEGQRKLIAWLRKHRVGKAVMEASGGYERSYAKALREAGIEVRIVDPKRVRSFAKSAGRLAKNDEIDAEMIAWFAETFGGAPGQPHDAAREELQKLVNARLALLDIQTKIQNRDEHVAPMPVQKMHARLLKKVATELARLEAAIAATIKATPHFAERAEIIESVPGLAGTTAANLIAGMPELGQVSNKIAPALLGAAPYDDDSGRRRGERHIKGGRRKVRNAFFMPCLGAATQHNPVLKVFYQRLLAKGKEKKVALIACMRKLIVILNTMIARGEKWDATRYVLS

SEQ ID NO: 372751 - protein, 428 aa, unidentified
MNYNTQNAKIASITEKTLIVGIDVGSETHYARAFDWRNYEYSKKPLEFSNTEAGFLTLKAWVEDIAEKHGKTAVIPGMEPTGHYWFALGKFLQDSGMKPVHVNPRHVKKSKELDDNNPNKNDRKDPKTIAALANEGRFSYPYIPAGIYAEIRSLSNLRFQTQEELTRIKNRTARWFSICFPEYKNVYKDLKAVSGRMVLKAAQLPEDIIKLGAEGVNRIWRDAKLRGAGMKRAKTLVSAAEHSIGSKEASEAARIELKNLLNDMDVYTARLEELIRSIEEKLKEIPYIDKLMAIQGIGLVTVSGFIAEVGDIGRFDNPKQLQKLAGYAIVANESGKHNGESRISCRGRKRLRYVLYEAAISLIGKNAEFREIHEYYRSRKENPLKKMQSVAAIACKVIRVFYAILTKGVDYDAKKLMGDIRRPQIQAG

SEQ ID NO: 372752 - protein, 343 aa, unidentified
MKQEMNVLGIDIAKHVFHAVGMDETGKVVFRKRVSRHDLMPCIAKLPLVLIGIEACGGAHDWARRFRASGHEVKLMAPQFVKPYVKSNKNDSRDAEAIAEAVTRPTMRFVPAKDVDQQDIQALHRVRERLISERTALVNEVHGLMHEYGIVMPKGVSKFRQAVVGKLESEKDKLTPLSQEMFWKLVEEFAALEEQLAYDQKKLEALATTHPECQRLMTIPGIGPLSATALVAAVSDASAFKNGRQFAAWLGLVPRQHSTGGKERLLGISKRGDSSLRKLLVHGARTTIRWVGRKTDRRSQWIRQLVERRGKNRTAVAVANKNARIVWALLTSHQDYQLATGEG

SEQ ID NO: 372753 - protein, 319 aa, unidentified
MQSKLTFGMDIGKNEVVVACHEGAFAILKMANAVAGLRRWLGSVPAGSRLGLEATGGYHEPVAELAYSLGFTVYILNPKDVHFYARALGARGKTDRLDAQIIAAYVAEHSVRLHPFVPLSADEKLLRELARRRATLVNAKSMLQQSLRVLPGFEREGRELLRAMGSFADRLERKLAQIAARSSERATLVKRLQTIDGVGTLTSIRCATLFTRVPFHSSDAVVAFFGLDPRPNDSGQHRGRRRLSKRGPSEDRRLLYNAAMSAIRTPAWRPLYLHLRNRGLASTEAIIIIARRIVRIAFAMYRNHSDFNPRLVPRPCCAA

SEQ ID NO: 372754 - protein, 416 aa, unidentified
MQSARNTLPEEPPGDVTCGIDWARDDHAVSVVNARGREICRCSVEHSAAGLHELLAVLARNGAREAAIERPDGPVVDALLEAGITVVVISPNQIKNLRGRYGSAGNKDDRFDAYVLADTLRTDRARLAPLTPDSPATVTLRRACRARKDLVSHRVAVANQLRAHLRNAFPGAASLFADIDSAISLRFLARFSTQDRADWLSPRRLAAWLASAGYSGRTDPAVLHARLAAAPRGATGDDGAVQAHVTAALLAVLATLVEQIKALSEQIGEQLALHADAHIFTSLPRSGTVRAARLLAEIGDCRARFPTPEALACLAGAAPSTRQSGKIRAVSFRWSCDKQLRDAVTDFAGDSRRASPWAADLYQRARARGHDHPHAVRILARAWLFVIWHCWQDGVAYNPVRHRALQTLLNQDQQAA

SEQ ID NO: 372755 - protein, 344 aa, unidentified
MGEVSTIGLDIAKSVFQIHGVDRDGEVAIRKRVSRAKLLEFFAGLPPCVIGIEACPTAHHWSRKLQALGHTVRLMPPSYVKAYLKRSKNDANDAAAICEAVTRPSMRFVPIKSEQQQSGLMLHRSRQLLVRQRTMLSNAIRGHMAELGIISAKGRNGTAELLKIIATENDDCIPAAARFSLDVLARQYVAIAAEIGVIEKRIHAWHRSCAESRRLEEIPGIGPIVATALVAEVGDWKAFSSGRNLAAWIGLVPKQHSTGGKERLGGISKQGNRYLRWLLVAGAMAVIRYARQHGTKRLWLVRIMERRPIKVAAVALANKIARIAWAIMVHGERFKEPRLSPVAA

SEQ ID NO: 372756 - protein, 370 aa, unidentified
MRKDTLYVGLDTDKKSIDIGLAEPLPKGEVRYWGKIANDTAAFERVRKRLQKDGRELVVCYEAGPCGYGLYRWLNGKPGVSCQVVAPALTPRRPGVRVKTNRRDCLTLAKLLRAEELTAVWVPDAAHEAMRDLVRARGGAKEDLNRCRQRLGGFLLRQDIRYAGKPWTQKHRAWLGRLSFAEAAHRLLVGELIEALDQATARRDRLSDHIAELVPNWSLAWLVEALQVLRGYQLINAATVVAEVGDPRRFDNPRRLMGYLGMAISEYSTGERVRRGGITKTGNKRARTALIEAAWTYARPAKRPKAAAARQPAAVRAIADKARHRLSARYRKLIARGKLPTVAVTAIARESLGFIWAIARAAAPDPLRQR

SEQ ID NO: 372757 - protein, 444 aa, unidentified
MSDIETSSEPKFAALVGIDWGDKKHAWALQVEGSSQIERGEMLHTPEAIQEWVAELRRRFPTGCVAIALEQSRGPLVFALSTYEHLVLYPIHPTSAADYRKVFRPSGAKSDGPDAALHLDMLVRHRDKLRPLHPDTPQTRTLQLLVEDRRQLVNERTRYSNRLRADLKSYYPQVLQWFEDLYTPVALDFLERWPTLEDLQKAKPAMLHKFFQQHRCRDDAHHQARLQAMRTALEATTDLAVITAGRAATCTAVRLLSTLHQSIQEYDRQIDQLAKAHPDFVIFDSLPGAGEVLVPRLIAAFGTQRDRYQHAAEIQQYSGIAPVTQASGQQHWVHWRWSCPKFLRQTFHEWAEKSIPYSDWAQAYYRTQRDDKNKSHNAAVRSLAYKWLRIVFRCWKDRKPYDESIYETALRRHKTAPDPQPSPFELNVRWTSCGSFQKIALKTP

SEQ ID NO: 372758 - protein, 397 aa, unidentified
MLSLPIYVGLDYHLKVIQVCVMDQYRRILINETVENDPDAVGRIVAPFGTGTNVQVAIEATTGAADFAEILINRFQWSVDLAHPGYVARMKQTPDKSDWTDAKLLADLTRAGYLPRVWLAPQYIRDLRELVRHRHGLVQQRTQVKLRLRALLRQHRIVCPYSPWTIKGKDWLLNLDNIPNPTVRLVLRNHYDTIAYFNKIIGEVVDAMEDHVACDPVVRQLLQQPGIGVITAITMRALIGHFDRFRTGKQLAHFCAVCPRNNSSGGKTTTGGLIKAGDELLRQVLVEAAHRLIRYDDHWREMADRLRTNGKKTCVIVAAVANRWIRKLFHHMVELQPSPGVTSGFLRNGQKSVIGTSSSGAGPSGVPTPESHSFDSAIPSPVAPQQSRRPFRGTEKV

SEQ ID NO: 372759 - protein, 346 aa, unidentified
MRFYTQNHHHVCGVDLHTKTMYLCILNQSGEIVLHSNMPTDPQPFLKAVEPFRDDLVIGVECMFSWYWLADLCLHEHIEFILGHALYMKAIHGGKAKSDKIDSEKIARLMKGGTFPLAYVYPPELRPTRDLLRRRRMLVRMRSEVLAHIKLTHYQYNTEFFQKNINKRGNREGIERLFSDPTVRKNIEVDLSVADHLQDEITQLENFIIRKTKSFDPRTFYRLRTVPGIGKILALTILYETGDVNRFPTVQSFASYARLVKCSKESAGKLYGYGGSKIGNPQLKWAFSEAMCLFMRESDRAKAYIAKLEKKHGKGKAMSILTHKLGRAVYFVLKRKDAFDENYFFS

SEQ ID NO: 372760 - protein, 450 aa, unidentified
MIKLLRIMYRCVGGLDVHKKTVVATRMRVTEDDRLEWETETFGTTTPELLKLHDWLAEWGCTHVAMESTGDYWKPVFNLLEDNFEVLLVNAQHVKHVPGRKTDVCDAEWLAELLLHGLLKPSFIPPKPQRALRDLTRYRTKLVQERTRVVNRVQKLLEGANIKLASVATDIMGVSARAMLEEIAAGQTDAALMANLARGRMRNKIPELEKALIGLVGPHHRFLLVKQLAHIDFLDEQIDDISGEIARWFGTQSQRPGGESGISTNGESVTPETPPPDEDAPLTWDEAVALLDTIPGVNRKTAEDMLAEMGLDMSQFPTDKHLTSWAGLAPGNNQSGGKRYSGRTRKGSRTLSAVTVQAAWSAVRTKDTFLKSRYHRLAARRGKKRAIVAVARSILTSAWHILTYRQPYRELGGDYFDQRRKDAKVSYFTRQLERLTGAAVRIELQTATAA

SEQ ID NO: 372761 - protein, 430 aa, unidentified
MSDGMASGGRDADAVTRALFVLGEEPGVIAAGFDVHRRQITVDALDTATGEVSRGQIESTPAAVEHWVAGFPGRVVHVAVEACTGWLFVCRALERCGAVAHLAEPVETSALRGRKRRAKTDRADARWLRQLLCDGRLPEAWAPPEHVRQWRTRARLRNTLVSERTGWTQRIRATLYHHGIAGAPDELRTLGGRQFLAGLKLPADARERITIALEIIDLLDAQLSEIEHHLRALAREQTGCQALMAQYGMGEISALVTLCELGDVSRLQASRQAVRMAGIDIGVHRSDRHAQLGKLTRQGSAPLRWALYEAAQSACRIGSPDYHDYHALKARGLSHTRASLTIARKLARRSYHILKALGPAALDPVTPDHRSDKAHPSPMRSQHAASSRSARGTHAQRGGPRKTERPQSLHRNDRSTITSPAANTHGRGPR

SEQ ID NO: 372762 - protein, 432 aa, unidentified
MAETATSPPKRASAPARVAARYIGLDIHKAYFVATGVNAQKEIVFGPQRVTNAELDEWVKKHLNNDDAVVLEMTTNTYLFYDLLAPLVHSVTVVHPPHVALITRAQVKTDRKAAMGLAQLHAAGLLVGIWIPPQSVREMRALIAQRYKMVRLCTLAKNRLSNVLHRHNFEKPPGSQPFHLKHKDWWMNLPVKGVEKINLECDWEMVEFAERMKKRCEQEITKAAASDPRAPLLVQLPGLSVIGSVTVLAAIGDIKRFPDADHLVGYAGLGARVHISGEMHQTGRITKAGRKDLRYIMVEAANHAARVHPKWKALFKKLEVRLGRSKALVAIARRMLVVIWHLLTDEAADKFSDPHQVACAMYAFFYKVGARNMPAGLKALLYVRQQLDRLGLDCEAIRWGRKRYKIPPTSNSKATSPASPSPPQMQATTITV

SEQ ID NO: 372763 - protein, 382 aa, unidentified
MQASTAGTPTAEHSGTLFVSIELSQKTWLVTLHSPDRDRISRHKLEGGDHVELLALIEKVRTRSSEKLGSAPRVVSCYEAGYDGFWLHRLLQSAGISNLVFDAASIAVEQRSRRTKTDRIDGELMLRTLMAYLRGEPRVVRIVRVPSVEVEDARRASRERDRLVKEQTAHTNRIKALLRLSGVAVGSLRRRNWLTFLEQQRDWQGQPLPPHLLAEVKREHARLTMIREQIAALEQAQIDQTCPVPAPMAERRSNLQRLKALGPVFTATLVDELFYKDFRNRREVASYCGLTPSPWKSGGIDREQGISKAGNRRARNKTIELAWLWLRHQPDSALSRWFRTRTAGAGKRAKRIAIVALARKLIVALWRYLTTGLIPEQATMKA

SEQ ID NO: 372764 - protein, 429 aa, unidentified
MKPCEQTAQDWLAYRAFGGLDWASEKHNVIVVDARGKLVEDFEIAHSSVGWKKFRERLAPYGAIPFGIETSQGSAVEQLLEAGMKVYPINAKSAKSYRERKAPSGVKDDRLDAWSFADACRVDGHGWKALRPEDPLVKELRLLCRDEVGLIEQRTSFICQLRHALGEYYPIALEAFEDWGSLSAWMFVQRFPTPQILQGAGKRQWEKFLHSRHLWRTQSAPRRMELFAQATELSGTVPMANAKSQLALSLISMLFALEEQLGIYRKRIEELFARHPDHDLFGSLPGAGPKLAPRLLAEIGDDRERFEDGPQALQCLAGSAPVTRRTGKRKVRANPDQWPCHQRWACDKHLRHAMHLFSEHSLTRCVWAKIYYQHHRQKGSSHADALRRLTQRWLKIIYRMWMDRKPYDAILHHHNQLKHGSWVLELKTT

SEQ ID NO: 372765 - protein, 351 aa, unidentified
MKEFIALDAHKRYSWMEREEVKSRKIRHARIEHEPGAIREGLQGREKGTPVAVEATGNWYWIVDEIEQAGLEPKLVHPRRAKLMMGLVNKTDKLDAQGMNQLQRNGTLPTVWIPPRELRDQREMTRARMVLTRHRSRLKNRIQATLSKYGWTGGEASDPFGKKARRELSQAIGGLPPQTAQITEMLLKQLDFGQGQIEEMESKTRQLVKDPAQMDRSRSLPGVGWILSAVIALEVGDRKRFASADRYASYSGTTPRVHASGGKIWYGRLRPDVNRYLRWAYIEAAHSVCLHRKTHPERHVSQLYERIRERKGHGKAIGAVARHLAEATYHVWTREEPYQDPALRKGQSREV

SEQ ID NO: 372766 - protein, 354 aa, unidentified
MIIIGMDYHPSFQEIAFVDSETGEYQESRLQHREEAEKFYRDLATRGVKVRVGMEASGQARWFERLLAELNMELWIGDAAEIRAKRVRKKKTNREDARHILRLLLEDRFPRIWVASWENRDLRQLLWHRHRMVQMRTRIMNQLQAVALNEGLCCRKRLWRESGRKQLEGFPLAPWGSRRRRDLLELLDRLNPTIAELTQAIEQEVEKYPAAQRLMTHPGVGALTALAFVLIIGEAERFRCGKQIASYIGLVPTEESTGERQRLGHISKQGSGLLRFFLVEAAQVTVRSDMEWRSKYFHLAMRRGRKIAKVAMARRLAVRLYWMWREKRDYEQLKKFGPHAGQPGTGVGVQQNIA

SEQ ID NO: 372767 - protein, 451 aa, unidentified
MEEKQISLEVVHPNAAGIDIGSRSHWVAVGQNAEDVKEFGVYSHDQLELCQWLKEKNVVHVAMESTGTYWQNLFSTLIVQGFEVILVNGKQTKNLKGKKTDIKDCQWIQKLHSLGLLQKSFLPDSTTDIIRTYSRHKLNLLNQSASTIKRMQKYLRLMNMRLEIVVRDIVGDTGSKIIQAFIDGNTDGKILAQNRHYNCRKSEEEIAKALQYNGREDYYFALQQEWHTYQHIQQQIKQTDAKIANLLKDIIDKDDNKKQHIAEAKPFKRKNKNSNTNLNFNQVAYQYFEGVDLMAIEGVNESTIMSIISEVGLEGIKKFESAKQFTAWLRLAPNNKISGGKVLSHHLPKGSSRLKLALRNAANAIGQLKEGHLNEFFRKINYKKGRATAVSATARKLRVIIWNMITKGITYNPPEPYLCLDEKRKLKLVTRIKKQIHKFELTNTELGFITT

SEQ ID NO: 372768 - protein, 434 aa, unidentified
MMRGNEQEPSLKEKRRCAMKMPPPAPSSEGAVIKYVCGIDIGSQCCVGCICRPDKSVVIKSITFANAREGWQIWEEKLKQLDAPAGEILIGMEATSRYGENLYQELEQRGYVLRLLHPGQTHHFHQQRGLRAKTDRLDAMTIARALLSGEARMGYVPDEQVATYRELVRLHTQLSDTAASYQNEIQALVVVLFPEFTQVKASPCLPTALAVLKAFPSAQALVEAGVEALVQVLRAQPAAHYGRPTAKKLVALANQSVSSGRARAGRSTSLRILCDQLEHTQANLARLNTEIEQLLNTDPGVKGLQQVPEFGPKTLAVLRAELGDVQRFSRIDEVIAYGGMDIEIKESGLWKGKAKLSKHGSGLLRRVLYMSALRCIHRKESAFGAYYQRLVQRGLKKGSALMAVMRKMLAVAAHFLMHEDEEYDPSKVCGSAAG

SEQ ID NO: 372769 - protein, 346 aa, unidentified
MQITTIGLDLAKSVFQVHGINSANEAVLKKTLRRVQVRRFFEQLDPCLVGIEACGTSHHWAREITKLGHQVRLMPPAYVKPYVKRGKSEAGDAEAICEAVTRPTMRYVAIKSPEQQAALALHRTRDLFVKQRTQLVNMIRGLLAEFGIEIRRGIEQALMLAKRIAAHEVPDIPPPAAKVIAGLAGQVLDLQARLCEIERELLAWLRSNDIAKRLGTIPGIGTVCATALAASVTDPHQFRSGRQFAAWLGLTPLQHSSGGKERLGRISKMGDKYLRRLLVVGVTSLIWRAKYKPEAVDPWLADLLSRKPARLVTVALANKAARVVWAIMVRGGVYHGSASASVTTSV

SEQ ID NO: 372770 - protein, 395 aa, unidentified
MFIVGIDVAKRSHEVCMITSDGQTVQRPFSIRNNCTGYNLMLEKIRKHTNIKSQIVFAMESTAHYWLALFTRLRKDGYHVILLNPIQTSAMRDMFIRKIKTDAKDSFIIAELIRFGRYAESNVAQDRLLALKELCRNRFYLVDMAGDLKRKLVALIDRVFPEYEAQFDTIFCKSSVALLKKYPTPQRLSNAHLDKLTELLWNSSNGHFGEWKARELKELARNSFGVEDCDGAYSTLILLMLDQIQSLSGKADALEKEISRLFQSFDTTVTTIPGVGPIIGAVILSEVGDISRFSSADKLAAYIGVDPSVNQSGEFQAAHAHMSKRGSPYLRRCIWMASQVAVQRDPMFRAYYEKKAAEGLKYMTIIGHVTRKMTAVVFAILRDHKVYEPVLPTAA

SEQ ID NO: 372771 - protein, 341 aa, unidentified
MQAPRHIGIDLHRNQFTCCVRLENGRNYLTDWKLEDLPRFIKKLRPNDEVAVEVTGNTRLFRDAVAPYVARVVAVDPNQFKVISHSVKKTDPNDARNLALYLEKDLLPEVRMKDKPQAQLASLTQTRDTLVKLRTSLKNKINNILSAHGINLEKEALSSEKKLNEVLAMPFDAMIRIELKVIVEQIRSLNRSIAELEKTIAEEGSKLEGHKNLTSIKGIGPLTGSILLSVIGDIHDFADEGKLAAYFGIVPRVSNSNETERSGRITKRGSKLGRTALVQCALIAQRYSPYLKRYYEQVKARRGTGKAIIALARKLLGIIYRTLKNNWVFEDFPNFVLAEGA

SEQ ID NO: 372772 - protein, 337 aa, unidentified
MDQQYVGIDFHRRRSVIVRMDAAGERLAVTRVANEPAAFAAVMAEAGVAPQVVIEATYGWYWIVDLLQQQGAIVHLANPRALNWGERRVKNDVIDATDLADMLRMRRLPEAWIAPPALRELRELVRYRAKLVQLRSGLKAQVHAVMAKEGVLPTVTDMFCAKGNVQLDTMGLSRNYAMRVASLRDVIAIYDDQIVGLERDIHRHLRHDRGYQAVQAINGVGRTIAAILVTEIGDVSRFPTPQHLCSWAGLTPGHRESDVKAHRTGITKQGSRLLRWSLIEGISRYHGGPKLAADYRQIAQRRGVNKARVAVARKVLTLVYYGLRDGEIRCLAHPEAA

SEQ ID NO: 372773 - protein, 424 aa, unidentified
MKVTYQTCCGVDVHKSFLVATIVKTTGGIEPSYQKKRFSTFNNSILEFKQWLLDNDCHDVCMESTGKYWVPVFNLLEDEINVVIANPKWVKAVKGNKDDTKDSKWIGDLFRLGLVKGSYIPCKIVRILREYTRYRYKLVSCRSSEKNRYQNTLTVCNVALDSVVSDIFGKSSMSIIDYLLEQSGTSINHEEIASKLLRSLKSKEDAVIESVEGYQMTDAQKYRMRLVRAHMDYITAEINDVDKMIENMISSNPDFENAVQFLCTIPGVKRDSAITIISEIGTDMSQFSSSKRLCCWAGLTPGSNESAGKKKSVRITRAGVYLKPALVQCAHAAVKSDKSPYYKKKYESLVKRRGKKRAIIAIARMILTAIYQMLSTGEQWNPSDLYKIDMPVALVEKQKAKAIKQAKKLLQREGILPPDEPLAS

SEQ ID NO: 372774 - protein, 306 aa, unidentified
MNYTTIGIDVSKAKLDICFLSTGECLKITNDEKGFKVFFKHMNKNYPNISRIVLEHTGAYQKELVSFLHSKKLPVCVVNPMHIRSFARAVGQLAKTDQIDAYIIAKYGEVIKPEFTEPKNYEEDELHALNLYRKQLSEVLKLNKQWLEKKPSPKIVRKIKSLMNTVNTQMQCIEAEILELIETNKELKRKYDAIVDTQGIGDVTAAILLSELPELGKITRQQIVALCGLAPINKDSGTMHGKASIKGGRKIVRNTLYMAVMSAIKCNDVIKIYYKHLKTLGKPSKVALTACMRKMIIHLNTKLQNI

SEQ ID NO: 372775 - protein, 317 aa, unidentified
MAKAIPVFVGIDVSKAQFDIALCPSGTMESFPNDEVAIGNLVKNLRTIKPVLIVLEASGGFERSLVRALVAAGLPVTVANPRQVRDFAKATGKLAKTDVLDAQILARFAEAVRPTLRPLPDETTLELRALVSRRRQITAMLTAEKNRLSRAPRRVQTHIEAHIHWLQSELERYDEELDQAIRQSPIWREQQDLLKSVPGIGSVISRTLLAELPELGCLNRKQIAALVGVAPLNWDSGLMRGRRIIWGGRADVRTALYMAAVTASRCNSVIRDFYKRLRAAGKPANVALVASIRKLLVILNAIIKNRVPWRPVLTQTP

SEQ ID NO: 372776 - protein, 317 aa, unidentified
MAQKSRLVGIDVAKGKIDAAIRSGAEAAFANSVEGHRELLAWLQEHGVGKAVMEASGGYERKWMGLLRQAGIEVVIVEPKRVRHFAKSAGRQAKNDAIDARMIAWFGEVFDDLESQAGDVEREELDHLVTTRLAVMQLRDQVENWTEHERPKAVQKIHQALLKTIQAQLDTLQQLIAGRIARTERFARRAEIIRSMPGVGEASTAGVIAFLPELGRVDRQVAAALLGVAPFDDDSGTRRGERHIQGGRRKLRTLLFMPILAAATRHNPVLKAYYQRLIARGKKAKVALTACMRKMIGILNTMLARGEKWDPTKHAIA

SEQ ID NO: 372777 - protein, 412 aa, unidentified
MNVFCGIDWAEDHHDIALVDRDGQLLARRRISDDAAGLAALLDLLAGHGDQGGELIPVAIETPRGLLTGCLRATGRPVYPINPMAVARYRDRHSVAGRKSGHGDAVVLANILRTDAHAHRPLPADTELAQAIAVLARAQQDAVWARTAAPSKLRSHLREYYPGFLAAFAGARGGITRPDARAILAAAPTPAAAAALTVAQLGALLRKAGRSRGIDTEAARLRAAFRAQQMRQPPLVEQAMGRQTLALLRQLDAACAAADDLEQAAIESFNQHPDAEIITSFPGLGPIAGARVLAETGDDRSRFADAKGLKAYAGAAPITRASGKTTAVLHRRVKNQRLAAAGYTWAFAALTASPGARAHYDRRRHAGDRHAAAQRNLFGRLLGCLHHCLATGQHYDENTAFPTAATKLPQAA

SEQ ID NO: 372778 - protein, 342 aa, unidentified
MLYVGIDVAKNKHDVTALNVPGKTVLKPLTFSNNKAGFELLDLSLRQLNQDCLIALEDTGHYAFNLLNFLHEQGYEVYTYTPLLIKEFAKSLSLRKTKTDKKDAHGIALKLLSDPNREQFQHDNRQVELKILARHIHRLKKKQSDWKVQYTRCLDIIFPELDKIVGKHSEYTYQLLTRYPNPQKRIEVGFDKLIEIKRLTASKIQDILSVAPRSIGTTSPAREFEIIEIIKHYKRLIDKVEKCVNDLMAEFNSVITTVTGIENRLGAVILAEIRNIHAFDNPARLQAFAGLDSSIYQSGQIDLAGRMIKRGSPHLRWALIQAAKACARFSPAFKAYLKTKLE

SEQ ID NO: 372779 - protein, 354 aa, unidentified
MVLLGVDPHKDTHTVVAVDQAGRQLDQTTVPARTLGHGELVGWARTRWPGPAQRTWAVEDCRHVTGRLERDLLAAGERVVRVPPRLMAGARQAVRTQGKSDPIDALAVTRAALREPNLPTAGHDQASWEVKLLVDHREHLVAEPTRTINRLRWHLHQLDPDLEHTTRRLPGRGLRRITARLAQTAADAGSVVQVRICQAQVSAIQALSDQIGQLDRQLRQQVARLAPSLLSLPGCGTLTAAKLIAETAGVARFRSQACFAMHAGVAPVPVSSGRTDRHRLSRGGNRQLNAALHRIAITQLRLPGPGQACYQRRRAQGDATGEAVRALKRRITRAVYQHLKQAEQRLRAASPAAA

SEQ ID NO: 372780 - protein, 363 aa, unidentified
MNATAALPVVGVDLAKSVFQLAVADGAWRVVEQQRLTRLQFERWFINRAVGLVVMEACGSAHHWARWLNGLGIEVRLLPAAYVRAYVKRNKTDAADACALLEAARCAEIVPVRIKSVEQQALQAMHRPRSLWMATRTSRINALRGFCREFGIGIAQGSRLGVEQIGRVLADPHSAVPLLLRRSMSLLVEEIRLLEVRIAQLERELTALARQSPACTTLLSIPGVGLLTATAMVAATSGKVGHFHDARHFASWFGLTPKEHSSGGTRHLGRISKRGDRYLRMLLTHGARSVLRAASTAVRAGKTVDGLRQWALAVQGRSNHNKATCALANKLARICYATLRDGEPYGVTRLNKKVARTAFALPA

SEQ ID NO: 372781 - protein, 382 aa, unidentified
MYIVGIDIGKNHHEASIVSPEGKQIGRSLRFATTHKGADSLMSFIFKNIGNSPCVFGMEATGHYWYPIYSFLKAKGYTICVINPIQSDSLRKMYIRQTKNDSIDSFLIAEVIRFGQFGTTSMADENILAMRQLCRYRDSVISSRTEIKLRIGTIMEQIFPEYEKQFSSLWVSTSMGILEKYLTPENIENAPIDELFEIIKDKSHNRLTKAKAISIKEAAADTFGIKIAQDAFSFQLKQLIDRMNFLDKQIEALDIEIMKYYEQFDCYLHTIPGIGMIATATILAEIGDIHRFKSSSALVAFAGIDPTVRQSGEFNSTHNHMSKRGSPYLRHAIFLAATTCSFHNSPLNAYYKKKRDQGKHHLTATGAVARKLTTVNLCRVTG

SEQ ID NO: 372782 - protein, 468 aa, unidentified
MRKAKRNVTSAAAAAGKKRLTLLEQINLNVAGIDVGSREHWVAVPADRDPQPVRCFGTFTSDLHALADWLLQCEVKSVAMESTGVYWIPVFQILESRGLEVLLVNARQVKNVSGRKSDVSDCQWLQQLHSYGLLGGSFRPEAQICVLRCYLRHREHLVEQASTQILLMQKALGQMNVQLHHVLSDVTGVTGMTILEAILAGERDPLKLAQLKDPRVRSSVETIAKALTGDYRPEHLFVLKQARESLRFLQAQIAECDVEVDQVLSGWEAKVDLEQQPLPPTRKKNRSKSKHKPLPFNLREQLYRVTGVDLTEVDGLDVLSAQALISEIGLNMHRWPSEKHFASWLGLCPDHRISGGQVLHNRTRPVINRAADVLRMAAQSLKDSQSALGAFFRRLKARLGPAKAITATAHKLARIVYLLLKYGHNYVDPGAQYYEQRYRENILRSLKKRAASLGYTLVENAALNLQVS

SEQ ID NO: 372783 - protein, 355 aa, unidentified
MATNARKVTGGVDTHGETHHAAVVDEVGRQLADREFPTTPRGYRALLIWLASFGTLVLVGVEGTGAYGAALTRYLRSEGVQVVEVDRPDRQTRRAKGKSDPIDAYAAALAALSGRAAGTPKSRDGRIEAIRALRVARRSAVKARTQAINQLRALFLTGPAELRQQLRGLPAGALIDTCARMRPTGDLADPVQATKAALRRLARRHQRLTEEIRELDAELAPLVTAAAPGLLALPGVGIEVAGQLLTTAGDNPDRLHSEAALAHLCGVAPIPASTGRTDRHRLNRSGDRAANAALHTIALSRLRWDPRTRAYLARRRHEGLTKPEAMRCLKRYIAREVYRELINAPHHTKDKPAAA

SEQ ID NO: 372784 - protein, 342 aa, unidentified
MYYIGLDVHKKTISYCVKDASGQVHQEGKVGATRRELDSWIKTLPQPRTMAMEATIFTGWIYDHLLPHAQQVKVAHPLMLRAIAAAKKKNDRIDAGKIADCLRCDFLPECHMASTQIRDRRRTLRYRQLLVRQMVQMKNRVSGLLMETGVSYNKQRLHKVGYFRELLSTNEDVHESIRPLLKLSRDTVVRLQKTEYALVSSLQRDPLLADRVKRLRTVPGVGPITALAWALEIGDVARFRSIRQAISYCGLCGEEKSSADKVMRTPLSKQRNKHIQRVLVEAAKLAPRQDHDLALVYETEKQKGNANRATLAVARKMVAYLLAVDREERDFVPAENYQRAAA

SEQ ID NO: 372785 - protein, 341 aa, unidentified
MEEYIGLDVSMKETAVSIRRDGQRIWRGKCASDPTVIAQLIRKRAPFAKRIVFETGPLSVWFYHALCSEGLPAICIDARHAKAALDMAPNKTDANDADGLAHLAEVGFFREVRVKGFDSMLTRTLVTARRQLVRITTALSNQIRGLMKTFGLVVPAGKGINFERNVRRLLADHPGLSEIMLPLLEAWRTSRLQSVELGRQLVAQARQVKACQLLMSIPGVGVITATAFVTAIENPDNFRRSRSVGAWLGLTTRRYQSGEVDYDGHISRRGDRHVRSLLYEAAMVILTRSRADSDLRTWGLKLKERIGFKRAAVAVARKLAVIMHAMLRADTSFVRVAKAAA

SEQ ID NO: 372786 - protein, 350 aa, unidentified
MIAINKDIIATIGVDLGKNTFHICAMNDKGTILLRERLTRAALPKRLANIPPCRIGMEACAGSHHIGRQLTALGHDVRLMPAKYVKPFLKSHKNDYRDAEAIAEAVQRPTMRFVPFKSDEQLDLQALHRVRSRLVGQRTAVINQIRAFLLEHGVAVRQGPGALRLALPSILAQRTDVLSPRIIHLIEGLTGDWRRFDERIADVTREIEQLAKQDQYCEGLMGVPGVGPMTASAMVAAIGDGAAFSRGRDFAAWLGLVPKQISTGDRTILGGISRRGNRYLRTLFIQGARSVLQRSDGWEKKSFGRWLIAASKRLHKNVLAAALANKLARIAWAVLYNAREYDTALAPKAT

SEQ ID NO: 372787 - protein, 423 aa, unidentified
MKLATEHQFTALVGIDWADRKHDFCLQATGSDRRESGVLVHNPESIAQWASGLHRRFGGPIAVCLEIAKGPLVHALQRHDFLVLFPVNPAMLAKYREAFVPSRAKDDPTDAEIALELLLWHRDKLQALQPQSADMRTLATLVEQRRGLVGDKTRITIRLNITLKGYFPQVLDWFEDRDTMMFCDFLYRWPSLKQVKRAPQATLRSFFSAHNLRRARLVEERINGIRAASALTDDPAVIRPHQLLVQALVAQLRVTLQAIDDYDAAITAVAMRLPDYQLFAGLPGAGSILAPRLLVAFGEQRERYRSAADLQNYAGVAPVLERSGNKSWVHWRLACPTFLRQTFVEWAGSTIPRSFWAGAYYERQRAKGCSHHAALRSLAYKWIRIVYRCWQTRTPYDESVYLNALKRRGSPLIAHLATTARTT

SEQ ID NO: 372788 - protein, 309 aa, unidentified
MNPTTLYLGIDIAKSHLDLDLPSPNERFPNTEEGVARLLACLPAQTHLVCEATGGYENTLLQAAWTAGRPISLVSPSRVRAYARSRGQLAKTDCLDKALLSAFGRERQPSTSIQPSPTRTRLRALLRAREHVLDLQRRESNHLEHLAEFPLLQAQTAARSQLLAQQLSELETQIRALVQADPNAHTQIARLETINGVGEVTAWTVWADLPEIGTLAPGQAAALAALAPYAHDSGQSSGVRHIQSGRATLRRVLYMAAIAASQHNPVLKEVYRRLRQKGKAAKVALIAIARKLIEVMNLLIKNPSFTLAS

SEQ ID NO: 372789 - protein, 385 aa, unidentified
MQMMIEGQSHFPPFGLSYWGFADLNKGVGSMTASYDYHIGVDYHKSYSHLVVQDSSGKTLRSGRVKNDRQSLGGFREQYRENSHAVVEATRNWMVMYDWLDDICDDVVLAHPLKVKAIADAKIKTDKIDATVLAHLLRADLVPEAWASSERSRDLRVALRERMFYVRLRTMTKNRIVTVFDRYPEQTAQLKKLGDLFGKAGRAQLAQVNVSEIDRIQIDRGLAFIGDIDMRIKQSEATIRAMTKANANVKLLKTIPGIGEFFARLIDAEIDDISRFRTPKKLAAYAGLVPSTYSSGGKTFHGKIINQGNKWLRWAFVEAVAPAIASDAQLRAQYEHLKIRGTNKARVAIARKLLTIAFQIVRDQRAYEPRGTNPKEGASTISRLS

SEQ ID NO: 372790 - protein, 341 aa, unidentified
MKPALRKNFLGIAVSKSWFDVSLMQVIDHVKQPIFTQRFDNTTSGMSAFKSWLKTSAVTLDSNSLLVIENTGVYHRLLWSFCSKHNLPLHIGNAAHIKWSLGITRGKNDVVDSVRLCQYCCKQSDELKASPVLNPVFMKLKDLMSSRSRLVTQLNSTRNYIKELQCSHDKILLATLEKAHKAALEGIKKSILQIEELINRIIQEDPVIYKNYLLIKSVPGIGHLTAVYIICCTNNFAAKVTGKQLASYAGVVPFEHSSGVSVKGRNRVHKMANKQLKKMLHLCALTAIKYYPEFKDYFNRKKAEGKNGMLVLNAIRNKLILRVVAVVNKQQPYVDNASIAA

SEQ ID NO: 372791 - protein, 334 aa, unidentified
MQNITLIGIDLGKHSFHIHCQDKSGKALLRKKFTRTKLMQFLATCPPSVVVMEACAGAHFMARRISDFGHETKLISPQFVRPFVKSNKNDFVDAEAICEAASRPSMRFVQPRTEPLQAMRALHRVRESLIRDKVKTTNQIHGFLLEFGISLPTGDAVIKRLSLVLAEHEIPEYLSRLLVRLHTHYLYLVEQIAELESELSQSINADDTAQRIMTILGVGPITASLLSSQPGDGKQFSCSRDFAASTGLVPRQYSTGGKSTLLGISKRGDKNLRRLLVQCARSFMMRLERQHGKLAEWVREQLNKKHSNVVACALANKLARIAWVITTQQKEYQA

SEQ ID NO: 372792 - protein, 418 aa, unidentified
MNQDLIARLSRRYLALDIHKHYSVVAGVDFEGKVILEPVRVEHADLPAWLEKHIQVTDHVVIESTTNAWTVYDLLEPLAEKVLVANPIKVKQIAQARVKTDVRDTLILARMLAANMIPAIWVPSVDVRSLRYLLSQRRRLTGMHTQIVNRMHSVAHRHHLSHPRGKRFNEKNTVWQQDDELSEEEKFQLELDMATEKHLSEQIGKITRKLSKMSHQKPWRESMMYLMQLPGFGVVTGMTVLAAIGDISRFEDFKKLASYSGLTPGVEQSGTKNRGKKITKEGRKDLRWAMVEVAQRAVKSDPLWERRFQELCRRMHRNQAIVVIAHRLLELVWIVLSRKQPYRHFSHERIAYKYLTWAWQLSEADRDGLTRQQFARYYLMRMGIGHELEKIALNPRYPRRLASEVELLTLRPDLFQSG

SEQ ID NO: 372793 - protein, 351 aa, unidentified
MGTYEPNSRNETVFLGIDLHRRTWYVSARTSDQELFTTGIPGRWEALERLLLKVNSQNIKLVYEAGYFGFWLHDKLTSWGVDCIVTPPSLIPQEYGNRVKTDRKDSRKLAHLLAKDLLKHVYVPTQEELYHRQVLRRRTQLIQDRVRTQNRIKAELRFYGIDIPAPHGKWSLIYLGNLKRIRFGNRWIQESFNRLIEMYEFLSGQIQEQTRLLMELAKKTLYQQRVDILTSIPGIGVLTAMEILLELIDMERFSKPEQLAAYVGLTPAQYSSGDKVRMGRITGIGKSHLRASLVEASWYLISRDGSMRSTYERIKSRAGGKRAIVAVARRVLLVIRKMLNENKMYQKTIPA

SEQ ID NO: 372794 - protein, 441 aa, unidentified
MSDLQPSSKAEPEEWAAFAAIDWADQKHFWRLVPAGREQEEHGQLDNTPEAVEAWASGLQGRFGGRPVAVCLEQSRGALVYMLAKYEHLVLFPVPPAMSAAYRKTFRSSGAKDDPNDTALLLDLLLQHRERLRQLRPDTVETRLLQFLVEERRKMVNEKTRQHNRLIDCLKLYFPQVLPWFDDLAGELAGAFLQQWPSLQEAKRAHPGTLNRFFHEHNCRSEERIAERIHAIQEDMPATSDVAVLEACSMTTRGLVALLATLRRNIAVYEKRIEELVAAHPDGALFASLPGAGAALVPRLITAFGTQRDRFDNAYQVQCYSGIAPVTEASGKSHWVHFRWSCPKFFRQTFQEYASQSIRQCEWARDYYQLQRDRHKSHHAAVRALAYKWIRIIFRCWKDGKPYDEQMYLSSVRRRTAVLGTALAAATGYGWKDVAGFKKFC

SEQ ID NO: 372795 - protein, 313 aa, unidentified
MYYIGIDVSKKDLSVFNGKKDLKFINQEGLRPFKKYLKGKYKNFSDLVIIFEPTGIYSFNLKEFCAENNIKAYIVNPKRSHSFARSLGIRPKNDKIDALILYQFHRLIDLKDIKVPKIDQQAKVLSSYLTSYEFAVKQRVAISNHLESLRDEKLVSLLKKELKRAQKLEDKIFHDILEYIKQNQNLREDYERLLTISGVGEKMAIALLTLFKTYPGTNRAQITALVGLDSTKRESGSSVRGRAKISKNGKAIYRKVSYLPAICATVHNQKIKIFYQRLLAHHKPKKLAIIASMRKILLIAHAMYRDKTEYMAV

SEQ ID NO: 372796 - protein, 386 aa, unidentified
MQASNVCTPTVGHIGTIFVAIELSQKSWLVTIHSPDRDRISRHKLAGGDHVGLLGLLEGIRTRASRKLGSAPAIVSCYEAGYDGFWLHRLLTAAGIRSHVFDPASIAVEQRGRRAKTDRIDGELLLRTLMAYCRGEPRVVRIVRVPSPEQEDVRRTTRERDRLVKEQGGHTNRIKALLRLHGLSVGNPRRRDWLKWLAAQRDWQGQAVPPQIKAEIEREHARLMLVREQLTALEQQSAQAQPAPAAAEMARRRDILFKLKALGPAFSGTLTNEVFYKDFDNRRQVGAYVGLAPSPWKSGGIDREQGISKAGNPRARLAAVELAWLWLRHQSNSALTRWFLAYTAKASKRIKRIAIVALARKLMVALWRYLTTGLVPVGAVLKPVEV

SEQ ID NO: 372797 - protein, 339 aa, unidentified
MDKCRVFVGIDVSAKQLVVVRQQDGKNEVARSFANTAAGHKELKRYLTRAASRVRVGLESTGLYGLDVALFLQADSRIEVMVANPRAVKDFAKALLQRSKSDPVDAWVLAEYAARMPFQPWQPPSSSALAVTALARRIHALTESATREKNRLHALSAMGTSLKVLVADLKRSLQAIARSQARLTRECRKIIAADGLLEGRFRLLLSLPGVGETSTLQLLGELALLPADAEVRQWVAYAGLDPCTCSSGSSLAKRPRISKVGNRHLRRALYMPALTAAYHHAAFASYYRRLQERGKCKMVALVAVMRKLLHATFGMFKHGARFDASRAFPATAAAAGAAA

SEQ ID NO: 372798 - protein, 366 aa, unidentified
MKKISTVRAFSNEIFKKQKLTIGVDLGDRSSAYCVLNEAGEIVLEHKLPTTPEAMKQVFGSMPRCRITMETGTHSPWVSRLLTALGHEVIVAHAQKVRLITKSRRKDDRLDARTLARLARIDPALLSPVKHRSAQAQLHLTEIRARAVLVSARTALVNAARGLVKSYGERLRKCGTEQLRRETTRGLSAGLREALEPLLREVESLNERIQEYDRRIEHMSKKTYPETMLLKQVKGVGDLIATTYVLTIEDPHRFRKSRDAGCFVGLQPGRRDSGESEPQMRISKEGDEYLRTLLVQGAHYILGPFGEDSDLRRWGRKLSARGGKTAKKRAVVAVARKLAVLLHRLWVSGEVYEPLRNSQKTMNAAA

SEQ ID NO: 372799 - protein, 416 aa, unidentified
MKLFVGIDVSSEKLDVCFLTDDNQLSILSEISVANDIEGASFIRETILEFNNSYHFDQIVIGMESTSMYSFHPSMFFHEDEKLKKLNTLVTIENPFRVKQFSRMFDENKTDRNDALRIADFLRIQRFTTSPIKEEKYMALQRLTRTRYQLIKQLIRTKQHFLENLTYKCNTLAREMRDESTSLFSATLISLMTEDFTLDELAELPLEAFCDLLQEKGKGRFKQPEKIAKAIQRAITMSYRLGALAQESINVVLRVLVREIRALEKNIKELDKAIEQVIVVIPEYQCLTSIPGVGKVYAAGLIAEIGQIERFEDQTKLAKYAGLSWKVNQSGNYQSQNTPLTKQGNRYFRYYLVEAANSVKNYLPEYKAFYQSKYKEVPKHQHKRALVLTARKFTRLVDTLLRKHQLYTPPRNVIEK

SEQ ID NO: 372800 - protein, 355 aa, unidentified
MIIVGCDYHPSFQQIAFVDTETGELNEQRLEQRESAEAFYRELASRGEKVRVGMEASGHARWFERLLAELGIELWLGDAAVIRAKRGRRKPKTDRQDAQHILHLLLKDDFPKIWVPSWENRDLRQLLWHRHRMVQARTRIMNQLQAVALNEGLRCKKRLWREKGRKQLEAIPLAPWASRRRENLLQLLDGLNPTIAELSAAIDREVDKSAEARRLMTHPGVGPLTSLAFVLIIGSAERFQCGKQIAAYLGLVPLEDSSGERRRLGHITKQGNSLLRFLLVESAQVAARSIPQWRNQYFHLAMRRGRKIAKVAMARKLAIRLFWMMRQGWDYEQMKKFGSHAGQPGNRDGVQQSIE

SEQ ID NO: 372801 - protein, 430 aa, unidentified
MDEVNRNRLEEFRQLRKEIRHSEEYLIVGMDIAKDRHYAFFGTATGKTLFKRIVFSNDHEGFRKLLDQAEALRVQHGLKRVVYGMEPTANYHKPLGEYLIKLGKTVVLVSGVTVARNRESLDGRWDKHDGKDSVNVADLISQGKCLYYEYPSAELRGLRGLLSLKRRLKKQEHGYRVRIRNQLIAQYYPEMDRDYERLGEEGLSIVKWCLAASEIAQLEVDPFIERVTSRRITTEKRRRLEEIWEKAGESIGCEVVPGVGHETKVMVEGLRQIREMIKETEQKIEELCKQFAEYPYILTIPGFGPDVSAKVLGAVGDPDRFLNGKQVLKLAGFDLSANRSGKDSDKAIPEISKRGKADLRYALYQAALIASLKNRDVMIYYTSKIRGREREKGIRVKMRVKLAAKLLVIAWTLMKKKEAFNPAYLKAELN

SEQ ID NO: 372802 - protein, 311 aa, unidentified
MESTKFVGMDVHKDAITIAVMNSAGKVIMESIIETKAVTILQFIQGLRADVFVTFEEGTWAAWLYDLLKPHVTKVVVCNPRKSALLKDGSKGDKIDARKLAELLRGGYVKPVYHGENGLRTLKELSRSYLTISKDLTRVMNRIKALYRGWAIPCGGTQVYALCHRSVWLSKIPEAGVRSRAEHFYEQLDALQGLRKQVRRDLLAESRKHNATKLLRQIPSIGPIRAAELVALIQTPHRFRTKRQLWNYSGLGLKTHDSAQYRYVDGQLQRSRKPQQLRGLNQDHNHDLKKIFKECGAPHSLKNVKLPEMWS

SEQ ID NO: 372803 - protein, 411 aa, unidentified
MENIFPCCAGLDIHKKSVEACVRRLEPTGQMHHQTRHWGTMTRDLVAMADWMAAQGVTHVAMESTGVYWKPIYNILESRFTVLLVNARHLKQVPGRKSDVRDCQWIAQLLQHGLLKGSFIPPRTQRELRDLTRHRTQLVEEKTRTVNRLHKVLEDANIKLASVATDILGVSGRAMLEALMEGQEDPVKLADLAQRQLRGKIPELEKALEGHLTEHHRFLLRLLWKELAQQEELIAELDRKIEEQTRPFANEIERLDAVPGVDRRVAEVVLAEVGSDVKPFPTHSHMASWAGICPGNEESAGKRRRQRITPGNRWLKRTLVQAAWAASHTKNTYLASQYRRLAGRRGKKRALVAVGHSMLVIFYHMLKERTTYKNLGGDFFDRLEPERLTRYYVKRLKDLGHKVTLEPGVAA

SEQ ID NO: 372804 - protein, 331 aa, unidentified
MNNDLCRNDIAMERVIFDQVVKVGCGIDVHKDNIVATVRKSEKEYETREFSSFTSSLTELREWCKTEGVTHIAMESTGVYWKPVFNILEEGEFEIILVNARHVRNVPGHKTDKKDSQWLSKLLLSGLLKASFIPPIEIRDLRDLVRYKKKVTAQASSEKNRIIRILEDANIKLSSVLTNVDGAVGSHIIDDLIAGKTNVDGLMQHYHGQIKASKEEFRKALQGRLTKHHQFMLRVLKESITDKEKLIDKLDKQIDEMAKQYAVEIELLQTIPGVAYDSAVGIISEIGADMKQFSSEQHLSSWAGMSPGNNDSGGKNKAQKPSTGTHICKPS

SEQ ID NO: 372805 - protein, 444 aa, unidentified
MAMRKQEEEVFPNAAGIDVGASSHWVAVPRHLAEQAGCEPVREFGAMTDDLVALAQWLLSLGVDTVALESTGVYWIPVYEVLEQHGLTVWLVDARQLKYVPGRKSDVQDCQWLQKLMSLGLLRAAWRPGDDVCVVRAVARQREVLLTEQGTWVQRMQKALVQMNLQLTEVLSDVMGQTGQAIIRAIVAGERDPKVLARHRHSRVKASAEAITKALTGNWREEHLFVLGQALAMYDDIARHLVECDAKLRTLLAERSVHRVDLGKAPRAGAKARVEFDGRQALANWAGVDLTRINGLGVTVVMKLLSEIGPDLSRFATVKHFCSWLGLCPGTKISGGKVLSSGTKRSANRARQALKLAAMSLSHSDSALGAFYRRLCTRMDKPRANTAVAHKLARMVYFMLTRGEAFVDQGQQQYEAQQRQRSIAALKRRAAALGFQLHPVPVAA

SEQ ID NO: 372806 - protein, 341 aa, unidentified
MSTMRYFVGLDIAAETFMAAIGTSPWKLLVKAKQFANAPDGFQQFDSWLREQNCPLEQTVVCMEATGVYGEALAYYLVAHQYAVAIEPPLKVKRAFKPHGPKTDAVDSEQIAEYACRYSDELMLWQPPSELVEHLQVLLSTREQLVQQSTAHQNALRALRRKVVRITFAEQVYEQMITETKSRAKALEQEIQRLIDQHPTAHRLLTWLVTIPGVGLLLAAHVLVLTQCGTRPFPSPKLAAHLGIAPLAHESGTSVYAHPTSRHYGPSQPRKLLHLAARSVSTHNEHFRAYYQRKVAEGKAKKLVLNNVANKLVRIICAILESQTEYDANYDGRRKPALAKN

SEQ ID NO: 372807 - protein, 396 aa, unidentified
MFIVGIDIAKHTHQASVMNTDGSLVGKSIKIPNTSVGFDSFISKLKEIDRDISHFEFGMEATDHYWLNIYTHLADLGCIVHVINPVQSDALRGLYIRQTKNDIKDSEIIADVIRIGIYCETSVSDDKMLALRDLTRQRFYLVDMVSDLKRKSLTLIDRIFPEYPTLFSDTFGTTSLELLANCNTPEDILAIETDKLVEMLSSASKGRFKQDKAEKIKETARNSFGALLCTDSASFMLRQFVEQIRFLENQIDELDEMISESLTELDSLITTITGIGDTLGAAILSEIGDIERFESADKLAAFAGIDPSVSQSGNFLGTRNRMSKRGSPYLRRAIWLAATAAILHDPAIKAFYDRKKAQGKHHYVCVGYICRKLVNIIFSVLKSGQPYQPVFPKNLD

SEQ ID NO: 372808 - protein, 351 aa, unidentified
METQITAQPNLFIGIDIHKRSWKIHCSTDLFSGKSFTMPPLAEKLYDYVQKHFPDYEVSTAYEAGCCGYSAHRSFEGYGWKSLVVNPADIHRKGKEKYTKTDRIDAQLISRELKDGRLESIVVPDREREELRSLFRRRNELVKDLRRIKSKIKMQLLYFGIEVPEEFDNDHWSHAFRYWVDEQLFKYSTGDSTMSSRMRSFRFIDKELRDVSNHLRAYCRKHYKVDYYLLRSVPGIGGIVAVGILSELGDLRRFGSLKDLAGYVGLAPGLYESGGHSKSLGMNPRCHRLMRSYFVEASWQAIRTDPVMQKYYRKHLGKDSKKIIVKVAHKLLSRTLAVIKTGIPYEIGVVS

SEQ ID NO: 372809 - protein, 468 aa, unidentified
MSKGSGTTRGDRRRNARRERLRGLLPRDGAVIGIDLAEDKQALVLIDHDVRVLARKTVKVKVFRLGEALDWAVTAAKVKGFRQVTVACEPTGPRWMQVQRLCAERGLPLVCIQPLMSHIAREQQDYTPHKTGESDCVLIGRLAVELHCYIPEELDETWAHLRHLGRRRAQLITAATASVQRVRDFLSVAWPVVTEACAGPFGSVTWLAALRVVTARCGGDPGKLAGMGQEAFTAAVRGAVAGWGGKKAWGTISARVFAALTDTEGVVTWSRRGLLRRVADELGDLARTRAQLRAVEADMVMILGELGLSRLGDIPGLTAVGAAAILAETGDPRRYDGSSSLVKHAGMSPAGNASGAFEGQAHISRRGRPGLRLAVWRAVWPMLRYNPVMAAKYTALTRAADAAAAGAGPQHGTAAQAAARARRAKARVACAASLLRWIYCMVIHGTSWDPAVAAGRCHDTPRSQAEAA

SEQ ID NO: 372810 - protein, 343 aa, unidentified
MDYFAGLDVSVQETSVCIVDDAGKIVREARVASEPEALLQVLTNTLYRFKRVGLEAGPLSQWLYSSLAEAGLPVICVEARHMRAVLRAQINKTDRNDARGIAQMMRAGLYRPVHVKTLRSQKLRMLLTHRKLLQSKAIAIENDLRATLRNFGLKVGMVGTVKFEARIKELVENLPDVAALVEPLLIVRRALREQVAILHRRLLAVVRDDDVCRRLMTVPGVGPVVALTYRATVDVPARFRNSKAVGAVFGLTPSRYQSGESDRSGRISRCGDEMTRMMLYEAAQSMLAHSAKWSWLKAWAMKIARHRGIKKAIVALARRLAVIMHRIWVDGTEFRWTREVAAA

SEQ ID NO: 372811 - protein, 389 aa, unidentified
MDKSITHVAMDTHKKQHAVALAYPDTGEIQVFTVKNTATDIKKMVKKIQRKAPGEVRFCYEAGVCGFTLKQQIEAMGSVCIVIAPSLVPRKKGDRIKTDRRDARKLLGQFLAGQLTEVYAPNPEQEAAREITRCRQAAQEDLKRIRHQLVKFLTRHGYIYRDGGHWTKAHGQWLLSLQFGSSDLREVFDWYYTQLQHCQQRLASLDKEVKALAERPVYKEVVGLLRCLRGVETLTAITLITELFEFGRFASPRKFMAYLGLVPSEHSSGEKRCPGSITKTGNGRVRRLLVESAWHYRHRPSVSKALKRRRDGQPPWAIAMADRAMHRLHKRYQRLMLRGKIPCKIVVAVARELAGFIWAILHEWQWRRAGDKAQAQEVSLATTDASAFC

SEQ ID NO: 372812 - protein, 319 aa, unidentified
MEKKIYIGIDISKDTLDVAVHGDKQHWSFPNDGTGITKAVSKFKELSPELVVLEATGGFEVFLATELVVAKIPTAVVNPRQIRDFAKSVGMLAKTDILDARIIARFAATVQPDPHPMPDIEAQELGALTARRRQIINMITAEKNRLSTAGETVKPGISAHINWLEKELNEINRNIKQRVKDSPIWREKDELLQSVPGVGPNLSATILAELPELGTLNRKQIAVLVGVAPLNRDSGTLRGKRTTWGGRATVRTALYMATLVATRYNPVIRRFYERLREAGKATKVALTACMRKLLTILNAMLRYQTSWNFGVSQIFGHCH

SEQ ID NO: 372813 - protein, 349 aa, unidentified
MRLSPSPNSYLNELRIVQGRDMTNAATRELAPLDFVGVDMAEEAFEWALHGVRGTHSASNNETGFQALLEALTDRRIGLIVLEATGGLERALAGFLLRHGLPVAVVNPRAAREFARSMGHLAKTDAIDAVALAHLAQTLAAKADQAGVAFVAPSVEVEALQAMVARRVQLLNMRTAEKNRLGGAMRVLHKSIEAVIKTLDKEIAKLERDIDAHLERHFKAQAQHFEAIKSLGPITCATLLAFMPELGTVSNARAAKLAGVAPLNRDSGKERGKRHIWGGRRVVRCALHMAVLSAVRFNPVIKVFYERLIAAGKPKKVALTACSHKLLRILNAMARTGQPWNDEFHAVTP

SEQ ID NO: 372814 - protein, 342 aa, unidentified
MKAKAQPQVATLYVGVDIAKDDFAAATVWAEQTKSLGKEENTEAGCETFASRIAARQQACGAEQVHLVVEPTGGFEAELVARAYRCGWRVTVVNLGVVRKWAQGQGRRAKTDRLDARVLAEYGAKEHPEPQQELPEEIAELDSLLGRKLDLDKLLQSERNRYGRLNRHTAPAVRRSLEQVIAALEQELATIEAAIKQLQHAQPTIKQQLAFLLSVPGIGEKIAPLLLVQLHRFWARTNGRGTAKQLVAYLGLDPVPYESGTSVRHRATISRQGNSLLRSKLFLGALGGVGGKNQLRLFYHSLLARSKPKKVALIACARKALTWAWAVFAHNTYFDPTLAAKA

SEQ ID NO: 372815 - protein, 482 aa, unidentified
MKKRNIYQNQSQELLFLFENAGNNDKVMCVPMDYAKNDHLVMFCNGHGDILRKPFSVKNTPESLAYIEDQVTRSCTKRGIKKEHVFFGGEDANSFAKNFVSTLRSKGFIVANVNAHDAKKQRESVQASTDRIDLMGIAAMLLNCRGNCYPAQSGIYRNLRLLVRHRRKLVQMLTEVKNRVHGIVDELFPGFLKEQNTGIVAFTESSLYLMEDRFSPKQVCRRKRKKLIEILKRLSTSKAEQTAAKLQQYAAKVLHAPVEYVDTMQLSLSQHVKHIRCLKESIAQMEKEIALNLAQTQGAFLTSVRGVGLVLAAGVTAEIGNPNGQKPLNNLSSYAGIVPRVKQTGGIEGKTYTGPVARRCNRILKDYVVQSAHHLGWHGPPDLMNDYKRRDASGQHANFGMGRRYLRMAMCLMRTSQVYLPSGLRKGDYTLEEKASYYLINWPSLRAKWKKVNALEEAFALNRPLGLWRKIVQELYDIKLKL

SEQ ID NO: 372816 - protein, 320 aa, unidentified
MTILNSQVVVGVDVAKDEIVIYRSDLEKTLNIANKRSTLKQWLKTLPAHSAIALEATNIYHLDTTEMAHEMGHDVYVIDGSRLNKYRDGIGMRAKTDALDAELLARYLSRESDRLRVWNPPPKAYTQMKSLLRRRAQLVRTCVALKQSWKNEPLLKEHFNHLLAAIAQFEKMIQKTLKEIAAEGGVEDQVKRCQAIEGVGLLTATAAATAFLRGEFANSDEYVAFLGMDPRVRQSGQKDQKRRLSKRGDSEFRRLLHNSAMAASRSPTWKPYYESYLARGLKGTQALVVLARKLARVMFALMKNQSEYKPNSMFGCSPQT

SEQ ID NO: 372817 - protein, 414 aa, unidentified
MFAVGVDVSNGRSTVAVLQTKTSALMKPFEIPHTAEGFASLAGKLAGLDGEVRIVMEHTGRYYESFARAMHSAGFFVSAINPLAIKNYQDGINIRKVKTDKADAMKIARFALDKWEILPQYTPMDTIRYDLKTMHRQFQLSSKTKTALSNNLVALLEQSYPGANRYFDSPVRPNGSQKWVDYVDTFWHVDCVAKVSQNAFVERYRKWCKRHGYNFSQQTAIDLHTDARQKFPLVPKSDTCKLLVREAVSQLNAVSRTVETYRTEMDRLASQLPEYETVMAMTGVGKSMGPQLMAEIGDIRRFPHQKSIVGFAGTDPIKDDSGDKVSDSKPSSKRGSPYLRKTLFVIMSILLQLHPQDDPVYQFLDKKRSEGKPYYVYMTAGMTKFLRIYYGKVRDCLKEQGLWEQTPDAPGMAD

SEQ ID NO: 372818 - protein, 416 aa, unidentified
MTEQQRWYVGVDWASENHHVLITDGDGRKIGEKIFKHGGEGLAEMAIWLMATSSATDPCQIHIAIEVPHGPVVETLIERGFKVHAINPKQMDRFRDRFTLAGAKDDSRDAETMASALRTDPRCLRLLGVGDPTVIELREWSRIAEDLGAERNRLTNRMREQLWRYFPAILEFDGDLGAEWLLELWEAVPTPARATRVREATIAKLLKRNRIRRFNASYVLAVLRQQPVTVAAGTMEAASAHIATLIARIRLLNRQLKQAHERLDALTSRLALNEEAEPGHKKQHDVEILASLPGVGRIVLATLLAEGFDALQRRDYAALRSLTGVAPVTRRSGKSLIVIRRQACHQRLSNAMYHWARVAVQHDRISRAKYAALRSRGHSHGRALRSVADRLLNVACAMLKTGTTFNPSLADEKTPC

SEQ ID NO: 372819 - protein, 456 aa, unidentified
MNNYLGIDVSKGYADFALIDEQKKPIVNSFQLDDTPDGHNQLGDFIRELFKQHPDLTLLASAESTGGYENNWLDCLIKLQRCYAIKVARLNPKGVHHYHEAKLNRAITDAISARLIAEYSMSHQEIIRFDQPDETYSLRKQWTLIKLLSKQKTQLLNQLDNLVYQSNTELMIYCRSYWPAWLLQLLRIFPTAKDLAQANVDQLTKIPYLGTDKAQQILQQARQSVASATDLVSGEMIKTVIAEIIQREKVIAICKKSLTENCSLPDVELLASIIGIGKFSAVGLIIEIGTWLRFSSAAKMAAFFGLHPILKQSGDKTWVARMSKQGSSEVRALLFMCAMVAIRHNPIIKDLYAHSLAKGKSKMSAIGICMHKLLRIVYGVLKSGKAFDPAIDQTNRTRKPDQRKPKKQEIRRLQPVDENAPVSSRQNKKRKEQSQSQSELVTKCEIKTPALSHCAT

SEQ ID NO: 372820 - protein, 407 aa, unidentified
MDLLKTVFGIDVSSRKSNVCIMVNGQKVNDYAISNDMVGFNQLLGDLKQVTKPQIIFEATGVYSRRLQAFLDMHELRYVMMNPLEAKRKTKDDLHQNKTDKLDALYLAKLQSEHPQRLAYVQSKEYQELMANNRIYEQASHDLISNKNRLHKAVQLTFPEIEHLLANPRGKNYWSIALRFPHPDIVLETKEADIIDFLKGLSGIGKKRANDITQSLIRLAKVACPAVKKNSAHVRGLKMAINNILSAEEECQTALQEMAKLAPKRDLEILTSIPGIGENTALRIISELGDIRRFNNPSQLNAFVGVDPQVYESGNLTAHLSISKRGTAIGRKVLYLAINQIQSAKKAGNPCHIADYYEKRKRSSETASHKKAAIASIHKLLQTMFALIKNDQLYSYDVAKHNQRLLS

SEQ ID NO: 372821 - protein, 402 aa, unidentified
MNCVGIDVSKGKSMIAVMRPFGEVVVSPFEVRHTANELSELAGLLKSLDGETRVVMESTGNYHAPVAWLLHDAGLYVSVVNAMLVHDYGNNSLRRAKTDKKDAVKLANYGLDHWLTLPRYIPEEDTRLMLKICYRQYQQYSKVQTMLKNNLISLLDTAFPDANRLFTSPPRADGSEKWVDFVAAFWHCECVCGLSKKAFTAKYQKWCRKHGYNFSQDKALDIYASACGRFGVMPKTNTAKLLVEQAISQLQATSAALAALKQEMQSLAASLPEYPVVMGMFGVGPTLGPQLIAEIGDVRRFHSKKALVAFAGIDAPPYQSGQIDVRSRSISKRGSASLRRTLFLVMGVLLQCAPMDEPVYQFMNKKRSEGKPYRVYMMASANKFLRIYYASVKAYLESLEHD

SEQ ID NO: 372822 - protein, 376 aa, unidentified
MERGSLMLNTTTFVGLDVHARSIKAVALDAMTGEVRSATFAYDAAAVAEWVGSLDPAAKCVYESGVTGFDLQKKLTALGVGCVVGAVSKMIKPSADRKRKNDRNDAEFLARMLSVGNVVEVCVPDDECEAARDLVRALDDAREDLKRCKQRLSKFLMRHGYAFSETTPTGRRKGNWTAAHWAWIRSIEFPEKADDEVLAYYVDAVRQAMEDKKRLEKLVEAEASKPRWKKRVDSLRCLKGVDAMTAADIVFEAGEFSRFKNARSFAAWLGLTPSEHSSGESARQGGITKAGNKHLRRVLVEAAWHYVSASPHPKDLAKGQAPDPAARRHAAKGVRRLVKRREEMLGRGVHKNKANVATARELACWCWAVGRMVENG

SEQ ID NO: 372823 - protein, 453 aa, unidentified
MTNSIAALGASTGSPLERPLVTRGLRREQEKRRRRRTRVPPDTLVLGIDLARERQAASFSHDGHVLGRRRFDCAAHEIDRFFPEAQALAKKHGLPHLVVAFEPAGHYWCLAAEACERAGVDYLLVHGLSVKREREITRYTPEKTDPRDADLISFLPPQGKFLEARLSSSVERETLAQLARNYFLIRKLSAAERTRLGNFWDRMLPEFFSVLRDPTSNTALAVAGALPSASELATLTSRSWVSRVRRSAQGDRILLRRASSVLPLLKQAHADPVRRSGEGMSARLRHAAQRRRLLEAQKQELRLEILARYEALEEHTFLDSIPGADSFYNALVLGIVGDFRLYDDPRTLVKLAGSEVNHYASGDWDGTSRISHRGRSRLRAAAYQQARLLVVNNDDYRARFQHLLHRTHRPNLRDLPAYVAVMNSYLRTAHALVIRKQLYVPRAMRSTTENHHL

SEQ ID NO: 372824 - protein, 421 aa, unidentified
MEPMHQRVAGIDVHRMKHVVTILIGQEDGAVSSQTREFGGFKRDMRALVAWLQTHRIQQVVMESTGIYWKSVFAHLEAAGIPALVVNAFHVKNVPGRKTDVGDSEWLAQLARFGLLRGSFIPPQDLRELRIVSRYRRKLTGMLAGEKNRLHKLLDDAGIKLGGVVADIDGVCASKMVEGLIAGGKPDELAALGQGKVRATTDILEAAMDGELSARHRLVLDMAYDHLRYLEGKLTALDRYLVAAMQPYAWAWRLLQTIPGIDAISAAMILIEIGDDPHRFGSSARLASWSALCPGNNESAGKRKSGKTRHGNPIVRYLLCEVANAARRTKTVFRAKYESLVIRRGHKKTIIALAHKLVRTIYFVLVRRKPYRDSTVDYEAASVAKNAPRWIRALKKYGYWPQVVVRHGFETPGCACSGGQG

SEQ ID NO: 372825 - protein, 318 aa, unidentified
MSLKIVYKICCGIDVHKTFVVACIASTNDKGITSYESLRFSTYTSGLKTLLQWLLNWNCKDVCMESTGKYQIPVYNILENDCSIVLAHPKYVKAIRRKKTDKKEAKWIADLFKHNLVVCSFMPPVDIRQLRDLMRYRSKLTCFQSSEKNRLHNCLMVSNIQLGNVVSNTFGKSAQSAQAIPDKLLENPADTSFNLEPLVYKSLKKKLPELRDAIDGYITLEQVGKLKLIKAHYESLESRKAELEELILALAAPYQQELAILQTAPGIRNDFTAIGIISEIGSNMEAFSSTKHLCSWACLTPTNNESAGKKKSVQFSKA

SEQ ID NO: 372826 - protein, 414 aa, unidentified
MGVPIWVGRAIGLDVHRDFCEVAICEDGEVRSAGRLPATPEGVSALGVSLLSSDRVALEVTGSCWEVARILEPYANRVVVVSPDDTGIASARAKTDRLDARALASLLWRGELEAVWMPDERCRILRRRLSRREQLVRSRTRAKNEVHACLHRRLVGKPPCSDVFGVKGREWLGGLELPEEERESIDAAMRHVGFLDSEIAAVEKLIAQQALCWPEIRRLMTVPGVNLVCAASFIAAVGDANRFLSSRKLVAYLGLDPRVKQSGEAPARSGRTSKRGSPSARWALVGAAWTSVLQPGPLHAFYERTKARRGHGKAIVATARKLAVLFWCMLTRDQDYAHQQPSLTRKKLRRLEITAGAPKNTRRAAGVWSTNELMRTAELELARQAEASYKRTVQDQLAGAPAKKVGASATPEHA

SEQ ID NO: 372827 - protein, 411 aa, unidentified
MHNRQNYLYVGVDLHKEHHTAVIINCWQEKLGEIQFDNKPSAFSKFLLKVETYVCDGITVVFGLEDVGGYGRALAKYLVDHEQVVKEVNPALSFLERKSQVMIQKNDSWDAECVARILINKFNQLPDAKPNDLLWSIQQLVSRRNALVKAQSALKNQLHIQLNHHYPSYKKFFSELDGKTALAFWQQYPSPSCLEGTNIKQLTAFLLDVSNNTCSVKKASDILKLVKEDGQTMKEYQETRDFLVRSIVRDIEFKKKEMKYIQRELKRLVNLLDYQLETMPGIELVTASALIAEIGDVRRFPNANKLARFAGIAPVYFGSGGKGKTHKSKQGNRALHALFYNLAVQQVQVAKGSKLPRNPVFHAYYQKKLKEGKTKGQALVCIMRRLVNIVYGMMKYKIAYELPVVEEKEVV

SEQ ID NO: 372828 - protein, 353 aa, unidentified
MWIIGCDFHPRYQQIAALNEVTGEVVERRLSHEGKEVWEFYKALPGGARVGMEATCTAQWFERLLDRCGHQLWVGDPAQIRASVVRKQKTDTHDARHLLELLLTERFPRIWIPTPAERDLRQLLVHRHKLVCWRTQVRNQLYALARNQGLLPRTRFWTQQGREQLQSLPLDPWTAQRRQDLLRRLDELGAQIVELTRQVEQQAKQRPETAQLMTQPGVGPIVSLAFVLTLGPVRRFRRGKQVASYLGLNPSEHSSGGTQRLGHISKQGNCMLRWLLVEAAHVAARKDPELRRIYQRLAFRRGRKIAAVAVARKLAVKLYWRLREFKEQRTTQPAPMQGGSGSGMVNAVSSPTA

SEQ ID NO: 372829 - protein, 335 aa, unidentified
MDREYVGIDFHRRRSVIVRKNSAGEKLSSVRVVNDALVIAAAVAEAGPEPEVVIEATYGWYWIVDLLQEQGASVHLANPSGLNWGTRRVKNDERDAVDLIDMLRLGRLPGAWIAPPATRELRELVRYRAKLVALRSGLKAQVHAVMAKEGVLPSMADMFGTAGNVQLDEMQLGEAYALRVESLRNLIVVYDREVAMLEGQIRRRLRDDRGYRAIQAIHGIGPTMAAILVAEIGDVSRFRSAAALCSWAGLTPKHRESDTTVRRGGVTKQGSRLVRWAVIEGTIRYHGGGKLAADFRKIAERRGKNKATVAIARKVLTLVYYGLRDGEIRCLAKTA

SEQ ID NO: 372830 - protein, 408 aa, unidentified
MNTLYVGIDVSSKSNVVYLMLPNGDKHSNFSVANSHEGSTQLVKRILSALTSHSLDTVLIGLEATSVYGDNLVYFLREDATLAPFNRKIHVLNPKQVKKFHDAYNDLPKNDYVDSFVIADCLRFGRINKEVYMGDYRYKALQNLTRARFFAVQNLVKEKQRFMNVLFKKYSTMTQEKVFSDTFSTTALAVYDEFESAEALANMDLHELTDFIIEKGKNRFPDPDAVAKAIQKAARNSYRLPKTVNDSVNQVLSISITSMKALESQIKEFDKAIKAQMELLPNVLISIPGIGPVYSAGIMAEIGDINRFNSQAALAKYAGLAWKQHQSGGFESEVTRLIPSGNRFLKYYLCEAAFSLVRCDKEYSDFYHLKYKEVNRCQHKRALALTARKFVRLVFRLLKDNRLYCPAK

SEQ ID NO: 372831 - protein, 318 aa, unidentified
MNDTNSIIHIGADVSGETLDCWKPSTQTAKGVHKGFPNTNAGIAALLRWLPKGAHLVAEASGGCERQLRMAAHQAGLRFSLVNPKAVRDFAKAGGLRAKTDRLDSELIARFARALDIPPEPKPDPARLELDELCTLRQSLVEERKAHRCRLKQAGSPAARLAIRPLIKALDSQIAALERRIDALCASCPRMSLLRKTLATLPGIGKILSASIIAWLPELGTLSRKQVAALVGLAPFANDSGKRKGQRFISGGRAKLRRALYMAAVSLANTKSPLSRQYWSLRKRGKPVKVARIAVLRKLVIRANTICKPLASLPYATA

SEQ ID NO: 372832 - protein, 344 aa, unidentified
MDHFGGLDVSVKETSICIVDDTGRIVKEVKVASEPEALLKVLWNPAYRFKRIGLEAGPLSQWLFSGLAEASLPVVCVETRHMQAVLKAQINKTDRNDARGIAQMIRVGLYRPVHVKTLRSQKLRMLLTHRKLLQSKAIAIENDLRGTLRNFGLKVGMVGKVRFEARIQELVENTPDLAALVEPLLIVRRVLREQIVILHRRLLAIVREDEVCRRLMTTPGVGPVVALTYRATVDVPARFRKSKSVGAVFGLTSSRYQSGEIDWSGKISRCGDEMMRTMLYEAAQSMMHSKKWSWLKAWAMQIARRRGMKKAIVALARRLAVIMHRIWVDGTEFRWTREQAAVAA

SEQ ID NO: 372833 - protein, 303 aa, unidentified
MTTFLNESTAAVHIVAGVDTHADNHHVAVLDLSGRRLGDRQIPATAAGYDRLLTYLGSLGNIQLVGIEGTSSYGAGLARHLRERRVDIREIIRPRRSQRRRGKSDPIDAYAAAQQVLADPESLPAAKSGDGLVEQVRVLLTVRRSAVKARVAVIRQIKSLLVTAPEEIRTWWSRVSEHDVIADLAATRPCAPTASVDAATGHALRRLARRHRYLTSEIEELEEDLRELVSTVAPAMIATKGFAVITTATLLVTAGSNPERLRSESSFAALCGASPIPASSGKTNRFRLNLVPPTLRSARPDLR

SEQ ID NO: 372834 - protein, 415 aa, unidentified
MEGMEVLHEHVAGIDVHRKSLCVCVRHVGSDRRVRQQVRTFGTMTRDLLALRDWFQGEQVTHVAMEATGVLWKPVYNLLEGRVEVWLVNAHHVKQVEGRKTDVKDCQWLAQLLSCGLLRASFIPPKPQRELRDLTRMRSQLIAERTRVVNRIHKVLEDANIQLGAVASNVLGVSGRQMMEALIAGEQDTEKMAQMARQRLRAKIPQLRLALEGRVSEHHRFLLKMHLEQYDGIESQVGRLTQRIEEVCGPFAPAIATIAEMPGYDQTSGQNVIAEIGTDMSRFASDDHLCSWATICPGNHESAGKQLHGRTVKGNRWLKAALCQSAWAAARAKDSYFGAQFHRLAGRRGKKRAVIAVAHAQLKVIYHLLTSDQPYKDLGPDYFLKLNAGHAARYHRKVLESMGYTVIPPDADKAA

SEQ ID NO: 372835 - protein, 367 aa, unidentified
MTVTIVDAARPVTGSRNTHPDLHAAPCLVTGGVDTHLDLNVAAALDPVGGLLAVAEFATTLAGHRDLLGWLSGFGPVARVGVEGTGSYGAGLARFLRRAGVEIVEVDRPNRQARRRSGKSDPLDAVEAARAALSGRACGAAKSRDGNVEAIRALVVAKRSARSAKIQALNQIRHLSFTAPEQLRQRLAGVSRHHLAARAAALRPATGEGADPVVAATKTALRILGRRVLALDEEKARIDALLAGLVTQTAPQLLAVFGVGIDTAAALLVTAGDNPGRLRSEAAWAHLCGTAPIPASSGKVTRYRLNRGGDRQANCALWGIVITRLRNDPRTRAYMARRLAEGRSKPEVIRILKRYVAREVYHHLPRT

SEQ ID NO: 372836 - protein, 427 aa, unidentified
MSSADESGQPVQAVTLGVDTHADVHVAAALDERGRRLGIHSVPSTPAGFADLATWAGRFGPLDRVGIEGTGSYGAGLARWLGARGVPVVEVDRPDRRARRRHGKSDPVDAEAAARAVQAGTAIARPRVSTAAMEMLRALRVARQSAVKARVQAANQLHALVVTAPDVLRAQLRPLSLARLVTTAANFRCGRQPATPEAATKLALKALAVRYRHLCAEVAALDTHLKRLLAEVAPELLAVKGVGIDVAATLLVAAGDQPHRLRSESAFAHLCGVAPIPASSGKTHRHRLNRGGDRDANRALYIVAVVRLACDPRTRAYVARRTAEGLSKAEILRCLKRYLAREIYRVLVSRPVPAAALTAVDKSDAEQHQAASTHGGSGSRANHPSSPWPGAACHPEGRRAAEEPREGLDAPAGAAPPAPSLRHPGTT

SEQ ID NO: 372837 - protein, 592 aa, unidentified
MNLKDVAPSLTPIGVGFDTARYGHHVTFLREDLQPATTPCEFTESREGYQLLEQKFQQLAQRIPNVLFCIRIDVAGQYASNLDTFLRQLPFPKTISVGEPARNQKYRQAIFPKCKSDPAESHCAGRFALREDPEPAREVPAELIPLREIASRLEAQTRQSTRLANQLHNLLARVFPELATIASDLQAQWVLRLLDQYPTPAQLARARQNSLTAIPYLTTDKAQKLQTAARRSVGSFRGPVAEELVRRLVGQLRRSGQEEDDLRNLLVEVHQCLPQSNQIDTIPGIGAGTAAVLTAKVISIDRFETPDELVGYFGIFPEKDASGVDKDGKPKPGCHSHMCKKGSDLVRKYLWNAAKVACQHNPAVRALYRRLRSRGTRGDVALGHCMRKLLHLVWAVWKSGKAFDPNHYPWESTSAPLGNAEAAGHNQGTSPETKVVTAADSTVAAETPAVNTPNPAAPDNPLDSAGWIDFDLLREQVTMEQALAHLNWLSCLRGSGPQRRGPCPVHGGSADRLRSFSVHLQKNIFRCFHPPCASHGDVIDLWAAVHRLPLPEAAHHLAATFNLAATFNLRTTRGTEKRNGREESPPPPKAHA

SEQ ID NO: 372838 - protein, 340 aa, unidentified
MELYCGIDLHSTNNVVAILNRDLECVGCRRLRNDLKAVLAYLEPYREDIVTIAVESTYNWYWLVDGLKEAGYDVRLVNTTKASNYNEMKYTDDNHDARWIARLQALKILPEGYITPPEDRGIRDLLRRRSFLVEKRTAHLLSLRALFERSTGKRVDSDLFEGWSVETVRELIQDPWAAECVTVMLPVVRVLTRQICTIEKSVLAVAKLRPEFELLKTVPGIGDVLALTIMCETVDISRFAKVGNYVSYCRAAKSEHTSNQKKKGVGNRKNGNKYLSWAYSEVAQHTMRYEPLAARYYARKRSRSSHPMVAKRALAAKMARACYYVLRDQTPFDADRVFHR

SEQ ID NO: 372839 - protein, 402 aa, unidentified
MIFINCLGIDISKSESVVAHYKDEVLVKEMVIQNNQNGYRYLKNYIKHLDSLFILFESTGIYSRGMKRFCEIHKIDYLEMNPLEAKFKTSSLRSWKTDKSDAHKLALLAFRMKDSKIQRQSEEIYFELRERARFHLEMEINQNRLKVELVETLHQTFPGLEKLFTNRYSKIALNIAKAFPHPDFVSTLTHDELVEKVLHSTDKGISVNKAHKYVQKLIEIKNNSFPNVDKSSFLLQKVQYLCDKLLIGIEEMKEFDQEMIDLAKNTTEFENIISIPGIGELTAALLIGELGNIREFKTNKQLNAFVGIDIKRYQSGTSKSRDTINKRGNKKARRLLYLIIMNIIRGRNHYQSHIVDYYYKLREQPHGKTHKTAVIASINRLLKTIHYLIVNNKLYDYQKAPH

SEQ ID NO: 372840 - protein, 348 aa, unidentified
MFVGIDVHKDTHTAVGISPFGEKLFEITVGNYKKDFETLKEKVDEVAGTLSPYIGLEDVRGYGERLAGYLYEKYPVYHVPSILVDRARQNATHPEKSDSLDALGVAKVMIQSIDTLLPYTISEDGQKAKQLKEISIDREDLVLERTRLKNQVHTLLYRIYNTEYADKYKDPFSLKALRYWRSAKPKCDPFLLKTMKRKVKRLLDIHIEVTDLEKDMETLLDTGGYTIQTASGCGLVLASAIVGEIGDINRFTSPGALAKYAGCAPRERSSGKKVRHVKSRSGNRRLNCAFHRMALSQISRMGNDKARAYFKRKISEGKSKSQALVCLRRQMVNIVWMMLKHKTVYRNA

SEQ ID NO: 372841 - protein, 322 aa, unidentified
MAKRTTICAGIDTGKQKLDVALDGSSEPLQIDNTPEGYKVLSDWLRRHRVKRIGIEASGGYERAVVAELRRRRFVVVIFQPAQVRAYAKFHLQRAKNDKIDAALIASCTAAVKKIHDPPDARLLPFAEHLTMIDQVGEDIARFKNRLETCRDPRLRQIWKEDIARLEQRKKIELKALVAAIREHRDLAERLDLIHSVNGAGLPTAVAILVRMPEIGQITREQAAALAGLAPYDDDSGKQVGARHIDGGRERLRRALYTAALPASFRWNSQLTALYQRLIAAGKEHKRALIACARKLLIFVNTVVARGTPWQNQPPPLAAMTC

SEQ ID NO: 372842 - protein, 499 aa, unidentified
MPSTNVAAAPILGAMKRKSIFRNESQKLDAAFIEAGLPERVLLVPLDFAKVTHYACFCDGRGTYIRKAFTVKNNQEGIDYLVDQIERTRVARSIKSKRHVIIGGEDSASYTRNFMDRLFELGYLTVRLDSKEVHRQAESVDSSTDKTAVRAIAKTMLNRDARQVGGSDPYTQLRGLTRQRRRIVHLSTAVKNRIHTHADCLFPGFLSKDSAVAAFSMASLELMANKFSAATLARKSEKTITRTLSRQGVRSAPEVAAKLKEQARNAICADDASVQLSSQLIESELRLFQTLQSSLSQLDRESARILLQLPEAFAVSIKGIGITLASSIFAETGSLSQIQRCDQINAYAGIAPRVKQTGGPESPARIGGKRRNFNRILKDYTLQAGNHLYLHGPEELLHDAARRKLAGKAVDTAMARRFLRIARALAKSHSIYLPSHLRTAQAGTDVEAQTRAQYIVKTWSDFLLKWKRLGLHEEAFAPETPLGDWRIIVQEIYEIDLPI

SEQ ID NO: 372843 - protein, 318 aa, unidentified
MDRVVGVDVSKGQLDGHDLGQGRRLSVSNDAAGIGRLVAWVNPGALVVMEASGGYERLAHRRLRARGLAVAIVNAKRVRDFARASGRLAKTDRVDAEVIARYGAFARPAATPAPDPAGRELAELLAFRQRLVSEITARQQQLSHLETPTLRQRAQADLARLRRDKAEIETLLRRAIARAPGLARRFALLTSMPGVGPILAATLLALLPELGTLDRRQIASLVGVAPIAKDSGLKRGQRVIAEGRSGVRRVLYMAALSASRGSSRFADFYRRLVARGKPPKLALVATMRKMLVTLNAIARAHQPWSLQHAAWTPSHNGC

SEQ ID NO: 372844 - protein, 472 aa, unidentified
MARAPRRQGGGQPRQRRSSRGRPAQLEQLNLNAAGIDVGATEHWVAVPADRDAQPVQRFGAFTADLYALAEWLRQCQIDTVVMESTGVYWIALFAVLEERGFDVKLVDAHYARQVPGRKTDVKDCQWLQELHTYGLLRGAFRPEDEVCVLRRYLRQRSMLVAMASRTVQHMQKALEQMNLKLTEVVSDITGKTGMTIIRAMLAGERAPQLLATYRDKRCKHDQATIAKALTGHWRAEHLFALQQAVEQYDFIAQQLRACDGHIEGCLQAFVPDVEIDAPQAPSARPWRSSRSNPLSFEVQAYLEAMTGVDLTQIDGIESLTALKVLSEIGRDMTRWPTSKHFAAWLGLCPGNKLSGGKRYRMRSKPSANRAATALRLAAQGVANSHSALGAYYRRMRARLGAPKAITATAHKLARLVYSMLRYGTAYVDAGQQAYEQKYRDRVLTNLQRKAKAFGYQLVHVEDIAGGVASTL

SEQ ID NO: 372845 - protein, 355 aa, unidentified
MNKIKTNIAGQTIYAGMDIHKSSWNLGIHLNDQFVKNVHQKPDPVIMARYLQQHYPGAVYKAAYEAGKFGFWIQRQLTKLGIECLVLNPADIPKSQKDTLQKTDPRDARNIGLRLQSGVLKSIHIPDEQQEADRVLFRHRKRIWKDLTRCKNRIKGLLAFSGIDIPEQYDNASWSHNFINWLKALDCIQTSRRRTLDYMIAQMEFLRKELLAISNEIRKMMREQRYNKNYYLLRSIPGIGPLTGASILVEIGDVKRFETFYHLNSFVGLLPMEHSSGQSENKMSLTVRKHRQLRSDLVESAWTAKRTDPAMTLYFQEQLKRKDSKIVIIKIARKLLNRIRYVLVNQQPYEYGVVK

SEQ ID NO: 372846 - protein, 349 aa, unidentified
MIIIGVDFHPEFQQIALLDSDTGELTEKRLGHREEAEQFYRALVGAGLQVRVGMEASGHGRWFERLMGELQIELWIGDAAEIRTKRVRKQKTDRQDAQLILKLMLKDDFPRIWVPSWENRDLRQLLWHRHRMVQARTRIMNQLQAVALNEGLRCKKRLWRTKRPQLESFQLAPWASRRRHDLLELLDRLNPTIAELSHAVEQEVEKFPEAQRLATHPGVGPLTALAFVLIIGEAERFQCGKQIASYLGLVPAEESSGNQRRLGHITKQGSSMLRFLLVEAAQVTVRSLPQWRTRYVHLMMRRGRKIAKVALARRLAVGLYWMLRQGWDYQQWVEFGSHAGQPGNRHGVQ

SEQ ID NO: 372847 - protein, 407 aa, unidentified
MNAVGIDVSKGKSMVAILRPYGEIVSKPFEVRHTASGIYSLIEHIKSIDGESRIVMEHTGRYYEPVAHQLSNAGLFVSAVNPKLISDFQDEDNSHRKVKSDKADAIKIACYTLDRWQKLKQYSLMDEIRIQLKTMNRQFAFYMKHKTAMKNNLIGILDQTFPGVNTYFDSPVREDGSQKWVDFASTYWHVDCVRKMSLNSFVEHYRKWCCRRKYNFSKSKAEEIYGTSKELVPVLPKDQTTKLIIRQAADQLNTASKTVEHLRSLMNETAARLPEYPVVMQMKGVGTSLGPQLMAEIGDVMRFTHRGAITAFAGVDPGVNESGDYRQKSVHASKRGSSTLRRTLFLIMDVLIKTRPQDDPVYRFMDKKRTQGKPYYVYMTAGANKFLRIYYGRVKEYFATLADSEET

SEQ ID NO: 372848 - protein, 345 aa, unidentified
MKITTVGIDLAKNVFAIHGVNEHGRTVLKKVLKRDQVAAFFANLPACLIGMEACASAHYWARKLQCMGHTVRLIAPQFVKPYVKSNKNDAADAEAICEAVARPNMRFVPIKNVEQQAVLAQHRARQGFIKARTAQANQIRGLLAEFGFIIPQGIANIAKRVPELLEDATNELPGSFRLLVQRLMEHLKELDHQADEVEAQIVTWHRDNELSRKLAEVPGIGPITASALVATVSDAKNFDNARQLAAWIGLVPRQNSSGGKNVLLGISKRGDTYLRTLLIHGARSVICAFQRKKNKVDGWLGALLARRNPNVVAVALANKNARIVWALLAHGREFRPDYTSAKAAT

SEQ ID NO: 372849 - protein, 413 aa, unidentified
MRVGIDAHKKSCTTLVFADGEESPIQSFVFKTTRSGVSEMLEKVPEKSVFVIESSTTGKAITRMISSSASNHVIHMVAPPEKKPSIKTDKRDAERIVKEDTLGYLRRCYIPSQYIEDMRFLVTKQMEIGAKIARVKNQVQSLLERNMVQSEFSELSDMFGVEGLQKLSEIELPKQDRLALAMHLQELKFYASQHAQLETEIAKIAMTDQDCQLLFSHPGISSFTAVAIKSRIGDDCKRFPTKKHLCSYAGVVPGADNSGEHESQHEHVKHGDVILKYALTCAVSGAVKAKTDSTVKRFYLKQIKRGKAPQEAEVDAARKLTCIIWKMLTSKQRYVEEDKYLTARKMRKTSSNARRVIKDAVLPESVPELAKSLSSHVEVLEQYSEDLDRMLGRHHRGNRKAPSSEHAKRSDLK

SEQ ID NO: 372850 - protein, 407 aa, unidentified
MRTIYERSCGLDVHKKTVVACVLTPASQQTRTFGTMTPDLLQLREWLQSEGVTHVAMESTGVYWKPVFNLLEDQGMELMVVNARHVKAVPGRKTDVKDAEWLADLLRHGLLKASFIPNREQRELRELVRYRRTVIEQRAHVVQRIQKLLEGANIKLGDVTSDVMGVSGRAMLTALATADQDARTLAGMAKTALRRKIPELERALTGSFGPHQRFMLRSQFQLLEALEAQIASLDDEVAQRMRPLQAALDHLDEIPGIGVRAAQQIIAEVGTDMTRFPTSAHFASWARICPGNNESAGKRRNSSIGGGNRWLRNALLEAAWTVSHSRRQTFFTARHRRIAARRGNKRAAIASAHSLLVAIYHMLRDGTVFQDLGPMHFEKLNREAVTRRSLRRLEQLGYRVTLEEATA

SEQ ID NO: 372851 - protein, 327 aa, unidentified
MQTITTIGLDIAKSVFQVHGTDAAGQVVIRRQLKRRFVLSFFERLPPCLVGIEACASSHYWSRELQMLGHTVRLMPPAYVKPYVKRQKNDATDAEAICEAVTRPSMRFVPTKTVEQQSCLMLHRARHLFIRQQTAVINSIRAYLAGFGIIAPVGRRGVEQLLEVVANTADRRLPEVARACLAALGGQLRALKAQILEFDRRIIDWHRSNATSKRLDAIPGVGPALAKALVASIVDPKAFRSARDFSAWVGLVPKQNSSGGKDRLGSISKQGDRYLRSLFTAGALAVIRYAKIHGTGIGRGLRDCWRGDRPRSPPSRSPTSSPGWPGR

SEQ ID NO: 372852 - protein, 341 aa, unidentified
MSIVGAFDVHRRQLTFEYLDTSTAELKRGRVIPADREHLRAWLARFAGQDDVHFALEGCTGWRYIAEELAAAGITPHLAEPADTAALRGRKRHAKTDKTDTRHLRVHLMAGDLPECWIPPEHVLEARAVVRLYKDLLDERGAWHQRIAATLFHQGVPVIGSMAKPEGRAAVGQVDLSPAGRQAVEAGLRQVDRLTGELDVLRRQLGMLSRRQPGCAALRTAWFGIGPVTAVAIWAELGDVRRFGNSDDVVRHTGLDITVWSSDGKGPPGRLSRQGPPLLRWALYEAAKCAARAAAPDHGYYTAVRDQRTAGLATLSVARKLARRCYHTLRELGEEALAPAA

SEQ ID NO: 372853 - protein, 305 aa, unidentified
MEVLYQSCAGIDVHQANIVVCILHGPLTSTRPKREMATFDTTTKGLRACHDFLSQFHVEAVGMESTGVYWRPVWHALCDDFELILAQPAHMKAIPGQKTDKKDAHWIAKLTRIGLLPRSFVPDETIQELKELTRQRKHYVESRNRETNRIHKILQSGGIKLTTYIEDIMELSGRNLLQLLVDGTPITPRIVHQSVYTSLKKKVPQLLEALDGYFSDHHRFMLKQSLEIYDFYQKHIELLEERITVYLSQYENHVEILDSIPGIDVITASVIISEVGVDMSQFPTSGHLASWAGLCPGNNESAGKK

SEQ ID NO: 372854 - protein, 350 aa, unidentified
MSQLIRIGMDTSKKVFQLHGVDADERVVLSRKLSRHQMIRFFANLPPTVIGIEACGASHHWARTLGALGHEVRLMAPQLVKPYVRRSKNDAADAEALCEAMSRPTMRFVPVKTVGQQAALMLVGMRERLIGRRTQLANSIRGYAAEFGVTAPVGLSRVAPFLQQIASEETLPPLARDLFAQMAEEYEGLMEQIRDLDKNLATWHRSQEVSRRLSGIPGIGPLAAALLLMKAPDPHLFRSGRDFAAWIGLTPRDHSSGGKVRHGGITRAGDSRLRSTLVVGATTVLRHVRQNGQSRLATPWLLSLLSRKKPKPAAVALANRMARIAWKLMTSGETYRKPMDAVALAAAAAC

SEQ ID NO: 372855 - protein, 361 aa, unidentified
MQSTTIIAFDQHASTTMAAVLLPEHRTPALHPLASESGTILRFVERLRRQGAVVCCYEAGPCGFELQRTLTTHGIPCEVIAPALIPRRAGDRIKTDRRDAGQLAVLYRAGALTAIHIPTEQEEAARDLLRCREDIRADLLRARHRLSKFLLRHGRRHTGTKKAWTKQHDGWLRAQTWPIVALDHTHRAYLRTVDEAVARLRAVEEDLRALLTLEPLQARVTNLRCFRGINDLTALTIAAELGDPRRFATAPRTMAYVGLVPSEHSSGTKRARGPITKTGNAHLRRVLVEAAWHYRHRPFVGATLRARQRGAPPEVIARAWAAQQRLHRRYHRLAARGKPNQHIITAVARELTGFVWAALTQ

SEQ ID NO: 372856 - protein, 400 aa, unidentified
MSGLKGRFDCFVGIDVSKDKFDACGITGEEVKLFQISAGMDRKGFEKLKGHLASVSVSSVLIGMESTASYHVNLFSYLVSEGYKVILINPLLISNYVKMQLRKTKTDKKDAVVIAQFLLANGDTLIQRITPSLISDLRDLSRQRESLVDEMTSLKIEIKQLLNITFPELEHMVGIFTKSILNLLQQYPSAFALRDADLDQLSQMLIADSYGHKREAFAAALIKAAHSSIGINSTAKEIILKQKIALLLHLEDALQEITGMLIEMARKLMEEDINIMTSIKGIGDKTATNFLVEMGGDINQFERSGKIIAMAGLDPAVYQSGKHEGKGRITKRGNRHLRRIIWLMTTKVIQYTDIFNAYYQKRRKEGLPYKMAVLATTHKLIHVIYAMLTQRTTFCPQMNS

SEQ ID NO: 372857 - protein, 383 aa, unidentified
MEALLYCACGLDVHKDIIEACILRGLDAEPEILRQSFGATKPELQRLMKWLLENDCYTVAMESTGVYWKPIYQILETESVYLEQIWVVNAHHMRNLPGRKSDVKDAEWIATLLRHGLLEKSFVPSIAIRDLREAARLRRTFVQERCRYVNRLEKFLQAHGFKFSSVMSDILCMSGRKLLHILCETGTLTEKDVQENCRRLRRSSDEIAAAVCGNLTLAERRLLGRLLRKLDSCQEDIDGILEDMRLLCTPFQEQLAIVDSIPGFDQESSMEIIAEISAAPQEHFSTPQRLCKWAGVIPRNEETAKKIKSRKTLHGNSYVKAILCQAAWAAVKVRGSPFHSWFWSHQRKIGQKKAIIAVARKLLMLLYLLLNTGQMYRQPVTET

SEQ ID NO: 372858 - protein, 367 aa, unidentified
MNKTIVHHEGAAALTVAGHEVKSLPATIKLGVDVHSRLYVVAVQYDESLPKPPRRFVPQEFVPWVESLLGAGHAVHMVYEACGFGFGLHRQLTAAGAHAYVIAPRKLDERRSGVKTDARDATALCQRLSRYLEGNTQELAVIRVPTEAEERARHVSRQREQLVQHRQKLEAQGRGLLVNHGLPAPAHWWKNQTWSRLLKLLPEWIGAHLEIYRPILLAVHRQIVALSTALEAAAPAALPQGLGKLTSVVLSREVCDWGRFKNRRAVSSYTGLCPGEHSSGSQRVQGSVTKHGNPRVRAALVECAWRMVRFQPQYPPVKKRLLVLAKGSKATGAARKKAIVAVARHLAVDLWRLHTARCSAAQLGLNA

SEQ ID NO: 372859 - protein, 312 aa, unidentified
MVTIGLDPHPDSHTVAALDENGTTLASLAVANNAEGLMKLHQFALPFPKRRWAVEGAANRFILPFVCELLKQGETVHHIPPNLTSQYRARLSRKKNDVVDASNAARALLANPELPAFRPSEGQREFQDLTRTQRRLSEQLKANRMALQALDPSSSARSALTQVIHVLEEQLAELSKQMKTLVKTLAPALLELLGVGPVVASVILGEVGTIERFANEGQFASYCGAAPVERGSGKNSRMQLNHGGNRRLNWALHIIALTRSRCDERTRTLLAKLKARGKTQRASLRVLKTYIARELFRHLKHTTSPAIAAAKT

SEQ ID NO: 372860 - protein, 342 aa, unidentified
MTQFTFFVGVDIASASFMACVGSAPWKLTVKPEKFENIEDGFASFLNWLKNNSLLPEKTVVCMEATGVYSEGLAYFLFANGYTVAVEPPLNIQRKFPANASKTDELDCQYIAEYACRYVDKLAFWKPRADILEKVKVLLTTRQHFSVQLTGHKNALIAVNRKKVTSELAKQVHQAMIGQINTHIKAIDQEIRRLIDDDPSFKQTFLLLMSVPGIGLQLAAYLLIHMQATLDPKVLAAFIGICPLKHESGTSVYSAPTSRHYGPPVMRKLLYLSACSVRTHKKQFQQYFFRKVAEGKHKKVALNNIENKILKIACAVVRSQKPYIPNYVSVNPLVLQKTLTAS

SEQ ID NO: 372861 - protein, 345 aa, unidentified
MERASIIGLDLAKQVFQVHGMSRDGRKAFSRKLERAELHAFFKKQKACIVAMEATSGSHFWGREIEKLGHTPRLIHAQYVKPFVKRQKSDALDAEAIAVAAAQAGMRFVPIKSTEQQAIITLMRARTLFIRQRTSSINALRGLLGEFGFVVPSRTTNIVKLAQLLDAEEKRVPEPARTVLRDVYQHVEAVNRRIAHMERLINEQIKLDTAIQRLMTIPGVGKITAATICASVGDPKLFKSARHFSSWLGITPRSFSSGGKQIFGRISKRGNAEIRKLLVLGAFPVVSAARRNGSPQPWIQSLVQRKPYKVAAVAVANKTARIAWALLAKGGEYQSNGRGLDRDPL

SEQ ID NO: 372862 - protein, 354 aa, unidentified
MRAKNIDFTGKNIYIGLDVHKKSWSVTILLDELEHRTFSSPPVPEFLNKYLRKHFPGGRYLSAYECGFSGYVHHRKLNELGIENIVINPADVPSSNKEKTTKTDKVDSRKIAKGLRNGELKGIHVFDRVHEEFRSFVRQRTIFQKDLRRSKQRITSSLMYHGIEIPEDFDEASWSNSFEDWLSGLEMSTTNGTQVLENLYQNYLFNKNQIRILAIDIKKYARRHYKEDYFLLRTIPGIGQLTAVAIISELGDITRFKNLNHLASYVGLMPMSYNSGESEQSRGMTYRANNWVRTMLVEASWQAIRKDPAMMQYYLNHAGKINGKKAIIKVSRKLLNRVRFVLKNKQPYELSVQD

SEQ ID NO: 372863 - protein, 384 aa, unidentified
MQKDNILFIGLDTHKEQTQVSYTLDHRTAEVNDLGRIQTTKTGFVKLARQLQSKYPHATLHFVYEAGPCGYWIYRLLTSLGHCCFLVAPSLIPKKPGDRVKTDKRDAQNLTRLLKNNDLDPIYVPEPEDEAVRDLSRAREVAMRDLNDAKHQLKSMFLRNNIRYTGSDSWSLKHLRWLTEIVLPHPCQQIVLQEMIQTISERMTRLKRLDNELTHQVKQWRYYPVVKAIQAMRGIRLLIATGMIAELGDLSRFDSPRKLMKYVGLTPSEHSSGNTRRLGAITKCGNGRARRLLIEGAHSYRHTAKISKEMQLRQEGLPKAIIDKAWEAQLRLCRRYQRLMMRGKPRNVVITAIAREMIAFVWSISREVVLPRIDPRTRLSRVPA

SEQ ID NO: 372864 - protein, 337 aa, unidentified
MSYLGIDLHTNSFTVCRRTKQGKETINEYSIVRIDRFLKTLRKDDLLAVEATGNTAWFIEQMANRVKKTVVVNPYQFEVIRKSVKKTDKHDAKTLAYFLSNDMLPESRMKTKENAQLHSLAVTRDKLVKQRTALINKIHNVLNSHGLKFKKESLGSEKGLNAVWAYDWDTIVKIELEVLVSQIRSLNENIKRLDKDITTQGEKLKGYKNLVSIKGIAGRSATVLLSVIGDVKDFADENKLAAYFGIVPRVSDSNETVRHGRITKRGDKLARTTLVQCTLVAKRYSPYLRNYYERIKKHRGSGKAIIATARKFLGIIYNTLKNGWLFKDFPNFVIANT

SEQ ID NO: 372865 - protein, 367 aa, unidentified
MMAWMAPLRHLSAKLLSDRISSEWEPSMGEVTTIGLDLAKQVFQVHGVDAKGATVLRKQLRRAQVLAFFSRLPPCLVGLEACATAHYWGRELRALGHEVRLMPAQYVKAYIRRNKNDAADAEAICEAVQRPRMRFVPVKTAEQQASQLLHRGREQLVRQRTMLVNALRAHLAEFGLVAAQGLRNVGELIAIVRKQDDTRVPDMARQVLQVLANQIEQIEAAIAALEKQLLAWHKTNAVSQRLASIPGIGPIIATAIATTVADPNVFRSGREFAAWLGLVPRQNSTGGKPRLGGITKRGNRYLRRLLINGASANLLRSKATKADPWVIGLRRRRPPLVVAVALANKTARIAWAVMLREREYQPRAVAA

SEQ ID NO: 372866 - protein, 377 aa, unidentified
MKRIKFVGLDVHAETIAVAVAEQDGDVRSLGVIPNREESIRKLVKKLGPVEQLRFCYEAGPTGYVVYWQLTALGAKCEVVAPTLVPVKSGERVKTDRRDALKLARNYRAGELTPVWVPDAAHEALRDLVRAREAAKKDQLRAKHRLGKFLLRHGRRPPTGVKPWTLNYLSWVKHEVHFEQMAQEATLLDYLNEVEHAELRIARLNLAIEEAVKLTPPKMRAVIQALQALRGIAQVAAVSIVAEVGEVSRFTRARQLMGYGGITASEHSSGEGSWRGGITKTGNAHLRRVVVEAAWAYRHRPSLGVALRKRQEVVSEEISEIAWKAQHRLHTRYRKLTARGKDKGKVVTAIGRELLGFIWAIGVKVEAAQKLTDRQAA

SEQ ID NO: 372867 - protein, 287 aa, unidentified
MESVKYLGFDVHQSTISVAVVNADGKLVMQSVIATHAATILDFIHGLRGTLHLTFEEGTHSAWLYDLLARRVARVVVCNPRQNALLKAGNKSDTGDARKLAELLRAGLLAPVYHGEGSTRTLQELVRSYAALTEDTTRVMGRVKALYRSQAIACAGKKPYGRRHRREWLSKLSEAGLHRRAERLYEELDALQGLRRAAKRELVMESRKHAAAKLLRTVPLLGAIRAAWLIGRVQTPHRFRTKRQFWAYCGLALETRSSADYRFQDGQLVRAKKPVFIRDSTATTITI

SEQ ID NO: 372868 - protein, 438 aa, unidentified
MTSANALSAASIPNRNRHLFMDIHPPFLYQATVGIDWADQKHDVFVRLANGNSYRRKIDSRPEAIQEWLLELRSACAEGKIAIALEQRRGALFYQLCAHSNWIDLYPINPHSLSSFRLTFFSSRAKDDPIDGQLLEELVRTHHDRLRPYQPESATERKLYLYCRQRRSLLDIATKAELKLVSTLKQYFPVTVSLFAAIGMKSDIALDFLSRWPTLHDLRRAKVHTIRSFFYAHNSRSQSLIEKRLHQIAEAHEVTDDCALIEPLVLTAKCLVAQLRQFNEIINEFDRKIRELFKSHPDHFLFETLPGAGEKLAPRLLSLFGSDRSRWTDATDLQKYSGIAPVIERSGKSLWVHRRLSRPIFVCQTFHEFAQQSTRFSSWADQFYKRQREKGKSHHSAIRSLAFKWIRIIFACWKANKPYDESLYINALAKRNSAPSST

SEQ ID NO: 372869 - protein, 497 aa, unidentified
MKAKKHKARSNQNTRISQAMQAPEQMDIVNRHAAGIDCGAREHYAAVPPDSVEQGEPIVRSFSAFTQGLDALVEWFKVCGVTTVAMESTGVYWIALYQKLEAAGFEVFLVNARHIRHVPGRKTDVKDCQWIQRLHSFGLLNASFRPEDLICRLRSFQRHRLNMISAGGAEIQHMQKALQQMNLHLHHVVSDISGVSGLRIIDAILAGQRDPSQLAKLRDHRVKSTLGQIEAALVGDYRPEHLFVLNQNLQAYRFYQARIEECDREIETLLEQLVERFESSSRLPKADASQLQTPKDQALQSDQTPQSPTPGPAKQKRKRKPRANEPKIDLAGYLERICGVDLTQVIGLNVLSVLLIVSEIGVDMSKWRNAKAFCSWLGLCPGNKISGGKVLDSRSCKVINRVATALRLAAQSVGRTNTCLGIFYRRKKSHLGPAKATTATARKLACLIYHLLKYKDQYREPDPVTYQLKLEKTILHKLQQQAASLGYQLLPSALVPA

SEQ ID NO: 372870 - protein, 466 aa, unidentified
MRILALDLAIAAEHKALLADAQGQPLGPIRSLRTSASALAQLVRQAREGMAAEEELLLVMEPTGMVWFPIAVWAQRQGGITTYLVNTQQVADLRRYYHKHAKSDRIDVRVLVKLPVVSPEQLHPLHLPSGGPFALQRGVKELNALMTLQIALQQRIRAIDQFGWPGLDALLSEPFAPPARWFREHWYQPAQVLAAGVSTLQAAWQTAAATRGGTAEDTEWLAALVRLAEQTLALYGAEGAYLDYAALQAEVTRHQALLQMVETQHHTFQLKSVRPLYRRLHPSRHLETLKGVGQDSAAVYLSFIGDPQRFPDHRHFRSWTGMIPGSRQSGTHEAQGMHITQAGPALVKKFAYLDAETARQWDPQIAALYYDQMVNHGKHHNQAVCCCATHLLDRVWTVLKEARPYELRDVDGTPVTVAEAREIITQRYTVPKEVRQHNNRRNREKRMARRAERQRESRASVVRGKA

SEQ ID NO: 372871 - protein, 408 aa, unidentified
MRTTVGVDVGCHRHRVAIADPGGKIVEEFDLPARWEGFRYFFARLEHYRRNYGVPVVVAMEGYNGYARPLDREIQKRGYTLLNVNNLKLRRFKELFPSPAKTDAIDARKIVELVRLQGSLPRSREILQEVSEVPEEHRMLKRLTRRRRQLVDEKVCLLNRMQSDLQAVSPGLADLVEYKDGVAFLRFLSCRNRLEQLKSIRKESLLKIRGIGKSFTGKVQAWQKKACFSEEASYVGPMIIEDARRILELKERIAELEEQIKELSESSPLGRRIGSIPGFGVVSTGELVGEIGTMDRFDSESSLAMYLGMAPLDNSSGSYQGTKTARQVNRRARMAMMTATMRHIPRVEESRSYYEKKRNEGKTYHQAVRATGRHLVRVIWSMVRRGEDYHIRQLHHLTENSPESVASS

SEQ ID NO: 372872 - protein, 338 aa, unidentified
MRYVGLDVHWRQSSICVLDARGRKLSMQTIRGGWSKVLEELGKTKKPFAICFEASSGYGYLFERLETIARRVVVAHPGQLRLIFRSKRKNDRVDAEKLAKLLFLDEVPPVHVPSTEVRSWRSMIEHRRKLVAEQTRAKNGIRSLLRSQGIEAPRGLWTRRGLAWLASVQLATDLDELQRDIMRERLESIASMIQRVERVLNRKGAAHPGVQLLRTIPGVGPRTGEAVVAYIDKPNRFQRNKAIGCYFGLIPKQDASGRSNRLGHITREGPSVVRSLLVEAAWQGIRLCPRIREVYERIMRGDKERKKIALVATAHYLIRAMLAMLQTGEVWRESAEAA

SEQ ID NO: 372873 - protein, 354 aa, unidentified
MLAELVDHVIGVDPDRDWITVAVLDARTSGVIATDRFTARRDGYRDAVLWADAYTTASERARVIEGTASYGRGLTMALQRSEELVVEFDRPTRKATNDGAKSDALDAIRAAREALGRDKLAQPRAHDGIREAIRVHTVARAAAVRAHTAAINELKAFIVTADEQLRAELRGLRTSKVVARCSRFRDSAARPIDERCTRNAMRALARRAQHLGAEIADHDTILKQLLDRAAPQLIAERGVGYVTAAAFYLAWSHPGRCHSEAAYARLGGTAPIEVTSGQNQDRHRLCRGGDRQLNRALYLVALTRQRCCPDTQDYMTRRTSQGKTQRETTRCLKRFIARRVWRLLEHPETHLDNT

SEQ ID NO: 372874 - protein, 406 aa, unidentified
MNYLGIDVSKNNSRYVLLDNDGEKAAKPFTFDNNQQAFAKLLERLKELNIQPNGLLIGIEATGIWWENLYCFMTEQKFKVIVLNPHQTNKFREALRLKAKTDDIDAYVIAGLLRSGEYAASYIPEETIQILREIVKLRHQLVTNRQSFERQAHALLGLLFPEYEKTAIKNPFGVASLAILKAYPTAKHLAEAKPKNIEKIVRSIVGNNFDIAEIQTLIETARNSIYSGRAKDARGMNLNILLTHVETLHQSIAQLDQRIDDILSPQNSNDANSFPGANLLSIPGVGPKTLAAILSVVGADGSAYPDGKSFIGYIGFFPKIYESGETRRDNIISKRGPNYIRRALYLSAVACLKHNPELKALYDRKISQGKKPKQALICVAKKLAHLCLSMLQSGEFYNPARVFMPA

SEQ ID NO: 372875 - protein, 341 aa, unidentified
MNIKRVGIDLAKQVFQVHGVDHHEKVVLRKQLKRGQFLSFFTELPPCLIGLEACGGAHHWARELQKLGHTVKLMAPQFVKPYVKSNKNDANDAEAICEAVGRPTMRFVSIKTVSQQDLQAIHRIRSELIKRRTAKVNQIRGLLAEYGLVVGQQVNTLRRALPGLLEDAENGLSFDFRALLEELRQDLIQLDKRTVEIDKKIHALAHADPVSKRLQGIPGIGPIIATAIICAVGEGKQFKRGRDMAAWLGLTPGQHSSGGKDRLLGMSKRGDPHLRTLFIQGAKSSLNAAGKKTDPRSLWLNNLCARRHKNVAVVALANKNARIAWALLRNGTDYLPEGVTR

SEQ ID NO: 372876 - protein, 332 aa, unidentified
MENFYFIGVDVSKKKLDFCIMFEGKVVHEEETANHQSAIMSLLHHLEEDYGIDNTRMLVCAEHTGQYTFPLACACKAVECRLWLENAAEIKYSSGVQRGKNDKVDAKRIAIYASRFQDKVHYYERPTEDIERLKQLESERTLYVTDLAKYKGQMKDQKDYMPKALYERKMKRLQALMDDLEEAIQSITDEIDEVIASCLVLSRQRELLMSIDGVGHVVATNMIITTEAFTRFDDPRKFNCYAGVAPFSYSSGSSQHSKARVSHRADKVMKRLLHLAAVAVTHRIGGELKKYYERKVAEGKNKMFVINALRAKIVARMFAVIKRNEKYKPILS

SEQ ID NO: 372877 - protein, 421 aa, unidentified
MKNTAARKRKQVPEGYLIIGVDPHKKKHAAVAITQDFTIHDRFKFDNTREGLEFLLRRIRIEMVKSNCRGVMFAIETGGHYWRNVAYYLDERDIPFRFINQYTLKRRREGKDLNRRKNDYRDSEVAAQLLCTGEFVESVIPQGVYAELRTAHNAYRRLVKERTRIINLVKGLLDGLFPEFTQVFKDPCGLTALSVLSTGSIPGVIAGMTGEEFVATIEAKHRGRLMRKKLMALHYAARSSIGIAAGAKSLSSEISFLAEKHEFIRGHICIIERTLVKLVNEAEEGKYLLSIRGLNYIAVAGLLAELGCFKSYRSAKQMIKLAGSNPTESESAGKKKSRTPMSKQGRPVLRYCAWTAVIPMLRFNSDFRAWAKQRRERPAHANPLGGREIVGAALNRLLRLSFALVKNQTYYRSPQLVQVTG

SEQ ID NO: 372878 - protein, 346 aa, unidentified
MAHYAAFDVSDKETAIHVLDEHGKLVWKGKRPSEPEALAAALRRHAPELVRVGLETGRLTPWLFHALKGLGVPVVCLDARHARAATALQRNKTDARDAETLAQLVRTGWFREARVKSWAAHAVRHLVGARAQLVGMATDLSNQIRSLLRTFGLRVTGLAGGTFERKVREQITGSPEVAAVAEPLLAAWRAMRDQIAALDRKLIEAARGNATCRLLMTCPGVGVVVATSFAAAVEAPDHFRRSRAVGAYLGLTPRRHQSGESDHSAGVSKRGDKLLRSYLFEAAACLLIRVQRPSALKAWGVGLVQRLGFKRAAVAVARKLSVVLHAMWRENRPFQAWPTPAVAAAA

SEQ ID NO: 372879 - protein, 319 aa, unidentified
MSSAASAVHVGIDVAKARLDLCLLPGGQTLSVGNDDDGIAQVVALLRQQSAVALVLLEATGRYERRVASELLEAGFRVAVVNPRQARDFARALGKLAKTDTIDARTLAQFAQLGHARLCEKQPQNHTLLDDLVTRRRQVTQMMAMEKTRAQIPQDKATRAMIAKVIRLLEQQREDLDRRIAELIESDDDWRNKRDLMSSVPGVGPITASQLVADLPELGKLNRQQIAALVGVAPINRDSGTLRGKRTIFGGRASVRSALYMAAFCAMKFNPIIRRFAERLRAAGKPFKVIVVAAMRKLLTILNVMLKENRPWDANTQMA

SEQ ID NO: 372880 - protein, 354 aa, unidentified
MNTTQNSTKSKIVKVIGVDLAKDHCDVIGYDENGKICLRLDGCSYAKLREILSNLPQAVVLMEACKGSMFHARSIADLGHEVRLVKGTDVKALRNVNHKNDLRDAAYIANLYFVPGIKYVYIKSQQQQSLQFLQNEYKSLQELRIQAGNQIHAGLEEFGCPVRKSSKFIKTRMVAHLEKHAELIPEDVMASFKRRREIWLNLLQQEEEAKRRLEQVAATDANAKRIMTVPCVGPQTAVGLLVHVGVDFGRFKNSRQFAASLGLVPKQNSTGGNNTLNHITKCGPKRLRSNLVQCAQLVLMYAEKWKGNFGDWVRKMRDSGKKHGVIVCAIAAKLARIIYRLMKDKVDYTPVLSC

SEQ ID NO: 372881 - protein, 362 aa, unidentified
MSKTEEKRRLCVGVDLHKTQFTVSALTEDGEVMLQDVYRTTPDGYSEFIEEMHRYEEEDGCSIELAVETTGNARFFKNQMEKEFFDVTVVNTNKFKVITYSTKKTDANDALTLAMYLQKEMLPEAHLCSQTSEEIRRMLKTRRILVQSSVKIKNQIHGMLLGYGIETNAAQFQSKRKRQELMNDLANHYYSDFTASSLEVMLNILDVLADQIKDVEEQIETMVEDNEDVELLKTIPGVGKIGAATIASYTEDLERFDGDFKRFAAYIGIVPSVHNSNETVHLGHITKHGPQELRTAFVQVALGMIRASKQTSNWRLIEDYRRKKTDKGSGRAIIAMTRKIARIVFVMLENREPFNPELMLSK

SEQ ID NO: 372882 - protein, 400 aa, unidentified
MAVAVGVDVAKELHWAAIVHTETGKVLASRRVNNDPEAIQTLVEDIRATEAEHGPATVAIDVLGGIAGLLQVMLLDAGLRLVHVSGLAVNRARQATRGGEHKSDPRDAKVIADQIRLRGDELRTVEPAGELDAELRLLVGRRRELVVEQTRRINRLRDLLASIHPGLERVIDATNKADLALLARYVTPAEIRKAGRRRISDYLRHVGGLRATSIDALAEQALASAQRQRVTVPGEEVAADLVRDLATEALTCRTKLTELDKRIAEALDNPPDAALVQSLPGMGATLTAEFLAVAGGTTRFPTGDQLACPAGLAPVLQQSGKVHYLRRATSGDKTLKRIFYQSAFCALQRDPASRAFYDRKRAEGKRHHQALIALARRRINVLHAILRTRQPYRIDHAVAA

SEQ ID NO: 372883 - protein, 390 aa, unidentified
MIDCYNQKLGEITFPNRPADFPKLVAKVKKCNTDGKTIVFGLENAYGYGRALAVWLIDKGYLVKDVNTAISHRQAKHRGAMYRKSDSDDAEAIALATLNMLDKLPDAYPNDAYWSLGQLVHRRDNIMKQRTRLVNQLHEQLCIAYPSYKQFFNDISRPTALYFWEHYPSRKYLKGKSVEDLRAELVPVSHNKCSTRTCEKILDAIAGDKVKNNAYQDARDMVTLSIVSDLQHYDKQLAEVDKMLEQMYKMLGCTLTTIPGVNVITAVKILAEIGDIKRFANANKLAQFAGIAPLHLSSSGKGKDLATKQGNRRLQATIYFLAIQMVQISSKGTPRNPVVRAYYEKRKAEGKTSQQALICISRRLISVIYGMLKNGTEYRMPVVESAGENR

SEQ ID NO: 372884 - protein, 389 aa, unidentified
MGLSSGEVLEEFEIEHRLEGFQEFFSRIEKHNLQQGYSVAVAMEGYNGYARPLDSMVRQRGYRLYNINNLKLARFKEIFPGSAKSDRIDARKGLELFQLSDHLPLAKEVLQEVSGTPHENEVLKRLTRRRRRLVNERVRVVNNLQADLQAVCPGLLEITSEASNQWFLNFLLSADTLPQLARLRKATLLKIPAVGRKYASLIEGWQKRAHFGAEVEWVSEMIQEDAQRCLDLGDKIKALETKIKQVAKDSKIAKILLSIPGFGAVCTSELAGEIGTIERFSKEGSLALYLGMSTLDNSSGKYQGSKAPKHVNTRAKAAMMIALDRHRKHVPESQRYYEKKRSEGKKHNQTIRALGRHLCRIIYKLLKAEREYQIRPEKRNTKTKVRSRS

SEQ ID NO: 372885 - protein, 376 aa, unidentified
MTKLRFLGLDVHAETIAVAVAESGEEVRSLGTIPNRLESIRKMIGKLGPVKELRACYEAGPTGYVLYWQLTTLGVECQVVAPTLVPTKAGDRVKTDRRDAEKLARCHRAGDLTAVWVPDEAHEALRDLVRAREAGKKDQLRARHRLSKFLLRHGCRQPDGMKAWTKTYLAWVKSHVHFDQPALEAALQDYFHEVEHAAARLERLEKSLDEAISKAPEQIRAVIEALQALRGVAQLTAATIVSEIGSFSRFEPRRLMGYSGLVASEHSSGNRLKRGAITKTGNAHLRRVIVEAAWAYQRRPWIGGYLLRRQRDLKLTEEVKEIAWKAQHRLHKRYVKLTAGGKNKNQTVTAVGRELLGFIWDIAVRTESAGEPTRAA

SEQ ID NO: 372886 - protein, 349 aa, unidentified
MRSFTPPAGTRFYAGVDLHARAMFPVILDRDGQVVFARNLPANPDAFLRAVAPFRDGLLVACECMHCWYWLADTCRDHDIPFVLGHAWAMKAVHGCKTKCDRKDAEAIARLLRGGNLPPAYAYPRERRGLRDLLRARLRLVRQRAELYGHVHTARRQANLPPVSSDVKYKSKRDGITADIADPFVRRRVETHLALLQPLDTTIRRLEKEIEDAADQLFPTELAVLQSTPGVGKVLSLTILLEIDTSDRFDTRQQFCSYARLCGAVQTSDNKRTGAGNRKAGNAWLKWAFSEAAVLSAQKDERVGALLNRLASKLGKAKAYSALAHKLGRAFYHMLHTKEVFDVHRFVRH

SEQ ID NO: 372887 - protein, 409 aa, unidentified
MDVLFERCCGLDIHKRTVMACLVVPGPTGAPTKEVRSFGTMTDDLVQLADWLLAASCTHVAMESTGVYWKPVWNLLEDQFALLLVNARHVKAVPGRKTDAKDCEWLADLLRHGLLRGSFVPDRGQRELRELTRYRTSLVQERSAEINRLQKTLEGANIKLGDVATDIMGLSSRQMLAALADGETNATAMAQLAQGRLRDKLPALERALAGSIGAHQRFLLARQLAHIDFLDAAIAEVSVEIAERLRSVANELERLASIPGIGRRTAEVLIAEVGTDMDRFPTGAHLASWAGMCPGNDESAGKRRSGKTRKGSPWLRSALIEAARAAGRSKGTYLAAQYHRLAARRGTKRAAVAVGHTILLIVYRLLSEGDIYRDLGERYFDERDRHAVERRLVARLVGLGYKVSLDPAA

SEQ ID NO: 372888 - protein, 418 aa, unidentified
MDRTKYIYIGMDIHKETHTAVLLNYLEEKLGEIKIKNTLQGFHKLEDYILKQKGELIPIFGLEDITHYGRNLSIFLLDRDYPVKEVNPSLSYMERMSYASTRKNDTWDAQCISAVLMRRSHLLQDANPQDYYWTMRHLVNRRNALVKASTKLMQQFHEQIQTAYPNYKGFFRELDCQTSLTFFEHYPSSKHLENISEEELGAFLRIPSNNSCSTNRARKILDLVAEETTKERDYQFARDTVIQSITRQLRAYQREIKELERTERQMYQELGYQLETMPGIDIVTACALVGHIGDIQRFSNGDKLANYAGVAPLRFNSAGKGKDLQNKSQGNRKLYSTLYFLAIQQIYLTNKGEPRNPVFRAYFERKVSEGKTKIQALICIMRKLIKIIYSMMKHKTAYDLPKIEEKMASDEKCAKMLV

SEQ ID NO: 372889 - protein, 343 aa, unidentified
MQTVTTIGLDIAKSVFQVHAVDAAGKVILRRQLKRRHVLAFFEKLPPCLIGIEACASSHHWSHELQALGHSVRLMPPAYVKPYVKRQKNDATDAEAICEAVTRANMRFVETKTADQQGGLVLHRTRHLCMRQQTSVINAIRAHLAEFGVVAPVGRNGVEELLRVVADPDDRRVPEVARVCLVALGAQLRRLKDQVLEFDRMITAWHRSNKMSIRLDECPGVGPVLATALVATVADPKSFRSGRNFSAWIGLVPKQHSSGGKDRLGSISKQGDRYLRSLFVIGALAVIRYAKVHGTRHRPWLTALLARRPAKVAAIALANKIARMVWAMMAKCERYKEPVALAA

SEQ ID NO: 372890 - protein, 351 aa, unidentified
MLIIGCDFHTRFQQIAMMDGTTGELVKRRLEHGTGEAERFYAALVAPARVGIEATIATQWFEKMLTRYGHELWFGDAAEIRAAMVRKQKTDDRDALHILDLLMQNRFPRIWVPSAAEQDVRQLVRHRHKLVRLRTSVMNQLHALAMGQGVCLRKKLWTRVGRQKLESLQLDPWASRRRRELLELLDRLDPSIEELNRAVISEAESRPTAVCLMQQPGVGPVTALAFVLTVGPASRFANSKKLVSYLGLNPSEESSGGRQRLGAISKQGNTMMRSLLVEAAQTASIYDPELRRDYQRLKFRRGHSGLAKVAIARKLAVRLYWKLREAAQPVPLAPMQGSPALSVVGESLSSF

SEQ ID NO: 372891 - protein, 407 aa, unidentified
MIFVGVDWAEAHHDVCVLDTEGAVLARLRIPDSLIGVSELHTLVAEHLGDDDDPQSVIVGIEKDRGLVVTALLAANYQVFAINPLAASRYRERHHVSGAKSDPGDAKVLADLVRTDRHNHRAVAGDSALSDAIKLLARTHQNTIWSRQRHVNSLRSALKDFYPGALEAFGTDLSGLDAVAILAIAPTPTLALRLSRAKITSALRRVGRQRHLEERTERIYEVLQRDQLHQPTTLENAYGVTTETAIANIAQLNASIAKLETSLSEHFKQHPSAKVILSLPGMGTVLGARVLGEFGDDPNRYSDAKSRRNYAGTSPITRASGRSRVVLSRHARNKRLASALDRWAFSSLLPSPGARHYYDELKARDKHHRKAIRHLANKWVGILHGCLESDCPYDENIAWLTREERAA

SEQ ID NO: 372892 - protein, 354 aa, unidentified
MTLTTTHPIRTVTIGVDTHQLVHHAAAVDQDGRMLGAREFPADRNGYQELLDWAASFGIINAFGVECTGSYGAGLTRHLLAAGIDVVEVNRGHAQVRHRVGKSDAVDAEAAARKVLSGECSDPAKDTTGAVEAIRNLHLVRDSAIKARSAACVQLRDVLLTAPDHLRTRLTAKTLEGKATQARALRPDLNRIHEPEQAVKYALRELGRRIYELTAEINEVDKHLTQLVSAVAPNTLALPQVGPVSVAQLLITAGENFDRFRNEAAFARLCGVAPIPVSSGKSHRMRLHRGGNRQANRVIYLITICRLRYDPRSQAYRDRKRAQGHSSADAIRCLKRFIAREIYYSLKRDLSPAG

SEQ ID NO: 372893 - protein, 332 aa, unidentified
MQMLAIDLGKQSFHIYGITGDGEVVSRKVSRAKLSDAVIKLQPRSVAMEACASSHHWGRVFEGQGYTVHLIHPRFVKPFVKGSKNDAVDAEAIFEAANRPTMRFVPLKSVEQQDLQALHRTRDRLIVQRTALINHTRGLLAEYGVVMPVGASRFRLQIDKMVETAELSDLAKNLFLMLAEEYRGLDARVSALDDMLAEICREDERCKRLTTLPGVGPIVATTLIAAIDDGRHFASGRALSAWIGLVPRQYTTGGKPRLGGIGNRANHYLRRQLIHGARSALLRIAKHDDRRSKWAQELQSRAGHNKTLVAMANKTARMAWAMLRSGESYKMA

SEQ ID NO: 372894 - protein, 324 aa, unidentified
MVTTALGIDVSKDRLDAEIAACGKPRSKYFANSPDGWRQLLAWLKELKIKRVHACLEATGRYSLGIALALWEAGHIVSIVNPAQIRDFARTKLGRNKTDAVDAGHIRGYAEIFKPQPWTPPSPAMRRLGELQTIRAGIVSSLTEWKNRCGSGLADDTALALVKATITHFDAQLAEVDKAIAQTVDNDRDLSAKRDLLLSISGVGEVLAGLVLSELPGTDILRSGTQAVAYVGLNPRSHRSGSSIDRPTRISKIGNATLRNALYMPALSAMQHNPVVAALAKRLKAQGRLKGKQIAVAAMRKLLVLCFGVLKSGKPFDPALAMPN

SEQ ID NO: 372895 - protein, 429 aa, unidentified
MRTESTPGARGPVFCGVDTHADSHWLHVLDWRGRKVLSRRFPADAAGYEALAGAIAAAGEPACVAMEGTSSYGAGLTRHLASLGMPVREALSPARMQRRRPGQGKCDEADAERAARAAMSGSKLGTPKSQDGWVDGVRCMLAARSGAVKARTSAINTARSLLATAPEGLRSRFRGMAGPRLMEELPSVRAEGALGAALGALADLWAAARDAALDMERAIEASLEENCPALLAMYGCGPVSAAKLAVAAGDNPGRLRSEASFAAICGACPIPASSGKTVRHRLNRGGDRQANSALHEIARQRVMRDPETAEYAERARARGKSDREVMRCLKRYVAREAYRALMRPHEIRRPEDASELVAARRAARVSQVRAASILGTSEKHISMLERGQRELKPIRRAYEAWVEAGLPLDWDRQAFEAERKMDSKKHLAK

SEQ ID NO: 372896 - protein, 415 aa, unidentified
MESVICVVGVDWSDQKHSYAVRTASGQEEEEEGEFGSDPEAVHEWVRRLRPCYGQGKIVIALEQSRGALMYALSAYDFIDLVPINPRAAKAYRDSLHLSGAKDDPVDAALIRDFVWNHRGQLRVWHGDDPITRKLRLLVEGRRDLVDQRTATSHALNAALKQYFPHILEWFGDGGSALGRAFLGRWPTLEQARHARADAVRGLVRAHSRKSAAEIDMLLLKIRSAVPLTTDPAIIEPLALRVVTLVAILDPIDEHLKQYETAIAQVWQSDADRELFESFPGAGPVMAPRLAVALGSDRSRFNDPSELQTYSGIAPVVERSGKQCWTHARWQCPKFLRQSFHEFAECSIPHCAWARAFYHQQRERGAGHHEAIRALAFRWIRILYRCWKSNTLYQEERYLESLKRRGSPLMMRLAA

SEQ ID NO: 372897 - protein, 429 aa, unidentified
MTATYATLSTVLVAIDISKHRHEVLISIPGKKRRRRLTIMNTLEDFQRLATTLASYELPVRIGFEATGNYHRALAHHLGLAGFVLKLVSSVGLARTREALHNSWDKNDPKDAQVILHMLEIGAVQFFHDPLVTGKADIQELSKTHEIVSRSKTELWHRILTHYLPLYFPEAERFHRSSRTDWFLAFLEKYPTPHMITALDREAFVADAWQVVGRKVSKERLLSDIYATAVDSVGLPVQPDSDAVRMFRLVLAEGRSLIRQRDEIESRAVELLSDLPDYQLLTTIPGIGPINAMTILAEAGDLRRFRHHRQFLKFCGMDLATVQSGMFRGQSRISKYGNARLRRTLWMAGQTAVLKRTNSFRDKFERYISKDRHNAHLRRKAYTAIAAKMARTVHAVVKNGAPYRPFFEGVSPGGRTSLCSSRGGSSLTS

SEQ ID NO: 372898 - protein, 363 aa, unidentified
MGTITVGVDLAKQVFSVCELDGGGRVKQRRDLKRDAFAAWLVQLPQGTVVAMEACSGAHHWARRCLEHGLVPRLMAAQFVKPFRKSQGNKNDRNDAEAIATAARQGNMRFVAVKTVDQQARLAWHRVREGYKAEGLAISNRLRGLLAEFGVVMARSDFALRRALADDAIRRQLPPMLQGLLDDLQQHWQQVRERIAACDAGIAAHAKADVRSQRAQQLIGVGPLTADAVVATIGDGREFTHGRQLSAWLGLTPTQHSSGGKQRLGQISRRGDSYLRTLLIQGARSSLQRANAVALEKATAEQIWIRGLSQRMPFGKVLVAIANKHARQLWAMLARDEDYDAEAWLRHPMVQRPARKKTDAVAA

SEQ ID NO: 372899 - protein, 312 aa, unidentified
MTRIICGVDISSLSLEARIGPEGAFASFSNNPQGIAALAAFCQAHQVELVAMEATGGYEQQALALLSEQGLPVAILNPRAVRRFADSMGQMEKTDRLDAGMIAWYAQTRHSQPVCLTSASQQQLRALVTRLRQLTEVRTAQMNQSRLVTDPAVLALIEELLAVVARQIRELETSIAALIAQDPLWQHLDRVFRTIKGVADRTVARLMAEMPEIGTLSNKAISKLAGVAPLARDSGNHQGKRAVRGGRASVREILFIVASVVGRHEPDFIVFQQRLSAAGKPRKVIRIALAHKLLVRLNAKARQVRQQLEAAA

SEQ ID NO: 372900 - protein, 354 aa, unidentified
MTEILKSMIAAIGIDIGKSSFHVVGLDGRGAVALRQKWSRGQLEARLANMPACLIGMEACVGAHHLSRRLRLLGHDARLMPAKYVRAYSKGQKNDFRDAEAIAEAVQRPTMKFVATKTADQLDLQALHRVRERLVSQRTGVINQIRAFLLERGIAVRQGRHFLRAELPGILATGCEVLSGRMVHLIADLAGDWRRLDERIEGLSGEIAALARQDAGCERLMSVPGIGPIISSAMVAAIGAGDTFTKGRDFAAWLGLVPKQFSTGDRTVLGKISKRGNRYLRALFVQAAWVVLIRSKNWERYGLKPWIEAAKRRLHRNVLAIALANKLARIAWSVLAHGRSFAAGKLVEAASLPA

SEQ ID NO: 372901 - protein, 401 aa, unidentified
MNSSTILYVGIDVSKDKSDICIKDNSGNDLIQRFKITNTKADLGKLYETIERIKSKTPGNSDVVFGMEATGIYSLPLYSALKRDGHKVKLYNPIQTNGFRKINIRKTKTDPIDSAVIADMLRLSEPPQVNEIKDLNLIQLRELVRIRHRLIEKQSLCKIQLIRNIDMIWPDYESVMPTVFGAASIAILKKYSVPSKVRAKSFEVFYNLVKKASRSKISQKKAEKIYAHAGNILTLPELDAIITIEIKTLITQLELYDEQIESVEIKIYQMMNSIESKIMSIPGIGDILGPTILGEIGNVDRFSNAKKLIAFAGLDPGVSQSGRFQNMTGPISKRGSPLLRQALFLAANVARQNDENLKRFYDVKISEGKHHFSALNAVAAKLLRIVYWVLKNNKEYQTQVN

SEQ ID NO: 372902 - protein, 381 aa, unidentified
MKRNKKLTPTSHEQTEAQAEVIKLGIDIHKTKYVVIRQIDNQAAQSPQSFSPDDFVVWAQRQRLLAKRVVSCYEAGCFGFVLHRKLAEVGVENYVVRPRNWDEYGSSVKTDARDARELCGHLDRYLAGNDRALCVVRVPTEEQEQARALSRQRETLAKERKRLQNVGTSSGLYHGVDVPANWWKPKVFAKLCTEIPEFLKRILEPFQQVLEMIDKHLRETTAREERKANRKIPVGLGALTTSILDQEFVDYTRFNNRGQVASFTGLCPRETSSGNKRQQHSINKHGNPRIRHMLLEAVWRMIQFQPDYKPVLHWNKRKASEPFGAAKKKKMAVAIAWQFAVDWWRIQTGRIEPEDVGLRIEFPSAYSTRALREGRVSKVYA

SEQ ID NO: 372903 - protein, 409 aa, unidentified
MTVVGIDVSKGKSMVAAMKPGGELVAAPYEVRHSDIELSHLALDVLCMEPDTRVVMEATGRYHEPVAALLHSEGIFVSILNPLLIKQSGAGSLRKVKSDPKDALKIAKYGLDNWSTLREYTPMEAIRQQLKLCARQCDLYNKNIVMLTNNLISLSDKTFPGVNELFSSPEKENGHLKWVDFYRTFWHCDCINRMSPDAFEERYKKWCKRKGYHFSADAADALYAASCGLYTTLPRDNNAKLLVTVATDQLIALRENQSKLETEMLNLCKQLPEYETVMAMYGVGKSTGPHLMAELGDIRRFPHRSSIVAFAGVDPGVVGSVKMQLSSVATSKRGSPQLRKALFQVVSAYVKRKPENEAVYQFYAKKRDEGKPYYVCTTAAANKFLRIYYEQCYAAAGVDRRHQQCGLLG

SEQ ID NO: 372904 - protein, 361 aa, unidentified
MTGTMTWVGMDVHARSTHAAAIDSMTGELTRRKFGPGVDEVIGWLQGLPGPVRACYEAGPTGYGLYRAAIAAGIAIEVIAPGKTPRGPSDRVKTDRKDAELLARCLLAGSLTRVVVPPPEVEAARELTRAHDACRRDLGAARNRVSKMLLRHGVVYPDASTWTARHRTWLSRQQFSETASELVFADLVAAVDGITARKLAIAGRLSELATDEQWWPTVSRLRAFRGLDTLTAFTVHLELGADWQRFERPTALSSWLGLTPSSSQSGESSRQGAITKTGSMLARRLLVEAAWHYTREPRLGVTLRNRQEGQPAHVLQISNRAQQRLYRVHKKMRARGKPGNVTVVACARELSCFLWAAATAD

SEQ ID NO: 372905 - protein, 409 aa, unidentified
MRNDASAAVFVGLDWAVLTHAVCIIDAAGSVLDRFEVTHDRDGLAELMRRLARHGQCLRIAIERPSGLIVDALVDAGHAVFPIHPNAVKASRPRYRSHGAKSDASDAYLLADLLRTDGHRWRPLAPQSDAIRALRALVRSRDDLIAARVAASNQLTSTLQAFWPGAACIFADVASPIGLAFLRRYPSPSSAKRLTAAQLQRFCKAQYYSGRRSGADLLARLRAAATGLVGGQTEQAMADVVRARVAVLVPIVTQIADLTRRIEQFMHSMPDGLLMMSFPRAGQVCAAQILAELGDVRERFPSADQLAAEAGAVPVTYQSGKTRSVAFRWACNHRLRKAVTCLADNSRHANDWARGIYQAARGRGCDHTHAVRILARAWLRVIWRAWIDRKPYDPALHGSAVALASTQGG

SEQ ID NO: 372906 - protein, 368 aa, unidentified
MTKSITFVGLDVHKNSIAVALADAGRNAEVRNYGIIGGSLDELDRLVKKLVATGKDLHFVYEAGPCGYDVFRFLTAKGLDCAVCSPAHVPKSPADRIKTDPRDAMMLARLHRAGELTYVFVPRADDEAMRDLTRCREDAKKAQRVTQQQLGGMLLRLGFRYPKDNWTKAHFNWLANQKMPTDSQQVVFQEYIHAIKETTDRVERLTKQIETLVPAWRMAPVVMALQSLRGVSTIVATTMIAELGDLTRFETPKKLMAFLGLVPSEHSSGEKKQRGKITKTGNGHARRVLVEGAQTYSHPARITRPLLKRQEGQSQEVRDIAWKCQVRLCARFRRLVAKGKSRNAVVTAIARELAAFMWAIANKTPITA

SEQ ID NO: 372907 - protein, 415 aa, unidentified
MTEFKVFAGIDWARESHQACVVDDEGKVLWEAKIEHTAEGLAELCAKLIELAGGEASLIGVGIETPNGIVVETLVSAGFPVFVINPKQLDRFRDRFAMSGAKDDRRDARVIADSLRTDRRSYRLLELEADAVVEIRELSRLHAELQQEYVRVSNRLSNQLFRYFPAFAKLTADDTGAPWALALWKAIPTPQDAQRRLERTVQSILKSHRIRRLDGQSVLQILREPAMKVSAATVRAACRHIKTLANQLQVLNTELRECRKELEQSLDRFAESETDAGKAGEQHTVTIAMSIPGIGPIILGALLAEGARALIAGDYEALRSLSGVAPVTKSSGRSRAVLRRYAHNQRLGNALYNAARIAAQCDPVFKAGYKALRDRGHTHGRAMRTIGDRMLAMMCSMVRSKTLFDPTRRKARAAA

SEQ ID NO: 372908 - protein, 403 aa, unidentified
MNAVGIDVSKGKSMVAAIAPGGKLLARPFEVLHTKSGIKELVSFVHTLGADTRIVMEHTGRYYEPLLQRLAKSGLFVAAVNPKLIKDFGNNTLRKVKTDKADAKKIARYALDNWCDLRQHTGMDTTRTQLKTLNRQFAFCMKQKTACKNNLIALIDQVYPGANTYFESPARADGSQKWVDYVLTFWHVDYVCSMTLSTFTERYRKWCHRHGYNFQPDKPRMLWEKAKDLIAMLPMDKTTKMLVQTSIAQLNVLSKTVEALRTQMIELAEQLPEYPVVIDMNGVGPTLASQLIAEIGDITRFPRRGSLTAFAGVDPGAKQSGTMQLRSNKTSKAGSPHLRRALFQIVSGLLMRSPDDAVYNFMDKKRSEGKPYYVYMTAGANKFLRIYYGRVNEYLASCPKDHE

SEQ ID NO: 372909 - protein, 337 aa, unidentified
MLPTRLREQNESDKILIKGDSMSVRRILAKTIDTDLEYEAIGIDLAKNCVSVALLTTDGEVVCIDRLDYSELEKSAQVLCPTTFAMEPCTEMNYLVQKLEAWGHRCLVIGGKNVQNYVENHYSGQKTDLNDAQALAFLAQDTQLRTIKAKDMEQRKYASLTTLREQYIKQYRQTIVSLKGICQAWGLNISKGISGKARLKDLIENHAAFPEELKESLVDMVTHAQTAQKALNKITKTLEELAKNDKLCQLIRTIPGLGLICSCRLRATIGDIKRFKNPKDFPAYYGLVPRSIATGHNEKKGKITHRGDKTMRSLMVQGAGSVIGFFSLFPLAFRKFP

SEQ ID NO: 372910 - protein, 312 aa, unidentified
MEKLSCGGIDVSKDRLDVVVLPEGWFFSVSNDTAGWAELVARLRPLGVSAIGLEPSGGYERGIIRALLAAGLSVRRINPNKLRQFARARGVLAKNDRLDARLIAEYVAIMPTRVVQRDDAVERLAEIVTMRRQLCDEHVAVENQAAHLEDAMLRRLSKRRLIRLEADIRVLDKRLAEMVATNAAFAQLYALLTSMPGVGPVLAFTLIALLPELGKMSRKQIAALVGLAPYDFDSGKLRGHRSIYGGRMPIRNVLYMAALSASRHNPALKAFSNRLAHANKKSKVIIVAVMRKMITTLNAMLRDNAAWQPQSA

SEQ ID NO: 372911 - protein, 353 aa, unidentified
MRIVVALDVHRKQITYKALDRETGELRRGRIAPATRAELRAWLSQFADGQAEFAVEGTTGWRFVVEEIERAGHRAHLADPAETAARRGRKRRAKTDNADCDLQLRLLLAGEVPESWIPPAHILELRTLVRLRKTLIDQRTAWQQRIHAQLFHQGVRGGLRLRTQAGRDALQRAELSPAGRELVALGLRMLDAFDRELAPLDRELRTFARRQPGCRALIEQLHGVGPVSATAILAELGDCRRFSSSDDAVRHAGLDITVYQSDEKRAPGHLSHEGPAVLRWALYEAAVSAARASSPDRGYYLQVAERIDHNRACLSVARKLCRRAYHILRELGEDALAPIEQPVAQTETITAAA

SEQ ID NO: 372912 - protein, 478 aa, unidentified
MTPPKDYCLAAPCPPTPLLPPLPVLSDALQVCNPHAAGIDIGEAEHWVAVPPGRDPQPVRRFGTFTVDLDALADWLIDCGVITVAMESTGVYWIPLFELLEARGLQVFLIDPRQTKRAPGRPKTDRLDCQWLQRLHAYGLLAAAFRPADQICVLRSYLRHRQMLLTYGAHHIQHMHKALQQMNLKLSQVVSDLTGATGMAILKAIIAGERDPLTLAKLRNPHCQHSEDDIAKALQGTWRAEHLFAFQQAVELYQFSHQQLTVCDQHIQTHLGTFADKSHGRPLPPKARRHKKANEPRFDARTPLYRLAGVDLTTIEGIEEGTALVILSEIGTDMSRWPSVKHFCSWLGLSPQHKISGGKVLSRRVRPGAQRVALALRLAARTVYKAHTALGAFFRRLRSRLGAPKAITATAHKLARLVYSLLKHGSAYVQQGLDAYESQYRERKVKAMARQAQALGYTLVALGTPEVPNFNALAAPTP

SEQ ID NO: 372913 - protein, 327 aa, unidentified
MYICILDEKGEIREHRNLKTDRDAFLKAIAPFREDIVVAVECIFTWYWVADLCHNEGIPFVLGHALYMKAIHGGKAKNDKIDSHKIAALLRGGMIPMSYVYPEKMRATRDLMRRRNHLMRKRSELYAHIQNTNSQYNLPDSFGCLARLKNRNGIIEQFEHPSVQESITADMEIIRRYDVILSQLEKSIINMAIHHDPVSYALLQTIPGVGKIIALIILYEVENIRRFASVQDFVSYSRLVKCAKESNGKKCGSGGSKIGNAHLKWAFSEAASFFAKNNDPAKKYLDRLTKKHGKSKALSILAHKLGRAVYFMLKNKEAFDQKKFLNI

SEQ ID NO: 372914 - protein, 368 aa, unidentified
MVGTMTVVGLDVHARSTQAAAIDLLSGELRRQRFGPGTEPVVEWLSGLDGPVRAAYEAGPTGFGLARVAAAAGVEVMVVAPSKTPRAPGDRVKSDRKDAELLARLLLAGQLKPVTVPPDWLEAIRHLARTREQARRDLGRARQRVSKLLLVEGRVYPGVTTWNLEHRRWLSRQQFVFEATELAFIDLLAAVDGLAARREVLDERLSRLATDERLWPTVSRLRAFRGVDTLTALLLHLELGGDWQRFRSPRQLGSWLGLTPSLEQSGESLTQGAITKTGSGIARRLLVEAAWQYLREPRIGVTLQNRQAGQSDHVLAIAWRANTACTAPTSGCAPAANPATSRPSRSHASSPGSSGPPRPHHDLTAQHP

SEQ ID NO: 372915 - protein, 344 aa, unidentified
MDNHTQYSGFAGVDLAKKVMQIHFVAGDGEITDKQVKRAEFLDFFRNRSKCLIGMEACGASQDWARKLEAMGHEVHLMSPKAVKPFVSGQKNDYNDAIGIYKAMFNGVRRVPVKSTEIRDLQTLRRIRSQVTKDKVKEINHVRGLLAEYGIVMGKSITAFNKGISSALESLKERGDVSPLVAEELQTTVESIKTKIERQKRLDREIEQLARGCKNYENFLKTPGVGPFTAAMLCVLLCDPAIFANGRQFAAYIGLAPRSRGSGGKNFIIGIPSKFNCDSESRAVFVECAQALARYKNKSPWVDGILRRKPKKVAVIAIANKLARQVWAMANKGESFKQMTILTA

SEQ ID NO: 372916 - protein, 424 aa, unidentified
MKKRSYRSVSVKAIDTKQLCQELAWKRVVVGTDVAKEKFMAVLMTEDQQVGSTVRWNHPKETPLLIGLLVELKNSGAEIEVVMESTGSYGVAFQYALRKVGIPIYQMGAKRVHDAAEVYDGVPSKHDPKDAAIIAKLHLDGLSKPWPAPSDEQRELGAAVAIMRVFQEQASIQVSRLEGLLAMYWPELPRELELGSAAMSRLILKFGTPAEVSKREDEAREMMRRMCCPAEWEKKIERVIESAKISLGVPPVAGELEALQTLVMDMNRAQRAYRQRRKVVQEMGQQNEAARNMSTVLGKTTAAVIVSEVGDPRDYSSASAYMKAAGLNLKERSSGEHKGQVKITKRGSGVARQYEYFTVLRLIFRDAVVKAWYLRKVERDGGVKMKAIVAIMRKLHRALWYVARGALFDSTKLFDVRRLGLVAS

SEQ ID NO: 372917 - protein, 341 aa, unidentified
MDKVSTIGLDIAKSVCQVHGVDAAGAVLIRKRISRAKVLEYFGELPPCLVGIEACPSAHHWGRELQGLGHTVRLIPPSYVKAYLKRGKNDANDAAAICEAVTRPSMRFVPIKTKEQQTALMLHRARQLLVRQRTMLSNALRGHLAELGIVSAKGRNGTAELLRIIADGRVSPAVCGILKVLTRQYGAVGTEIASIDKSIMALHRGCEASQRLAEIPGIGPIGATALVAEIGDWKTFSSGRSFAAWIGLVPKQHTTGGKDRLGSITKQGNRYLRWLLVVGAMAVIRYARKHGTQKRPWLGRLMERRPTKVAAVALANKIARMAWAIMVRGERYKEPKLLLAA

SEQ ID NO: 372918 - protein, 344 aa, unidentified
MNKNWFIGIDVSKKTLDASIFVAGEVINRFPHIQVRNDKQGFKDLLRWAKGQGVKTKDTLFGLEFTGYYSDALEQFLTRKKVSYTMLPTTVVKHYQRGTHDKNDKIDSAKIADYLFRFNGTECIKLRVLPSKAMQQLKDLKSERKFLVQQRVACENRQKVAKSKSEEKHLQKLIDLYKAEIELVEQQIADVIVQDEEIYTTYRLLTSIPGIGFVNAVNTIANTQNFTAFETARQYAKYVGVAPSEHSSGTSVQWRRRPSPHADLQAKADLSMAALHAIELSAEMRQLYERKLGNKPKDKDMQKKALNAVKFKLVREMFSVAKQARNFELRGLDKAQAEVHSTEE

SEQ ID NO: 372919 - protein, 367 aa, unidentified
MKKISTVAIEGIQIFKENQLTIGLDLGDRTSHYCILNEAGEVISESELPTPPKGIEGVFSRIPRSRVALETGTHSPWASRQLTQLGHEVIVAHARNVRLIGESNRKDDQLDARTLARLARIDPGLLGPVRHRSAKAQIHLTVIRARAALVSSRTALVNAARGLTKSYGQRLRKCGSEQMNRERAKGLSQELRDVLDPLLREIESLNERIAEYDTRIEQIAKEVYPEVARLKQVKGVGPLIALTYVLTLDDPHRFRHSRDVGCFLGLRPGRRNSGMSEPQLHISKEGDRYLRTLLVQGAHYALGPFGQDSDLRRWGLKLAERGGKNAKKRAVVAVARKLAVLLHKLWVSKEVYEPLRNNNRKGMAQVA

SEQ ID NO: 372920 - protein, 327 aa, unidentified
MAAAVDHNGGLLGMESFPADLAGYEGLLSWLTEFGPIVRIGVEGTGSWGVGLARFLVDQDLEVIEVDRPNRQTRRKQGKSDPTDAVSAARAALSGEASVTPKARNGAVEQIRVLMVARRSARQQRIQSLNQIRHLVFCAPEEIRVRFKDRPKTGLVKEAAAMRPREGSDPLEYTTNLVIRNLARRVTRLNDEMTEIDRMLAALIGQAAPSLLELHGVGIDSAASLLVTAGDNPDRLHSEGSWARLCGVAPLPANSGKVNARYRLNRGGDRQANAALYRIALTRMSNHPETRAYVARRRSEGLNSGEIMRCLKRYVARQTFKHLPQKV

SEQ ID NO: 372921 - protein, 371 aa, unidentified
MNFIGIDLHTNMFTCCYRDEHSSVENPKKGKKIITFPINESGLTAFYQTLTEDTYVLVEATITTFSFVRLFKEIVKDVIIANTYELKQVSMARCNTDKIDADKLCRILKAQILSGEELVSPVVLPSKEIQDLRSLFTTYRLYKKQNVQLKNRIHSLLKEQLHGFTQEEIFSKKEREHIRGISPGSAMHFQVNQLLDRLERDEADALELEKQVKTHAAPFMRQIEILTSMRGISVFIAIALIADIIDVNRFRNSKVFTSYLRSAPRVSNSNTSVSIRGTNKKGRKLSATLLTQSLQHVLNSSPKLKSWYNRLCEYKKPGLVRTGLRRRVFAEIFQMLKKGEYHYGRDKNNHESKMSQYRIFLKKRKILLDIA

SEQ ID NO: 372922 - protein, 381 aa, unidentified
MKKNSIARLQVTKSQIRRMAGKQKLTVGLDLGDRSSRYCILNEAGEAASEGELPTTKAGVDSLLAKMAPSRIALEVGTHSPWVSRQLTAMGHEVIVANPRKVRLITQSVKKNDRMDAEQLARLARVDPKLLAPIRHRGAEAQGDLAIIRARAEVVECRTKLINAARGLTKPMGERLKSCDADSVKESLADGHSEATQAIIRPLLKLVESITQQIQVYDQKIQEMEKRYPETKLLKQVHGVGRLIALSFILTLEDAERFAHSRDVGPYLGLTRKLRESGESQPELGISQAGDGLMRRLLVQAAHCILREGVPDSDLKAWGMTKVQAGAGKKGSKKRKTKAAVAVARKLAVLLHRLWVTGEVYDPQYNRKAVEAAKGKKPAAA

SEQ ID NO: 372923 - protein, 404 aa, unidentified
MNAVGIDVSKGKSTVAILRPYGEVVVSPFDVAHTGSDLRALADLIKKLPGETKVVMEATGNYFESIARYLHEQNIFVSVVNPVLISDFGGNTLRKPKTDKKDSVKIASYALTYWLDLKEYTPQEDLRKSLKLLNRQYQQSIKLKTMMNNNLISLLDLTFPGINKLFTSPSRESDGHEKWVDFVLEFSHCDMISKLTIKAFAKKYKKWSDKNSYHFTESSCEKIYAFAKDCVSSVSSDKAIVFSVVQAAKMLISATENCHAIQSEMNRVASKLPEYDTVMNMYGVGKAVGPQLMAEIGDPRRFHSRKAITAYFGYDSENNDSGQKTTRSNPMTKKGSGALRRTLFIIIQVLLQTKPQDNPVYDFLIKKKSEGKHYYSYINAAANKFLRIYYARVKEVLNVSEQMT

SEQ ID NO: 372924 - protein, 378 aa, unidentified
MRILALDLAKNKSVYLDYVTGGERTFGKVATNAPEMEKLLSRCRPDWVVIEACPAAGWVCDLVQRMNIPIQVANANDERWKWKTVKDKSDRKDALKLAQLSEMENLPTVHVPRPAVRQWRSLIEYRHGLIARRTAIKNSIRSIYERQGLGLPSRTCAWTQRALAELDKEVAGASPEQVWLFQVGCELEQLKQVQQQIEQVEAKLKQIADGNEAVRRLQTAPCVGPRLSEAVVAILDDPHRFRNGRQVACYAGLTPRRFQSGESDRQGHVTKAGNQLLRGLLVEIAWLGVQKRTWMLGVYEQVRRGSDKRKKIAIVAVARRLLVRLWAMLRDGSEWKEKAPGKEAGSGKQALDLSLCPSSGCEGGSDADEAGRSVKRPA

SEQ ID NO: 372925 - protein, 343 aa, unidentified
MEIIRIGLDLAKSVFEVCGVDMRDHVVLRKTLRREAVPQFFAELPPCLIGMEACSSSHYWAKVLTDLGHQVRLIAPQFVTPYVKSNKNDRNDAEAICEAISRPSMRFVPPKSSEQLEIQAVHRIRQRLVSSRTRLVNQIRGLLAEHGVVIGRDISRLRRALSQIVEGADRNLGDLIQELASDIHQELAALDERISSYDRRIRNLFRTNEMCQRIGKIEGIGPITATALVAAVGDQSCFENGRQFAAWLGLVPKQRSSGGKSRLFGISKRGDRYLRTLLIHGARAVLGKAGGKQDARSVWINRMRERRHPNVVAVALANKNARIVWSILSKNEDYRGPETPQAA

SEQ ID NO: 372926 - protein, 425 aa, unidentified
MREHDTRAEAGTVNTPGRGTMFEIEDVGVFLGLDVGKSAHHGHGLTLAGKKVFDKPLPNSEPKLRAVFDKLTAKFGTVLVIVDQPASIGALPLTVARDAGCRVAYLPGLAMRRIADLYPGEAKTDAKDAAVIADAARTMPHTLRSLELTDEITAELTVLVGFDQDLAAEATRTSNRIRGLLTQFHPSLERVLGPRLDHQAITWLLERYGSPAALRKAGRRRLVELIRPKAPRMAARLIDDVFDALDEQTVVVPGTGTLDIVVPSLAASLTAVHTQRRAMEAQINTLLEAHPLSPVLTSMPGVGVRTAAVLLVTVGDGTSYPTAAHLASYAGLAPTTKQSGTSIHGEHAPRGGNRQLKRAMFLSAFACMNADPASRAYYDKQRARGKTHTQALLRLARQRVSVLFAMLRDGTFYQSRTPNDVELAA

SEQ ID NO: 372927 - protein, 400 aa, unidentified
MHLTANISIPQKNFIAIDLHSDNAVICVRRNALNKAGELVGKNIWCGRVSIRDGLDNFIKVLVPHSQDFDHVAVVESTYNWYCLADAFEERGWLLRVADPSTVSQANLKSSDDRTDAQYLAERLRVGSLKHDLPLNYSSRALRDLCRYRMAMVQDCASLKIKLINLYRNQLSKNVRVADLLERCQPHMQPNYRFNSDILEEFKDPNIRLRVAFEISRIAMLEEMIEECNAEIQKQCKDQELVELCKTIPGCGPVFSAVICTEIGTMQRFKSAGDFVSYCRLCSTSKLSNGKSKGLGNAKNGNAYLSWAFTEVAQYASRNPVIREILQRLLRKYGGLRVKAIRTLAAKIARVTFYVLKNKQPFNAAKCFGMELTKSIVKKLPHKPLREDAAVVLPTVAGQA

SEQ ID NO: 372928 - protein, 320 aa, unidentified
MYSIGLDVSKSTINCYIPNEEIDLAIDNNEKSLNQFYLKLKKIYKKDIDKIVFIFEPTGSYSSLLKSFCTKKSIKAFIVNTKQSHNFAKAIAQRNKSDKIDSQVLSKMISIATNSDIKVPVYDENIENIKDYMSYYKFVVKELVQAKNVLEAMSNSQTNKYILNSLEKKIDALQKESLKIIEKIKEIISKDQFLLQSFNNIKTIKGVGDITAIVLLHLFLKYPSANQRQIISLTGLEPIAKSSGSSIKSKPKISKAGSKLYRGTIFMSALSAIRFNPKIKEFYNRLKENGKQSTLAQVAVMRKLIIIAHSLYKNNQEYIN

SEQ ID NO: 372929 - protein, 365 aa, unidentified
MNGDRRTTAEEAVVGGVDTHKDTNVAAVLGSTGALLGTSEFPAGLAGHADLLCWMGSFGDISSVGVEGTGNYGAGLTRFLLAEGTRVVEIVRPDRRVRRLRVKSDTLGSETAARAVLAGERTSAPKHRDGAVESLRALRVARTSATKVRRTALQLLRNTIVSAPDGLRESVSGLTRTVLIRTCAAWRPNRDAAHEPTTATRIVLRSLVRRILVLEEEIKDLDELIGGLVVRINPRLTEIPCVGVEIAAQLLVTAGENPERLKSEAAFAMLCGVAPLPASSGKTRRYRLNRGRDRAANCALHMAAISRLRVDPRTRPTQHVEPPRAFPRRRSFAASNATWHARSTSCSSQHHRAHSRAQKLPLDTI

SEQ ID NO: 372930 - protein, 456 aa, unidentified
MTSKSKAKPRLIGRMLPILHPDAAGIDIGAEEIFVAVPPDRDTDSVRRFGTFTRDLIELADWLRQCNIRSVAMESTGVYWIPLYQILETHGFEVFLVNAHHVKNVPGRKSDVSDCQWIQYLHSVGLLKASFRPPDEICVLRSLWRHREGLVQMAAEHIQHMQKALSQMNLQLHHVLSDIVGVSGTAILDAILAGERDPAKLASLCNRRIRSPRQTVAKSLEGDYRPEHLFALRQSLAAYRFYKHLMSEADLELAQKMRKLPRVEHAPEKRPAGTKKRIYQHAGNEPSFDLKEELFRIAGVDLTDVPGISTLTAHTILMEVGTDVSRFRNASAFASWLGLCPEKQVSGGKILYTRTRKVKNRAAIALRLGAHCLYHAQNYLGDFYRKMKWRLGAPAAVTATAHKLARILYHMLSTRQPYSDEVFARCDQQASIRAEIRLRKQAAELGFQLAPITETA

SEQ ID NO: 372931 - protein, 393 aa, unidentified
MICVGIDVAKDKHDCFILSSEGEVLADVFTIQNNAEGFDMLLQTIRRCARPEDKIKVGLEATGHYSYNILGFLLDKGLDTYVINPLHTNLYRKSLSLRKTKTDRVDARTIAAMLMSDVALKPYTDTAYHNEELKSLTRYRFDKVRERAKLKQSVSRLVTILFPELEKLVPSLHLASVYALLIEFPGAKQVAGAHLTHLKAILSDASKGRYGRDMAVTLRDAARCSVGSVMPAKSLELQHTIRLIRELDAEIEDIETAIQSMMDEMQSPITTIPGIGVRMGAMILAEIGDFSRFNSPDKILAYAGMSPSTYQSGQLSLSGPYSHMEKRGSRYLRYALYNATKYVCLWDPAFAAYLAKKRGEGKHYNVALSHAAKKLVRLICALEKSQQSYRNAA

SEQ ID NO: 372932 - protein, 366 aa, unidentified
MKKQLTGTNIEQGSGEGKCNRVLKLGLDMHYRQVTVAMQEEDGPIKAVGRMGHDGFENWVERKREVGWEVYSCYEAGASGYWLHRDLEQMGVKNLVVAPKAMGQDKGQKTDRRDSAELVDQLDRYLRGNRKALSAVAIPTAEQEQKRALLRYHRQIMADRSRYEARGKGLLCAQGIEVQGRWWQPEAWKELKTHGRFQGWMQTQLQGWRRKLLSAEQEQQKLRKQIEALAPALLPKGVGAYSAVALEYELKGLARFKTARALSSYTGLCPGIHSSDGRGKEGSINRCGNAAVRWNLVEMVWRLLKWQPDYQVVRQLAAGLVRSKRARKRLVVKAARQLAIDLWRLETGRVTAQELGLVMQPSPKTK

SEQ ID NO: 372933 - protein, 319 aa, unidentified
MDYIGVDVSKQDISVFDYKGLSTFKNEKGLKNLRFYIKKQFKSYDDIAIIFESTGVYSDYLKEFCSIHKIKACIVNPKKSSNFAKAIGNRSKTDKIDANMLYRFKDIISQKDILIPETNKTADRLSSYLTSYEFISKKVTSISNHIEALKHKSDTPKDILRMFEKELKYTKEMQNKILLKMEEFIENNKGLKKDYENLLTIPGIGKISAIALSTLFTTYKDTNRSQITALAGLDPIRKESGTSVNKRRKISKSGNKMFRKILYFPMLTAIRYNKKIKKFYDRLVENHKPKKLALIAAMRKMILIAHAIYKNKTVFCDDL

SEQ ID NO: 372934 - protein, 374 aa, unidentified
MEQAITYVGLDVHKDMIAVAIAETGRLGEVREYGKIANTPTALKGLVSRLTRSGTALQFCYEAGPCGYRIQRQLTAAGHGCVVVAPSLIPRKPGDRIKTDRRDATNLAKLHRAGELTPVWVPDPAHEAIRDLLRARLAAVRGLRQARQQLSGFLLRHGHHYNRPAWTLIHRRWLAGLKFEQAVHHIVLEDCIAAVEAATARRDRLEAYIKAALPEWSLAPVVHALQALRGMALVAAATLVAELGDITRFANPRQLMAYLGLVPSEHSSGGTRRQGRITKAGNGAARRMLIEAAWSYRFPARISRELLLRQEGLARSIRDTAWKAQERLCRRYRKLARAGKPPTVVTTAIARELAGFVWAIANQVESSGALIRRS

SEQ ID NO: 372935 - protein, 386 aa, unidentified
MQKLNDLSRSLTALEPEGTLIAVIEMSLSSWLVAGILPGVERQPLKKLAVDESALLKLLHRWREEAEKAGRRIERIVVAFEAGRDGFWLARWLNARGIEAHVIHASSVAVSREHRRAKTDRLDTELLKRSFLGWLRGERDHCKMVAIPTIKDEDAKRPNRERDSLVGERSRIVNRMKAALVRLGIRGFNPKLKRAAERLDGLRTPEGEPIPPNTLAELRRDMERRRLVNNQIRQIEEARLQRLEQTPSDGPHAMVRLLARVIGVGIETADMLVHEVLSRNMRDRRAVARYAGLTGSPDESGRKRREKGLARSGNARVRRGMVQLAWRFLLHQKNSALAQWYRARTENARGTRKPMIVALARKLLIALWRLVRQGVVPDGVVLRPAQ

SEQ ID NO: 372936 - protein, 329 aa, unidentified
MEQYIGVDLHKQFFQACSITSTGARAWEMRFPRTDGGLALFCARCGPQTAVAVEACGPTWAFVDAIAPTGTTVCVVDPRKTRLKAGFAAKTDRLDARRLADALRRDSVVSVYVPPPAIRELREVCRGRHQVIRLRTRLAQMIRALLLRSGGPDVPVRRVFSPAGLAWLEAVQLPPEAAASLARLRHVLTAIQAEAAAAEAVVAARAQADPIARALDAMVGIGPVLALTLRAEVGDGWRFPRGAALASYAGLVPRVDASADRYWSGRITREGSPWLRWALVEVAMHAMRRQDPVGRWARQLAIRKGAYKARVALARRLCDEIVQAWRHVG

SEQ ID NO: 372937 - protein, 287 aa, unidentified
MRFANDDEGIDQVLQRFSGLTLELIVLEATGSYHRLLLSRLIAAGLPAIAINPRQARDFARAIGRLAKSDAIDADVLAEFGEKIRPEIRSIADESTQRLEALCTRRRQLVGMLAAEKNRLHSALSSMRPMIKKHIQWLEKEIEQLEKELDQQIRSNPAWREKDDLLRSCKGIGPTTSSMMLACLPELGTLDRRDIAALVGVAPFNRDTGKHRGRRHVQGGRPDVRCVLYMATLAAIRYNRAIRDFHQRLIAAGKFKKVAITACMRKLLTILNAMVRNNTPWNADYAS

SEQ ID NO: 372938 - protein, 340 aa, unidentified
MFYVGLDIHANHISVCALNEKGQIAHRSQVRSIEEMMRILKGLPDRFEVCYEASCGYGHFHDLLRPLAARVLVAHPGQLRLIFRSKNKNDRNDAERMAKLLYLGETPTVHVPSLEVRSWRELINCRSQVIAKRTRAKNTVRALLRSAGIVSPKQPGLWSKKGLAWLRQLTLPTASQQLRRDLLLEEIETLIRQVRRIERQLNHQAQQTVAVAQLRSIPGVGIRTAEAVAAFVDDPHRFRNAKAVGRYFGLVPCQDQSGDRNRLGHITREGAPVVRQLVAEAAWQAQRRSPSVRAYFERSQRGDPQRKKIALVATAHYLVRVMWAMLKRGTFWKEKMALAS

SEQ ID NO: 372939 - protein, 397 aa, unidentified
MYIVGIDIAKRKHEAAVIDGEGSVIIKPFSFTNNCSGYNRLLDMLAKAKLPLDEVSFAMEATGHYWLALFTRLQKEGFRVQVINPVQTNSIRSFYIRQAKTDPRDALLIAEVIRFGHFSESTLHPENIYELRELCRGRHAIVSMQADVKRKVVALLDQVFPEYETAFTNMFSDTSMAILQTCPTPKELSEMPLEELCHLIEVSSRKRFRMAKARELQELARSSFGFAMAGDVFSTMIRLYAKHLVFLKQQVREMDRKIAEIMETLDTPITTITGIGPTLGAYILSEIGDISRFSSAAKLAAYAGIDPTMRQSGEYNGVRNRMSKRGSPYLRHAIWLAASSAVLHDPALKLYFQKKRDEGKPYMASVGHACRKMVSIIYAVMRDNKAYVPCIPSEISA

SEQ ID NO: 372940 - protein, 420 aa, unidentified
MKVVHPICCGVDVHKTFLVATIITSQGITPHYSKKRFSTFNNSILQFKQWLIDNNCFDVCMESTGKYWVPVHNLLEDAIHLTIANPKWVKAIKGNKDDTKDSKWIGELFRLGLVPGSYIPEKPIRILREYTRYRSKLVSCKSSEKNRFQNAFTVCNVALDAVVSDMFGKSAASITDYLISSDSFNPQYCTSLLQRSLKKKASAVIESIEGYQMTQEQKERMIMVRSHLEYITQSISELDAKLNKMVEPYENYIKLLCTIPGVNRQSAITIISEIGTDMTQFSNSKRLCCWAGLTPSNNESAGKKKSVRISRAGVYLKPALVQVAHASVKSNKSPYYKVKYERIYKRRGKKRAIIAIARMILTAIYHMFVRGEDFNPCDLYKIDMPQEIQNKQKEKAIKQATSFLIAQGIIKDSDISCLKL

SEQ ID NO: 372941 - protein, 374 aa, unidentified
MKPAHRTEFLTVPETSKLKISVAIADGSRNGEVRFFGDISSEPAPVASMVSKLSKRGAKLHFCYEAGPTGYGLYRQIVELGHDCVVVAPSLVPKRAGDRVKTNRRDAMSLARLHRAGELTAVWVPDEGHEAIRDLVRAREAASDALKQARQQLKSFLLRHGRIYAGREPWTRAHRRWLTCQAFDRPAHQILLAEYCQAVADASVRLDRLTKLVVETAASWSMAPVVAAYQAMRGVAFMTAVTFVVEIGDVRRFDNPRQLMAYLGLVPSESSTGERVKRGGITKAGNTRARRVLIEGAWTYRFPARVSPKIQARLDDLPRTVREITWKAQVRLCARNRKLLAAGKPKVVAVTAIAREMAAFLWAIGQEVALTAKG

SEQ ID NO: 372942 - protein, 343 aa, unidentified
MEAYSGKQFVGIDLHRRRTVIVRTTESGEVLETVRIVNDVERLASVMARAGQCPEVVLEATYGWYWAVDALQAGGASVHLAHPLGVKAFEYRRVKNDVRDASDLADLLRMGRLPEAWIAPPATRELRELVRHRAKLVGLRSHCKAEIHAVLAKCGVQVLMSDLFGVAGTQLLDRLDLPSPYAARIASLRRLIDDLEFEIDLFAGIVRGRMAREPGYTAVQNIPGIGPTLAAVFVAEIGDITRFSSAPKLTCWAGLTPKHHESDTHVHRGRITKQGSRLVRWAAIESVKNIPAGTVAGVLRERVADRRGRNVGAVAAARRQLEFVFYALRDGHVRALEHLPGVA

SEQ ID NO: 372943 - protein, 293 aa, unidentified
MKIVRCDFHPSFQQVAILDISTGEVRELKLMHATGEAERFYSELESPVLVGMESMGNSFWFERLMERLGHELWIGDPTRIRASYVRRQKTDKRDAGHILQLLIEKRFPRIWVPSSLERDQRQLLLHRHRLVQMRTRVKTELQHLALNQGMQKQRGLWSVRGRADLEKLPLEGWTKRRRMDLLKVLDMLETQVGELDEAVSKVAFSNAGARLLMTQPGVGPITALAFVVTIGDWSRFKRGKQVASYLGLIPSERSSGQKRRLGAISKQGNVFLRTMLVEAAASAVRYDEQFKKE

SEQ ID NO: 372944 - protein, 345 aa, unidentified
MTMLADQVEFVIGVDTHKQAHTAAVVDRVGGVAETFEFAADPTGYRKVLARVAARGGARVWGVEGTGSYGAGLTEFLRKAGEQAVEVERPGRPARRNGAKSDAIDAVRAARQVLASKYQIEPRQRGEREAVRVLFATRNGAVVARTRALNHLQALVVTAPQRLRSRLEGLTTAELARQAARLRHGADQPIEDQATVRAMRACARRALMCEHEAAELETELERILVGQVPHLLAEPGIGPISAAAIYLAWSHHGRIRNDAAFAALAGVAPIPASSGQTTRHRLNRGGDRQLNRALHTITLSRLSFHPETQAYATRRLAEGKTPREIRRCLKRHIARRIYKLLEHTP

SEQ ID NO: 372945 - protein, 353 aa, unidentified
MTTSDGVTVVGGVDCHSQVHHAVALDDTGRRLGDRGFPATGAGYADLLGWLRGFGTVTVVGVESTGSYGAALTRFLLQAGVRVVEVNQPHAHLRRRRGKTDAVDAEAAARKALSGEATAIPKEMNGAVESIRQLRIARRSAVSARSVALCQLGDLIVTAPAALRARLTRKTLPGQAAICVRFRPDQRRLTDPTQAAKFALRTLARRIAALDAEIAQVDEHLEPLVRAVAPRTIALLGIGPQHAGQLLVTAGQNITRLHSEAAFAHLCGVDPIPASSGKTTRHRLNPGGDRQANSALHRIAIVRLRYCERTQQYAKRRIAEGHSKREILRCLKRYIARAVYRTLRADLAPPAAA

SEQ ID NO: 372946 - protein, 429 aa, unidentified
MHYTQNQKLEQVTEKTLVIGVDIGSEDHHARAFNYRGIEYSPKDFRFSNDAKGFEAFQGWMQSYVQMFGKEKVIVGFEPTGHYWYRFADFLKALEIMYVMVAPQHVKHSKEMDDNTQRKDDHKDPKVIAKLVTDGRYIIPYVPEGIYAELRTAYSRYCELTETKVRLENRITRWFDIYFPEYREVYKNPGAKTGMMVLRIAPLPADVVKLGADGINQLWRNAKARAAGMKRAETLVAAAARSTGRVGGDAVRRDLWQMLEEYELVMRHLDQMQAMLEELVAQIDGAERLLRIKGVGFITVAGFFAEVGDLSRFTDPKQIQKLAGLAVVTPDSSGKHNGQSEISRRGRKRLRMILFRAAMSMVKSNREIKTLHEFYTTREQNPLKKMQSLMAIAGKIIRVFYGIMRNGTEYDPVRLLADIRRPGTDKNVA

SEQ ID NO: 372947 - protein, 388 aa, unidentified
MPTVADRAEAPTAIQTNLAAIFTSLELSRSIWLITSLSPGCGEKMSKHSVPAGDIAALLARFSELKQKALARTGKSFPIVAVQEAGLDGFWLHRVLEKEGIESHVVDPASIATSRRRRRAKTDRIDGETLLRALLAYKRGEPRVCAMVRTPTPEEEDRRRLCRERKVLIAERVEHVNRIKGLLFAQGISGYEPLRRNRRQRLDELMTGDGRPLPTHLKSQITRELDRLELLLDQIKAAEAERDALLAAQQAAAPAPVGKMLLEFKGIGAEFAAVLWLEAMFRFDNRRQLASYAGLAPTPWQSGSVDREQGVSKAGNPRLRATLIELAWLWLRHQPQSALALWFKERVSRNGGRMKKTSIVALARKRLVALWKYVTAGVVIEGAVMKAA

SEQ ID NO: 372948 - protein, 374 aa, unidentified
MTYIGVDLHKANMAVVCCDEKGEIICKERIACKCIGKIEEFFAQPHLHPCNVVIESVGFYHWLFDLLEGKVENLVLANPVETKKYSWNEPKTDFRDARKLALLLAGGEFERNRSLSCFVPDKTLRTFRELTRYRHNLVCRHTSLVNSAHRILLKNNLAGPKILNGQSLELFLSRFGDKFSLYHKDFLMQISENLFYNERQLKEAEEKIQPFLHMDRFKQLYEILTSIPGIGDTVSATLISEIGDFSRFDHPDKLASYAGLCPRVFASDATVRYGRITKKGSGFLRRALINAAWVSIREDMKPRRIFNRVCKRAGRKKAVVAIARKLLVWIWYLVAEGEKWEAVSTRPDSLTNNKSGVTLIGLLKRTPYRVNSVA

SEQ ID NO: 372949 - protein, 303 aa, unidentified
MATSSETYVGIDVAKDRLDIAVLGERGEKQVDNNQAGIACLVQQMLELQPELIVVEATGGYQRGVVEALFGAGLAVAVVNPARVRQFARACGLLAKTDKLDAQVLAVFGQRVQPRRYESKSEAGKQLSALLVRRRQLDEMLKAEQNRLRTISPSLRGSVERIIACLKDEKKLLDEQTQQFMKEQEEWQEQTEILSSAPGVGKVTTATLLAELPELGKMDRKKIAALVGVAPMNYDSGRKRGYRKTKGGRGDVRSVLYMSTLVATRYNPLIQTQYQQHHPECDAARQPTFPVCSDVIILCFSNE

SEQ ID NO: 372950 - protein, 392 aa, unidentified
MQNIEGCAGHTGTEPHALETGLMDIITYVGLDVHKATISVALAESGRDREVRQVGVFENRPEIVIKLAARFSKGGRHLSFCYEAGPCGYGLHRLLTGCGHDCVVVAPSLIPTKAGDRVKTDRRDARMLAKLHRAGELTPIWIPDAAHEAMRDLVRARATARKVLSKARQHLQGFLLRHERIYRGARAWTLAYRRWLMTVRFAHPAQQIVLQDYIHTVQDAEARLARLTQQIEELLPSWSMAPVVTALQTMRGVALIVAVTVVAEVGDFRRFTNARQLMAYLGLVPSEHSSGSSVRRGGITKAGNVLARRVLIEGAWTYRMPARISRKLHDRNEELPATIRDIAWKAQLRLCARYRRLVAAGKQRVVATTAIAREMVGFIWAIARVAQPAFAG

SEQ ID NO: 372951 - protein, 342 aa, unidentified
MRIIGCDLHARQQAVAMLDTETGELMEMTLTHEGNNVREFYSRLPRPVRVGIEATGSMQWFVNLMEELGIECLVGHPAEIRAAEPRKQKHDRRDADLILKLLVENRFPAIWLPSKELQDLRALLRHRHQWVRMRTRIQNALQSIALANGLRRGPSLWSQDGQNTIASLPLAPHTAYRRNELQAVYAKFETEIEKLNQRVEEQACKRAGARLLMTHPGVGPVTALATDVFLGDPARFADSKALASYVGMIPREYSSGGRQRLGGLTKQGNPLLRFLWGEAGAHAVRRDPELQRFYRRKLVQKGFGKASVAVARNRGQKQQKSSDACAGMPEKRYGANSHRHVD

SEQ ID NO: 372952 - protein, 321 aa, unidentified
MTQRGVMDPHAITVGIDVSKTELIVALHPSGEQWSSGTDPAAVDALIARLVALQPAVVVVEATGGYERAVVAASAAAGLPVAVVNPRQVRAFAQALGRTAKTDAIDAHVLALFGARVQPEARPVADAETQALAGLVARRRQLLEMLGAERCRLAQAPPTGPITRDLRNHIRWLERRVNDVDEEIGTAIQQSAVWRVHEDLLRSVPGIGPTVARTLLGELPELGRLDRRAIAALVGVAPFNRDSGQWRGRRMIWGGRASVRAALYMAALVATRHNPVLKRFYQRLRAAGKPAKVALVAVMRKLLTIVNAMLAHQSRWQNQTV

SEQ ID NO: 372953 - protein, 482 aa, unidentified
MKKRNIYQNQSQELLTLFEEAGNSEKVMCIPIDYAKTDHVVMFCNGHGDIVRKPFSVKNSPLGVDYLTDQVIRSCKSRGISKRHVFFGGEDVGSFAANFVTTLRSQGWLVAGVNAHDAKKQRANLQASTDRLDLMGIASMLLNRRANSCPAQSGIYWNLRTVVRHRQKLVKLTTEVRNRIHAVVDRLFPGFLDEEKSGISPFSKSSLWLMQARFSTPQIRRRKRSTLIKGLRKLGAKNPELTAAKLQQYAAQVLKPPQEYIATLQFSLAQHVKHFSCLQDNIDQLEKEMAVGLAQTQGAFLTSFRGIGIVLASGVTSEIGNPYEQAPLNNLVSYTGIIPRVKQTGGPQGESYSGKVAKRCNRILKNYVVQSASHLGLHGPQELMADYKRREAAGQHADFGMGRRFLRIAMCLMRTSQIYLPPRLREPEAKLQERADYYLMNWPSLHEKWRKSGALKVAFDKNMPLGQWRNIVQQLYKIKLAL

SEQ ID NO: 372954 - protein, 415 aa, unidentified
MKFEKDTSGIKRYIGFDIHKEYALVGGQNAQQEWVLVPRRIGMEKLREWAAANLRAGDAVVLETTTNVWDVYDIVEPLVSYVVVAHAGGVRQIAEARVKTDKKDIERLIRLLIADIVPEVWVPPVEVRELRGMISYRNRLVKTSTMIRNRLQSLIHRHNLILPKGKLRDQGWWEAQQVSALEKIQIRQELAMLDEMEKHKGEVDGELGRQSLGEVWGQQAMRLLQLSGFGVIVTMTVLSAIGDASRFESAKKLVGYSGLGAGVHDSGKEHIQKRITKSGRKELRWALVEAAWRAIRISPYWKEQYEKYLRRMRKPNQAIVVIARKLLVVVWHVLTKQETDEHVSEEDLAYKMLVLAWDLDENVRMGLNYKQFAKYALMKLGVETDITRFVRKNVPRRLAPREEVLRRMAELGIAQ

SEQ ID NO: 372955 - protein, 374 aa, unidentified
MENNITYIAMDTHKKQHKIALHYPCQEEIVEFTINNTVRDIRKMVNKVTKHAPGKVEFCYEAGVCGFTLKRRIEQLDCRCSVIAPSLVPKKPGERVKTDRRDAKKLLMMFKAGLLTEVHAPDEHQEAARELTRLRETAKDNLKRIRHQLLKFLTRHGYVYTEGRHWTQKHITWLRTIKFTEPMLTNVFENYFNEMIYCIGRLENLDKEVELLANSQEYKEIVGLLCCFHGIDTLTAITILTEIFEFGRFESPRHLMSELGLTPSEDSSGDRQKKGSITKAGNKRVRRLLNEASWHYRHRYVPSKVLKKRRKGQPQWAVEIADAAGRRLSKRHWYLVNNGKMPCKANIAIARELSGFIWFMVTQYQARKNIKDVA

SEQ ID NO: 372956 - protein, 390 aa, unidentified
MNPTEGKRIIGLDMHPDVFAAAALSVDAKRQHADWVQDRLPTAGLEAWAKKQLRKEDVTVLEAPGNSFEVAARLHALGHIALVLESAQAGKIRDNFCNDDRHSAVKLAKVYRSGLAKEVWQPDTKTREYREVFFAHRNAVKDATRCRNRIRSFLNEHCVRLKKGVRLTEPSGETTAKAAKAWTALQADLISEAFELLRQVETRRKKLERIMVRELVANPGWARLWRLMGIRHRVAFGLMAMVGDMHRFPTAKKLVGYLGLAPRKTQSGNDAKGQGGGMGKFGRGDVRGLLIQSAQNALTQRNSPWHQWGWKLLVKKLRNEAVAAVARKITVSVRHLLMGHFTPLLEVTDHLRAKLLRLATLIGKDGIKTLGFDDRDAFASAQIQSIQLST

SEQ ID NO: 372957 - protein, 339 aa, unidentified
MQVTTVGLDLAKNIFQVHGVTGTGEVAFNRPLRRAQVLAFFERLSPCLIGIEACASSHHWARELSQLGHTVRLMPPMYVKPYVKRGKSDAVDAEAICEAVTRPTMRFVEIKSEEQQALLSLHRARDFIVRQRTQLINMVRSLAAEFGITIARGVARAIEFARSIIDGKQPELPDLAQDVLRVLSRQLVDLHNRLGWYEITMRIQARLSRQAQLLQTIPGVGPVTASAVAATIGSGRQFRSGREFAAWLGLTPRNHSSGGKERLGKITKMGDRYLRQLIVVGMTSRIRQVTTPPECAAPRLTKPLQRKPARLATVAMANKTARIMWAVLTRDEPYKPHAV

SEQ ID NO: 372958 - protein, 338 aa, unidentified
MAILTVGIDLAKNVFAVHGVNEAGKPDLVRPSVPRAKLHALVAALPPCTIGMEACSGAHHWARLFAAHGHTVKLMAPKLVAPYRMSGKRGKNDGADAAATCEAVQRPNMRFVPVKTEEQQSRLMVHRARQGFVAARTATINRIRGLLAEFGVVLPQKAEIVRREAAARLEDLPGYANTVIGDLLSEVHHLDERIKQYDGHVRAMAKDCTLAQRLMQLMGIGETTATAIVAMVGNGAEFNSGRQFAAWLGLVPGQYSSGGKTRLGRITKAGDAYLRSLLVLGARAVLNAAPNKVDSLSRWAVKLAERRGYWKAVVAIAAKNARMAWAMLIKGEDFKMPA

SEQ ID NO: 372959 - protein, 390 aa, unidentified
MESNPMHKLNDLNRSLTPLKPDGTLIAVIEMGLSSWLVAGIVPGIERQPLKKLEVDERTLLKLLICWREEAKKSGHRIERIAVAFEAGRDGFWLARWLRARGIEAHIIHASSVAVSREHRRAKTDRLDTELLKRAFLGWLRGERDHCKMVAIPTIKDEDAKRPNRERESLVGEQSRIVNRLKAALVRLGIRGFNPKLKKAVERLDGLRTPEGDPIPPNTLAELRRDMARRRLVSDQIRQIEDARLERLEQAPSDGPHAMVRLLARVIGVGIETADMLVQEVLSRNMRDRRAIARYAGLTGSPDESGRKRREKGLARSGNARVRRGMIQLAWRFLMFQKDSTLAQWFRARTENARSTRKTMIVALARKLLIGLWRLVREGVVPDGVVLRPA

SEQ ID NO: 372960 - protein, 318 aa, unidentified
MEQHDFVGIDIAKDKFDVALKRGNKFINVAFKNNTSGFKAFEEWLKKNTLNPWICLEATGSYGEGIAEYLASKNIIVSVCNPLQIKNYAKSILARNKNDTLDAKIIAAYAEERKPRCFIAPSEDKKHVRGLLQLIDTLQGQKQQLSNQLGSTLLESIRKELKKAIKAIEKRIAELNAKLKVSIKKNNEHSEIKKRIKTVKGLGEKTAHAIIAYLPNIEDFQNAKQLAAYAGLNPKQHQSGKYAGRTTLSKIGNSKIRKALYMPAMVVKNTNPHFKSFCQRLEKSGLTPKAIIGAVMRKLIHIIFGILKHKQDFNPALV

SEQ ID NO: 372961 - protein, 328 aa, unidentified
MCTLGIDVSKNKIDLCLLTAGPGGKKKHKVLTNEPAVARKVVDWLNAQKCVPESVTVVLEATGIYHENLAYGLHEAGVSVCMANPCRVREFAHGMDILNKNDAVDAFVLACYGELKSPAVWVPPSPEVRKLRALLRQRDALREDVQRTVNRLEKANSTSTPQEVIRSLERMKSWLNEELARIEKLITDHTDNDPGLKADLDLLKSIKGVKDQVGREMLALLKDGTFKSASQVAACLGLTPVEKTSGSSVRGRPHMSKTGPSGVRAKLYVAALTASRWNKQAKAIYERLVAKGKAKKAALGAVMRKLVHLCFGVLKTRLPWDENYVATA

SEQ ID NO: 372962 - protein, 390 aa, unidentified
MRAGASLTEIRGLSGRGCLLGLSDSCGRPRVFTERTSVGLDVHARSVVAAAIDGVTGEVSRARLVPAPAEVIGWVGKLPGPVAVVYESGPTGFGLARALTAAGVRCQVAASSKLQRPAGDRVKTDARDALHLARLLRLDEVVAVRVPSEVEESARDLVRCREAARADLMRARHRLSKLLLRHGIVYSGGKAWTQAHDVWLLRQSFPLAGTQAAFQDAYETVVLAAGRRDRLDSAILAMAADGQFTAVVRRLSCLRGISTLTAFSLAVEIGDWDRFTGAGIGAYLGLVPSEHSSGTSRSQGSITKTGNSHVRRLLVEAAWHHRKPYRPTAVLRRRWQLASPAAVARAQAGNHRLHQRWVSYADRKKRPVLANVAVARELAGWCWSLAMIPD

SEQ ID NO: 372963 - protein, 352 aa, unidentified
MSLYLGVDFHPHQQTVAWCDDQTGEIRTFDLVHDLEKVREFYFSLPEPAIIGIEASAKARWFEKMLFESGHKLVVGNPVLIRKRATSRHKNDRRDAELILDLLMKDEFPALWRRPAESEQVLEILRLRSALVRQRTQVYNRLQALAHSAGLPKGSIRTAAFQARVKSADMDEACSLARSQNFALLRSIHERISEVEEWLKKKVSDPQVQLLLSQKGVGYLTSLTVVHTLGDVTRFARVAKQVVGFAGLDSLEDSSAGKIRFKQISKAGSPLLRFQLGQAVQTATRYDVRLKTFYKRLAKKKPKAVAKTATARKLLVKLAIMLRDNITAEEFDRRGPQVGNARLSARSEMAVT

SEQ ID NO: 372964 - protein, 374 aa, unidentified
MADIIEAFVAFDTSKLRNAVAIAEAGRTGEVRFLGEIENTGAAVAKLVRKLAGKYGRLTFCYEAGPTGYGLYRQIKSLGHECIVVAPSLILKKPGERVKTNRRDAVSLVKQLRGGDLTAVWVPDPRHEAMRDLTRAREVAVEDLRCKRQQVSAFLLRQGLHYPGERTWTKAHRNWLMSQKLEYAEHRIAFEEMLLAMRQAQERIERLEQAIRVAVPDWSLAEVVTALMAMRGIDFISATAFLAEIGDLSRFPTPRELMGYLGLVPSEASTGDTIKRGPITKAGNRRARRILVECSWSYQHPPRVGKEKQERVAAAPQAVREIAWKAQCRLSARYRALTRKGKLKTVAVTAVARELSAFIWAINRQIANPRAVAR

SEQ ID NO: 372965 - protein, 319 aa, unidentified
MNISEPVFVGIDVSKATLDVAEISGPALRFENTPAGNRRLCEHLATRSVGLIVVEATGGYERDCVAALSTAGLPVAVVNPRQARDFARSSGQLAKTDRLDARMLAQWAAVLHRSPKRAQLLQAPPDLAMVQLRALLTRRQQLVEMRTAESNRLSGAQGRAHKSIVAVLKTLDRQLAAMDADLDRHIDQHHRPARDLLDSVKGVGPQTLATLIADLPELGKIPSRQLSALVGLAPINCDSGRYRGQQHIWGGRRRVRSALYMAVLSGTRFNPALKAFYTRLLAAGKPKKVALIACAHKLLRILNAIMRTGQPWDPARNTA

SEQ ID NO: 372966 - protein, 447 aa, unidentified
MKTEPEEIPDADHELIIERVAAIDVAKASGKVCLRLPRPGRPGHRVSRVWDVEATTAAVCELADHLVAGQIQRVTVESTSDYWRIWYYLLEAAGLSVQLVNARDVKNVPGRPKSDKLDSVWLAKLTEKGLLRPSFVPPAPIRQLRDYTRLRVDLTRERSRYWQRLEKLLEDALIKVSAVASTLDTLSVRDMLEALIAGERDPRRLADLARGRMKTKRAALIEALTGRFDDHHGELARMLLDQIDALSGQTNTLTIRIDQLLDTIANEAPGHDDGDSGADGQPSADLTVVQRLTEIPGIGPTAAQIILAEIGRDMTQFPTAAHLVSWAKLCPRTIQSGPVIRGGKTGKGNPYLKGALGEAAAAAAKTDTFLGERYRRIVKRRGKLKALVAVARSILVVIWHLLNDPAARFRELGSDYHTRRIDIERRMRTHIAQLTAMGYRVTLEPAA

SEQ ID NO: 372967 - protein, 354 aa, unidentified
MTTETIGVTGGIDTHSNTHHAAALDDVGRLLGTREFQADPAGYHQLLDWLASFGTITRVGVEGTGCYGAGVTRFLRRHRIHVIEVNRPDRRSRRVRGKSDPLDAESAARRALAGEDQVTPKDTTTIVEAIRVLRIARTGAVKSRTAAFNQLKDLIITAPDSLRETLRDKTLQRVAVESARLRPDTSRLADPTQATKLALRTIAVRVAALNTEIAALDTQLGELVTAAAPRTLALLGVGTEHAAQLLITAGGNPERLRSEASFAALCAASPIPASSGKTNRHRLNPAGDREANRALYMITLVRLRYCPDTQAYIQRRLTEGLSKREAIRCVKRYVARQTYHAIRADLATTAIDDL

SEQ ID NO: 372968 - protein, 464 aa, unidentified
MKKKPTGKKAASRRARKTGDNPQHSINTQTHPDAAGIDVGAEEFVVAVPAGRCEKPVRTYATFTSGVEALRDWLLECGIKTAAMESTGNYWITLHDVLTEAGIDVYLVNARHVKGVPGKKTDVCDAQWLQQLHAAGLLRKSFRPAPDIVPLRFLMRHRAEMVGDAAKQLQLMQKTLTEMNLKLHHVFSDIDGVSAQAIIDAILSGERDANKLAALRDKRCRSSAEDIIEALRGDYREEYLFVLKQSQQTYRQLRESIASCDEQLGELAARVECEVSAPLPEAPKGQHKVAKNSPQFAVFETAWRFYGVDLSGVPGVSTGLLCSLISEVGTRDQLLSTFAGPENFASWMGLCPDNRISGGKVLKAKTRKVDSRLAGAFRLGVFGLQRSQTEMGGYLRRMKGKLGKAEGITAAAHKLARVVYAMIKSQKPYDEKEAFKLTPQSESRRRKALEKQAAALGLTLSPAA

SEQ ID NO: 372969 - protein, 343 aa, unidentified
MKITAIGLDLAKSVFQVHGVDDRGRAIVRKQLRRDQVVPYFAKVPPCLVGMEACGGAHHWARRLREFGHTVRLISPQFVKPYVKSNKNDAADAEAICEAVGRPNMRFVPIKTVEQQSVLSVHRVRQGFVKVRTAQANQIRGLLAEFGLILPQGISNVARRVPGLVDEAAELPVPMRQLVNRLLEHMKMLDQQAKELEAQIKAWHQGSELSRNLEAIPGIGPLTASALVASIADAKSFKNGRQVAAWLGLVPKQDSTGGKPKLLGMSKRGDTYLRTLLIHGARSAIVSAQRWHKPNAWLERLLSRRHPNVAAVALANKNARTAWALLAHEREFRPDYVPQPPIA

SEQ ID NO: 372970 - protein, 399 aa, unidentified
MIIVGVDYHPSVQQVAFLDTETSETGERRLDHSDGEAERFYRDLQRRQVKVRVGIEATGHARWFERLLAELKFELWIGDPARIKAARVRKQKTDRQDAELLLRLLIEGRFPQIWVPSPENRDLRQLIWHRHRLVQMRTRAMNQIQAAAMNEGLRRKKTLWSKTGRRQLEALPLAPWATRRRQDLLELVDRLNTTIDELTAAAEQEARKRPEVLRLMTHPGVGPITALAFVLVLGSPDRFGCGHQIGSYLGLIPCEDSSADRQRLGHITKQGSSLLRFLLVEAAQAAVRWDPDWRRRFVHLAMRRDRRIAKVAMARKLAVSLYWMWRKECDYQQTLQFGSHAGEPGFGPWCEVNHRPLDWASRSLSREFEVVIMVERAIGEMVGSDRVPPERLHANLCRR

SEQ ID NO: 372971 - protein, 361 aa, unidentified
MTTEEKQRTLFVGIDVHKDTHTAVGVSPFGEKLFELTVGNYQKDFDGLSERIRAVSTSASLAPFVGLEDCHGYGDRIARALWETGFPMVHVPPILVDRARKRTTHPEKSDSLDALGVAKVMMHDTDSLPVYSISERDLSAKFLRELSQDREHLTVERARLRNQLHLLLHRIYNTEYATYFKDPFALKALRHWVRVRPECDPYLLRSMQRKARRMLELHVEIKELERDMQEVMTKEKYTLLTASGCGIVLAATMIGEIGDINRFRSPASLAKYAGCAPRECSSGKHTRYRKTRSGNRKLNCAFHRMALSQISPTGNDAARTYFKKKVSEGKTKSQALVCLRRHMVTVVYMMLKHGTEYRCPQ

SEQ ID NO: 372972 - protein, 437 aa, unidentified
MLWDEPKIFFLERRYFFSIILSEFLKNRVALHLNMRRAYTMYIVGIDIAKRKHEAAVIDGEGTVIIKPFSFTNNCSGYNRLLAMLTKAKLPLDEVSFAMEATGHYWLALFTRLQKEGFRVQVINPVQTNSIRSFYIRQAKTDPRDALLIAEVIRFGHFSESTLHPENIYELRELCRGRHAIVSMQADVKRKVVALLDQVFPEYETAFTNLFGDTSMAILQTCPTPKELSEMRLEELCHLIEVSSHKRFRMAKAQELQALARNSFGFAMAGDVFSTMIRLYAKHLDFLKQQVREMDRKIAEIMDTLDTPITTITGIGPTLGAYILSEIGDISRFSSAAKLAAYAGIDPTMRQSGEYNGVRNRMSKRGSPYLRHAIWLAASSAVLHDPALKLYFQKKRDEGKPYMASVGHACRKMVSIIYAVMRDNKAYTPCIPNEISV

SEQ ID NO: 372973 - protein, 352 aa, unidentified
MITIRVDAHKRIHVALAVNDDGQEAGQWRGPNSPKGWRSLADWATDLGGPRQWGIEGAWGYGRGLAQLMVDAGEAVFEINPRWTAFGRRRARRAGKTDRLDARTVALLVRQDAPELPRVAPEDVTALLDLLTTQREGTLAEATRLRNQIHAIMVQLDPEYHRHLPNLKSRAGLKALETYPSRGPSLQMARAAAVRRIAGRLRLALDQAAELAKEIEEHAEAHFAPLTRLCGVSLLTAGALAGILGPGQRFTNDAELAAYAGVAPLEASLAGVVRHRLNRGGNRRLNAVLYMIALTQAHHSPQARTYLDRRVSEGKSRREALRALKRFIVRAIWRLWQECQTNDLKPLVEVAA

SEQ ID NO: 372974 - protein, 400 aa, unidentified
MRVVFGIDVSKASSEVAILVNGEKVHGYTIPNDAIGFNRLLGDLKTVHQPEIVFEATGVYSRRLQAFFEDNSYTYTRLNPLESKKQLDSLRVRKTDKIDAEKLAMSQFILNRKPSYVQEALYQELRDLSRFYQNLTEDIVCAKNRLHKVLQITFPELENILSAPTGEQYWILVMTFPCNSFVLELDDAVLTAIIRQSTAKRISEKRVTYLVDKLTKLANQSYCAVKKTSPVIEEVKYYAGELLRLSEHRQGVVEEMVTLAQSLPEYEILLSIPGIAETTATSIIGELGDIRRFHSANQINALISIDLSHYESGDFLAKEHITKRGNPYARKILFKCIHNIASAGYTNPCHIADFYEKRKRQSQVTSTKPHTIASIHRLIRTMYYLITHNKLYDYTSIQNR

SEQ ID NO: 372975 - protein, 345 aa, unidentified
MMVVLGIDAHKRTHTIVAVDESGRQVGVLMVRANTDGHLRALRWAGAWEQRRWAVEDCRHVTRRLEADLLAAGEQIVRVPPMLMAAVRASVRTPGKSDPIDALATARAALRERDLPVARLDDPPREVRLLVDHRDQLVRERTRLQSRLRWHLHELDPDYQPTSLSRVNNLDRVTVWLQRRDGLVVDLCHELVVRIRQITIRADQLETEIARRVARLAPSLLTLPGCGPLTAGKLIGEIGDPSRFSSKDAFALFAGTAPVPASSGNREVFRLNRGGNRQVNAALHRIAVTQARYHPPAQAIIARHNTANGRKRHAYRVLKRRLANVVYRTLLADLQPAHTQPEIAA

SEQ ID NO: 372976 - protein, 358 aa, unidentified
MQSKIKKISFKKQNIYIGIDVHFKNWVITIMAEDIVYRTFSQNPKAKDLKKYLENNFPEGNYFSVYEAGFCGFSVHRELVKYGIKNIIVTPADIPATDKDKRQKEDKRDSRKLAKSLKNGELTGIHILSTETEELRSLVRYRKTIVKELGRHKNRIKSMLKFYGKEIPQELDTASKYWSLNFIKWVKQIETNTPEGSLVLQETIDTVEHLRTKQLKINKELRRLSKDSRFSKTIKLLTSVPGIGLIIAFIFLSELETIKRFKNLDKLSSYVGLIPSTNSSGEKERTGNITKRSNKLLRTSLIEAAWIALRQDPALILKYTELKKRMSPNEAIVRIAKKVLNRIRYVLKNEQEYVIAIV

SEQ ID NO: 372977 - protein, 295 aa, unidentified
MSQPGSLCVDIDVSKAILDIAASSAIEQFSVGNDSDGFDAIIAELRMYAIALVLMKATGGLETAIVCALQAEGFELAVVNPRQARDFARAMGYLAKTDSIDARVLSQMAEVLNRHPERERFIRALPDTECQVLTAMVVRRRQLITMLVAERNRLHPAHPLNRKSINIIIKALEDELARLDADMNSHIHSHFKELAKRLSSIKGVGTMTAAALLAEVPEQGNLSRREISVLVGMVPVNRDSGTMRGRRTIFGGRAGVRTALYMAALVATRFNPVIKVFYMRLLAKKWRWLPVYASC

SEQ ID NO: 372978 - protein, 425 aa, unidentified
MKKTDYLSTLFVGIDIGSRTNVVSAIDFNQEYFIRMKPVPNAKEGAEILESLLVDVLSAHHEFKHVIIGMESTGFYGVHIANYLSASDLLSPFGTEVYCLNPKEVAKYKESFNSINKNDGIDSFVIADFARVGRITIKPWRGAQYLALQRLTRHRLHIAECIAREKTYVLNNIFLKFSEFAMLKSEDHPFSNKYGATAEAIIEQYVTNDDIIRASIDELVELIESKSHGRITDPEETAKLLQSAARGSYRLDKVVAKPITLSISSSFNCIRAFEKELKAIEKAIEQTVQGINPLEYQVLKSIPGIGPTYAAGILAEIGTIKAFPNNDALAKYCGIIWKENQSGNFRAEDTKMSKAGNRYLRYYIIEATGSVINHCPEYKAFYGKKFAETTTHQHKRALALTSRKFLRMLFGLLDKTQLYSLEKSR

SEQ ID NO: 372979 - protein, 370 aa, unidentified
MAQSTPLFVGLDVHKDSIAVAHAAGGSPEPPVFVGAIGSRQADLDHLLRRLQGKASALTFAYEAGPCGYGLHRYLTGKGLACQVVAPSLIPKKPGDKVKTDRRDAVELARLLRSGDLTAVHVPSVEDEAIRDLCRARDAARVTGKDAKLRLKAFLLRLGRHYVGRATWNDAHRRYLAKVVCPTPAQQIVFQESVRAIDEQIDRLQRLEAELLERAPEWRLYPVVQALQALRGVQFLVAITVVAELGDLTRFTSPRQLAAFVGLIPSEYSSGGTRRQGGITKAGNGRARRALIEAAWAYRHPAKVSLHIQQRIDRLPKSLQDLGWKAQVRLCKRFRRLVARGKHPNVAVTAVARELIAFMWAIAKEVPLAA

SEQ ID NO: 372980 - protein, 393 aa, unidentified
MFYLGIDVGKFTHSLCLIDESGHHDIWQINNDKSGFESLRKKINSLNLLIESRLLVGMEATGHYFLNIYDFLLHLGLSTEQIALLNPLQVKSFRNTNLRGAKSDNVDAEQIAVLLQFGNFDRCNVSTDHIMNLRELTRLKSDLTANLGNLKRKMIAVVDRIFPEFAKIFANKFGLTVVTLLTDYQTPEEFAALSLEELTALIKGLSKRGVNRDKIQRLHEAARNSIGISFGREGFKIELSILLTQLKSIEEQIDFLEGKIAEMVNELNSPLFTIPGIGKTTGAAILAEIGDINHFASAVKLIAFAGLDPKLKSSGTYQGRTPISKRGSKYLRSALWYSAMVLCRVDEKFRKQYQDRKKLGKSHRYAVTAAANKLTKIVYHVLKNNCIYDPNLA

SEQ ID NO: 372981 - protein, 444 aa, unidentified
MHYQKVLKMLESIPYLSVGLDVGADFTWMSILLPNGTLVGKPFKIVHCDPASRELAVSKIKEAQETYSLKSRCFLESTGIYHIPLLCFLRDKGLDCSVINPIITKNSTNMNVRKLHNDKFDSKKAAKVGQDTSLKTSIVPEDAVIDLRNLVRDYYYFKDLQSAVVLKLHAELKVSFPAYLNVFSKVTAQTSLKLLEAYPLAADMLAAPRDELVETIRNTARFGEKYALSKYDAICAAAKDAAVFGRALPSNALRIRLYIKTYREYQAHLDSILEELHKAVDNLQGGPVYDRICLLQSLQGVGFLSAVVLIAEMGSFDLFSSPKKLYAYFGMDPGVNDSGKFHGDRVHMSKRGSSLARRILHMIAINNLKVDKAAKAPVNPVIYDYYIRKCANKKKIVAVGAVMHKICNIIFAMLRDNKPFELITPKEHCERYAAEHPGSVNIAA

SEQ ID NO: 372982 - protein, 326 aa, unidentified
MARVTWIGVDLAKASFVAARRQQGKCILAEFANDAAGLALFGAWLPQRSRVCVVFEPTGPYGRPLEAWVGQRWPRMSYVLANPRRVRHFARAAACASKTDVIDARRLLEFAEAFQPPARQRPAPLTLELRALWRHQLELRKLLDGLRDRRQKAQVDPHIPDALVDGLGELADRLAAELAKIQAQALALVRTQRSLRPRFDLLVSIPGIGPLTALALLAEYGPQLAHASPRQLTRYAGLDPVLRQSGSSVRGKTRISKQGNSRLRKALYMAALVGVRWNPVLRSFYERRLRKGLTPKPALVAAMRKLLHICYGVLKNDQPFVAVATP

SEQ ID NO: 372983 - protein, 431 aa, unidentified
MTNRLQVGVDFSRKRAGFCVLFPDGQPLEAHQAFANSCSGYSLAKQLLLDALDSYQFDGLDVSGEATGYYWLPFFLQLAADPDLEPYDLNLFLLNPRWVHWFKKCFAQDDKSDQKDPYYIAERTRTHRPDVVWTPQMDTLALRFYTRFRFHWVQNLAREKCYFSAFLFLKASAYRRLEPFANVFGATSRLVLTQLPSLDELAALPIEALTAYLHELSGHHLRDPADNARKLQRVVRESFPLDTALALPVQRILDLTLEHIRFLEGQIAQVDDWIAAELPSHPAIPQLATIPGVGPVFSSGIGAEVADTQRFLQGKKWDRRRKRYRPRNLRDAEDAVAKIAGLWWPRSSSGDFEAEDRRMAKTGNRYLRYYLIQAANQMRLHIPDYAHFYARKYQEASKHHHKRALVLTARKSVGLIVGLLHRNEPYRSKEG

SEQ ID NO: 372984 - protein, 436 aa, unidentified
MRGCRCSMIMGFTKPIEHFNLQRKKVITMNTLYVGIDVSSKSNVIYLMLPNGDKHSNFSVANSHEGSTQLVKRILSVLTSHSLDTVLIGLEATSVYGDNLVYFLREDATLAPFNRKIHVLNPKQVKKFHDAYNDLPKNDYVDSFVIADCLRFGRINKEVYMGDYRYKALQNLTRARFFAVQNLVKEKQRFMNVLFKKYSTMTQEKVFSDTFSTTALAVYDEFESAEALANMDLHELTDFIIEKGKNRFPDPDAVAKAIQKAARSSYRLPKTVNDSVNQVLSISITSMKALESQIKEFDKAIKAQMELLPNVLISIPGIGPVYSAGIMAEIGDINRFNSQAALAKYAGLAWKQHQSGGFESEVTRLIPSGNRFLKYYLCEAAFSLVRCDKEYSDFYRLKYKEVNRCQHKRALALTARKFVRLVFRLLKDNRLYCPAK

SEQ ID NO: 372985 - protein, 433 aa, unidentified
MSNFFYSPVIGIDVSADFSYTAILAPNGDIYKKSFKIQHDLNGFNHLVNEIKKVEEEFNMKTAIFMESTGVYHLSLFHYLNKYFDNTFVINPLVTKSNKNGDIRKVKNDKKDALSIATIGKFQTIKLSQQLSLDIFLLKNLVREYYKLTDTSSTFKKKLSADLRVIFPGYNTIFSDSTSKSSIELLSQYPTPQSILEAPKENIIKIFLNSSKKGIIWSENTYSKLFKVANEAKIIGLPLDGLAVKIASSITLIKTIQSEIDTLLQKINNFIQSETFPESIRANIELIDSIPGIGQLTAITIIAEIGDIDGFLKPKHLIAFFGIDSSVNQSGNFKGDDNKISKRGTRIGRRALYSVALASIRNNRNGVPINKVLLDYYQINLKGKKPKIALVAIMHKIINYIFAVLRNQTPFEQRDPKIHKQMFLENNSLNKVA

SEQ ID NO: 372986 - protein, 347 aa, unidentified
MKDVTTIGLDLAKQVFQVHGADAEGAPLFNRKLRRAEVLRFFAKLRPCLVGMEACASAHYWAREIAAFGHDVRLLPPQYVKPFVKRGKTDAADAEAIAEAVTRKTMRFVPVKTAEQQAAVMVLKTRALLVRQRTQAINALRAHMGELGIIAPTGIANVKALAVIVRDEDDVRLPPAARFALIEIVEQIEMLAVRIDKLEREIVIQARQDADMRRLTTIPGVGAIIAMAVKAFVPDPAGFKSARHFAAWIGLTPKAHSSGGKERLGRISKMGNPELRSLLTSGASSVLRHVRYHDRAWPWLKDMLARRPFKVVAVALANKIARMIWALLNKGGIYRNPTEMAAAAVPA

SEQ ID NO: 372987 - protein, 371 aa, unidentified
MKQDNTKFIGMDVHKNTVSIAIADGPRKGELRSYGTIPNDIKSIDKFIRKQISMGNKLHVVYEAGPNGYGIYRHLVGNGIECIVVAPSMIPKKSGVRIKNDRRDALTLARLHRAGELDAIYVPDPEDEAIRDLLRGRDDARIAVRKAKQRLLSFLLRHGVIYTAKTKWTTAHFNWLSDVKMEHPAQQITLQEYIDSVHESKQRVTRLTQVVTATVKTWRMRPVVLAIQALRGVSELTAAIVVAEVGSLERFSTPTKLMAYLGLVPSEHSTGDTIKRGGITKAGNGYARRALVEVSWTYRFPARVTRHLLKRSRDLPRNIQDIAWKAQLRLCSRYKRLIAKGKPTQVVTTAIARELIAFIWAISQEVKISTK

SEQ ID NO: 372988 - protein, 329 aa, unidentified
MMIIGVDYYPSFQQIALFVEETGEYGEQRLNHEGGEAERFYRGLQQRGIRVRVGMEATGYARWFERLLAELGFELWIGDPAEIKAQRVKKRKTDREDARLLLRLMREDRFPTIWVPSPENRDLRQLLWHRHRMVQMRTRIMNQLQALAMNEGKRWKSKLFSQEGRAEFEKLALAPWASRRRRELLELFDQLNPSIQELSAAVEQEVQKRPEALRLMTHPGVGPITALAYVLIIGTPERFARGRQIGTYVGMIPTEDSSADKQRLGHISKQGSSLLRYLLVEAAQAATTLQPALAASVPALGRAPTPEHREGRQGTPTRDSVVLDVAKWL

SEQ ID NO: 372989 - protein, 267 aa, unidentified
MELKKLCCGIDVSHTSLDVCYQNNLGDLFHLRVGNNIKGFEKILEHTGVNYHFVMEATGVYYIRLAFYLHEQGCMLSVVNALSIKRYIQMHLERNKSDKKDAGWICRYAIEQRPPYWEMPDTAYFESKQLYNTIREYAEQIKRFNNQLHSLRLLPVPSKDTIKSLEKMKLQLEKEMKSLEQKLEISLHQWQPAQLKSVSSVKGIGKRATAMLIVYTQGFKYTHSHRQLISFAGLSPTEYSSGSSIQGKPRIYKRGGFVITIPWDCSH

SEQ ID NO: 372990 - protein, 346 aa, unidentified
MKVTTIAIDLAKNVFQVLGMTADAKKVYNKRLNRNQLKELLCNTPACTVVMEACYSSHYWGRVGLQFGHNVKLIPAQHVTPFVRGNKNDSNDALAIFEASSRPNIRFVPIKSEAQQEVLMMHRIRDRLIKQRIACTNQIRGLLVDFGFVFPQGFTAFEQNIWDIINDSEQRPLLRYLLNQVYDEYLQITKQLKDLNKLIKQKVEQTETGPILLSIPGIGHVIASAFEACIDKGQAFNGPKELAVWLGLTPRQYASGNKSQIYGITKRGDSYLRKQLIHGARTVVSHAHKKDDALNQWVTQLKARIGFNKATVATAHKLARLMWILLKKQTRYQAQSGQTAEIISCV

SEQ ID NO: 372991 - protein, 286 aa, unidentified
MQTFPNIGVDVAKDAVVVACAAQSFPAHSVTNQRAPLLAWLKSLPAGSRIGLESTGGYHELLADLAHAQGHTVFLLNPLDTKHYARAMGSRAKTDRVDAELIARLVAQEHANLRPYTPPTANQRKLDRMIRRRAKIARIKSSLKLTMGNLGGFAAELKAALRKLDALIAKLDSAMSAIAARSPQHGEAQQRLQTIVGVGPVVGMALTNMLERVPFRNADAFVAFTGYDLKANDSGQKIGRRRLSKRGPSELRRLLFVAAMAAVKTKVWKPIYEHYRTPGWSTPHRW

SEQ ID NO: 372992 - protein, 344 aa, unidentified
MDHFGGLDVSVKETSICIVDDTGRIVKEVKVASEPEALLKVLGNQAYRFKRIGLEAGPLSQWLFSGLAEAGLPVVCVETRHMQAVLKAQINKTDRNDARGIAQMMRVGLYRPVHVKTLRSQKLRMLLTHRKLLQSKAIAIENDLRGTLRNFGLKVGMVGTVKFEARIKELVESLPDLAELVEPLLIVRRTLREQIVILHRRLLAIVRDDEVCQRLMTTPGVGPVVALTYRATVDVPARFRKSKSVGAVFGLTCARYQSGEIDWSGRISRCGDEMMRVMLYEAAQSMMRSKKWSWLKAWAMQIARRRGMKKAIVALARRLAVIMHRIWVDGTEFRWTREQAAAAA

SEQ ID NO: 372993 - protein, 336 aa, unidentified
MTEFTRIAVDTSKHVFTLHGIDLKGSAVLRRNLRRAGFVEFFKKLPATQIAMEACGGSYHWARELQALGHEVRLVPPQYVKPFVKRGKNDRNDAEAICTAAGQADMAYVPVKSAELQAGAMLLSVREWLTRQRTQLVNALRGHASEFGLVAAKGEAGLRALIAEAADTPTLPDPAVQALAVLGAEIEHIETVLEQTDKKLIAQHKASPMSRTLAEIPGVGWMTALTLSLRVDAAQFKSGRHLAAWIGLTPREHSTGGKQRLGGISRAGNERLRSLLVLGSTAVIRHARPGRRSPWLLSLLERKPRKLAAVALANKIARVTWAMMVSGEAYRQPAGA

SEQ ID NO: 372994 - protein, 346 aa, unidentified
MEHYAGIDVSLEWSSICVVDALGKIVKEAKISSEPATLVAFFEALGFAVKRIGLEAGPLSQWLHAGLKRAGFEAVLLETRHVKAALSAMTVKTDRKDARGLAQLIRMGWFRPVHAKSIRSQEVRALLVARKQLLGRLIDVELSIRGILRGFGLKVGPVTRKGFEARIRELVTGQATLERIAGAMLSARVALKAEYEKLHKTVLAIVRDDAVCRRLMTVPSVGPLVAITYKSAMDDPNRIPKSKAAGALFGLTPRKYQSGEKDVTSGITRAGDEMVRTALYEAANVLLSRITRFSKLKRWGIDVAKRRGSKRAKVALARKIAVILHRMWVDGSTYRWTETQPIAVQA

SEQ ID NO: 372995 - protein, 420 aa, unidentified
MTTSKDSRILSVIHSVCCGLDVHKKVIVATLISTDESGQDISQTMEFGTFTDDLEKLRSWLLEHECFVVAMESTGIYWRCVHNILEADVEVILVNARHVKNVPGRKTDIEDSRWLAGLLRHGLLRGSFIPAKEIRQWRELSRVRRKNRDTLGDYKRRVHKLFESANIKIDSVVSDLFGVTGRNLIMLLMTGPKEIRIEDIELCAKGRLQGKVSELYRSIQGFYEEHHRFQLTSLMQVIAALEKANDAIDTRMRELMQEHNGLIRRMDEVPGINELSAQYVLSELGPDLGTFADASALASWAGLCPGNNESAGKRRSGRSPVRKHHLKTIMIEVAWAAVKKKGTYYRDKYWRLRYRLGPKKAIVAIAHRIVKALFFIIKKGEEYRELGDRYLAAKSQKNKLTRIRRDAEELGFNLIPIAVG

SEQ ID NO: 372996 - protein, 353 aa, unidentified
MKTDSTLILAIDLGKYKSFACVYEPEGGEVKTATVDSNRFELVRVIERWRPAVVVIEACALSGWVSDLCGELGVRCRVANTASEAWKFKHAKRKTDRDDALRLAQLQALGQLPEVVVPPKATREWRALISARQALVCRRVALQNRVRGILLGQGLPMPRGGRAWSATGLKGLDQLARPLADCAATELWRGLLHSALAEYRQVLTLIDDMEAQLDAIAAADAGAQLLSSVPGVGPRTAEAVAAHLGDARRFATGKQVSAYAGLVPKQYQSGETDRRGHITKRGPAVLRKLLVECAWCCLRYNAWARALYLRLTHGGKTRKKPAVVALARRLLVRLWAMLRDGATWRGDPTPLAA

SEQ ID NO: 372997 - protein, 383 aa, unidentified
MKNTIVHDEGAASLEVAVQRIKLSGSMIKIGLDMHARLYVAVAQYDHLLPKPARRLAPMEFLPWVEQLLRAGHTVHVVYEACGFGFGLYRELKALGAHCYVTAPRKLDEQCTRVKTDPRDATTLCQRLSRYLDGNTGELAVIRVPTEREEQDRHVSRQREQLVRLRQKLEAQGRSLLISHSLASPAHWWKNQTWSRLRRLLPAWICIRLEVHRPGLLILQKQIDALSVQLQAAAPADVPLGIGKLSTVVMTREICSWERFNNRRAISCYTGLCPGEHTSGTKRVPGSVTKRGNPRLRATLVECAWRMVRFQPNYPPVKKRLSVLAKGARATGAQRKKAIVAVARHLAVDLWRIHTGRCSAAQLGLNNAETLRCSRGTVVNPST

SEQ ID NO: 372998 - protein, 451 aa, unidentified
MKKKNEKTKIVKVSSGLPVLYDHAAGIDSGDTEHYVATPDGKGGHEVKCYDAFTCELRNVVSDLKEKGMTTAAMETTGVYWLNLYLLLEEAGIEPWLVNAKHVKNVTGRKKDDTDAIWIQKLHACGLLQKCFQPDEQVRILRTYVRQRKNLITICSDSVRRMQKALELMNIKLHTVISDILGKTGMQMVEAILKGERNPEVLAELTDPRIKATRETIIKSLEGIWKDEYLFMLQQAHEEYLFYQKQIKCCEEKIRKQLLQQVAIVNEGDISAITWQKEVKKKVRKNQFSFQVTPYLKAMTGVDLCKIPSVNEITALELISETGVDMNKWKSAKHFAAWLNLTPNTKITGGKIISSKVPKKKNKAGQCLKMAASSLSKSKSPLGDEYRRMRAKFGGKGAALAMAHKLSRIIYTMLKNKTEYNAEIITGNQKKWREQKIKRMEKQLEKLKKTA

SEQ ID NO: 372999 - protein, 377 aa, unidentified
MTVSNGMDAPTFDGINVPEWKCQQPLEPEGAPTMQITTIGIDLAKNVFQIHGADQRGKAVLRKQLRRDQVAPFFANLPPCLIGIEACSSSHHWARKLQALGHTVRLMAPQFVKPYVKSNKNDVADAEAICEAVGRPTMRFVPIKSAEQQSVLSLHRVRQAFVKARTAQANQIRGLLAEYGLIVPKGIGFIATRVPGLIEDASNELPGLFRQLINRLLEHLKLLDQQVDEIEVQIKAWHRDDETSQKLQKVPGIGPITASALAATVGNARNFDNGRQLAAWLGLVPRQSSSGGKQTLLGMSKRGDAYLRTLLIHGARSVLYRASQKNDTESWLVKLTTRRNANVAAVALANKTARIVWALLAHDREFRPDYTAAAAAA

SEQ ID NO: 373000 - protein, 372 aa, unidentified
MKEGSVIFIGLDTSKSKISVAIAEGARNGEVRFFGDISSEPASVASMVSKLSKRGAKLHFCYEAGPTGYGLYRQIVELGHDCVVVAPSLVPKRAGDRVKTNRRDAVSLARLHRAGELTPVWVPDQGHEAIRDLVRAREAASDALKQARQQIQSFLLRHGRIYTGRKPWTRAHTRWLTCQAFDHPAHQILLAEYCQAIEDAGVRLDRLTQLVVETAASWSMAPVVAAYQAMRGVALMTAVTFVVEIGDVRRFDNPRQLMAYLGLVPSESSTGERVKRGGITKAGNTRARRVLIEGAWTYRFPARVSPTIQARLEGLPRTVREIAWKGQVRLCARYRRLVAAGKPKVIAVTAIAREMAAFLWAIGQEVAPATKV

SEQ ID NO: 373001 - protein, 416 aa, unidentified
MNAVGIDVSSRKSTVAVLRPLGEVVCLPFDVTHDIVGLASLAEKLKTIDGETRVVMEHTGRYYEAVAKALHEAGFFVCAVNPLLIKEYGANSLRRVKTDKADAIKIARYALDNWADLRDFTPMDAIRYDLKTLNRQFQLASKQRTASANNLIALLEQSFPGIRKCFDSPVRSDGTQKWVDFAHSFWHVDCVRKQPFPAFCERYRKWCKRHAYLFKLSNAEEVYALAKRAVVLTPKSKVVKVLVQEAANQLISISRSVEVYRAEMDRLAAMLPEYPVVMAMYGVGKSYGPQLMAEIGDVRRFERKQALVAFAGIDPMPNQSGDKNVRSNKSSKRGSPYLRKTLFNVIRTYLQCAPQDEPVFQFLNRKRAEGKPFYVYMLAAANKFLRRYYAKLRDFFASLDTLQPVAPIPTILKATL

SEQ ID NO: 373002 - protein, 405 aa, unidentified
MVRYVGMDVHREFAQLAVVEDGILRDEGRIAVTPETLRDWACQLCPDDEVALEATGNSDAIATLLTPLVARVVVSNPSKTRAIAEAKVKTDKVDARILAQLLAADFLPPVWLPDDRTRSLRRQVMRRAHVVRQRTRLKNQVHAILARNLAPTPPVSDLFGKTGRHWLSRQPLPEDERASVQALLRQLDFHAHELALVDKELALEALADPVVARLMSIPGVDAIAGLSIVAAVGDFTRFSDLNKLVAYVGLNPKVRQSGNSAPVHGRISKAGRAHVRGVLVEAAWSASRAPGPLRAFYQRIKARRGFQTAIVATARKMTVLSWHLVTNDQDYAFARPGLVTHKRRKLELAAGAPSRRGNHRQPGAAYNSKQCRDQETADVERAERAYEVLVAHWQPRKPATQTTSP

SEQ ID NO: 373003 - protein, 344 aa, unidentified
MEITTIGLDLAKRIFQVHGVDASGNVVVRKALRRSQVLPFFKRTPRCLVGIEACGTSHHWARELIALGHEVRLMPPAYVKPYVKRGKTDAADAEAICEAVTRPTMRFVSVKSRDQQAALSMHRTRNLLVKQRTQIVNMMRGLLAEFGIDIPKGLERALMMAREIVDGAAPDVPPEAVKIVGTLSQQALDLHARLREIDRDLLVWQRSSDVARRLMTIPGIGPVGATAFAATVGDANQFRSGRQFAAWLGLTPLQMSSGGKERLGRITKMGDKYLRKLLIIGMTSLVRRAKYKPESVDLRLADLLARKPVRVATVAMANKAARVIWAIMTRGETYRSGHVPALAA

SEQ ID NO: 373004 - protein, 345 aa, unidentified
MQSMYYVGLDVHKKTISYCVKDGSGKIHADGTIPATRFDLDRWMRTLPQPWTAAMEATVFTGWIYDYLLPHAAAVKVAHPLMLRAIAAAKKKNDRVDANKICDCLRCDFLPECYMASTAIRERRRTLRYRNLLVRQMVQMKNKISGLLMEAGVSYNKQRLHKAGYFRELLATNPDIDEGLVSLLRLCRETVVRLQRTESALVRSLERDSLLMDRVERLMTIPAVGPITALTWALEVGDAKRFSSIKKAISYCGLCGAEKSSANTVQRTPLSKQRNQHLQTTLIEAAKMAPRNSPELAMLYDKEKQKGNANRATLTVARKLVAYLMAVDRGQRNFQVTETSNCIAA

SEQ ID NO: 373005 - protein, 430 aa, unidentified
MKSNTQNAKIEAITEKTLVLGIDVGSEMHYARAFDYRGIEYSKKPFKFSNTEAGFVTFKEWILDLKERHEKDKVVPGMEPTGHYWFNLGKFLQDNEMKPVLVNPHHVKKSKELDDNNPTKNDRKDPKVIAGLVREGRYMIPYLPDGVYADLRTASNIRFQLQAELTRIQNRISRWFNIYFPEYKTVYGKPDAKSGMLILKAAPLPEDILTLGIDGVNQIWRDAKLRAVGKARAKTLIEAAEHSVGSKEGAVSARMEIRMLLEDYESRNIRLQEVMTLIEGLVKQIPMAEKLLEIKGVGIKTVSGFFAEVGDISRFNTPKELQKLAGLALVESSSGKHKGETTISRRGRKRLRYLLFEVAMSLVAKNPEFRELHNYYTTRRLNPLKKMQSLMAIAAKLIRVFYAMLTKGVDYDPKKMVSDIKRPAVYLQAA

SEQ ID NO: 373006 - protein, 346 aa, unidentified
MLNAGLDLSRKRLDFHLLDADGATIEVGAAPPDADGLRGLSERLARHGEAIRAAIESMNGARFVHDRLELAGWQVEIADAQKVKGLAPLACKTDRIDAWVLAELARRDLVPAIWLPDPLVRAERERARWRLHLVRHRSSLKQRVHAVLLTHGKPCPVSDLFGVRGRQLLARLGLPEPWQGTIEASLRLIDELDREINECERELRRLGADHDYVPLLCTVPGISWVLAYTIAAELGDITRFPTPRKLAGYSGLCPRVYQSGDRDLRGPLSKQGPRYLRWALVEAATHACTHPVYRDRYQQTKTRIGKQRGAKVAQIDLARRLTEAIWHMLSRGERFAPKGATDPLAA

SEQ ID NO: 373007 - protein, 391 aa, unidentified
MIIVGIDVAKDKHDCFIMDSEGTVLFDVFTVPNTLDGFNVLLDNIKSVTDDLGKTKVGLEATGHYSYNLLGFLLNNGLPTYVLNPLHTNLYRKSLTLRKTKTDKVDARVIASMLMSCVDLKPYTSTLYQNEELKSMTRYRFDKVSERAKLKTSVSRLVTILFPELEKIVSTLHMKSVYALLAEFPSAKHIADAHLTRLTNLLSEASKNHYGKDKAIEIREAARRSIGSVMPAKSMELRHTIKLIADLTEQIDEVEAEIKKLVDESGTTLLTVPGLSYATVAVILAEVGDFSNFATPDKVLAFAGMSPSTYQSGQLTNCYARMEKRGSKYLRYALYNAAKYVCTWDKTFADYLSKKRAEGKHYNVALSHAVKKLVRLIFALEKTHLPYQPSI

SEQ ID NO: 373008 - protein, 440 aa, unidentified
MVNPNTAAIDIGSTMHMAAVNPDADIMPVRAFGTFTHDLHDLADWFQSCGVTNVATESTGVYWIPTFEILEARGFEVILVNARNAKNVPGRKTDVSDAGWLRQLHSYGLLRGSFRPDAEIATLRAYMRQRERLTEYAAAHIQHIQKALMEMNLQLHHVVSDITGATGMKIIRAIVAGERNPDVLADYRDVRCKSSPETIRAALVGNDRAEHVFALAQSLDLYDFYNAKIVECDRRLEAAVAALSVKAGEDLPSLPKARIRRKQVNAPAFDIRASLYGVLGTDLTQIHGLGPSLALKLLAECGTDLCAWKTAKHFTSWLCLAPGNKISGGKLLSSKTRRSSSRAAALFRLAATTIGRSDTALGAFYRRLAARIGKQKAVTATARKIAVLFYNAIRNRVSYQDQGAAAYDERHRQRVLANLQRRAKTLGYALAPVPPEPAVS

SEQ ID NO: 373009 - protein, 319 aa, unidentified
MEILGIDVGKHEMHAVLLLHDRSTSKSVANSAAGFKQLQTWLRNRKVEKVHACLEATGGWSEDLAIALCEAGHVVSLVNPMRIKAFAKSEMLRTKTDRIDAALIARFCRMHAPNPWTPPAPEIRALQGLIRRYQSLVQMRTEEQNRLEAPMVASVVKASIEATLAHLNREIERVEREIGQLFDRHPPLHRQRELLTSIPGIGETTAARILGEMPNIAEFRNVEAVAAYAGLSPRHHESGSIHFPSRIAKTGNASLRTALYFPAISAMRYNPLLRRFADRLRERGKPSMTIIAAVMRKLLTLAYGVLKSGRSFNPAYANA

SEQ ID NO: 373010 - protein, 326 aa, unidentified
MNQQKTPQSVGIDVSKAKIDVAILWDMTETKTKPFSNQTESDMEKLVAWLNDNGVAKDTPIVVESTGSYHWLSCLLLSEKGFMVHLINPLITKRYEQSSIRGTKTDTVDAKRLAEIGVIEKNLPLFFDSRESLSAKKYHSLYAKIKKVKQQLTRSYKDAVESAEIIGMSLNLDTIKDCLNQIEETLKVLRKIIEENVSEMAEQVAGIKGVSRFQASVLCNAVEGRTFENKNQLIAFFGLDIKKKESGTWRGREKLSKRGNSFYRMVLFQLGWSLARNNEEFGKYYQRLRDNGKHYYTCLIATARKFLRFFFAYYLKPNLNSNSEIL

SEQ ID NO: 373011 - protein, 414 aa, unidentified
MKKHNNSAKKSEWTPVQAKPRGPEQRDTKEVLAELVEKLKERLGPKALSANPGQEHSCVGLSPNLDRLTIGVDLGDQWSHYCILGLEGETLAEGQLRTTPQDVAEFFQALNAARVVFEVGTHSAWVQDVICVCGHEVLVANPRLMEGSKRRKRKNDRIDANKLARLGRVDPQSLHPMRHRSKEVRQDLVMLRARDALVAARTQLINATRGLVKSMGARLPKCSSPSFARQAADAVPIGMQEALLPLASLAATLSTSIAEYDKKIEKLSSEKYGHTALLRQVKGVGPITALAYVLTLENPERFGKSRDVGPYLGLVPQQQDSGDSQPQLGISKAGDTMVRKLLVGSAHYILGPFGPDTDLRRYGQRLCERGGKNAKKRAAVAVARKLAVLLHRLWVNGDVYEPLRQSASAMLAAA

SEQ ID NO: 373012 - protein, 347 aa, unidentified
MNFYTQQHKQYCGIDLHARAMYVCILDQSGTIRVHKNLPTTPEAFLRVIAPYRDDLVVGVECIFTWYWLADLCAKEGITFVLGHALYMKAIHGGKAKNDKIDAHKIAVLLRGGMLPQAYVYPAEMRATRDLLRRRCHLVRKRAELLAHIHNTNSQYNLPEIGKKLAYKANREGVEEHFPDPSVRKTIEVDVSLIDHYDQLLGEVELYITRTAKTHDVQTFARLQSVPGIGQILALVILYEIQDIARFPRVQDFVSYCRLVKCAKESGGKRLGTSGKKIGNVHLRWAFAEAAVLFLRHNQPGKEYFAKLEHKHGKAKALTVLAHKLARAVYYMLTREQAFDLNRFVSA

SEQ ID NO: 373013 - protein, 453 aa, unidentified
MSEPSNESKGTSLEIVHPNAAGIDIGNAAHYVAVPPDRDPQAVRRFECFTEDLKKMADWLIQCGIDTVAMQSTGVYWLPAYEILTERGLRVFLVNAAHTKNLPGRKSDVQECQWLMKLHTYGLLSNSFRPTEEICVLRTYWRQRDAQVKAASMTIQRMQKVLTEMNVQIANVISDISGVTGMAILDAILQGERDRYKLAELAHPRIQASKEEIAKSLEGNWRSELVFVLRQERDIYREYQKKIGECDEAIQAHLKTMEDKAEPGSKPGTPKAGKRAGGNAPRFDLRGELYRISGIDLTRIDGINIMVAQTILAEVGLDMSKWPTEAHFASWLGLCPNHQITGGKVYHRGSRHVENRAATAFRMAATSLWRSKTYLGAKFKRLRAQLGAPKAITAMAHNLARLVYRMLRYGKEYVDKGMEFYQQRYQQQQIRWIEKKAKDLGLVFTLTPESDVS

SEQ ID NO: 373014 - protein, 407 aa, unidentified
MDVVHLKCAGLDVHAQTVVACARLGSGKAVAYDRRTFGTTTPELLALSDWLTAHGCTHVAMESSGIYWKPVWHVLDGHFELVLANAMHIRNIPGRKSDLNDATWIADLLAHGLIRSSFVPPPSVQELRDLTRTRKQLVREIAQHTLRIQKTLETANVKLTSVLADILGVSGRAILTALIAGETQPERLAALASDQVKASRAELVAALHGRLTDHHRFMLRLHLDQIASLDVAVRDVEARLGETLAPFRAAVDHLITMPGVSETVARVIVAEIGFDMTRFPSAAHLVSWAGLCPRLHESAGKRLSNRTRSSNPWLKTTLVQAAWAAARKKDSYFRAQFLRIKSRRGPKKAVLAVAASMLTAAYHMLRNGAVYRDLGADHFDRHDKAKLAKRLIARLHDLGLVVDVRAA

SEQ ID NO: 373015 - protein, 341 aa, unidentified
MDISVLGIDLGKNSCSVVGLDATGKVVVRRRMRRETVITYAASLPACVVAMEACCGAHHMGRALARQGHAVRLMSPEYVRPYVKAQKNDDRDAEAIAEAATRPTMRFVELKTEEQLDMQTLHRIRDQLVGDRTSLMNQIRSLLLERGYIVPQGRAKLAARLIEMLDGDEPVLGARIHRLVSDMRLRWIALDERIADLDAEFTEAARSDERMRRLLTIPGIGALNATALVAAVGDARTFGRGRDLAAWLGLVPRQATTGGKPRLLGITKRGSRYLRKNLIQGARSSLPTMSKSDTRLGAWLRGLLSRSHPNTVVVALAAKMARIVWALLRHERTYEPVALTA

SEQ ID NO: 373016 - protein, 359 aa, unidentified
MEAQVKKIDFTGQNIYAGFDVHKKSWKVTIMAEDAFYKTFTQPPNPETLFNYLKRNFPGGNYYSAYEAGFCGYWIHEKLKSFGIKSMVVNPADIPTTDKERVQKEDKRDSRKIARSLSSGTLVPIYTPTIQTQRDRSLLRTRAMLVKDMARYKNRIKSFLFFYGINIDDAFEQSKKHWTKRFMSWLESLEFDGECGKEALQVLISECRNLRTAILKVTKQVRELSQTATYQEQVTLLESVPGIGLITAMTILTELETIDRFNNIDKLCGYIGLVPSTRSSGEKEKSGDITPRGHGVLRNAIIESSWTAIRNDPSLMKSYLVCCKRMDSNKAIIKIAKKLLSRIRFVLVNKKPYECLIES

SEQ ID NO: 373017 - protein, 347 aa, unidentified
MVQVSTIGLDIAKRVFQVHGVNQAGAVVFRRQLRRTEVLKFFAKLAPCLVGLEACASAHYWGREIVALGHQVRLMPPTRVKPYVKWGKKSDKVDAAACCEGVTRPSMSFVPIKTVESQGALMMHRARQLLVEQRTRLGNAIRGHLAEMGIVAAQGQRGLAALLAMVSHSEDTNVPAVIRPVLQVLVEQWHSLAPQIAALERQIIAWHKSNPDSLRLATQPQFGPILSSALVATAGDATRFNNARQFSAWVGIVPRQNSTGGKERLGGITKTGDRYLRQLLVVAATGLIHRARANPQIAPWFAGLLARMPAKKAAVALANKMARIAWAMLTKQTPYRAPLPKPAAQAA

SEQ ID NO: 373018 - protein, 334 aa, unidentified
MAENAKLIIGVDVSKHTLAVTALKGSDAVMFEVSNDTERFHKAVSRRFSVRATEVVVVMEATGVYHLKLACRLHKKGYKVAVVNPFVIKKYAEMKLKRVKTDKVDSRLIAEYGRDNLRQLRLFEPKDEAVYRLEAKVKILEDLEESLRRLKNQEEAMRHYPLEEVLTWHYEEVMDKIKEQVEKVKAEIKEIIREHFQREYKLLTSIPSVGDKFSLIVIGLLNCFEGFEGVKKVVSYVGISPQPWQSGKRQKRGKMSKKGNGYIRRVLYMCAMSASRHNEECRQLYRRLLSKGKGKRAALIAVANKLLRQAYGVLKNDMEYVANFHLHRRSPCGA

SEQ ID NO: 373019 - protein, 410 aa, unidentified
MEILHAICAGLDVHKDSVVACVRHLRNGVAVTSVKTFKTTTQELLQLSDWLSAESCTHIAMEATGVYWKPVWHILADGEFELVLANAAHVKNVPGRKTDVKDAAWLADLLAHGLIRPSFVPDEPTQRMRDLLRTRKQFTRERTSHVQRLQKTLEDANIKLDCVVTDIVGLSGRRMLEALIAGQTDPQALAALAHRNLHASASSLEAALRGRVTAHHRFLLRLHLDHLDAVDAAIFSIDQEVGLCVEPFRAAVALLKTIPGVSSLSAEVIVAEIGIDMTRFPTDAQLISWAGLCPGNDESAGRRRSTRLRQGAPWLKSALVQSAWAATRTKGTYLQAQFLRLRSRRGAKKAICAVAASLLTSIYHMLKNGVAYADLGAPHFDRQSKDRKVLTMVQRLRNLGYVVQLQPSTA

SEQ ID NO: 373020 - protein, 396 aa, unidentified
MRLDEGGGIDVHKETFKVAACHENVALQERTFGTFTKDIYAMRDFLLEQKIKHVVAESTGVYWKPMYRILSAAGIEVSIVNPTRVKQMPMEKTDKKDARWLAKLLMNDMIKKSFVPDEQQEQLREFSRMHTKYIRQMTRVKNQVVRLLESCNFKIRSIVSDISTQTAQKLINAISNGQTDTDLLIALCHHSVRKRQGDERLKLALEGRFTKYMQQQLRMLLDDLHYFEKQKMQTENVLKELFTNEQMEKIKKLDEVEGVSQQQAEIIMAEIGAGIDSFSQADQAAKYAGLTAGQRETADQQKPVRAVPGNKHLRVVMVQIAWSAVKVKNGYWKAEYQHLKKRIGAKKAILAIARKMFKAIYKVLTTEHRYEKWDAKKFYDNRIKTIEFKKRLSIAG

SEQ ID NO: 373021 - protein, 355 aa, unidentified
MNSLGIDVGKKKCRAALKDERGDIIREFFFSNNNEGISALIQSASHYGKCTAVVESTGNMWIRIHDTLEENGIDTILANPYKTKIIAEAKIKSDKLDARILADLLRADLVYEAYVPTKEFREKRSLVRHRISLVKSRSMLENKVHSLLDKYDYKSKLTDIFGKSGIIWLKTLDISTIDRLIMNTTLAAIENINIQVDTISKELAKYGWDSNDVKILLSMTGIDVFSAMLIATEIVDVRRFCTPWKLVSYAGLAPSIRESSGKTKTGRISKQGSPWLRWILVQCAMTAVRYDQRLRSFYERLKSRKGSAKAIVATAKEILVIIWYMLTRRELYRHMNKKRYEQKLSKIKKIKESAV

SEQ ID NO: 373022 - protein, 340 aa, unidentified
MFHVGLDIHSTRISICVLGETGQVVHRSQVRGIEEMLRVLKGLPDRFEVCYEASCGYGHYHDLLRPLAARVVVAHPGQLRLIFRSKAKNDRNDAERLAKLLYLGETPAVHVPAADVRMWRELINCRSQVVAKRTRAKNTARALLRSSGVVPPTHPGLWTKAGRAWLRRLDLPTASQRLRRDLLLEEIEALDRQVRRIELELNRQARRSPAVARLRTIPGVGARTAEAVAAFVDDPHRFGSAKAVGRYFGLVPCQDQSGDRNRLGHITREGPPVVRQLLAEAAWQAIRRSSTVRAFYERTRREDPQRQKIALVATAHYLVRVMWAMLRRGTVWHEGPALAA

SEQ ID NO: 373023 - protein, 350 aa, unidentified
MNRIYIGVDFHARQQTICYLTTEGGEIQLHELKHQNKQEVRDFYSQFEGQVIVGLEASGYSPWFERLLEELGCVVWLGHATEIRRRARWRQKNDRRDAELILDLMLHDEFPRLYLPPLQSREVLRMLRYRQKLVKIRTMGKNSLQALALQSGLAKGSHLFTKAGQQELRAAVMSPAMQWQREQWLQLLDPLNQRLTETMLWLKQQSLDDLRIARLRTHPGIGLLTSLCLVHSLEPVTRFRNQRKVVAYAGLEPLERSSAERIRFLGISKAGSRILRYLLVEAAHVAVRKDEELKRFYQRLAARRGRAKAKTAAARKLLIRAFIMLRDEIDYAEFRRRAVAARLARQITKA

SEQ ID NO: 373024 - protein, 348 aa, unidentified
MAHFVGLDVSVKETSVCVVDNAGKVILEQQVPTEPADIIALLTSLVVPFDRIGIEAGPLSQWLVNALTGADLPVICVETRHMKALLTAQQINKTDRNDARGIAQMMRVGLFKPVHVKTLVAQQQRMLLTSRKLLQRKLLDVESDLRGTLRNFGLKVGCVSGSRYEARVRELVADFPRLAAIAEPLLSVRRVMRQQFAVLHKMLLDTVRGDPVCRRLMTAPGVGAVVALTYRATVDQPQRFAHSRAVGAHVGLTPKRYQSGETDYDGGVSKCGDAPLRTMLYEAAQVLLTHSRKWSWLKAWGTRVAQRRGMRRAVVAVARRLAVVLHRMWVDGSEFRWSRDSAAAPTVA

SEQ ID NO: 373025 - protein, 387 aa, unidentified
MIYYVGIDISKYKHDFCIISNTGEVIIENSSFENNKKGFQELLEKLKPYNKSDIHIAFEATGNYSLNLELFLIDQGYSFMKMNPLVIHQFLKARSLRRTKTDKSDSLAIASYLMSVQYKPNSDLLYNIFTLKSLCRSREQLIKERSKFAVLLTNELDKTFPELKPFFDNRVSETLLYILDKYKNASHISLMKDYDSIRKISRGKFTYAKFVKLKELAKNTIGHHNDNTDLLISTYVSIYKNFNEKIDPIDKQISIIIKELNPKMLSIPGIGEISAATILSEYGDISNFSSPNKMLAFAGLEPSIIQSGTLEHNGKMVKHGSGHLRYAIMNIAMIILRHSPTFYDYYQKKRSEGKCHRVALSHVCKKLIRVIYCLEKNNIDFNPSLLK

SEQ ID NO: 373026 - protein, 337 aa, unidentified
MNYSGIDLHSNNSVVSVIDEADRVVAEKRLPNDLARIVAFLAPWRAELAGVVVESTYNWYWLVDGLQAAGFVVHLANTTAIKRYDGLKHTGDETDARYLAHLLRLGILPTGTILPAKHREVRDLAHKRMQLVRSRTTHILAVENITARQCGTRITSNQVKQLDDAAVNQLHLPEDVALAVRANVAVITTLSAQIAIVEKRLQEKVTGHADYALLTTVPGIGQALATVIVLETGTIERFASAGNFASYARCVDSQRMSNSKKKGEGNTRNGNPYLCWAFIEAANFAMRFSAEARQFYERKKAKTNPVIARKALNHKLARACFHMLKERKPFDVTRCFA

SEQ ID NO: 373027 - protein, 478 aa, unidentified
MNNELFVGCDVSKGYADFQAVCRDGTPFEAAFRLEDTRQGYGQLKAIINRWVTQGTGYLHIGVESTGGYENNWVRLILGWAEELPVRIARLNPSGVTSLRKAGLIRTVTDAVSAEAIARYVLVFPEKITWLTSRQVPCNEFAAARKFQRGTATLDKQRQQLASQLEKLMYEYFSPLLVYTRHGIPRWLITLLSKYPSPASFRRAGKKRLTVIKGITMEKAATVLDKLSAGDAEPGLLDRENIRQTARQILHLYGLIEQRHELLQSEYSDDPQVDLLRSVPGIGLQTAVLLRIEIEDISRFATAKKLATYFGVCPKFVESGDKKGQIRMSKQGRPDVRKALYMSGLSVIRHDESFKALYHRYRNKGHNHYQAIGVVMHKLLRVVYGILAHRTPYDPEVDKANQRRAKQKKRAKEDDQNRIISQQKKRLNRYQKETVDAPRSRRSVQKLREEQAASQSSTVEECAGSPNAPQTKTYENIT

SEQ ID NO: 373028 - protein, 355 aa, unidentified
MESTKYVGLDVHQEATTIAVMNSAGKLIMESIVETKAITIRQFIQGLHGDLHVTFEEGTWAAWLYDLLKPYVTKVIVCDPRKNTLLKVGNKSDRIDPKKLAELLRNGALSEVYHGENGVRTLKELARSYLTISKDLGRVMNRVKAVYRSWAIPCAGTQVYALCHRSEWLSKITEAGVRRRAEHYYQQLDALQSLRREVRKDLLLESRKHNATKLLRQIPCIGPIRAAQLVALMQTPHRFRTKRQLWTYSGLGLETRDSAQYCYVEGQLQRSKKPQQLRGLNSNHNHDLKNIFKGAATTASVSAGPFHDFYQALLTKGMRPTMARLTLARKIAAITLIVWKKGARFDPQHLKQQAA

SEQ ID NO: 373029 - protein, 373 aa, unidentified
MNENVIYVGLDVDDTQYHGAAFDQQTGETIGFKCRPTLKGLVRQLEKLQSSFKDYHLIICYEASYIGFCLQRDLTEAGYRCDVIAPGSVPRKGGKKSVKTDRIDALDLAQFHAKALLTIVEPPDATTEQDRDLLRSRQHTMQRLGDVRRHLQSLLRRHGLHYRSENKTRTHWTKHHYCWLDRTIEECDGSLKINLQLLLQQIKALDEVLAIYTQEIDAMAARPEYRGPVSALTCYKGIKNLFALTIITEIGDIKRFPHPRQLTAWVGMDIREYSSGGNHHRFGITREGNRYLRTAFIEANQRAYRSPVISRDIKVRRRDTDAEYIAIADRCLKRINKKGHRLLDAGKHPNKVKVACAREMIGFVWESLNQAAA

SEQ ID NO: 373030 - protein, 350 aa, unidentified
MRYAQINSKYVCGIDLHARNMYTCVMNRTGEILFHRNMRTDFDQFKKKMTPFLSDMAVGVESTHMYYWLADACNNEGIPFYLGHAYYMKTIHGGKTKTDRLDCRKIADLMRTNYYPLAYAYPEEMRGTRDLLRRRHRLSRLRAECYRHINSLFHQQGMDVNPRDIKSVKTRRELISKHLDNDILSNASADLDMIDFLDPLIKESEQKIRARAKCHDRASLNILMSVPGIGDIFSLIILYETNDINRFASHQHFCSYARLVKCERSSAGKHTKGGNQKIGNPYLKWAIADIIIHASHKSKLIGDYYQKLQARFGKRKAKSIISHKFGIAIYYMLKNKQVFDEKRFVQTNMK

SEQ ID NO: 373031 - protein, 428 aa, unidentified
MNRDEGSRLEEFRQFRKEVRGSSEYLLVGIDIAKDKHYVFFGTAQGKTLLRRLVLENNIEGFRKLLAQARALRDQNGLRRMVFGMEPTGNYHKPLGEHLIRCGHLVVLVSGVAACENRKTLDGRWDTNDTRDAANVADLMSQGKCIFYEFPVDALQDLRNLLSLKRRFKRVEHGYRVRIRNHLLAKYFPELDRYYRRSSPTNLAIVRWCLDPSVIAGLEYKRFAEMVSSSRGRSSQEKRLQAIWKLAVDSVGCEAGPTVAFEAKVMVEGLKQIRESMGQIEEKIQEVCFSFPEYEYLLSIPGFGKDVASKVLGAIGNPFRFQNGRQVLKLAGFDLCAKRSGKSSENVVPVISRRGKADLRNGLYQAALIASIKNPGFIAYYTDKLRGREREPGIKYKMRVKLAAKLLLVAWTLMKKKESYNPDYLGTE

SEQ ID NO: 373032 - protein, 490 aa, unidentified
MKSQPSKEAEKNKKQRKKANGDPTPDKWDQMNRKQRREMMRKMQNEDLSLDVVHPDAAGIDIGNESHYVAVPPSRDRQAVRHFGCTTAELKMMADWLKQCEIRTVAMQSTGVYWISVFDILEAAGLEVYLVNARETKNLPGRKTDVQESQWLMKLHTYGLLRNSFRPSCEIRRLRTYWRQRHDLVQSAGRHIQRMQKALTQMNIQLANVISDISGVTGQTIIKAILDGERDPRELAAYRDIRMKASEEEIAQALEGNWQDDQLFVLQQERAGYEFCQKQMAECDRQLAHYLGQIQDRSQGATLPIETRKGRRKKKKGNAPQFDLRQDLFRITGTDLTQIDSIDVMTAMTILSEVGGDMSKWKTENHFVSWLKLSPDNKISGGKVIGKGRMPTNNRATNALKMAASTLRESDSYLGAQFRRFRSRLGPPVATKAMAAKLARLVYRMLRYGMKYVDRGAESYEAQYRKQQVSYLKRRAAQLGLQIIEAAVQA

SEQ ID NO: 373033 - protein, 381 aa, unidentified
MRRYELGDNKVRAALPMVHPNAAAIDVGARKHVAAVAADRAAEPVRSFGTFTTDLHRLVDWFAECGVETVVMESTSVYWIPVFELLEARGFVVYLVNARDAKHVPGRKTDVSDAQWLQRLHSHGLLRASFRPKEEIVELRAYLRQRERLLEYAASHIQHMQKALMEMNLQLHHVVADITGATGLRIIRAILAGERDPAALARLRDKRCHASIGTVTKALTGHYRSEHLFALEQALALYDAYQEKASACDARIEVVLKRLSFRRGRKVGPLPAPRPGMRRQPNGPRFDVRAALFALLGKDLTQINGLGPYLALKLIAECGDDLSAWPSAKHFTSWLCLAPSNKISGGKVLSSRTRRSGSRAAALLRLAAVTVGRTDTALGAF

SEQ ID NO: 373034 - protein, 345 aa, unidentified
MNMVIYVGLDVHLNSIAAVWGKAKDKPRSMTIVPTEEGFKALTEAVGTGQVWGVYEASSCGFEAYDQLRALGWKMSIVAPTHITKSVHSKKRKTDLRDAKHLWELLMSHGELGTELAEIWIPSRELQEEREIVRRRLKLAENSCRVKNGILSLLRMHRIKRPEGMKSAWSRKHIAWLRGLTKDDTLGAPVRMVLESCVRELEFLGAEIETLQKAVEALAGEGKYRAEVERMTEVPGVGILTALTFLVELGDLRRFDNRRQVGSYLGLVPACYESGEANDRKGHITRLGPPRVRKVLNQAAWSLVRLDPLWRKRYGELSARRGAKKAITAVMRRLGIELWQRAKSA

SEQ ID NO: 373035 - protein, 312 aa, unidentified
MMQEVFVGVDIAKDWLDIFHPGSGLRRIDNTAAAARRFAKASAKDGVWVIFEASGGYDRLLRDALEAAQARFSRVNPRQARDFARAMGVVGKTDRVDARMLAEFGARLRPAPTAAAAPERCALQALTTRRRQLVEIRKQELTRLPQTLDPAARADIRSLILILNARIRRIEGAMAAQVGATPDMAQAARRMQTVPGVGPIVAATLLAELPELGQLDRRRIAALAGLAPIARDSGKHLGKRRIGGGRPTVRAILYIAALHASRLSPPFKAFRDRLKAAGKPTKVTLVATAHKLLDILNAMLAASTDYKANTMP

SEQ ID NO: 373036 - protein, 343 aa, unidentified
MQAVTTIGLDIAKSVFQVHGIDAEGNVLIRRQLKRRYVLAFFEKLQPCLVGIEACATSHHWSRELKGLGHNVRLMPPAYVKPYVKRQKNDAADAEAICEAVTRASMRFVETKTPEQQSCLMLHRTRQLFIRQQTSVIKAIRAHMAEFGVVAPVGRQGVEALLEAVADVGDNRVPEVARACLAALGAQLRMLKAQILEFDRRILAWHRSNETSRRLDAIPGIGPALATALVASVANPKAFRSGRNFSAWIGLVPKQHSSGGKDKLGGISKQGDRYLRSLFTAGALAVIRYAKLHGTQHRPWLTALLARKPTKVAAIALANKLARMAWAMMARGERYREPVALAA

SEQ ID NO: 373037 - protein, 405 aa, unidentified
MNAVGIDVSKGKSMVTVMRPFGEVVVTPYEVRHTASELRELAHSLKSLDGETRVVLEHTGRYYEPVAQTLCNAGIFVSAVNPLLIKEYGNNSIRKVKTDKADAMKIARYGLDNWAELREYTIMEKIREQLKILNRQYDLYVKNKTALKNNLIALLDQSFPGANAFFDSPVREDGSQKWVDFAASFWHVDCVKSLGIKAFTERYRKWCKRRGYNFREPKAIAIYEEAKELVPTLPKNDCTKVLLNEAITQLNTVSRTVESLRSEMHRMSKQLPEYPIVMAMYGVGTSLGPQLMSEIGDVRRFAHRGSLIAFAGVDPMPKQSGDYERRSNPSSKRGSPYLRKSLFLVMTVLLQNAPADDPVYQFLDKKRSEGKPYYVYMTAGANKFLRIYYGRVREYLNSIEDTTTE

SEQ ID NO: 373038 - protein, 468 aa, unidentified
MIRSVGIDFGQAGPHRVRCLDEQAQLCDAFTFWTTPEGLATLERRVFRDGADPVIVFEPTGLAWLPVAVYLRSRHPNCRLVRAKGQKVAALRKYLRGRSKSDRIDALTLAKMPFIDPEQLYEVYLPPAKLYALLRLTRQRHRLGREIASRKTRLGCLIDGYLPGLRQAFSDPWSPQARAFYRSRLNPFAVVREGEEALCSFLQEASGKRKSCLAEAYLVYTACYNIATLYELSREAGVIDEEFFADFEREIATELRLLEHAEAEAEALAKRIGELYQELHPEDHLRTIPGVGEHTAPVFLSSVGKPGRFHSQSAFGSWSGVIPGARQSSGMEGKGLKMTKEGPAVMKWALYQAGDVARQWDPQLACVYYRQMVYHGKTHKQAMGAVMSHLGARILAVLREGRPYELRDIQGNPITREEARQLILEQYRVPEEIRRERRRRKRSKRSRPRGPERGVPDAHRMHEAAFAP

SEQ ID NO: 373039 - protein, 319 aa, unidentified
MEQIRERVAALDVHRDSVAACARVPGPRGGVRLDKARFATTTAGVAELAAWLAERGVTTVGMEATGVYWKCVYYALECLFEEVWLYNAHHVKNVPGRKTDMSDAEWLADVVAHGMVRPSFVPPPPIRELRELTRYRKTQVDVRAAEIQRLEKLLQDAGIKLTSVASKVLTQSGRAMVEALVAGERDPGRLAGLAKGKLRAKLPQLAEAMAGRFGPHHALVARRILDRIDFLDHAIDALTAQVVARTRVFAEQVELLAEVPGLDQTAIQVILAETGGDMARFPSPAHLASWAGCAPATTSRPASAVTWRPRPATAGCGVS

SEQ ID NO: 373040 - protein, 481 aa, unidentified
MKAKQKEPAPKATGQFTQLNWRQMNRKQRRDLERKIQSADLSLQLVHPDAAGIDIGNESHYVAVPPDRDSQPVRHFGCTTAELRTMADWLTQCGIRTVAMQSTGVYWIAVYDILEQAGLEVYLANARETKNLPGRKSDVQESQWLMKLHTYGLLRNSFRPSQQIRTMRTYWRQRKDLVGSAGRHIQRIQKTLTQMNIQMANMLSDVSGVTGQAIIHAILAGERDPQKLAALRDPRVKASEKEIARSLEGNWQEDLLFVLKQEQLGYEFCQKQVAECDRQLERYLQEMEDRSQGAPLPEEKRKDRLQKKGNKPQFNLRQQLFRITGTDLTQIDGIDVMTATTIFSEVGWDMIKWKDEDHFVSWLRLSPDNRISGDRIIGKGRLPTTNRVTVALKLAANNLRTSQSYLGAQFRRFRARLDTPVAIKAMAAKLARLIYRMIRYGTKYVDRGALFYEAQQRTRQIKHLKQKAAKLGFQLLQAPAT

SEQ ID NO: 373041 - protein, 308 aa, unidentified
MKQTIIGVDLAKDVIQVCIYSNKKVHSNTEMTPKEFTLWLTNQTASIVVFEACGTSNYWKQKATSLGHDARLISPNLVTAIRQNQKTDRNDALAIVQASQLPEVKFIAGKSNKQQQLQSIMRMRELCVKQRTAMKNQLIALLAEFNIKPSTKNGGLNAVVSSVLEDGDNGLTFEFRIALDTAWNTYKSSILAIERYDECLRSAVEAHPECKKLMKLEGVGVLNAVNLYIALGCSEIGVFKKGKDAAACIGLTPIQYSSGGKTQIGSIGKYVKNTMLRSLLITGAMSVINQVMRRDPKTKKRTMVAITR

SEQ ID NO: 373042 - protein, 327 aa, unidentified
MIFIGIDVSKKKLDVAVLLDPSTLKKRQKKLPNTPEGYQELVRWCQKHTGVELSQLQAIMEATGPYHEAVALALHQAGMGVSVINPKALKDFAKGLGIKAKNDAMDALTIARYGYLAQPRRWQPDPPEFRQLAGLLKRLEALECDLQREQNRREKAQVGHASAEVLDSLSRTIGFLEQEKQHLIHSIDAHIDRHPHLQQDRERWQSIPGIGRVLSALMVLLWQHGQRFASAAQLASYLGLIPTEHQSGSSVRKPPRLSKLGPARVRAKLYRAAIVATQHNPDVQALYQRLLKRGKCKMAALGAAMRKLAHICFGVIKNQTPYQPQIT

SEQ ID NO: 373043 - protein, 346 aa, unidentified
MEQISRVGMDTSKRFFQLHGVNAAEEVVLRKKLRRKEMVEFFQALAPTVIGIEACGSSHHWARLLRSFGHEVKLIAPQLVKPYVKRGKNDGADAEALCEAMSRPTMRFVPIKTAEQQAALMLIGLRERLIGNCTQLSNAIRGYAAEFGFTAAKGMAHLDPLLERIQADESLPLAARELFAVQSKEYAQLRGQINEVEAKLKAWHKSDECSQRLIKIPGVGPIGAVLLKMKTPAPEQFRTGRQFAAWIGLTPQDHSTAGKVRHGGITRAGDEALRAVLVAGATAVIQQAVRYGGRASLWLDALLKRKPPKLAAVALANKMARVAWKLMVTGDSYSTKSAPAALASRI

SEQ ID NO: 373044 - protein, 411 aa, unidentified
MQVVYTRCAGLDVHKKTVVACVITPKESGEWHKQIRTFSTMTKDLLNLSDWLTSHDCTHVAMESTGEYWRPVFNILEGNFEVMLVNARHMKAVPGRKTDIKDSQWIAELLQHGLLRPSFIPPVEQRDLRDLTRHRSNFIRERVNLVNRVQKVLEAANIKLASVASDVMGASGRAMLAAIVEGNSSPEVMADLAKGTMTRKPDLLVQALEGRVRPHQKFILAQLLAQIDSINSSIELFDQQIEEYCHPFDQAVELVDTIPGIARRTAEMIVAEIGIDMNRFPSAEHLAAWAGLAPGNYESGGKKLGESTRKGNRVLRSILVQAAHALARTKTYLAAQFRRIAARRGKKRAAVAVAHSILVIVYHLISRQEHYKDLGADYFDKQRPESVKKRLIKRLEKLGYQVTVEPTPVAL

SEQ ID NO: 373045 - protein, 376 aa, unidentified
MSMLKPDMARNEGGRDENYRRGLHTRQQSIAMLDDQTGELVERELPHEGEQVRNFYSTLPKPVLVGLEATGSMRWFLQLLEELGIDFRVGHPAQIRAAEPRKQKNDRRDARLLLTLLAENRFPAIWMPSSAQRDLQILLRHRDQLVRLRTRGQLSLQAVALSHGLRRGSALWNRKGQQALRALPLAPQAGLQRDTLLALHPQLQTPIAALDREVAQQAEQRPRAQRLMTHPGVGPITALATEVFLGDPRRFADGKAVASYVGMIPSERSSGGRQRGGKLSKQGNSLPRFLWGEAAIHAVRRDPELQRFYRLKLVQKGLGKARMAAARKLGIRLWIMLRDEIDYAEFCRRGHPQRQSSGTAWAGMPAVGQWSNGPSV

SEQ ID NO: 373046 - protein, 328 aa, unidentified
MRDQYIGIDLHKAFFQACAVTPSGDRLWEGRFPRTGAGMEALTARCTTRTALAVEASTPTWHFADALVGAVGDLRIVDPLKTKLKAGYAAKTDRLDARRLADALRRDSVVGIYYPPLAIREVRELCRARHALVQVRTALINRLRAVLLRQGVADARRLAKTRDDSWLAALSLPPQAAASVARLRQVLAVVRTEAAQAEAEVRRASDGDPFAITLQQLRGIGPVLALTIRAEIADIRRFPTAGHLASYAGLVPRVDASAGRIRYGRITRRGSPWLRWALIEAAMHGTTRSDRIGRWGRGLAVRKGALKARVALARVLCEEIHRLWSAVI

SEQ ID NO: 373047 - protein, 410 aa, unidentified
MEVMFDRVAGLDVGKESVTVCVRMPGPRGGRRSETRTFKTMFGSLRVMRDWLIEAGVTIAAMESTSTYWKPPFYCLEEVMVVWLLNAAHMKAVPGRKSDVRDAEWIAQLLEHGLLAPSFVPPPEIRRLRMLTRYREQLLGDRIREMTRLELMLEDASIKLSSVASSLNTVSARAMLTAMIDGEADPLALAEMARGRMRRKIPDLAQALTGTFDAHHAQLAKSMLRRLQLVEQAQAELDAVIAEACRPWQHQIELLQTIPGVGEKVAQVFVAETGADMSRFPTAAHLASWTGLVPAMNESAGRQSPAGKRHGNKWLTAMLVEAAGSVGRMHNKNYLAVKHARLTRRRGMGRAQVAVAHSILVAAYHMLQRDQAYTDLGPDWHERRNNEAHTKRLIAQLERLGHTVMIKPAA

SEQ ID NO: 373048 - protein, 357 aa, unidentified
MTSMTRIGGPVTGGVDTHGQTHHGAVIDSVGRQLGDREFPTTPAGYRQLTAWLRGHGELDRVGVEGTGAYGAALARHLHTQAIMVVEVDRPDRKARRAHGKSDPLDAYAAARAALSGAATGVPKRRDGQVEAIRALRVARRSAVKARTQAMNQLRALLLTGPAGLREQLRHLSPTVLVTTCAALRPGVDLADPEQAVKTALRRLARRHQRLGEEIADADADLRVLVTAAAPQLLALQGVGIDVAGQLLTTAGDNPDRLQSEASFAHLCGVAPIPASSGRTHRHRLNRGGDRAANHALHTVVLCRLRYDPRTRIYVERRTSEGLSKTEIIRCLKRYIAREIYAALPATPHADDLGLAA

SEQ ID NO: 373049 - protein, 366 aa, unidentified
MGMFQLLLRQEESEMNATTVAVDLAKNVFELAAADGSGRVVERARLTRTQFERWFGNREVGRVVMEACGSAHHWGRVLRARGIEVWLLPPHYVRAYVKRNKTDAADACALLEAARASDIKPVAVKSVEQQALQGLHRTRSGWMASRTGRINMLRGFCREFGLVVPEGAARGLAQIARFLADERSGLPTILRGSMRLVLEEIRLMEARIQSLEQELTELAKLSPACQVLQSVPGIGLLTSTAMVAAVGDPRSFDSGRRYASFLGLTPREFSSGEHRYLGRISKRGDRYIRMLLTHGARSVLRAATVARRCGRQLDRLKSWALQVQARTNHNKAACALANKMARIAWAVWVKHEKYRTEPAFTAQPGA

SEQ ID NO: 373050 - protein, 391 aa, unidentified
MDPEGKTLGSQTFSNTLSGAEAIESWLLKIMKENDFSDLKIATESTSFLDLHLVDFLAQSTKLAPFHPSIYQLNPKLVRNFKRVYPDKEKTDKVDAFVIADRLRFGRLPEPYENHKPYLPLRRLTRYRYHIVQSISKEKAYFLTHLYLKFSGFSVEKPFTSLFGATSLTLITEFSPDELVNLPIEELTQLIIKTGKNRFEDPEGVVEAVRRAARESYRLRPALAPSIDLILGSILQTIRALQDSLKKVEQAIEKEFQAFPNTLQSIKGIGPVYSAGIFSEIGDIRRFPKEDALAKFSGLYWKRYQSGNFEAEETKMSKGGNEYLRYYLIEAANALRVHNAEYRAYYETKFKEVTKHQHKRALVLTARKLVRLVYALLKKGQLYKANYQQEA

SEQ ID NO: 373051 - protein, 378 aa, unidentified
MGHHSEAFIGIDTAKLRNAVAIAEAGRRGEVRYLGEVDTSEVATRRLVAGLAARYRKLTFCYEAGPTGYGLQRLIESLGHTCMVVAPSLIPKKAGDRVKTNRRDAEGLARLLRAGELTGVWVPDARHEAMRELTRARDAARQDLTRKRQQVSSMLLRLGRHYPGIKTWGARHRSWLANLRLEHREQRFALEEMLLAERQASDRIGRLEQAIREALADWSLAPIVPALMAMRGIDLVSAVTILGEIGDLSRFASPRQLMAYLGWCHRSDRRATASGADRSPRPATAGHGACWSRPRGHIAIRRASDTRSRPRLRRRHVLRGRSPGRRRFGSASGSGHCRARARNRRWSQRRLHASWRPSSGPSLARCPTRRRPARPERI

SEQ ID NO: 373052 - protein, 354 aa, unidentified
MSNKSTAIVATIGIDIGKNWFHVVGLDRRGAIVLRQKWSRSQVEARLANMPPCLIGMEACVGAHHLSRKLQLCGHDARLMPAKYVRPYSKGQKNDFRDAEAIAEAVQRPTMKFVAIKTADQLDLQALHRVRGRLVSQRTGIINQIRAFLLERGVAVRQGLRFLRTELPIILATRSDVLSPRMMRMIEALAGDWRRLDERIEGLSNEIEAVASHDPACERLMTVPGIGPIISSAMVAAIGNGAVFTKGRDFGAWLGLVPKQISTGDRTILGAISRHGNRYLRALFVQAAWVVLIRIKDWDRYGLKAWIDAAKKRLHHNVLAIALANKLARIAWAVLRKECAFECMKTRAMASRPA

SEQ ID NO: 373053 - protein, 412 aa, unidentified
MEGETVIAGVDTHKDVHVLCLLDGLGRKIWSGSFGADPEGYDRLAEAIGDPGSCMVVGVEGTASYGAGLTRRLVELGYNVVEVLRPKRDKVRPGEGKSDPLDAERAARKAASGRGCSVPKSQDGWVEAVRQLYVARRLAVATSTSCVACAKSMLTTAPSALRERFRGRERPRDLMPLLARGRKAGDALEESVLASLRSVAAVWKEARSQVESLDERIRALLEANAPALLGVEGCGTTTAAALVVAAGDNPGRLKGEAAFSMMCGASPIPASSGKTDRHRLNRGGNRQANWALYEIAIKRMAYDERTRRYVARRTSEGKSRREAVRCLKRYIAREVYRVLMDPNPDGAAPEGPELARMRKAMRVTQKKAAAELGLSAATLGHLERGKRRSTKLERRYYELLCELERALPQTAS

SEQ ID NO: 373054 - protein, 518 aa, unidentified
MSERFIGLDLGQKSKHQVAVLDGMELRGKPFAITVTQAGVEQLLRRATEGTTDRVTFVMEPTGMAWLPMAARVSAAGHRVYLTKPQKQSDLRKFYRRHTKTDVIDAVTAGRLPQVDPSGAHELILPTAAQMSLRYDVRLRARYAVEVTKHKRRIHSLLQVANPGLMEALGEHRFTKGCMRLLREHVDPSKVATGGVSILNKIFERAMTKRDEIVKRVHQACIDAHALYEPLRTSGRMPIDLVHHQELVNDELDDIDRLEQRIAKLTSRIEAQYLVIDPERTLTQLRGIGVTIAATIEATVGDVKRFRNAKAFASYCGLVPRRKKSGETDPAMPITKAGQRLLKQNLYLAADVARHWDPEFAAYYARRFKRGDHHTHIVVALAHKMANRVFALLKRRSLAPEGQVAGATAAEVRYILRDPDGNEVTKLEAREIIQRKYARAIVDPQRVARERLRKTGEAPAATKMSGCHFDTTALSARASTDGLTNLAVPKAIDDVLKTLLKRCGHDSGDVPQTPLEST

SEQ ID NO: 373055 - protein, 412 aa, unidentified
MKRIYERCCGIDVHKATLAACVRVYTRGGKLSQEIRSFGTTSDELLSLHDWLSAQQVSHVAMEATGVYWKPVYYVLEHGFTVLLVNPAEIKRLPGRKTDVSDSAWLAQLLENGLLRPSFIPPRAIRELRDLVRYRTELKHDHTRVANRLHKVLQDADLKLSSVMSDILGVSGRRILQQLAAGHSDPMALAELARGRLRAKLPVLRQALTGRFSAHHAFLIGQALTELDNLEESMSTLAARIEQHLAPFAQQLEQLSTIPGVQRLAATVILSEIGTDMGCFPSTAHLTSWAGMAPGNNESAGKRRRAKARQGNRWLRTILVECGHAAGNTRNTALAAIYRRMIIRAGRKHAAFVVGRHILSIAYHLLAERTTYRELGPSYFEQRRADQLKRRCLDQLRNLGFQATLTPLPKAA

SEQ ID NO: 373056 - protein, 432 aa, unidentified
MKHNQSNKQNQRISRISESTLVIGTDIAKFNHVARAFNYRGIELGKRCLFQNDENGLLNLLAWAESIMQEHMLTDVILGVEPTGHYWFPLYHYLNQRGIEVVLVNPHHVKKSKELDDNSPTKNDIKDAKVVAKLVIDGRYTQPQLPEGIHAELRVLMNQRDRLCGDLNRVKGRIHNWLDRFFPEYTQVFKDWEGKASLITLTHFPLPRDVVAAGETTVVATWKKNGVQRAVGAKRASLLHRKAQKSIGLTEGATAAKHELAMYLEQYAMLCRQIEQLMGLVGDLVEQIPGATHMMSIPCIGLVTVAGFLAEVGDLSGYDHSQQIVRHAGLSLRENSSGLHKGETTISKRGRCRLRALLFRAALTMVAKNPEFRALHRYFTTRRDNPLKKKQSMIAICNKLIRVLFELGRKQKNYDASKVLGPHREAQLQAAA

SEQ ID NO: 373057 - protein, 388 aa, unidentified
MQIVTDRPQAPTAIRTDLGAIFVSLELSRSTWLITSLSPGGGEKMSKHTVRSGDVAGLRARLSQLRDKVQVRTGQVVPIIVIQEAGLDGFWIHRLLQDDGVESHVVDPASIATSRRRRRAKTDKIDGEALVRALLAYKRGEPRVCAMVRAPTPHEEDRRRICRERKTLTAERVEHVNRIKGLLFAQGISDYEPLLRKRRERLEELRTGDGRPLPEHLKAQIRRELDRLELTLQQIKSVETERNAMLSPSDDGAPAPGAMLKNLKGIGPEFAGILWSEGLFRSFSNRRQVAAYAGLAPTPWRSGSVAHEQGVSKAGNPRLRTTMIQLAWLWIRHQPRSILTLWFHQRVQLNGGRVRKVLIVALARKLLIAFWKYVTAGVVLEGAETTAA

SEQ ID NO: 373058 - protein, 369 aa, unidentified
MEKDTRYVGLDTDKKHIDVALAEPLPGGEVRYWGKVANDALSVDRLIKRLGKGGHALVVCYEAGPCGYGIYRQLSGKPGVTCEVIAPSMTPRRPGDRVKTNRRDAITLARLRRAEELTAVWVPDAAHEAMHDLVRARGTAVTTAVRCQQHISSFLLRQRIAYVGKPWTKKHRQWLGSLKFEHAAHRLMFAEALIALDQAVARRQRLSEHIEELAPSWSLAWLVTALQALRGYRLVNAAVLVAEIGDPRRFDNPRKLMGFVGLKVSEHSTGDHVRRGRLTKTGNGRARKTLIEAAWTYSRPARKTKAQAAHQPPALRQIADNAYHRLSRRYRHLLSRGKLKPVAIAAVARESLGFIWAIAHAAAPAAPQR

SEQ ID NO: 373059 - protein, 343 aa, unidentified
MDHYAGIDVSLEQSSLCVVDATGRIVREAKVASAPEALITLLRGLALPLVRIGLEAGPLSQWLQAALVKAGFEAVLLETRHVKAALSAMIVKTDRKDARGIAQLLRMGWFRPVHCKSAPAQEVRALLVARKQLQAKMRDVELSLRGLLRGFGLKVGEISKGQFAARVRTLVAGHTMLERIAQAMLQAREALRTEFSKLHKAMLAIVRADAVCRRLMTVPGVGALVAVTFTSGVDAPERFARSKGVGAHFGLTPRKHQSGETDITGAVSRVGDVMVRTALYEAAHILLTRAVRFSALKRWALEVAKRRGMKRAKVALARKLAVLLHRMWVDGTTFRWGREAAAA

SEQ ID NO: 373060 - protein, 363 aa, unidentified
MMKQNIIFGIDVSSKSSTVCVVIDRIKQGETFKITNDSFGYQDLLDRLNQYLITPLVVFEATGVYSLSLQAFLEDYHIKYLKLNPLKAKKLMDNNLRHNKTDKVDAYRLALIQFNAPQKLRAPQPKEYHELQNASRYYEELTQALIINKNQLHRNLQSTFPQIESILSTSSGRVYWTIVSLFPHAQYVLNHNENQVFQSLLAISGIGRQRAHYLTTRLYALARQAYPYDNESSITIRAIQRNIANLLSLSAERDNVINYMEKLAMQANARSLNIYESIPGIAKTTAVRLVAELGDLRRFDTSAQIDAFVGIDPGRYQSGEKDSHLGITKHGNHLARKILYRTITQMETVKATQPCHITVSVQN

SEQ ID NO: 373061 - protein, 409 aa, unidentified
MELLYARCAGLDVHARQVVACARVVAQHAVTYHHLTVPTTTRGLLTLADWLTSHQVTQVAMEATGVYWKPVWHLLEGQFELLLANAQHVRNVPGRKSDVKDAQWLADLLAVGLIRGSFVPPAPIHELRDLTRTRKQLVRERSRHTQRIQKILEDANVKLTETITDIHGLTGRAILDAIIGGETDPERLASLTRGRLKASHAQLVDALHGRVTAHHRFMLKLHLDQIAAIETALSTLEAQLTVALAPFRAAHDLVKTMPGISDTVAAVIVAEIGEDMRPFPTAAHLVSWAGLAPRLDESAGKRRSTRTQPGAPWLKTTLVQAAWAAARTKDSYFHAQYLRLRSRRGPKKAILAVAASMLTAVYYMFRDGVEFHDLGADYFAHHDKDQITKRLLRRLRDLGVEVEVKNVAA

SEQ ID NO: 373062 - protein, 354 aa, unidentified
MSQSSTLYVGMDVHKESIAVAYVAQAHGAEVVSLGTIGTRQCDIDKLIRQLRSKSKQLVFVYEAGPCGYWLYRYLMKQGYVCWVVAPSLIPKKAGDRVKTDRRDAMQLARLMRSGDLTPVYVPAVDDEAIRDLSRAREDTLRDLKAAKLRLKAFLLRHDIRYTGRANWSPAHLRWLSEVVCPTPAPQIVFQEYVQTVTEQTERLGRLELELHEQVQTWRLSPVVEALQALRGVQFTVAVTTVAELGDLTRFDKPRQLMNSLGLTPSEYSSGGRRQQGSITKTGNTHARRALVEGAWAYRYPAKVSRHLQLRLEKLPKAIQAISWKAQVRLCKRYRQLMAKGKNANQVVVAIARE

SEQ ID NO: 373063 - protein, 347 aa, unidentified
MRFYTQQHKHYCGIDLHARQMYLCVLDATGTVLLSRNIASTAPAFLAAVKAFRDDLVVAVECMFTWYWLADLCRREGIAFVLGHALYMRAIHGGKAKNDRIDAHKIATLLRGGTIAQAYVYPPEMRATRDLMRRRNHLMRKRSELIAHIQNTASQYNLPAFEHRIAKKHQRVGLLEHFPDPQVRNSVALDVAMIDQYDELLPKLERHIRACAKGHDIKAFTLLRSIHGAELIIPLIILYEVHDIARFPRVQDFLSYCRLVKPTRESAGKIYGHSGRKIGNAHLKWAFGELATTFLRANPRAQQLHERLKKKHGKGKALSVLAAKLARATYYMLSRGKVFDANKFYKD

SEQ ID NO: 373064 - protein, 357 aa, unidentified
MNRTESNMNIPLQTIGIDLGDRSSYFVVLDSAGEVVEEGRVKTRMVAFQSVFSQHPGSRVVVEAGNQSRWVSQAMRGWGHEAIVANPRKVELIGKNTRKADREDAELLARLGRVDVKLLFPIQHRTAEQQEDLESVESRALLVKIRGQLVTHVRAVVKGFGQRLSSCSTEAFGRKVVEEIPPGLRVSLYPLLEEICRLTRQIRDYDREIERLCREKYPQTAVLRQIRGVGPVTALTFVLVLSEVRRFRRSRDVGAYLGLCPRQAQSGEHNPQLRITKAGHRLLRSLLVNCAQYILRQHAPDSDLKRHGEKIAERGGQNAKKRAVVAVARKLSVVMHRLWATGEVYEPLHRGEIRRAA

SEQ ID NO: 373065 - protein, 401 aa, unidentified
MTQETLAWFSGVDWGSERHQACIVDAQGKIADERVFPHSGAGLAELGDWLLSIAGEASSVAVAIEVPHGPVVDTLVDRGFIVHAINPKQLDRLRDRFSVAGAKDDRRDAYVLADGVRTDRRLFRRLHVADPRLVELRAWSRLAEELKEERRRLSNRVGQQLWRYYPQMQKLTDDLTEPWFIELWTIAPTPAKARQLHTSTVARLLKQHRIRRLDSETVLGTLRDPAIKVADGVAEAAGIHLRSLREAERQLEKLCMSVGETEAAAGDCVRRQDVLILRSMPGIGPINLAALLCEASGPLGSRDYPALRTLCGAAPVTRRSGKSCIVVMRYAAHVRLRNTVYHWARVAAQRDPKCRAKYAALRQRGHSHGRALRAVADRLLGLACVLLQRQTLFDPQFGQPA

SEQ ID NO: 373066 - protein, 311 aa, unidentified
MTDDTIGIDISKATLDIHRLSDGKMMSFSNCPAGFKALSKLCAKTAVTRVVYEATGAYHSGLERALGAHLPLVKVNPLQARRFAQAQGVRAKTDAVDAKMLAVMGNAFVLQPDEPATKIQHDLKELRAFRSGLVKDRTRIMSRLKIQTLSITCRQSKARLAQVDKNISEVDTEIDRLINSSDTLAHSMKILRSIPGIGAVCATTILIEMPEIGSMDRKQVACLTGVAPMTRQSGQWRGKSFIQGGRKVVRDALYMPALVAMRFNPDLKAKYQAMIKAGKPPKVALTALMRKLIELANALIKANRNWVKKTA

SEQ ID NO: 373067 - protein, 355 aa, unidentified
MDSKKYIGMDVHKEAISIAVLNASGKLVMESIIATKAITIVEFMQGLRGELHVTLEEGTWSAWLYDLLKPHVQKTVVCDPRRNALLKDGSKSDRIDARKLAQLLYTNMLRPVYHGESGVRTLKELARSYLTISKDQVRVMTRLKALYRSWAIPCSGKQVYAVRHRSEWLDKIREVGVGRRAEFYYQQLDALRCLRREVRRDLLTESAQHRASKRLRQIPSIGPIRAALLIAIRQTPHRFRTKRQLWTYSGFGIETHDSGEHRYVDGELRRSKKKVSVRGLNRNYNHDLKNLFKSAATNAAAKPGPLQEFYTALLVKGIRPDMARLTLARKIAAITLTIWKKGKSFDAQHLKHQTA

SEQ ID NO: 373068 - protein, 436 aa, unidentified
MDHVAAESVVDECKAGEPFGLLTYFGGFDWAMSEHQFAMVDRDGKVLMNLRFSDDAAGWAMLRETIAPYPHLGVAIETSTGPAVERLLALGVSLYPLNPKAAERYRDRKSPAGVKSDFLDAWCFADALRTDGHGWRQLRPADALTAELRILCRDQIALTEQRTALVLQLKAALHEYYPVALDAFDDWTKPGAWEFVLRFPDPHRLLSASRHKWEKFLHTHKLYRRETAAKRLELFAKAKEFASPSQAVTNAKSLLAVSLARSLCILQDQLEVYRKRIGELFNNHPDRDCFGSLPGAGEKLAPRLLAELGSDRARFESHESLQMYAGTAPLIRQSGNRSVTQIRWLCNKTLRSTVHHWANLSRSTCAWAEAYYQQKKQSGMSHAAALRCLGQRWLKILWKMWQTRTTYDEALHTRNQIAHGSWVIALKNEPASPTAN

SEQ ID NO: 373069 - protein, 402 aa, unidentified
MIFINCLGIDIGKSESVVAHYKDEVLVKEMVIQNNQNGYRYLKNYIKHLDSLFILFESTGIYSRGMKRFCEIHKIDYLEMNPLEAKFKTSSLRSWKTDKSDAHKLALLAFRMKDSKVQRHPEEIYFELRERARFHLEMEINQNCLKVELVETLHQTFPGLEKLFTNRYSKIALSIAKAFPHPDFVSTLTHDELVEKVLHSTDKGISVNKAHKYVQKLIEIQINSFPNVDKSSFLLQKVQYLCDKLLIGIEEMKEFDQEMIDLAKNTTEFENIISIPGIGELTAALLIGELGNIREFKTNKQLNAFVGIDIKRYQSGTSKSRDTINKRGNKKARRLLYLIIMNIIRGRNHYQSHIVDYYYKLREQPHGKTHKTAVIASINRLLKTIHYLIVNNKLYDYQKAPH

SEQ ID NO: 373070 - protein, 324 aa, unidentified
MDHYAGVDVSLEQSSVCVIDATGRIVREAKVASEPEALITFLRGLTLPLARIGLEAGPLSQWLQAALVKAGLEAVLLETRHVKAALSAMIVKTDRKDARGIAQLLRMGWFRPVHCKSAPAQEVRALLVARKQLQAKMRDVELSLRGLLRGFGLKVGEISKGQFAARVRTLVAGHTMLERVAEAMLSAREALRVEFGKLHQAMLAIVRADAVCRRLMTVPGVGALVAITFTSGVDAPERFARSKGVGAHFGLTPRKHQSGETDITGAVSRVGDVMVRTALYEAAHILLTRAVRFSALKRWALEVAKRRGMKRAKVALARKLAVTC

SEQ ID NO: 373071 - protein, 410 aa, unidentified
MEVLHPRCCGLDVHKETVVACIRLAIDGKVVKESRTFSTTTADLIAMSEWLAENKCTHVAMEATGVYWKPVWHILADGGFELVLANAAHIKNVPGRKSDVKDADWISELLAHGLIRASFVPDGPTQEMRTFLRTRKQFVREKGSHILRIQKTLEDANIKLDSVITDIIGMSGRKMIEALIAGESDPAKLANLADRRVKASQPTLREALRGRVTAQHRFLLRLHLDQIDALDAAIARIDREVEASIAPFRTAVEQVSSVPGVKTLAAMQILSEIGTDMSRFPSDANLVSWACICPRSDESAGKRRSTRIRKGSPWLKTTLVQCAWAAVRKKDSYLNAQFHRIKAQRGPKKAIVAVAASILTAIYHMLKDGTLYHELGPNHFHARDKERQKNRLLKRLAQLGYTVALAPVPN

SEQ ID NO: 373072 - protein, 348 aa, unidentified
MVIIGVDSHKRTHTAVAVDGNGRKLAEKTVATTADGHLELVRWSRRWRERSFAVEDCRHLTRRLEGDLLRGGERVLRVPPKLMASTRRSTREPGKSDPIDAQSVARAALRERDLPIARLDGPEREVRLLVDHRVSLIGDRTRLQSRLRWFLVELGIPEPQPRTLGQPTVLARLELDLGGRSEPSARISRDLLTRIRELTTAVNALGGEIQALTDLLAPSLLALPGCGHLTAGKLLGETGGIARFRSRAAFATHNGTAPIPVWSGNTVRHRLNRGGNRQLNLAVHRIAVTQLQTAGPGRDYVAKRMVAGDTKVEAIRALKRWISDEVFRRMNADEAARAALIQPARAAA

SEQ ID NO: 373073 - protein, 399 aa, unidentified
MFVGIDWAAESHDVCVVDPAGKICGRATVAHSQQGFDELTKHLVRWSQQGEVLVGIERPEGRLVDAILEAGYSIVLIPTFAMKDLRRRYAVSGAKSDPGDAYVIADVVRTDGHRLRRLEPLSEQTRALRAVVRARNDLVDQRVALGNQLRACLEAFWPGAAVIFADVASEICLSFLERYPTPESAARLGELRLQSFLKKAGYSGRRSPAELLERLRSAPEGIVGVEAEARSDAVRCMARVMRSLLRSIKDLDRAVVAHLGEHPDAEVFTSLPRSGRINAAQMLAEWGDCREAYPEPDAVAMLGGLCPVTHASGKHRDVSFRWACNKRLRLALTTFADNSRHASPWAAEVYRRAVARGCDHPHAVRILARAWVRVIWRCWQDRTPYDPALHGAAVLLEAA

SEQ ID NO: 373074 - protein, 446 aa, unidentified
MATRTVGIDVAIRGPHVAIILDEQGRPLGTPIRVRLSAAALAELVTKIRAGLQADDTVMVVLEPTGMAWFPLARRLTQAGCTVIRVKGQRVKALRRYLSEYAKTDVTDAQVLGRMLAFGRRGLLPLYVPAAKQQALNCLTKQRARYQDAISSIRRRLLDLIRWAQPTLEPVLPSLGTSVSLAVLEHYFNPAQLQALGARRLTEFIGRHVGGNHPAHGPFVEELARGLLAAAADAVALFGADGVDFELLQLEVRQEIQLLRHHRELLVELDRAIEQLYRELHPVEALRTLPGIGDTLGPALLGVLHTASRFGAQRRLRGFCGLFPRRQESGGVAHPGQPITQDGNNRIKRNLMLAADVARTVDPELAAVYYRCMVEKGHHHRQALCAVATRLVNRIHAVLRDGRPYELRDLDGHPITVSAAKQLIQTHLRVPDVIRRTRKKAPVAAA

SEQ ID NO: 373075 - protein, 408 aa, unidentified
MEVLHPRCAGLDVHKDSVVACIRIQQGPQAVHEIATFGTTTQALLKLSDWLSEHEVTHVAMEATGVYWKPVWHVMDGTFELVLANAMHIKNVPGRKTDVNDATWIADLLAHGLIRSSFVPPTTIQDMRTLMRTRKQLVGERAQHVQRIQKTLEDANLKIASAVSDVTGTSGRAILQALIDGKTNPEELLAATTGRLHAARATLLEALRGRIRPPHRFLLKLHLGQIDALEQSIADIDKEVGALLEPFRAKSKRLMTIPGISDVAAQVLVSEIGVDMSRFPTVGHLISWAGLCPRNDESAGKRRSTRLRHGAMWLKTTLVQAAWSAARCKKGYLPAQFRRIKSRRGPKKAIVAVAASMLTAAYYILRDDVDYRDLGSDYFDLTDRKKAASRLVKRLSDLGFTVEIKEAA

SEQ ID NO: 373076 - protein, 368 aa, unidentified
MGRKSSKLYVGMDVHKDSIDVAVAEEAGEVRHQGRIGGDSNALARAVRKLESQGRLLVFVYEAGPCGFGLYRMLKARGHECWVVSPADTPRRSRDRIKTDRRDSLKLAGLARAGELKPIYVPDATDEAMRDLVRAREDAVIVQRQGRQRLAALLLRNDIRYAGKTAWTEGHRRWIARLTLPAAAQRIAFEEYVEAVEEASARVERYTRAIEQELAHWRWQPVVAALQACRGIQLIHAVRIVAELGDLTRFGHPRQLMAYLGLVPSEDSTGERRRQGSITKAGNSSARRALVEAAWAYQHRPAVSPLIARRQARLPKAATQIAWSAQLRLCARFRRLHARGVNRNKIAVAIARELSGFVWAIGQQVKPT

SEQ ID NO: 373077 - protein, 362 aa, unidentified
MTAQPIVAHCHPFVVGVDTHARNHVYAIIDSSNGALLDTQSFPVTSTGINRAINWVARRTQGAADTLWVIECAATYGAILAGTVAAHGFPVTEAPRMSKKQNRGMGKTDSLDAHRMAMASLPLPVDKLRLPRLHEGIRQGLRILVTARTSMSKDRTRSVNALNALVRSSVLGIDARKKLTGSQIAEISRWREREEELSLRIARSEAVRLAKHILDLDQQLTANEQQLDELVKASEAAPLLNEIGFKAITAAKCFVAWSHEGRVRDEAAFACLAGVNPIPASSGNTTRHRLNRGGDRSLNAALHIAAVTRMAHDEETRAYVEKRQAEGKTDREIRRCIKRYLVRRIFKIFSASAMVEEVQVAA

SEQ ID NO: 373078 - protein, 450 aa, unidentified
MPPQLCIGIDIGKFRHLVGFVSADLLAQHCTFAQCPTVVLIPDRLHIDELLAKIALRLPLSECAVLLEHTGHYHRVLVEALHTAGLRVYVVAIKSRKASLDKTDKIDALRLANQIYNQLVLGSQVADPAQRIQDLHPPTPAAAQLDPLMRRRYELVQATTRTRNKLTAIADELFPELTQVPNFRDPNALIALDLRERFPTPAHVAAATIEELRVIRHWHFPTDARLQDLKDLAARSIGVTNPARSRGLQLEQAQLIAELRLFQRHLKALEGEIVQIVDAARDGQILRSIPCIGPIQAATILASIGSIDNFDSPAKLKKYFGWAPQSTQTGITLDRAHLTASGTRLMKSTLYLIALRAVKDDTPWRALYQRLIPQKCTYDARTGQYRGKLRVLGRICGQLTELIYTLLKRDADLLHRTPAGQPPPPPTLYDPTRPERKPKQPHIDKEPIVV

SEQ ID NO: 373079 - protein, 376 aa, unidentified
MERGSLMLNTTTFVGLDVHARSIKAVALDAMTGEVRSATFGYDAAEVAGWVSSVDPSAKCVYESGVTGFDLQKRLASMGIDCVVGAVSKMIKPPADRKRKNDRNDAEFLARMLSVGNVVEVWVPDDGCVAARDLSRALDDAREDLKRRKQRLSKFLLRHGYVFSETTPTGRRKGSWTAAHWAWIKSISFPEKADDDVLAYYVDAVRQAMEDKKRLEKLVEAEASKPRWKRRVDSVRCLKGIDVTSAADLVFEAGEFSRFKSARSFAAWLGLTPSEHSSGESVRQGGITKAGNKHLRRVLVESAWHYLGCSPHSKDLAKGQVPDPAARRHAAKGVRRLVERRRAMLERGVHKNKANVATARELACWCWAVGRMIENG

SEQ ID NO: 373080 - protein, 338 aa, unidentified
MDRQYVGIDFHRRRSVIVRLDSNGERLGVHRIVNDPFELSRVIALCGEAPQVVIEATYGWYWAVDLLQDLGAMVHLANPNALNWGDRRVKNDEIDAHDLADMLRLGRMPRAWIAPPAIRELRERVRYRAKLVKLRTGLKAQVHAVMAKEGVLPRVSDMFGPAGTRQLDALELGAPFAHRVASLRELIGVYDREIAMLERDIHAHLKTHRGYQAVQAINGIGKVSAAVLVAEIGDITRFATPAHLCSWCGLTPKHRESDTKTRRGRISKQGSALIRATLIEGISRYHGGSALDAQYQRIAKRRGRNKARVALARKVLTLVYYGLRDGEIRCLAPVEAAA

SEQ ID NO: 373081 - protein, 341 aa, unidentified
MIYSFGFDIAKDQFEVCLQQYRLDQQTGHILARKTFDNTPAGYKRWIKWARSRASDPQLPWRVTMEATGVYYEPLALFIQQNHPDIHLAVVLPSRAKKYINSQGFRSKTDKIDAQGLALMGAERRLAPWEGIDPYWRELRSMTRTRTDLMDQRTQLRNQLHALTHSGQASEAVIEALQACITTLSKQIQQLTQAIYKQLEAREQLDTSLAYLVSIPGIGRLTVATLLAETNGFAAFHSISQLISFSGYDVVIKQSGRWTGKPKISKQGSKYIRRAMYMPANAVVRSQTGPVYEYYQRLLATHNVDMKAHVAIQKKLLTYAYVLWNNQEPFDPQHIYAQRAA

SEQ ID NO: 373082 - protein, 406 aa, unidentified
MQVVHERCCGLDVHKASVVACLMTPEGKEIRTVKTLTATLLELVDWLKTAGCTHVAMESTGVYWKPIYNLLEGEGMTLLVVNARHMKAVPGRKTDVKDAEWICDLLRHGLLKPSFIPDRPQRELAELLRYRRSLIGERAREINRIQKVLEGANIKLAGTIANVLGVGGRAVLDALVTGIEEPDALASRISTNVRATREELEAALTGRMGDHQRAMLSVQLRHIDFLDGEIAELDAAIGERLRPFAEAMSRLDKIPGVGVRTAQEILAAIGTDMSRFPTHRHLASWARLCPGTHESAGKRSSAGTGKGNTPLREALVEAANAVSRSRKPSYLLAQYHRLAARRGRKRAVVAVAHSILVIAYYLLRDGKPYKDLGSLHFDERDRELVVRRAVKRLEALHLKVTVEPAA

SEQ ID NO: 373083 - protein, 379 aa, unidentified
MEVFIERCAGLDVHSETIVACVITGNHEEELVKVTESFPTLTKDLFRLLKWLEDYEVTHIAMESTGIYWKPVFNVLEGFFDITLANAQRIKNVPGRKTDVSDAEWIAKLLRHGLIERSFVPPVEIRELRDLTRLRKKWIGHLTSEKNRIQKVLESSNVKLSTVISDVFGVSGKKLLEKLVEQGYVDPNDVESCIHRSMSAKKQLITDSLFGTINEHQRFLIKQSWVHIQQLEELISEIEKRIDGLLENYKEELTILLTIPGIKKDSAANIIAEIGVDMTQFPTSQHLASWAGVSPGNHESAGKRRSSRTTKGNPHIKSTMCEVAWAVSRCRNRWLAAKYWPLASRRGKKKALVAISHRMLRIIYSMLINKECYKEPQLS

SEQ ID NO: 373084 - protein, 418 aa, unidentified
MAQRKDALFVTICHPVCCGLDIHKDLIVACLLGDEDGTEYWELREFGAFREDLICLRDWLLEHNCPIVALESTGIYWRPVYNVLEGSVQVILVNARHVKNVPGRKTDMSDSKWLAGLLRHGLLRGSFIPPEHVRDWRDLMRMRRGVMEHLGDYKRRVHKVLESANIKLGSVLGDIFGGTGRRLLGLLLDSATEITTAEVEPCLRGSLKHTTEEICAALQGYVRDHHRYMLKRYFHLLESLEGEIVELDSRVQVLMTPYDPILQRLKAIPGIADTAASQILSEIGPSLEQFSSSAALASWAGLCPGNNQSAGKRRSGRSPVRRHHLKTIMVEVAWAAIRKKGSYYRDKFYRLRVRLGHKKALIAVAHRLLTAIYHVIKEEQDFRDLGENYLLLKNQSRKLATLKRQAKVLGYELTPLAA

SEQ ID NO: 373085 - protein, 325 aa, unidentified
MTYIGIDISKATFVAAFPVERGYRTETFQNDTKGIRRFISKLSSDTHHCVMEATGNYCFLLLYLLDKAGIRASLVNESKIKNYARVMLSVTKTDAKDACLIADFGERFKPEPYKFPSEQIMLLKQKKTVICQLQKQLTATKNLHTSLEPLPVKDKKCIQSLKQTTAFLEKQIKYMQQEMEEVVSEVFARQLKALTSIKGIGVTLASALIIATGGFTYFDNAKQLSRFAGICPTIERSGTSINIRGHINRNGDENLRSMLYIAAWSASRHNKACRECYQRLRSNGKSGKLAMIAVANKLIRQAFAVVTSNSSYIDGYISTKPNADI

SEQ ID NO: 373086 - protein, 392 aa, unidentified
MSVTSDRVVIGMDPHKRSATIEVMTGDETIVGGGRFDTNHAGYTAMRKYANRWPIRVWAIEGCQGIGRHIANRLLADGEEVVDVPPKLSARARVFATGQGRKTDATDAHSIALVGTRMAGLRPVVNDEQLALLRILVDRRRSLGEDHTRMVSQLHQLLLELIPGGAKKSLSAAQAKALLATVRPRDAVGKARRRVAAELIGDLERVYRRSKEADKELKELVASTGTTLMDLHGIGPSGAARLLVEVADVTRFPGRAHFASWNGTAPIDASSGDQVRHRLSRAGNRQINRVLHIMATVQLRNPTEGRAYFDRKKAAGKTSMEAMRALKRRLSDIVYRQMIDDATAGQVTGPGGQRETTTDSSVTSSHPQAGSSDKSLPGPATSQPRTPVPTSA

SEQ ID NO: 373087 - protein, 438 aa, unidentified
MPTLAFVGLDVSQDDVSVCFLLSDGAEPVPRWFIPNTQPGAEALATTLAHLAQTHQIDQLRIGMEATGLLWWHLACALKDATSLAPFAPRIYALNPHLIKTFRANYGALPKTDRADAFLIAERIRFGRQLPSPFQLDARYAPIQRLTRFRCHLAQNLAREKSYFLSFLFLTFSTYGQIAPFGDPFGATSSAVLDEFTTEELVQQSIEDLAVYLQTKGRGRFADPDALAATLQRAARDSYRLDKVLQEPLRLVLGTTLATIRSLQSQLKTLDKTIAQELAAIPQTLASVPGLGPVWTAGLVAELGDISRFDDEAAIAQYAGLTWETRESGQFQAQDTELTKRGNSYLRYYLVEAANSVRQHCPEYGRYYAAKYAQTPKHPHQRALVLTARKLVRLIDVLLRDGKRYLPPAERPTAQGSSAPHASRPARQQRGKQAAALE

SEQ ID NO: 373088 - protein, 397 aa, unidentified
MKGFCISLDVSKGSSFYQGFKGLDEPITKPKKIEHNLEGFKELLNLKEKIKKQYNEDCVVIFESTGIYHKPLQTYLDEHDFKYTIISPLLSAKVRKSDIRGTKTDAKDCVSIAKVFYLKELRIYTKIDEIYADLKEKSRYYDFLVDEMKRWKIEFRRLLDIIYPGFDRVYDDLYGDFIQTFLLEYSHPEMIRKRRLDTIAKFLEKHTCHKEAYCIRQAQIIKEYAENCASGCSSKSYLVNQFDTVIHNLNAQIKHLQIVLEEIIELAKTLPNYDSIASIPGIGENLAARILAEIGDISRFNNVSQLVAFSGVDPQIYQSGQVSGLHLRISKKGNKKLRCLLYLAVTCMIKTSRDTSIVDFYKKKKADGLASKSALVASMNKLIRIIYSLCKNGCLFE

SEQ ID NO: 373089 - protein, 338 aa, unidentified
MKLYGAIDLHSNNNVTVLTDEQDHVVYEKRLPNDLALIVEQLATYRDSLQGIVVESTYNWYWLVDGLMDQGHKIHLANTAAIQQYEGLKYTDDPSDARWLAHLLRLGILPQGYIYPKEHRAVRDLLRKRGQMVRQRTMNLLSIKNLFSRNTGGSMSANRVKRFDSQEIDELVPNADLALAIKANLAMLQCADGQIDLLEKTIVGRVKLKPEFELLKTTPGIGHTLSLTIMLETGDISRFPTVGDYASYCRCVGSKKISNGKKKGSGNTKNGNKYLAWAYVEAANFAVRFSANIKSFYQRKKAKTNGISAIKAVAHKLCRACYYIMKDQVAFDVSKAFA

SEQ ID NO: 373090 - protein, 429 aa, unidentified
MEEIDDTDLVVERVAALDLGKAALDACVRVPHTHHPGRRMQELRSYGTTTAQLLELAAWLRHWHVQRVVMESTSTYWKGVYYLLEAEGFDCWLVNAREVKNVPGRAKTDRADAVWLAKVAERGMCRPSLVHPPEIRRLRDLTRYRRALVQDRTRERQRVEKLLEDAQIKISSVLSDLHGVTGRAMMDALINGQRDPHTLAQLAKGSARKKTARLEEALRGFFTDHHAMILQMMLANSDRLSAQIAELDGRIEEALSPFCAQSARLADVPGVDVMAAAELIAEVGVDMTRFPSAAHLVSWAKFCPQTHQSAGKSKSQGRGKGNPWLAGTLGRVVFANSRSETFLGARYRRLARRRGKQKAIVATGNSLLTVVYHLLLDADARFCDLGPGYYESRINKHRRARDLATQLQALTGQHIVIRDGKAVITDTAA

SEQ ID NO: 373091 - protein, 437 aa, unidentified
MEKKKKHQFPILFPNAAGIDISSKEHYVAVNPESSENPIRAFGAFTEDLHAISNWLKECNVTSVAMEATGIYWISLFLILEEAGFDVVLVTAKHVKNVRGKKTDVSDAEWIRQLHSCGLLSASFQPDKFTRSLRTYMRHRKNLIEMSATHIRMMQKALEQMNVKIHHVITDITGKSGQAIIAAILDGERDSNKLVALCDGRVKADAKTLIKSLEGIWKEEHVFELKQSYEFYKMYHSKLKECDIEIEKILRQKSGVEKKDNDVSKPKANKNNMNFDGKEILKNLLGTDLTEVFGLTETNITEIISEVGTDMSKWPTPKHFASWLNLAPNNRISGGKILSSRIQKKKNNAGQIFKMAAFAIQRSKNWLAMFYHRIKNKRGTQKAVVATARKIAMIFYKLVNEKVEFNPISIENYNEGFKKQEIVKVKRKAQSLGLQVV

SEQ ID NO: 373092 - protein, 346 aa, unidentified
MTYSTTVGVDLAKNVIQISAVSGRGKELSNRSLTRKKFTELLCRQKPAIVAFEACATSHYWARTAQRHGHTARIIPAKAVAPFRQGHKTDCNDALAVAEAARRPNVKEAPMKTVDQQGLQAIQRSRDLLVQESTALSNHLRGLLMEFGVVMPRGFAALQRKLPEILEDGDNEVPDMYRPTLHRLYFRFLELRSDIQAMDVEIKELVKQHPGCSRLTALEGVGPISAVLLYASLGTGEAFSGSREFAAYLGLTPRQLSSGGKTNIVGLSKKIGNCRLRSVLIQGARSYVHRLKEPKTSKDRWLMDLIERAGHGKAAVALANKNVRTAWAMLTQGTEYQRQLQLKEAA

SEQ ID NO: 373093 - protein, 440 aa, unidentified
MRHRTRMGNCRVQELAAHRSIMAIERRKVCGIDVHKSFLIATILDREGKYETKKIHQDLDSLLGLREWIISQACDSVAFESTADYWRPLYMVLQDKVPVTVANANHIKHVPGRKTDITDSRWIAQLELNNLITPSRIFSGESYDLRSLTRSRELLVQNRTELKNKIHHLLDSASIRLSSVLSDLFGKSGSIILKGIVENKPLEEIINSLPKRMRVNADAISTTLPLSIPPVCLVLLQSYLNLVERHDDEIKLLEGRIREALQNKSREQQILTSIPGIGFIGASILIAEIGDIHDFEDADKLAKWAGLTPSVYQSANVTRTGSITKQGSRYIRWILVELAHVAIRSPGRIRTFFERLMPKTGYKKAIVAVARKMLRIVWHLLVNDEEYIDEIPRSKQVKLPKLPSKIQQIGINRFIELLSKASEVIIKDNDQEILRLGLSD

SEQ ID NO: 373094 - protein, 354 aa, unidentified
MTTYCGVDFHARQQLVKWCNTEDGEIHERQLWHQSKDEVREFYAQFASRVIVGFETSGYSTWFETMLEQLGHEVWIGHATEIRRRARSRQKTDRRDAELILDLLLKDEFPRIHRLSAESREVLRQLRYRHRLVQLRTKSYNSLQAMALSAGVSLKARLRTRKGKERLLGLSLTKAGHSQREEWLLLISHLNSCIERVEQELELVAASDARVQLLRTHPGIGLLTGLALVHTLAPVSRFANSRKVAAYVGLEPREYSSGERQSFGGISKAGSRLLRFLLVEAAQKAVHKDEHLKKLYHRLVHRRERAKAKVAVARQLLVRTYIMLRDEIDYAEFVRRGVAVRSARVSYRPKCLAN

SEQ ID NO: 373095 - protein, 412 aa, unidentified
MDVMYPRCCGLDVHKNTVVACCILSTEGPEPVKEIRTFRTMTTDLLALADWLQEKGCTHVAMESTGVYWRPVYNVLEGQCELLVVNAQHIKAVPGRKTDVKDAAWIAELLRHGLLRGSFIPSKPQRQLRELTRYRSTLVQEHARTLNRLQAVLEDANLKLASVVSDISGVSARAMLEAILAGERDVEALADLARGRLRAKRDQLKDALEGRVTAHHSFLLTEHLSALEYLDEAVARVSAEIDQRLTADQEAIALLDTIPGVGLRAAEILIAEIGTDMSRFPSAKHLASWAGMCPGNHESGGKRLSGKTRKGSRWLRQILVEIAHVASKTKNTYLAAQYRRIAARRGTKRALIAVGHTVLTIVYTMLTRKQPYQDLGAAYFDQREQHRVERRLVQRLERLGYEVALHPRALAS

SEQ ID NO: 373096 - protein, 356 aa, unidentified
MQTQVTKKIDFSGKDLFIGLDVHKKSWSVTIVIDGMEHRTFTQPPDPWALNNYLQRMFPGGSYNSAYEAGFCGYGIHRELNSFGIKNIVINAADIPTSQKDKLQKRDPVDSRKIARSLEKGSLHGIHIFDRELEELRSLNRTRFYLMRDLRRSKTRIKSFLQYYGEPIPQEFDNNQWTLKFVSWLKQVKMHTMSGQDAFSNLISSYEYHRSQLLTLSRQIRERIREYDRDLYTLLKSVSGIGPLTASALITELGDINRFKNIDQLGSYVGLIPRIRESGETTHTGGITFRCNSFLRTLLIESSWQAIRMDPALMQYYHAHLINNKGHKVVIKVARKLLNRIRYVMKNRKPYVTGVA

SEQ ID NO: 373097 - protein, 359 aa, unidentified
MLNDSTTFLGLDLGDKHSHLTMLDQHGDLIEETRLPTSEASFRRKFSDLPSARIAMEVGTHSRWASHLLKELGHEVLVANARKLRAIYDNPRKTDHADAETLARLVRMDPKLLSPIHHRSPQAQADLAVLRSRDALVRSRTLLINHVRGSVKSSGARLPSCSTDSFSKKVLASIPESLLPAVLPILDTIGSLTQQIRSCDRQIETLCESQYPDTHSLRQVPGVGALTALAFVLTLEDPSRFAQSREVGPAIGLVPRRDQSGDRDPQLPITKTGNAFLRRLLVGSAHYILGPFGPDSDLRRWGLQLTERGGKNAKKRAVVAVARKLAVLLHRLWKTGEIYEPLYSSAPRINQTEVISTVA

SEQ ID NO: 373098 - protein, 351 aa, unidentified
MSGVVVGADVHKRTHTFVAVDEVGRQIGSKTVAATTAGHHQAVRWARERFGAELLWAIEDCRHLSARLERDLLTSGQSVVRVPAKMMAEQRRVARTRGKSDPIDALAVARAAQREPDLPVASHDEVSRELKLLVDRRDDLVKHRTATINRLLWRVHELDPAIAPPERSLDLAKHQQALAAALERFDGIVAELARDELADIVALTSRTNELERRITVRVREVAPSLLAMPGCGPLSAAKIVGETAGITRFKSEAAFARHAGIAPIPVWSGNTRGRVRLTRSGNRQLNTAIHRIAITQARLDGLGKTYYAKKKAEGMSTPEALRCLKRRLARIVFNHLTTDHATSATGLAAAA

SEQ ID NO: 373099 - protein, 344 aa, unidentified
MKLYVGLDVSMKETSICVVDKVGKVFREVKVATEPTAILAVLKDETLAIERIGLEAGAFSQWLYGALAEAGLPVVCVETRHMKAALSAQRNKTDRNDARGIAQMMRVGLYRPVHVKTLTSQKQRMLLTARQLLKAKAIDIESDLRGTLRNFGLKVGVVGEAKFEARIRELIKDDPDLAEIVEPVLIARRTLRQQLGVLHRQLLELVRHDPVCRRLMTAPGVGPVVALTFRATVDVPSRFKSSKTVGAAFGLTPRRYQSGETDRMGAVSKCGDRMMRVMLFEAALALMVCSRKWSWLKAWGMKIARHRGMKRAIIAVARRLAVILHRMWVDGTEFRWTREQAAAA

SEQ ID NO: 373100 - protein, 473 aa, unidentified
MQEKKYTKKRTNNKLKAAASADCTPGLNPNAAGIDIHPTAIFIAVPPGRDTHAVRKFETFTADLSAAVDWLKNCRVDTVAMESTGVYWIPLYQMLSDHGFLVYLVNARHVKSVPGRKTDISDSQWLQYLHSVGLLRGSFRPPQAICALRSISRHRESLLKMGAVHIQHMQKALDQMNLHLHHVIDDIVGVTGLAIIEAILAGKRDLGQLADLRRPGIKSSKSTIMKALEGDYRREHLFVLRQALNSWRQIQQQISECDSEMESLTRQLQAESNPEPVPLAPCKRKKVSKNQPKGEWQNLMAQEFGVDLTGIPGIQTATVQTLFTELGSNWGSFPSAGHFSSWLNLSPDHGLSNGKVVHRHTKRAHKRLRVALRMAALSLHHNKSSLGDEYRRRVSQLGPTGAITALAHKLARILWHLVTYKTPYDSSVFDEAAEKHKKRRKKNLIKLIQSMGYSVIDNQSPMPNMPSLSAQVP

SEQ ID NO: 373101 - protein, 359 aa, unidentified
MQRNKISFKGQKIFIGIDVHKKNWDVAIAPEIGIVKRHPQKASAKELFDFLKKHYPDGDYLAVYESGFSGYSTYYALKEAGIECIVIHAADVPTTQYEEVMKTDRVDSVKLVRSLKAGLLKGIYIREKENIDDRSVVRIRKTIQKQLSGYKARVKHMLHCNGVSLPERFEKPGSHWSKAFIKWLKEDVRLLSSTRNSLDLLIRQVETIRMTLLEATKMMRNLSQTERYKRKFDLLMTVPGIGVAVSMCILTEVYDVKRFHNENQFAAYLGLIPTSHSSGDKVAHGEMTFRGNKQLGPMIIEAAWITICKDAGLGSLYLRYKERMKPQEAIVRIARKLSNIIYTILKNEKEYVPYHQTGK

SEQ ID NO: 373102 - protein, 392 aa, unidentified
MPKSTTLFVGMDVHKETIDIAIATNRLNGKVRHYGQITHRIDSVDKFIAKLKREASTLKFVYEAGPTGFGLYRHLTRKGHQCEVVAPSLIPKKPGDRIKTDRRDALRLATLYRAGDLTPVYIPNVDDEAIRDLSRAREDAMLDQKSARQRLKSFLLRHGIRYEGRANWNEAHLRWLTEVIMPTPAQQIAYQEYVNTVTERSHRLERLERMLKQQVEGWHFAPVVSALQALRGIRFINAVTVVAELGDLTRFDNPRQLMCFLGLVPSQYSSGDRTRLGPITKSGNRHARRNLVEAAWAYRYRAKVSREIQIRQEKLPIKIREIAWKAQIRLCARYRKLVARGKHKNVVVTAIARELLAFMWDIAHHVRLKPVRLINLSHLREASQTQIKAPTP

SEQ ID NO: 373103 - protein, 349 aa, unidentified
MLIIGCDYHPGFQQIAYVDTETGELQEQRLPHPEEAERFYRDLAAREARVRVGMEASGHGRWFERLLAELNFELWVGDAAAIRAKRVRKQRTDRQDAQHILNLLVEDRFPRIWVANWENRDLRQLLWHRHRMVQARTRVMNQLQAVALNEGLRCKKRLWREQGRQQLESLTLAPWTSRRRRELLELLDRLNPTIAELNQVIEQEAEKNPEAQQLMTHPGVGALTALAFVLIIGDANRFSRGKQIASYLGLVPTEESSGDRRRLGHISKQGNCLLRFLLVEAAQVTVRTDREWRSKYFHLAMRRGRKIAKVAMARRLAVRLFWMIRQGWDYEQMKKFDSHAGQPGNRHGV

SEQ ID NO: 373104 - protein, 346 aa, unidentified
MLHVGLDLSRKRLDFHLLDAAGETVEVGAAPPEVDGLRALAARLSRHRQPVRGAIESMTGARFVHDQLELHGWQLEIADAAKVKGLAPLACKTDRIDAWVLAELSRRELVPAIWLPDPAVRAERERARFRLHLARKRSSLKQRVHATLMTHGTPCPVSDLFGVRGRELLARLALPEPWAGDVEAALRLIDELEREITAIERELAALGATHRYVPLLTTIPGIAWVLAYTIAAEIGDIARFPAPRKLAGYTGLCPRVYQSGESDRRGPLAKTGPRYLRWALIEATTHARKHPHYRDRYQRTKLRLGKQRGPKVAQVDLARRLAEAIWHMLTHNRPFAPAGATAPMTA

SEQ ID NO: 373105 - protein, 365 aa, unidentified
MPIVGGLDIHRKQITFDYPGTATGQVCRGQISPADREHLRAWLARFAGRDDVAFAVEGCTGWRYVAGELAAAGIEAHLAEPADTAFARGRKRHAKTDKTDCRHLRMLLAEGRLPECWIPPGHVLECRALLELYHDLRAEHTAWVQRIHAVLFHHGAPALGEGALRTEQHVAALRAAAAVHLSPAGQLQVTTALEVIDTLETRLHELRHQLTDAARHLTGAKVLAARLYGVGPVTALAMTCWLAGKDRFSSSRKAVRFAGLDVTVHSSDRKGPPGRLSRQGPPVLRFSSALAVSGCIGVAFHRRSRRAGGAVVVPPLRLLSDARAGGGCGARHMDGLGSRCLAGERRRGGSPSAARTGMPARAAGG

SEQ ID NO: 373106 - protein, 424 aa, unidentified
MKGAFLYAMKIVRFNCCGMDVHKDLVVATIGITDTRTNITEYFQQSFSTLNSDLYRLKDWLKSHHCSDVCMESTGKYWIPIFNILEDGINVHLTHPKYVKAIKGKKTDKKDSKRICDLFKHDLIKFSFIPPKEIRELREIARYRYKLVCMRTSERNRYQNCMTVSNIGLASVVSDPFGKTASNIMKEVMKSNVIDDDKILKLIHENCKNKDKILDSLHGHRIESDQRFKTEKSLDHMEYLDQIIDSCEVELIKRAYPLRESFQHITQIKGISALSAILIVSEIGIDMSQFESDKQLISWAGLSPANNESAGKKKSVRISKAGQYLKPLLIQCALSTIKDKTSYFGRKYSNIKKRRGHKKAIIAIARMMLVSIYHMILTGEEFNPCDYESFMNPKTNDNQSLTVEKALNFLKRFGIDISSILVNL

SEQ ID NO: 373107 - protein, 418 aa, unidentified
MNKPNELELAAYVGLDWADRCHVISLQAFGSRETESCVLEQKPDALHEWIAQLRARFNGDKVGIAIEQTRGAVIHAMMMYDFLELYPINPKALARFREAFRVSGAKDDPSDAELLMDLLRLHRHRLRAWLPDTMETRRLQILAEYRRKLVNNRIRHSNRITSLLKMYFPQALDWAGELGTAQSCDFLQTWPTLTAIQRVRPSRLRKFYLKHHCRNLALIEQRLNEIRTARPLTDDPAIVESLSLAVQAEAAQMCPVIEWIPRFDQIIAHYFALHPEHELFDSFPGAGPVYAPRLLTALGTNRSRWDSSADLLSHSGIAPVTEKSGNSCWVHRRLACSNFIRQTFHEFAAQSIRWSIWARIYYDQMRARGLRHPAAVRALAFKWIRIIYRCWKDNQPYDEQQYLKALREKKSPLADKLD

SEQ ID NO: 373108 - protein, 322 aa, unidentified
MITGIDCSKDIFDVVMLNDDQVVFEGLFSNDLKGFKSFLKKVKDSHLVVMEATGPYYLPLALFLYENKVNVSIINPLVIKRFSQMRMIRAKTDRKDALVIAQYGQVEKPKLWEPPSALHFKIQQLNSYSEGLIRRRAVANSQLHAFECSGQITNQLRRQLKIEIQDYDTRIRQVEKEVQKLLEDAYGQVYQNLQTIPGIGPKSAALLLIMTNGFESFESYKQVISYFGLAPRIFQSGSSVYGKSKICKMGMSKVRKTLYMAARSAIKCNKACKELYERLRSKGKSHRLALIAAANKLIKQSFAIVKNNMKYNPAFVSVLISK

SEQ ID NO: 373109 - protein, 413 aa, unidentified
MKVLYPCCAGLDVHKQFVVACVLTCQEDGQADKETRRFATVTDDLLQMSDWLQTKGCTHLAMESSGVYWKPIFNLLEGSFKVLVVNAQHMKAIPGKKTDVKDAEWIADLLQHGLLKASFIPGQDQRDLRDLTRYRTTLIQERARLTNRLQKLLEEANLKLSSVLSEVLGKTGRLILHALASGETDPEKLADLALERLPQKRAAIAQALGGRFRDHHRFLLQELLEAIEYHDRAIARLDAHIAEHLRPFQETIQRLDEITGVGRGCLETLFAEVGSDVTPFPDAAHVASWAGLCPGNNESGGKRLGGRIRQGNHWVKIALVQAAHAAAHTKNTYLGAQYRRLKLRLGAKRAAIAVAHSILLIYYQMLATGESYHEKGGDYFLVRDQQQVEHRLVKQLERLGHKVILLPNAQASA

SEQ ID NO: 373110 - protein, 350 aa, unidentified
MQPVIGCDAHKHFSVFVSVDQHGKASRPVRVDHDRDLYCEYLRTLPVGSEIALEATGHWYWIVDAMEEAGHHPHLANPFEAKRRMAKSNKTDALDAKGLAILLRCGTLPESWIPPGELRDQRELLRTRMALRDLRTSLKHRIHAGIDRYGLQADAISDLFGTKGRIYLKSIMRALPPETAQMIAVQLNSIDQLEEKIAAIERRIAETLKASPEIRLLRTVPGLGPILAPLVWLEVGDVERFPRAEHLASYAGLVPRIIASGGHIRHGGTCRNVNHYLKWAFVEAANVAIRIKAHRQQHIGLLYQRLYPNKGHGRAVVAVARHLAEASYWVLRKKQAYRAPQPRTELRIAG

SEQ ID NO: 373111 - protein, 326 aa, unidentified
MSTSNSALSTVPTVTAGIDVSKARLDVHVGPGVASFSARNDASGHNDLVSQFAKLGVTHVAVESTGGYERDAVFVLLDAGVAVAVVNPRQVRDFAKCTGQLAKTDTIDAAVICRFAVVAKPRNMNKPSENQVEIKGLVERRRQLINMRTMEKNRLDKPLSKLVRASVHQHIDQLNLQVIEIESRIDELIDGDDNWRQRVDLLKTARGVGNVIARTLVAELPELGTLSRGAIAALVGVAPFACESGQFKGRRMIRGGRASIRKVLYMGVPRAIQNNPVLKALSERMAALGKCYKVNAVACMRKMLVMLNMMVRNNEKWRPPCPTPNA

SEQ ID NO: 373112 - protein, 410 aa, unidentified
MAERFVGIDVALREHRIAVLDRDGEAVGQSFTIAASTDGVATLLRTLHARDATAAQTLIGLEASGHLWENLEAALVSTGYRVVVLNPLQTRRYRDVVRRKAKTDDIDAHVIAGLLRSGAAQASYVPDDQIQSLRELARLRARLMADRQDYQRQLIAQLDVVLPEHRAVLGDLLTARARGILAQFPTAQHLAKANPRAIRRAAEDAGARGFSLNDATGVRDSARRSLYSGKAAAARAHVVRTLVSQLERLTSAMDEVDRAATALLPPSEPGTGPSDAELLQTIPGIGPQTAATLLGELGALTRFTDARALVAYVGFYPVIHESGDRAATPRLSRVGSRIARQSLYLAAVNAVRRSGEWRTIYLRKKAQGKTAKQALVVVAVKLLHALYAMLKHRQPYNPSRLLVAAATIGS

SEQ ID NO: 373113 - protein, 338 aa, unidentified
MGLYCGIDLHSNNAYYGIVDAEGKRIFKRRLPNELPRVLETLAPFKEELERLAAESTYNWYWLVDGLQANDYPVQLANPAAMEQYSGLKHADDQHDAFFLAEMLRLGILPTGYIYPKEERPVRDLLRRRMLLVQLKTVQLLSLQSLLSRETGQQITGNQLKQLKDEALQVLLPEEHLFLAGQTNLSVIEFLERKIGELEQAILKRAKLKPEYETLLTVPGIGKILSLTIMYETGDIGRFPEVGNYTSYCRCASARRFSNQKEKGRNNGKNGNRYLSWAYIEAASFAIRCCPPAQKFYQRKKAKTKACVAMKALASKWSKACYFILRDQAEFQIERVFG

SEQ ID NO: 373114 - protein, 336 aa, unidentified
MGYYAGIDVSLKESSVCVVDATGKLVREVKVGSEPECLVGYFDQLGFPVERIGLEAGPLSQWLYAALVAAGHDVVLLETRHVKAALSAMTVKTDRKDARGIAQLLRMGWYRPVHAKSSPAQDTPALLVGRKLLQSKLLDVELSIRGILRGYGLKVGEVSRGRFEARIRELIEGHSTLSTVIDAMLTARVALWSEFTKLHREMLRIARADKVCKRLMSAPGVGALIALTYRSAVDDPARFEKSRTVGAYFGLTPKKYQSGETDRDGGVSKVGDAMVQTALFETAHIMLTRATRFSSLKRWALDVARRRGMKRAKVALARKLGVVLHSMWVDATFAGA

SEQ ID NO: 373115 - protein, 430 aa, unidentified
MTKLHSTPPDAVLVAIDMSKHRQEVLLERPEGGRRRRMTVMATKADYDRLADDLIATGRPVVVGFEATGNYHRTLAHRLLSAGFELRLISSVALARTREALHNGWDKNDSKDAQVILHMLKIGATQRYVDPLAAGINDLQEMSKTHEAISKAKTQTWHRILTHYLPLYFPEIERFAGNSRSDWFLALIERFPTPGSITSIGREAFTEQAWPLIGRKVSKARVVNDIYETACASIALPIDEDSTAVAMFRMVIAQARTLIQQRNEIERIAHDALATNSDYQLLRMIPGIGPINALTILAEAGDLRRFSHHRQFLKFCGLDLATYQSGIFRGRTKLSKYGNARLRRTFWMATQVAIRQPNNSFRDKLSRYVDGHAGDPDRRRKAMTALTAKMARVVHAVIKTGTEYRPFVERADTRWKDPSLLCREGATATL

SEQ ID NO: 373116 - protein, 407 aa, unidentified
MEVLIDRCAGIDVHKKSVTVCVMTTEGRTAVKIVQRFSTFHDELVEMREWLIEMRVTHAAMESTGEYWKPVYEVLEGSVELVLANAQHVKNVPGRKTDRQDAAWLARLLRHGLLRASFVPPQSIRDLRDLTRLRRKTIEMSARVENRVQKVLEACGIKLGSVVTDVFGATGRAILDELAENRTEPAALADLAQGSLKKKKHELTRALQGSFTAHDASLLKHQLILHGQLGQRRTAIETELVELTKPYEDLLTRLDGMPGVSREVAMAIVGEVGDDMSAWANEDRFSAWAGLCPGNHESAGKRKKIGVRKGNPFLKSTLVQAATSAGKAKGTYYQAKFGQLCKRAGYERAIVAIAHSMLIAIYHIIRDKQPYRELGAETFAKRSAQLRAKSLVKQLERLGYAVELHST

SEQ ID NO: 373117 - protein, 356 aa, unidentified
MQTQVTKKIDFKGTDLFIGLDVHKKSWSVTILVEGMEHRTFTQPPDPRTLYNYLQKMFPGGTYYSAYEAGFCGYGIHRELNDLGIKNIVINAADIPASQKDQLQKRDPVDSRKIARALEKGLLRAIHIFDRDMEELRSLNRTRFYLMRDFRRSKNRIKSFLQYYSIYIPQEFDNNQWTLKFIDWLKQIKMKTSSGQDAFSNLIRSFEYHREQILILSRQIRIRVREYDKELYNLLKTISGIGPLTSSALITELGDINRFPHINHLSSFVGLVPRVKQSGETSYNGGMTFRCNEYLRTLLIESSWQAIRQDPALMQYYHQHIINNKGQKVIIKVARKLLNRIRYVMKNRQPYVTGVA

SEQ ID NO: 373118 - protein, 386 aa, unidentified
MKLVGIDIAKYEHAAYITDAATGESLCDPFFFKNNKNGFQKLYIELNKYAKDELFIGMEDTGHYNFDIETNLLAKGYKVALINPITTKNLRKAALKSVKTDKEDAILITNALLDKDYYRIISIQDEKLKEAKELTRYRTQLTIEMNRKKNVLQRHIDIVFPEFNTLFHDEYTITYLNILRKYGDAYTIAHTDIRSLRKCFKYCNSFTAEELKKLASNSVGIHDVSISFIIQSVISSIDLINSQIEELDKKIEELAITQDSSITSIPGISIITGTSILAELGDISKYSNAGKLIKFAGVNPYISESGEFSADKTVITKKGSKYLRTTLYRVIIPVIRHNPVFNNYYHLKRSQGKKHLCALGHCVRKLLRIIYHLETNHLSFDINSLK

SEQ ID NO: 373119 - protein, 375 aa, unidentified
MKKNSSGCKSPKASMKTTKSTNVTVGMDLGDKTSRYCMLDENGEVLREASVGTTKEAITQVFATMKPCRVAIEVGTHSPWVSRLLKSVGHEVIVANARQVQLISNSTRKNDRMDAQMLARLVRVDPRLLRPIQHRSEQAQEHLRVIRVRAALVEARTMLVNAARGLTKATGERLPSCDADQMGEERMESLPAGLQNSLRPLLEEVESLTEKIQAWDQQVEQIARTDYPETRLLRQVSGVGSLIALTFVLTVEDRERFQKSRDVGCYVGLRPRQSDSGESEPQLRITKEGDPYLRKLLVQGAHCIMGRRGPDTDLKRWGLKLSARGGKNAKKRAVVAVARKLAILLHRLWVTGDVYEPLRNNRAEPPVKETGKAAA

SEQ ID NO: 373120 - protein, 344 aa, unidentified
MKCVLVLDVAKSKSMFMLSSDVGEVLLEPTEYIHNKSDFERIDSYISKLNIKDNLTIIMEATSIYHKAPERFFKENNYHVIVFNPLIGKEITNTIRKTKTDKQDCIKLTNLFWKGSIPDRNYTEDEIYTKLNELSRQYYHLDEGLTRHKNRYKELLHLCFPEFELCFKDGKIYDLTALNFIKEFPHAYIIKDKRVDALAYNMANTNDRHLNYYKRKANIIKEYAINSYPGVSENSKDVDNLKQLANIIIEIAKQKEIIKEQMIELAKQTKNFECINSLFGIGELSASLIIAELKDITRFNNIKQINASCGLDPTIVQSGKSIDYHGPIYKRGNRYARKILFNCS

SEQ ID NO: 373121 - protein, 352 aa, unidentified
MQHSIGSDIHPRYQKVAWIDEQTGEIRKRRLEHEGQEVKEFYAQFPPGTVVGIEATFPAYWFERLMGELGHELWVGDAARIRASEVRYQKTDERDAEDILDLLRTGRFPRIWVPSLEERDLRQLLVHRMKQVRARTQVKNQLHYLAISQGLCRKRKLWSVRGRKELESLVLLPWAARRRKELLETLDRLDEQVRELDRAVEEAGRERPEVALLRTHPGVGMVTALGFTLTVGPVERFPTSRKLVSYWGLNPRENSSGGRQRLGSISKQGNTMMRWLLIEAAQTAARLDPGLRRIYQRLKSRRNSGVAKVAVARRLTVRLFWMLRTRHNYAQLVHMSGSPTGAVVPPTAEPRV

SEQ ID NO: 373122 - protein, 369 aa, unidentified
MGKYSEAFVAFDVAKRKHAVAIAEGGRTGEVRFLGDVENSPLPIERTIKRLAGRYDRLHVCFEAGPTGYGLYRQIQALGHDCMVVAPALIPKRSGERIKTNRRDAVTLARLHRAGELTGVWAPDAAHEAVRDLVRAREAAADDLRRKRQQLLSFLLRHSRIYSGGGHWTLAHRRWLANQKFDHPAQQIVFQEGIDTIEDALQRLRRLEKQLALIVPEWSMAPVVEAYQAMRGASFLVAVTFAAEIGDVRRFDTPRQLMSFLGLVPAESSTGDTIRRKGLTLAGNRRARRALIEAAWTYRYPARVSVALGARLEGLPKPVRDIAWKAQVRLCARYRRLSATGKKLPIVVAAIAREMAAFLWAIGREVAPA

SEQ ID NO: 373123 - protein, 346 aa, unidentified
MEHYAGIDVSLELSSVCVVDAQGKIVKEAKVASDPEDLIAFFASLGFAMTRIGLEAGPLSQWLQSGLKCAGLEVVLLETRHVKAALSAMTVKTDRKDARGLAQLIRMGWFRPVHAKSMGSQEVRALLVARKQLLGRLIDVELSIRGILRGFGLKIGVVTRKGFEPRVRELVAGQATLQHITRAMLSARAVLRVEYEKLHKSVLAMVREDAVCRRLMTVPGVGPLVAMTYKSAIDDPSRITKSKAAGALFGLTPKKYQSGEKDITGGITRTGDEMVRTALYEAANVLLSRITRFSKLKRWGLDVAKRRGSKRAKVALARKIAVILHRMWIDGTTYRWSEAQLMATQA

SEQ ID NO: 373124 - protein, 400 aa, unidentified
MNPVIGVDISKGESHAQAFLKRGLPYGKIFKFQHDLEGLASFLVYIRDVESAAGTRPSVVMEATGHYHSPVVQFLDEHQFITIVINPLISFEAKKTNLRRVKTDAADAFQLGMLFYKEEFEPIKKRGQYLMNLRYLTRQYDSLTGMYVQVKLQFQAILDQVFPEYRGVFGDLYSKVSLKFLAKYSTSKSVLEMTENGITEAIQSFTGRGRSALWCRERTQILVAAARRNPFKETAFPSHLISIQLLIKLLLQYQEHLTDLEKSVDALAEELLEYDLIQSIPGIGTKIAATILAEIGEIDRFEHAKKLVAFAGVDPSVFSSGKFVATQNKITKHGSRRLRTALFQAVRCGIRSNRNKKLRAFYDKKRAEGKVFRVAIIACVNKLIHWIFAILTKKESFRLE

SEQ ID NO: 373125 - protein, 557 aa, unidentified
MRRFIGLDVHRDYSCSYVLEAGQEQGSRRRFPNTAEEWAGFVEELGPDDAVAIEVSGGTFRLYDTLADRAGQVVAVDPRVMRRLGSRKRKTDHDDAKVLAERLALGTLPGVWVPPKPLRELRALVNLRRRLVEQRARWKNQIRSLLQRYGYRAPHSLWQARRHVTALFELDLSPADRVALAVALEQLRSTNTHLRALEREIGQRVKDCPPVRLLLSLPGFNVIAAATYYAYIGDPFRFPTDKHVASYTGLVPRVYQSGTTDRRGSITKEGPAVLRWTLVEAASSVARHGPPALRAFYQRLRAKKGHQVAVVALAAKLTVFLYAAGTALCTGLGAIPFLAARSVPRSWLGTMNATAAGLMLAASFGLVYEGIGYSLARLTFGALLGLAFITWSSRVLHRYRNLTLGNLHGLDARKAFLVVGIMTLHSFTEGVGVGVSFGGGQSLGTFITLAIAVHNIPEGLAISLVLVPRGVPVWVAAGWSVFSSLPQPLMAPAAYLFVETFRAHLPTGLGFAAGAMIWMVFSELIPDALKDASHGAVATAVTLTSLAMVVFQTLIKT

SEQ ID NO: 373126 - protein, 388 aa, unidentified
MDQIWCSAVSTHTLHCALELSKNSWLLAIQFPDREQPSVYRIEGGDTEKLMAKLTAARDCWAKVSGSLPVITLCYEVGYDAFWLARFIKARGIECLVINPGSVQVNRRGRRVNTDRVDVKMLLRTLIAWCRGERHVWSLVRIPSVDEEDLRRSHRERSRLVRERTAHINRIKGLLFAQGIRGVNVKSQYKTLAVDKLLTGDGHRLPPRLACEITREIQRLAMVQEQIAEIERERDTAPTPCEATERKRELLLQLKSIGPAISALLSREVYYRQFANRRQVGSFLGLTPSPYSSGEEEHCQGISRAGSGQVRAIMIETAWLWIRHQPKSALTRRFVERTAGQSTRMRKIMIVAVARKLAIALWRYVEHGLVPQGAILNPPTTGKRKMTG

SEQ ID NO: 373127 - protein, 337 aa, unidentified
MFSLYGVNERGEVVLRRELRRQQLDAFFRKLPPTEIVLEACGSSHHWGRTLAALGHRVRLIAPQYVKPFVKRGKNDRIDAEAISEAALRPNMRFVPVKSVEAQADAMILSVRELLVKQHTQLVNALRGHASEFGVIAAKGTGHVEGLLERIAADPAVPAPAQAMFVELGERIDELRTRLAELDRRLAALHKACPWAGLQPDPRANPLSRQLAEVPGIGPIGALTLALTVDASQFHSGRHFAAWLGLTPRQNSTGGKTRLGGISRQGNERLRQLLVLGATSVVRLTKPDYRHASAWLLALLQRRPRKLAAVALANKMARVVWAMMTSGEAYRPQPAAG

SEQ ID NO: 373128 - protein, 461 aa, unidentified
MSRKKPTGKQNRSAQKRVDWKALEIVHPDAAGIDVGGSEHWVAISPDRDPEPVRRFGCFTADLREMGRWLVEKGVRSVAMQSTGVYWMPVFEVLEQQGLEVYLVNAQHTKNVPGRKSDVQECQWLLKLHAFGLLNNSFQPTDEIRIARTLWRQRSNLVAEASSVIQRMQKVLIEMNVQLSNVLSDVSGMSGMKIIGAILEGERDPWKLATFVEPEVKAKPEDIAKSLEGNWREELLFVLRQHVELYRIYQEKITDCDLQLRKHLESLGSKVDLKTQPIGNRPKGKKNSKNAPGFNLRTELYRITGIDWTQINGIDVLTAQTVIAEAGADLSAFPSEKQFASWLGLCPTNEQSGGKILNRRTRKVVNRATVAFRNAALTLLRSQSYLGAQYRRLRTRLGAPKAITAMARKLACLFYRLIKHGQPYVDKGTEYYEAKYREQQIRSLAKRAQKLGLQLVIPKTA

SEQ ID NO: 373129 - protein, 401 aa, unidentified
MHAVIGIDVSKATSQVAVAVDGKVVQNFKITHDVFGFNQLNTVIMQFNTFPDIVFEATGVYSRRLKTFLEAHNYPYTYLNPLTVKKQLDQLRPNKNDLNDAKHLAETQFILKRAKSYVQNPIYIELQDMSRFYQQLNHDIVSAKNRLHRLLQLTFPEIETLFSTTDSQQYWEIVSLIPHATMAKHSRQTLSDTIQSSVSRQIGVARLTRLVDKLVALGSLSAPAVAVASYNVTEVRYYAQRLTALSQSKANVLATMVDQTKDLPEYDIYQSIPGFSDKTVVSLIAELGDLHRFATSNKLNAFVGIDLRFNDSGDYKSSGFITKRGNTIARKVLFKAISNIASTATYGHQNHINDWYQKKKQSSMSKGTKKIAIGAMSRLLRTMHYLVLNNQLYDYDTASKR

SEQ ID NO: 373130 - protein, 410 aa, unidentified
MTDTTIAQTEPVLVAIDIAKARHEVLIAFPGRKRRRRLTVLNQLDDFNRLITVLSEYDRPVRAAFEATGNYHRALAYRLGDAGFEVRLVSSVALARTREALSNSWDKNDPKDAQVILHMMQIRNEQFYHDPTLCGTNDLQELSKTHDIVSRSKTELWHRILTHYLPLYWPEADRFHRSSRSDWFFAFLQRYPSPHFIAAMDQKAFIADAWDVVGRKVSKERLLADIYKTAKSSVGLPIAPDSDAARMFKLVLAEGRSLIAQRNEIEDRAVELLKDNIDYQLLTSIPGIGPINALTILAEAGDLRRFQHHRQFLKFCGMDLATIQSGTFRGQTKLSKYGNARLRRTLWMAGQVAIMQRTNSFRDKFERYIAKDRQNTHLRRKAYTAIAAKMARTVHGIIKRGEPYRPFFEG

SEQ ID NO: 373131 - protein, 383 aa, unidentified
MTDQQVIIGMDPHKSSNTIAVLTRDETMLTRRRFVNSDDGFIEMLDAVRDYPDRVWAVEGANGVGRSVAQRLVGFDEAVFDVPAKLATRVRVYSTGHGTKTDNADAVAIARAAIHSKHLRRVLPDDATVAMKLLSDRRHELVGLRTQAMCRLHRLLRELIAGGAPRQLSAEKAFDLLNDLTPDDPANVMRLEIAFDHIEDVMRLDRKIDDYNRRIVTEIKTCGTTLIRLYGVGPINAALILGEVGDVSRFPNRDHFASYTGTAPISASSGDHQRHRLNRAGNRRLNHALHIAAITQIRQDTPGRVLYRRKMTEGKTHKEALRCVKRRISDAVWRQLQTDRSNDRTQDTKWPRKPAKDTFLVAYRSPDTPRANGRPKQFKPAVV

SEQ ID NO: 373132 - protein, 405 aa, unidentified
MFDTGNVGVFLGMDVGKSAHHGYGLTPVGKKVFDKAMPNSEPKLRAVFDKLIAKFGTVLVIVDQPASIGALPLTVARDAGCKVAYLPGLAMRRIADLYPGEAKTDAKDAAVIADAARTMPHTLRSLELTDEITAELTVLVGFDQDLAAEATRTSNRIRGLLTQFHPSLERVLGPRLDHQAVTWLLERHGSPAALRKAGRRRLVEVIRPKAPRMAARLIDDVFDALDEQTVVVPGTGTLDIVIPSLARSLAAVHEQRRALEAQINALLEAHPLSPVLTSMPGVGVRTAAVLLVTVGDGTSFPSAAHLASYAGLAPATKSSGTSIHGEHAPRGGNRQLKRAMFLSAFACMNADPASRNYYDRQRARGKTHTQALLRLARQRISVLFAMLRDGTFYEPREPRTAALAA

SEQ ID NO: 373133 - protein, 323 aa, unidentified
MQGKITPERSAEEPVYVGIDVCKAWLDVYLHPLGRRLRLANGRDGLTRLKRALAGRRVVLIVMEATGKYHRQAHRSLHAAGFAVAVMNPLRARLFAEATGALAKTDRLDAHLLAILAESMAPQATPPAPEYLEELQELVRARQAATAEATALANRRQASQTAFLRAELKRRINSLKTHIARLETEIKRRIASDPALMRRCAILLSIPGVGPVTAATLGVAMAELGALTGKAAALLAGLAPIACDSGERNGGRRIRGGRAHVRTALYMAAVSAARCNPDLAAFHKRLRAAGKKPKLALTAVMRKLVVLANTLVKEDRFWQPSPP

SEQ ID NO: 373134 - protein, 342 aa, unidentified
MQITTIGLDIAKNVFQVHGIDATEKVVVRKQLRRGQVMKFFAALPPCLVGMEACASAHYWARELSKLGHEVRLMPAKDVKAYVKRHKNDAVDAEAGCEAVRRPTMRFVAVKSAEQQGRLMQHRTRDLLMRQRTQVINALRAHLAELGIVAAQGREGLKQLLAIIADEKDARLPIDARASLIVLAAQLQALQTMIGSIERRLIVQHRANEASKRLECIHGIGVIGASAIAATVTDPKAFRSGRDFAAWVGLVPRQDSTGGKQKLGPISKQGDRYLRRILVVGAHSVLRRAKSNPEKYPWLTQLLARRPFKVVAIALANKMARVAWALLARGGTYRVPALAAAA

SEQ ID NO: 373135 - protein, 434 aa, unidentified
MSNLQKMHENVAGIDVGACKFFVGTDDGQVQNFDTFTCGCHQVVEHLQQQNVQRVAMEATGVYWITLYDMLTAAGIQVYVVNGRHVKHVPGRKTDVKDCMWIKELHSHGLLRNSFIAPAEVRELRSYVRIREKHIECKVSAVQRMDKALVMMNIRLSTVLSDLQGASAMSIIKAILSGEKKPEVLVELCAPQVYKKKKEEVIKSLQGFYKSEQLFALQQAFDEYLFYTKKMEDCDKQINAVLKALTKDKEVPEAMPTKKRIYHNRPKVDDLDKTMMQLFDGKDLTVLPGITSYSLLKLYAQTGNNWNAWKTEKEYTAWLGLAPSKYQSGKSRKYKKIKVNTTAGQILKECVQPLLRSKNNALGTFGKSIASRRGPSIAIKAMARKLACWIYRIMTKGLAFVENGIKQHQQKQQARTLKWLEAQAAKLNLKLSAA

SEQ ID NO: 373136 - protein, 275 aa, unidentified
MNYNTVYVGMDVHKESFTLCSCKYEDEKASHYQRTPASYKNVLRYLAFLRTIYGEYTRFVCGYEAGCLGYSLYHQLENFNVECVILAPTTMLEQRSKRRIKTDKRDAEIIARSLAQHNYSPVHIPTETDNQTKEFIRMRDDHKAELKKIKQQILSFCLRQGYQYDGSGNWTAKHVKWLRSLKPTGLYKEILDEYLLTYTILTDKLNRLDQRIEELASKEEYKESVSKLTCFLGIKTHTALSVIVEVGDFQRFVSARKFAGYLGLVPGQHSSGDDR

SEQ ID NO: 373137 - protein, 440 aa, unidentified
MAVRRTERQTFPNAAAIDVGASSHWVAVPPARDQTPVREFGPMTDDLNAMADWLLASGIDTVALESTGVYWIPVYEVLEQRGLKVWLVDARQMKYVPGRKSDVQDCQWLQELMSLGLLRAAYRPDADVCVVRAVARQREALLGEQAGWIQRMQKSLVQMNIQLGEVISDVMGATGQAIIRAIVAGERDPQALARHRNGRIKADRAQIARALTGNWRAEHLFVLQQSLAMYDDIGRHLAACEVELRSMMTELERTPVDLGPVPREGSKRRAQFDLRQTLANWAGVDLTLIDGLATTTVMTLLTEIGPDLGRFASVKHFCSWLGLCPGTKISGGKVLSSGTKRSASRARQALKLAAQALSRSDSALGAFYRRLCCRMDKPRANTATAHKIARMVYFMLTRGEAYVDQGQQRYEEQQRQRSIAALKRRAASLGFELAPKAVAA

SEQ ID NO: 373138 - protein, 363 aa, unidentified
MTYDYVIGMDACKYFHHACVLDIDGTQVLSKRINQNEQSLRALFSAFSAYDHKVLVVVDQPNNIGRLTVAVAQDIGIDVRYLPGLAMRQLSRIHAGNAKTDIRDAYIIAHAAKNLPESLRSVDRVEEAFLQLKVLNGIDEDLARSYTRLINQIRSALVGCYPQFEQALRGQIIHRKWVLHLLARYGGPTKIKRLGKAKAAAFARRYKARNPEPVLDAIFAAISEQTVTIAGAHYAEMGVAMSAKDALLKLEHRQQIEKEVIELINDIPHTQFLLSMPGIGPKTAAQILMTAGDMSDFPSAGHLASYAGLSPRTNQSGTSIMSNSLNRAGNKKLKNALWQSSFASIRSHEHYHDPAPSQEDLAA

SEQ ID NO: 373139 - protein, 331 aa, unidentified
MKILDTIGIDISKLDFDARIHSTQSYEKFENSNKGFVKLLKWAYKNSPSPQENILFIFEHTGLYSHQLSVWLTGKEVPFLLVPGLEVKRSLGIARGKNDKVDATKIALYAYRIRDEAKPTIMPTKLVQSLKRLLSLRDRLIKQRAGFKASLKEQKRVLEKKENQVLLNTQEKLIKHLSKQIETVEKEMEDIIKSDRKLNGQFKLIVGIKGVGKQTALFMIAYTDGFTRFKTWRHFASYCGIAPFTNTSGTSIRGRTKVSNLANKKIKSLFDLCAKSAIQHNPEMKAYYNRRIEEGKNKMSTINIVRNKLLSRIFAVVNRQTPYVDVMKYAA

SEQ ID NO: 373140 - protein, 468 aa, unidentified
MRKAKRNVKSAAAAAGKKRLTLLEQINFNAAGIDVGSREQWVAVPADRDPQPVRCFGTFTSDLHALAGWLLQCGVKSVAMESTGVYWIPVFQILESRGLEVLLVNARQVKNVSGRKSDVSDCQWLQQLHSYGLLAGSFRPEAQICVLRCYLRHREHLVEQASTQIQLMQKALTQMNVQLHHVLSDVTGVTGMAILDAIADGERDPLKLAQLKDPRVRSSVETIAKALTGDYRPEQLFVVKQARESYRFLQTQIADCDVAVDQVLSGWEAKVDLGQQPLPPTHKKNRSKSKHKPGPFNLREQLYRVTGVDLTEVDGLDGLSAQALISEIGLNMHRWPSEKHFASWLGLCPDHRISGGQVLHNQTRPVLNRAADVLRMAAQSLKDSQSALGAFFRRLKARLGPAKAITATAHKLARIVYLLLKYGHNYVDPGAQYYEQRYRENILKSLKKRAASLGYTLIENSALNLQVS

SEQ ID NO: 373141 - protein, 391 aa, unidentified
MFLLGIDIAKLNHVASCIDSSTNEVVFSNFKFKNDFKGFSSLLDKIRTFNAENLIIGMESTSHYGENLINFLFKQHFKVALINPLQTSHLRKANIRDAKNDNLDSLNIARALSFAKLNFISKKNIDCFSLKKLTRFRSNLIKQRSKAKIQLTSLLDLLFPELQYLFKTKIHSRAIYSLLKKHPSAEEIAALKDDEISNLLYASSKGHFKKEKSIELKSLAKTSVGIKDTSISLHVIQLIELIELYDRQIKDIVTKITDTVDKLDTKLLSVPGINIIACAIILGETNNFDNFSNATKLLAFAGLDPKIRQSGNFSAASCRISKKGSPYLRYALIFTAWNAVRHSEKFNKYYCLKRSQGKSHYNVLGHVAHKLVRVIFTLIKKDTSYQEEKLE

SEQ ID NO: 373142 - protein, 417 aa, unidentified
MINITECAATIGLDWADQKHDLWLRPADGSKAEHLRVEQTPEALHEWVAKVRERFGGRRIAIAIETSRGPVISALMAYDFIVLFPVNPKALKSYRDAFAVSGAKDDRTDAQLLEEFVRLHPDKLRALEPDTELTRKLAGLAENRRHLIDERTRLVNQIHATLKTYYPLAETLLEGQLNTPMAADFLVRWPDLEGLQKAKPEVLRSFFYQHNSRGVKKTEERLAALQKAKALTTDPALIVPARQLVLALAGMLRPLHQAVGRLDREIAQAMDQHPDAPIFRSFPGAGPALAPRLLVAFGTNRDRFEKSTDVAEFYGIAPVVVQSGNSKTVHFRHRCPKFGRQTFHENAGCALKGEPWAKCYYDQQKERNKGKHHQACRALAYKLVRIYFACWKQRQAYDPSRYLKALEKHASPLHRKT

SEQ ID NO: 373143 - protein, 320 aa, unidentified
MSQNLPQNGVSVGIDVAKNHLDVNFAPTREPLRLANAPAGHAALRARLSSMEVRIIVLEATGGYEREVVAELAAAGLPVVVVNPRQVRDFARATGRLAKTDQIDAAVLADFGLAIQPPQRPLPDEQTLQMREKLARRRQLVEMIVAERNRLQRARAASVRHSIQAILELLQKELHQIDEELDQAIRQSPVWQEKVQLLQSVPGIGPQTALMLLFCLVELGLCSRQRIAALVGVAPMNNDSGQFRGRRTIRAGRAELRCCLYMATLAATRSNPKIRRHYEKLLAAGKPKKLALVACMRKLLTILNAIVRDGKPWQTAAATT

SEQ ID NO: 373144 - protein, 389 aa, unidentified
MLEPFNPSKSLAALEQDSTVIAVIEMSQSRWLVAAVIPGIERQPLKKIDPDEELLLKLLHRWQNEAGRAGREIKRIVAAYEAGRDGFWLARWLRARGIEAYVIHPTSVAVSREHRRAKTDRLDTELLKRAFLGWLRGEKRHCSMAAIPTLEEEDTRRPNRERVNLVTERTRLINQMKAILVRFGIRTFKPTLRKAEEKLEGLRTAEGTPLPQNTRAEMRRQLARLRVVREQISAIERERLRKLAAAAAEERGPHAMVRLLARVLGVGVETADMLVNEILLRHLHDRKAVARYAGLTGSPDESGRRRRERGLARAGSARVRCGMIQLAWRFLRFQKDSALAQWFRARTTDGRSATRKIMIVALARKLLIALWRLVTMGEVPRGIILRAAS

SEQ ID NO: 373145 - protein, 401 aa, unidentified
MEGPIVSIDVSNGNSHYMCFIKNNKRFGKVKKIDHDIEGFKRLLEDIQKLEAETNEKVCAVFEATGVYTKPLERFLSKNSIKTYIINPLESARKRKEEIHNKKTDKLDPISISKVYYDKEEMMELKKKDETYNWLRKKNRLYEDQLNHLRKYKVTFQNQLSICFPGYLDLFRDGYSDIPMTILKKYPHPDLLKNKKAETVARYLEKNTCHTHKISLEYALKIIEFAKKTYPGCEKDDVEVEIFKILLDKVIETQRECEKTLNEMITVASTLEEYRYISSIDGIGPNLAARIIAEIGDIEEFKSREALVAYAGLDPHIYQSGDQDGKHLKISKKGNKYLRCLLFLAVGCSIRGAKDNPVNRFYQKKKQQSNPLNSKAAKTACTAKLLKIIYGICKNKTTYKR

SEQ ID NO: 373146 - protein, 354 aa, unidentified
MRYSVSDYDLIYSMDVDATTICLAVLDKKGLKQNKSLPYDPVNLLNYVRKHFPGQKGVFLYEAGPTGYGLYDYLQEKGEDCLVAVPSMIPRAPSERVKTNRLDAYRLGVQARTEDLKLVVVPEKKYRDLRHLTRLRLYYSRRMVAVKNGLRGLYLFEGIRFPEGNWSRKLVLELKQITSRKAVEYKVKQLVTDLEFFRMQELKTKREIRRFCREDEEINRCIVYLMSLPGVGWIVSTYVLGALGGYKHLTSVKSTSGFLGFGPRENSTGPKVRRGEITAVGDPNARKMIIQASWVGINKDQELRSGFDKVSSQHNPKIAKQKAIVAVGRKNICRIHAILRDQRFFEKRLITKVA

SEQ ID NO: 373147 - protein, 314 aa, unidentified
MADLCSVGIDVSKAILDVAWSTNPTARWQTTNDDTGWTALVAHVRTGQPTLIVLEATGGYEIGAASALSTAGLPVAIVNPRQVRDFAKALGLLEKTDAIDAAVLASFGARIQPPPRPLPDNLQADLQALVTRRRQLVDMLTAERNRVALARGAVRKNVVAHIAWLEKQLGKTDRDLRTQIEASPMWRARDQLLQSVPGIGPATSARLLASLPELGTLSHRQISKLVGLAPLPDDSGRRHGYRRIQGGRADVRCDLYMATVTAITHNPTIRAAYRRWRAAGKLPKVALVAAMHKLLIHLNAMLRHQTPWQPPATP

SEQ ID NO: 373148 - protein, 322 aa, unidentified
MTTVGFDVSKDSLAVACLNRSGQLMHSDICPNTAAEIASYLQALRNRYSHLTLVAEATGEYHRVLALTSLELGLVLKLLNPIMTKQFTRATVRGKKTDPSDAVIIARLALQGEGVQVTAGMFTKAKPFTRTAANLIRAKQRVVAMAKHVRAVMPEETAAVAQLLDCASSLEQTAICFRAQATQTLDSHQLKLLCSIPGVGPTIAATIVSEVGDVERFKTAKALVAYAGLDPRVRQSGTTLSHNTSLTKRGTPYLRRDLFIAASVAKRWDPDLRAYYEKKRGEGRTYTEAIIAVSRKLLYRVYAVWKRNGAYVKRTPGVDTTF

SEQ ID NO: 373149 - protein, 447 aa, unidentified
MDQQRALAKVYVGIDIHRSIHKAAIVPLSLMEEGGHSWKKVRPLAVTNCRLDFEKLDCSIKEHNQDPSQVSIAIDHTGGYYSAPIVNFLSLRGYRLWYLEAKAVKEAKNRFLDQESKTDETDAMCMARLLYARDILNDDLRISAVSPELGSDAATMRALCLQRLALDKLITQATNRLRQFLVATFPEGESLYFTRLARVVTKYPTPQAIVVADLKEFRIPQKVADAIRKAASDSVGIYTPTIAASIRDVAQHRLDLISKKSELTAKIENLAKGHPFGPILTSFPCLGEVGAATLIGVIRDIDRWPSKKCLRKALGVYPTVTKSGAGTAHSVMGREGSREARRVLWQMVFTNLRKEAKPNIFRDYYQMKVNKGMRGKPAIVATMGKACEIMYHCLKEGEVYIYKPTEPLSLGNVERSQKCGQQVEMLPIIVAAPAIFDPHDELGVYVP

SEQ ID NO: 373150 - protein, 385 aa, unidentified
MLYIGIDIAKNKHDLACINENGEIMIANFKFANSYQGFVQLKLRLEQLSPLTQDIQIALESTGHYNYNIVTFLRELGYNVFTYNPLIIKEFAKSQSLRKTKTDRKDALLIARKLRSDVTPERYQTDSIVDELKELTRYQNRLIQSRSKCKNLYVRLLDIIFPELHAIVSNLHNQFIYELLTHYPSPQKIARARFSSLLKIKRLTADKAHQIQEEAKKTIGKDSPALVLELGQLIETIKHYDKQINQTQEEINRLMNDLNSPITSITGIGTRLGAIILAEIKNIHNFKNPNQLQAFAGLDPAIYQSGQMDNTGHMVKRGSSYLRYALIQAAKLISIYSPHFKAYLKLKISQGKHYNVAVTHVAKKLTRIIFHLLKTNQQFDETKLR

SEQ ID NO: 373151 - protein, 353 aa, unidentified
MRIVVALDVHRRQITYKTLDRESGEVCRGRIVPATRVAVREWLDQFVGCEAEFALEGTTGWRFVVEEIERAGHRAHLADPAETAAKRGRKRRAKTDSADCDLQLRLLCAGELPESWIPPAHILELRTRVRMRKTLIDQRTAWQQRLQAQLFHQGVPAGLRPRTRAGREALAQAELSPAGRELVALALRTIDMIDRELVALDRALRSFARRQPACRALIANLYGVGAISATAILAELGDCRRFTSSDAAVRHSGLDVTVYQSDNKRSAGHLSHEGPELLRWALFEAAHQSARRSSPDHDYYLQVAARIDHNRACLSVARKLCRRAHHLLRELGDAALAPVEREPQSEEAIQAAA

SEQ ID NO: 373152 - protein, 453 aa, unidentified
MAQGSGLTRGDRNRNRRIGLLRGVVARDRAVLAVDLGEDKQVAVLVDHEGRVLARKMARAKAHELGGLVGWAAGQAARAGFGGLVVACEPTGHRWKALMGLADAAGAGFCCVQPLAVARAREADDFTRDKTDHRDAYLIGKLVVRLECYLPERAEEAWARLRHLGARRAALAGDVVACRQQIGDLLACAWPAALGAAAGPLRSTTWLAALGVVTDRCCGDPARLRKMGYDKFAAAVRRELPRWGASRACGRIVRGLWEALGDAGGVAAQRRGALERVHLLMADWRSLLARLAEVEGRMCAVLGELDLTGLVTGIDGLSAVGAAVILAETGDLSRFASARSVVKHAGLNPAENTSATLAGVSRISRRGRPGLRTAAWRAAWAALHHNRVLRAKYAHLTGRDGSRLADGQARAACAAALLRWLYAVVTRRQPWDARVAAGLIPSRPGAVTGPAAA

SEQ ID NO: 373153 - protein, 374 aa, unidentified
MKTTRFVGLDVHAATITVAIAEPSGEIREMGTIPNDPEAIRKLMRRLGEREALRVCYEAGPCGYTLYWQLTRLGISCIVVAPTLVPVKPGDRVKTDRRDAKKLARSFRSGDLTPVWVPDAAHEALRDLVRAREAAKKDQRRARHRLQKFLLRHGHRPPAGTKAWTERYRRWLSTVRFDAPAQEATRVDYVAELEHARDRVARLERALDEAIEATPADMRSVIDALQALRGIAKLAAATIVAEVGPLSRFDRPRQLMGYSGAVSSEDSSGPRVHRGAITKTGNAHLRRIVVEAAWSYRHRPAIGPTLRRRQAGQGEAIKAIAWKAQHRLHGRYRHLLARGKLPQQVVTAVARELLGFIWAIGVAVEGEQSTRRVA

SEQ ID NO: 373154 - protein, 372 aa, unidentified
MKEHSELFIGLDVSKLKISVALAEDGRGGEVRFFGDIDASPASIAALATKLAKREARLHFCYEAGPTGYDLYRQIIALGHDCAVVAPSLIPQRPGDRIKTNRRDAVSLAKLHRAGELTPVWVPDVGHEAIRELVRAREGAMEALRRARQQLLSFLLRHGRVYTGRTPWSKAHSSWLCGQTFEHPAHQIVLAEYRHAIEEAEVRLKRLTGQVMETAASWSMAPVVQAYQAMRGVAFMIAVTFIAEIGDVRRFDNPRQLMAYLGLVPSESSTGERVHRGGITKAGNSRARRVLIEGAWTYRFPARMSRLIQGRQDDLPKAVREIAWKAQVRLCGRYRKLTAAGKLKAVTVTAIAREMAAFLWAIGQVVAPVLAA

SEQ ID NO: 373155 - protein, 369 aa, unidentified
MSKTITSFVGLDAHADAIAIGVAPRGRQEPHFVGTVSPQWGSLSKALGRLGKPEALQIVYEAGPCGYTLARQLQAHGYACEVIAPSKVARRPGDRIKTDRRDALLLARAARAGELVSVTIPDERDEAIRDLCRAREDAVRARLKGRQQLKAMLLRHGRRYGGRSSWTEAHERYLAAVSFTQPAQDIAFAEYRSAVREAHDRVERLTESMRAQLEHWRMRPVVEALMTLRGIDMVAAMTVVAEIGDFIRFARPRELMGFLGLVPSEYSSGSKRTQGQITKTGNSHARRVLVEAAWNYRFPARMSAILQRRQEGQPKAVRQIAWKAQLRLAKRYRHLSARRLAMNKICVAIARELSGFIWDISRQVRPSST

SEQ ID NO: 373156 - protein, 390 aa, unidentified
MYYCGIDVAKRKHAVALLDEHGHPVQRPFTIENTRAGFDQLLQALAGLKGPVLIGLEATGHYWWALYEDLTHHDHPVVVLNALQVHAFRKSGVRKVKSDRTDARWIAEFLRFSQPEPAQPSTTVFLQLKEVSRFRYHLSDQIGDGKRKLLSILDRVFPEYETLFSSVFLSSSRHLLAKAASAQELAAFDLSELTALLQTASRNRFDRTKAEAVQTLARQSVGVRFLADAAQLEVRCLLAQIDLLEEQRQQVDQALAQLMDQAPQHLTSIPGVGPTTGAALLAEIGDVHRFDAPEKLVAYAGIDATVYQTGQFEARQMHMSKRGSPYLRHALWQAASMAIQYDDELRVYYDRKRKEGKSHGTALGAVCRKLLTRVYIVLKENRPYEVRTQH

SEQ ID NO: 373157 - protein, 311 aa, unidentified
MTDDTIGIDISKATLDIHRLSDGKMMSFSNCPAGFKALSKFCAQTTVTRVVYEATGAYHGGLERALGAHLPLVKVNPLQARRFAQAQGVRAKTDAVDAKMLAVMGNAFALQPDEPVTKIQHDLKELRAFRSGLIKDRTRIMSRQKTQTLSITCRQSKAHLAQVDKQITEINAEIDRLISSSDTLAHSMKILRSIPGIGAVCAATILIEMPEIGSMNRKQVASLTGVAPMTRQSGQWRGKSFIQGGRKVVRDALYMPALVAMRFNPDLRAKYQAMIKAGKPPKVALTALMRKLIELANALIKANRNWVMKEA

SEQ ID NO: 373158 - protein, 394 aa, unidentified
MRYAGIDIGSERHVAAIVDERGETLVAPTSFGEDADGYARLLVQLGDPAGVLAAMEATGHYWQNLFAVLSSKGYTVALLNPLSTRRFAQAALVRAKTDAIDALWIAKLAAVKRPAPSKVPDELTRELREHVRLRDRLQQDLGDRVRELHRVVDLAFSELMRHLKDLGSLTAIVVFLAFPTAKSLAITSVRSVAQIVYDGRHKIGDELARTLITAAKSSIGQHQGPVYAREVKYFCEDIKVLRERLKEIDDDLRRAVDGHELATLLTTIEGIGPNTAARLVAELGDPAEWKSAGALAAHVGVVPQLRHSGKHAPLRAGIGSLGDRRLRHALWMPVLGAVRRNPWLRHHYRRLRANGKLAKVALIACMRKLLAAIYSVAKHRRAFEPRVPIASSPA

SEQ ID NO: 373159 - protein, 412 aa, unidentified
MILIENMYVGIDVSKDSLMAHAMDQDGKDIFHSFKVRNNKPGCNKLIDFIYKHAKQSDFELIKVGMEATNVYWEHSHRLINNSEKLNSNFKLITYILNPKVVKKFKDAYNSLPKTDSIDAWVIADKTRFRVPKPTIPEEVYRPLRELTRFRYKLVKNIRSEKNRALSLVFLKFSDLKEDVPIDIFSEASMTILESFTLEEIADKDLEELAAFLHENSNNRLGGSTPLNEIITDLKKAARNSYRLKPKMNQAITQTLSMTFDNIRFLQSQLNRSKKVLARELKAIPQTLDTVNGIGVVLTSGIIAEIGDIDRFHNQAALASYAGLTWTKHQSGSFVAEETSMTKTGNKYLRYYLVEAANSLRVHNDEYRSYYYKKYHESQKHKHKRALVLTARKFVRLVFALLSKGEIYQPRR

SEQ ID NO: 373160 - protein, 396 aa, unidentified
MTPSNVRFVGLDVHKEMAEACLVDPAGQVVGRMRFAVNRPTLESFATQILRPTDQVALEATTHCWAVAEALRPHVARVVVSNPMATKAIAQAKVKTDKVDACVLAQLLRCGYLPEVWPPDLGTQRLRELCGRRSALVGQRTALRNRIHSVLAMRLVETPHRLFSPAGRHWLETVALDEQARVLINSDLRQLDAVQAEIDALEEILAGRGYASPLVRLLMTLPGVDVTTAEALLAAWGDPTRFPDAEHAASYLGLVPSTRQSAKHCSHGPITKRGRSQARWMLIEAAGAPRPALAAPWATSSAAWPGRRTASAAVVAAARKLATIAGADADYGRALPLRPPASHRDQACAAAGQSHRPASQRGRAQGPEGHGTAARARRRQSHRPLPGRGVPLGGTL

SEQ ID NO: 373161 - protein, 338 aa, unidentified
MKLYGAIDLHSNNNVTVLIDEQDQVVYQKRLANDLPLIAQQLSGYRDRLQGIVVESTYNWYWLVDGLMDQGHKVHLANTAAIQQYEGLKYTDDHSDARWLAHILRLGVLPEGYIYPKQERAVRDLLRKRGQLVRQRTANLLSIQNLITRNTGSSIRSNRIKTLDAEAVDALLPNEDLALAVKANLAMIQCADKQIDILERTVTERIKLRAEFSFLKTVPGIGQILALTIMLETGEIKRFLSVGDYASYCRCVGSQKLSNGKKKGSGNTKNGNKYLSWAYVEAANFAVRFNAKIKSFYQRKKSKTNGIVAIKAVAHKLCRACYYIMKDQVAFDVSKAFA

SEQ ID NO: 373162 - protein, 367 aa, unidentified
MKKISTAAAKQTKNFHDHNLTIGLDLGDRSSWYCVLDETGSVLLEQRLSTTPKAMREVFGGMPRCRIALETGMHSPWVSRLLGELGHEVIVAHARNVRLIGESRKKDDRMDARSLARLARIDPQLLAPVKHRSAKAQADLTVIRARAGLVRSRTALINTARGLVKSYGERLRGCNPRNVNPEKAQELSPELQAALAPLLAAVEALSERIGEYNERIEQLAQQSYPQVARLEQVKGVGTLIALTYLLTLEDPQRFRKSRDVGCYVGLQPGRRNSGQSEPQLHISKEGDPYLRTLLVQGAHHILGPFGADSDLRRWGLKLAERGGKNGKKRAVIAVARKLAVLLHRLWVSGEVYEPLRNSSQMMMPAAA

SEQ ID NO: 373163 - protein, 388 aa, unidentified
MRATDPRPEEQTAIHTNLGAIFVSLELSRSTWLITSLSPGGGETMSKYSVRGDDVTGLMERLSVLQDKAERRTGRRVPIVTIQEAGLDGFWIHRTLEGEGIESHVVDAASIATSRRCRRAKTDRIDGEALVRTLLAYKRGEPRVCAMVRVPTPEEEDRRRLSRERKTLTAERVAHVNRIKGLLFTHGVEYEPAHRNRRARLEELRTRDGGLLPTHLKRQISRELDRLELILDQIKALEVERNALLVPAEHEVPTPAKMLLDLKGIGAEFATVLWTEGLFRQFDNRRQVAAYAGLAPTPWQSGTIDREQGVGKSGNPRLRTTMLQLAWLWLRHQPDSALSRWFHGRVERNGGRFRKTMITALARKLLVALWKYATAGVVIEGATMRTAR

SEQ ID NO: 373164 - protein, 417 aa, unidentified
MARVFEAVFERVAGLDVHKAQVTACVRVADAAGQRVAHLAEFSTTVTGLLALADWLKGYEVTHVAMEATGVYWLPVWHILEDDFELTLCNAAHVKNVPGRKTDVKDAEWLCQLMEAGLLRASFVAPKPQRRLRALTRYRKTQIAERQREANRLHKALEDTGIKLDCVATNILGKSGRAMLDALVAGTTDPEVLADLAKGLLRKKLPALREALQGRFEPHHALIIGAILSHLDFLDEHINQLSDAIEAELGPTGQAAVTLAATITGIAQRTAEVMVAEIGSDMTVFPSAGHLASWGGRCPGNDQSAGKRRSGRRHKGSKFLGIALQEAALAATRVNGSYLQAQYQRLKPRIGHRRALGAVQHSMLVAYWHMFTTGETYHELGGDYFARRDPERLTRRLVARLQSLGHTVILEPLSQTA

SEQ ID NO: 373165 - protein, 336 aa, unidentified
MIAVGVDTHKHEHLARAVDGLGQILGGLTIRADLSGYIELTQWLRTLGEDVVVGIEGAGSYGAGLCEFLLAEGIAVVEVERPRRQDRRRGKSDEIDALMAAKKVLAKDGLSTPRAGGTRQALAALLIAQRSCVSERTRLLNQLQALHTTAPVALRERIGPGNGRKLAARLVKMRARSDAPGSEQLIFTVLRDLARRGEELAAQANAYKHELAELISSLDPTLLQEYGIGPISAAKLLVCDPRRLKGEAAFARCNGTAPKPASSGQTIRYRLSRGGDRQANNALHTIARIRARHDEPTRTYLERRQSEGKTPREAMRALKRHLSRSLYKKLITIPLT

SEQ ID NO: 373166 - protein, 345 aa, unidentified
MNQQESRNSSMGTHWVGADVGKDAFDVGLVRYDQHYPDTPLCDIPADTFACSAQGVQAFVSWLDAQGLGEAPVRVVMEATGDYSINLAVWMLEQRASLAPAIANPRQTHNFIESMGVRNKTDRLDARALGFYGVERNPMAYETPSPEMADLRSLSRYRETLVRQRTALKNQMHKTNACAYVVKDQKKRLRQLNRGIEGVEKEMKALVDEHSALKGDVELLISIYGVAFISATTILAELGDLRRFERARPLTAFAGMSPRQHQSGSSIRGRTRLCKRGNPRIRQCLYLSAMVAIRGDNEFRQTYQRLLAQGKPRMVALASVMRKMLVVMRAILISGQPYRPLGISS

SEQ ID NO: 373167 - protein, 351 aa, unidentified
MKDYTGKKIYLGIDVHKTTYSVAAICEKIVIKKARLPANPEGLVTFCKKHFPGATVESAYEAGFSGFHLHRVLEKNGIKNLVVHAAGIEVATGDRVKTDKRDSLKIATQLEANRLEGIHVPSEEREEKRALTRLRDTIVEHRMTAANQIKALLHQHGLIPPTVKKKICPKWIKSLKTLPMRDGIRYALNHLVDMWEQLTIRIKEINTEMAQQAAEDNALEMVYRSAPGIGPVGARILANEVEDMSYFNNERQLFSYTGLTPSEHSSGGHVRRGHISRQGKPVIRRVLVLASWKAIQQDAQLRAVYDRISARAGGKKAIVAIARRLIGHIRACFRKKCSYREVVKTAVAAAA

SEQ ID NO: 373168 - protein, 338 aa, unidentified
MFTIGIDPHKGSHLAAVLDKDEVLLEELRVRADRHQRERLLKFAAAYEPRVWAIEGARGLGALLAQQLVAAGETVLDVPAKLSARVRSLDNECADKNDTHDARSAAIVGIHNRRLLQVAPENHAMVLRMLAKRHHELTARRTQSICRLHALLTTIRPGGLPRLLCAARAAKELRRFRPTDSVGVARRQAGYELLGEVRDADRQLRDLHQRIVAAVRVADTTVTNVYGVGPVVAAYLIGYTGDVTRFATKARYARYNATAPVEASSGPKPRHRLNLKGNRQLNHALHMAAVTQTSHDTAGRDYYQRKLAESGSKKEAMRALKRRISDAVYTRLQADASR

SEQ ID NO: 373169 - protein, 354 aa, unidentified
MKKNSIPASEIPGLTIGLDLSDRSFQFCELNAQGEIVNEGQLKLDRATLRKYLAAQAKARVALETGGQSAWVKQVIEELGHEAVVANARELEAVTGRSHRTDHHDARQLARLARVDRALLNPVQLRGTAEQVDLFVIRARAVLVEARTMLINFARGITKTLGHRLPASASHRFVERVREAVPEALEPALTGLLEVLHEITAQIEDYDAKIEALAVERYPETRWLKQAPGVGTLTALTFVLTVGEPGRFEHSRDVGPFLGLVPRRRQSGEQDPHLRISKCGDGYLRKLLVQCAHVVMGRFGPDCALRRWALDHARQSRTAKKRTVVAVARKLAVLLHRLWSRQEVFQPFPAAVAA

SEQ ID NO: 373170 - protein, 336 aa, unidentified
MKTHIGVDLHQRFCYLTAVDASGRVVKQGQVVNEAVALRNWLGQVPGPRQVVLEASGFWPAFVRAVAPASERLVMVHPQRVKAIASARLKNDRVDSETLAHLSRADLLPEAWMAEEATQQLRLLTRLRIALGQVRARAKNQMQAVLHQEGFRKPVSDLFGKRGRAWLKELPLSAAGRRVAEVWLRQIDHLDQEIAEQARELERLAAADARARWLRTVPGIGAYSAMVVLAEIGDIARFPSKRALASYAGLTPVVRESAGRKKRGTIGHHGSGTLRWIMLQVAQVAARHSPAARAWLNRLKQRKPPQVALIALARKLLMAVWALLRHGVCFEETRFA

SEQ ID NO: 373171 - protein, 327 aa, unidentified
MNLSVAVLGVDIAKLKFDVCLIKENGKVKHKVFANTRHGFEQLVVWLNAHQAGSLHACLEATGSYGEALALYLFDADYRVSVVNPAAVKAFAASRLTRTKTDKVDAELIARFCLLQQPQAWQPPAPAVRQLQALVRRLESLIEMRVAEENRLSSGVSIEAVRHSLEEHIAYLVAEIKQTELMIREHIGNHPDLKEQSDLLDSIPGIGATTAALLLAEVTDFTQYKSARQVAAYAGLVPRERRSGSSVRGRTCLSKIGNARLRKALYFPAMTALRCSSFFQAWASGMRERGKSKMAVIGAAMRKLIHLAYGVLKTGKPFDPNWTTKTA

SEQ ID NO: 373172 - protein, 344 aa, unidentified
MDHFAGLDVSVKETSVCIVDDTGKIVREVRVASEPEALLAVLKNPAYHFNRIGLEAGPLSQWLFSALAEAGLPVICVETRHMKAVLKAQINKTDRNDARGIAQMMRAGLYRPVHVKTLRSQKLRMLLTHRKLLQSKAIAIENDLRGTLRNFGLKVGMVGKVKFEARIKELVENLPDLAVLVEPMLIVRRVLREQIVILHRRLLAIVRDDEVCRRLMTVPGVGPVVSLTYRATVDVPARFHKSKSVGAVFGLTCAKYQSGEVDWSGRISRCGDEMMRVMLYEAAQSMLRSKKWSWLKAWAMQIARRRGMKKAIVALARRLAVIMHRIWVDGTEFRWTREQAAAAA

SEQ ID NO: 373173 - protein, 344 aa, unidentified
MKITTIGLDLAKNVFQVHGVNERGVGVLRKRLTRDQVAPYFARLEPCLIGIEACGGAHFWAARLTALGHRVKMMAPQFVKPYVKTNKNDSLDAEAICEAVARPNMRFVPVKSPEQQSVLSLHTARESFVHARTAQANQIRGLLIEFGLVIPQGLRHVYERVPEWIEDASVELPFRFRLLIDRLLQHLKELDRQVQELEGEIEQWHRSSEVSKRLETIPGIGPITASALVASAGDPSNFRNARQFAAWIGLVPHQNSSGGKTHLLGISKRGNVYLRTLLIHGGRALVQLARTRPERAGTWLGRLVCRRHHNVAAVAMANKNARLAWALLNSGRAYEPGHVPAPAA

SEQ ID NO: 373174 - protein, 346 aa, unidentified
MEISTIGLDLAKNVFQVHGISASGEVVIRKALRRSQMLPFFEKLPPCLIGAEACGTSHHWARELTKLGHEVRLMPAAYVKPYVKRGKNDAADAEAICEAVTRQTMRFVPIKSREQQAALSLHRVRSLLIKQRTQLVNMMRSVLAELGVAIPVGIVKALQMAREIVDGESRLDLPTEATNVVTMLAGQLLQLHTELRKLDLRLAALQRSDDRARRLATIPGIGPIGATALAASVTDPKQFSSGRQFAAWLGLTPRQSSSGGKERLGRITKMGDRYLRQLLVVGATALVRYAKEKRGTVDPRFIALLARKPARVASVAIANKMARIAWAVMARGGVFERGHAPILAAA

SEQ ID NO: 373175 - protein, 338 aa, unidentified
MLHVGLDLHKRFSTVTVMDDNGTVLKQDKLYHDDRTRLTEFFGPLAGKAVVTVEATRNWYWLYELLEELGVNVKLANARKVRLIAEARLKSDKVDPGSLAQLERTGFLPEAYIPPLEIRDNREYLRYRLTLVRLRTGLKNDVHALLDKLNIGHSFADLFCPAGRRFLSQLKLRPAYQEELTNYLALIEDLERRIVVATKEIKRQLKPDPRAKLLMTIPAVGHLTSYLLLNEIGDIKRFPTPGKLCAYGGIVPIVRQSADHRWQGHITRTGNSYIRWALTESACKAPSKDYVLGSFYRRVACRRGPLKARVAVARKLLVAVWYVLTYGEPYRTTVIPNV

SEQ ID NO: 373176 - protein, 421 aa, unidentified
MPNIEIGVDSMDKENFIYVGIDLHKETHTAVMIDCYNQKLGEITFPDRPADFPKLVTKVKKCNTDGKEVVYGLENAYGYGRALAVWLIDKGYLVKDVNTAISHQQAKHRGAMYRKSDSDDAKAIALATLNMLDKLPDACPNDAYWSLGQLVHRRDNIMKQRTRLVNQLHEQLCIAYPSYKQFFNDISRPTALYFWEHYPSRKYLKGKSVEDLRAELVPVSHNKCSTKTCEKILDAVASDKVKNNAYQDARDMVTLSIVSDLQHYDSQLAEVDKMLEQMYKMLGCTLTTISGVNVITAVKILAEIGDIKRFSNANKLAQFAGIAPLHLSSSGKGKDVATKQGNRRLQATIYFLAIQMVQISSKGTPRNPVVRAYYEKRKAEGKTSQQALICISRRLISIIYGMLKYGTEYRMPVVENAGEKL

SEQ ID NO: 373177 - protein, 388 aa, unidentified
MQIAADRPQASTAIRTDLGAIFVSLELSRSTWLITSLSPGGGEKMSKHSVRGCDVAGLLERFAHLREKARARTGQRFPIIVIHEAGLDGFWIHRMLNAEGIESHVVDPASIATSRRRRRAKTDRIDGEALVRALLAYKRGEPRVCSMVKAPTPEEEDRRRLCRERKVLTAERVLHVNRIKGLLFSQGITGYEPLRRDRRERLEQLQTGDGHTLPDHLKGQVRRELDRLELLLDQIKAVEAERDALLAAERAAARTPAAMLLDIKGIGPEFAAILWSEGLFRHFDNRRQVAAYAGLAPTPWQSGSVDREQGVSKAGNPRLRTTLIQLTWLWLRNQPHSALTLWFHERVRRKGGRLRKTTIVAVARKLLVALWKYVTAGVVIEGAVMKPA

SEQ ID NO: 373178 - protein, 341 aa, unidentified
MLIIGCDYHPSVQQIAWADTGTGECGERRLAHCAEAEQFYRDLKQKGVSVRVGIEATGHSRWFERLLAELNFELWIGDPAQIRAKQVRKQKNDRRDAEHMLKLMLENNFPQLWVPTAEDRDVRQLVWHRHRLVQMRTRVMNQLQAIAMNEGVRRKRGLWTRRGRAQLEALTLPPWTSRRRQELLELLDRFDPNIDELTEAIEQEAQRRPEVERLQTHPGVGPITALAYVLVVGTPERFACGKQVGSYLGLIPCEDSSADHWRLGHISKQGNALLRYLLVQSALSATQAEEEWRRKYVHLTMRRNHAIAKIAMARKLAVRLFWMWRRKWDYEQLKKFGSHAG

SEQ ID NO: 373179 - protein, 359 aa, unidentified
MDQSISESGKRFVGLDVGDRWSHVYVTDEQGEVVEEGRVRTTPEALRERFEGRARMRVVMEAGTHSPWMSRLLSELGHEVVVANPRQLGLISSNDSKSDRIDAELLCRLGRVDVGLLRPIEPRSARAMAARALLRSRDVAVRTRTTLINHIRGLVKASGARLPRSSTPAFAKKTQTAVPEELQSVVAPLYELLAQINQAIGDYDRAIEREGQQAWPATEIVRQVAGVGPVTALAFVACVERPERFASSRAVGSYLGMRPRRDQSGARDPQLRITKAGDPFVRRLLILSSQYILGPHGPDTDLRRFGQRLTARAGKGAKRRAVVAVARKLAVLLHRLWVTGEVYEPLRQATRSGAVEQPA

SEQ ID NO: 373180 - protein, 343 aa, unidentified
MEITTYGLDLAKSVMQLHWVDMETGEIHRKQLKRRRLLEFFANRQPGVVAMEACGSAHYWARELLKLGHEVRLIAAQFVRPFVKTNKNDAADAAAIWETVQRPDMRFVAVKTEEQQSVLALHRMRSQLIKVRTMQVNQIRGLLYEFGADLPQGRQRGLKEVPDALTNLENSISPMMLDTIRQQLKRLEEMDKDIADIEKRLTLWKKDQEAVTRLMAIPGVGLLTATAIIATVGDMKSFRSGREFAAFLGLVPRQSGTGGKVRLLGISKRGDTYLRSLLTHGARAVVNFQIKNRNPWIDKLLSRRPHNVTVVALANKMARTIWALLVKNTEYVASHTMNAASIS

SEQ ID NO: 373181 - protein, 424 aa, unidentified
MKVTYQTCCGVDVHKSFLVATIVKTTGGIEPSYQKKRFSTFNNSILEFKQWLINNNCHDVCMESTGKYWIPVFNLLEDQINVTIANPKWVKAVKGNKDDTKDSKWIGDLFRLGLVKGSYIPCKAIRILREYTRYRYKLVSCRSSEKNRYQNALTVCNVALDSVVSDIFGKSSTSIIDYLLEQSGASINHEEIASKLLRSLKSKEDAVIESVEGYQMTDAQKYRMRLVRAHIDYITAEINDVDKMIENMISSNPDFENAIQFLCTIPGVKRDSAITIISEIGTDMSQFSSSKRLCCWAVLTPGSNESAGKKKSVRITRAGVYLKPALVQCAHAAVKSDKSPYYKKKYESLVKRRGKKRAIIAIARMILTAIYQMLSTGEQWNPSDLYKVDMPVALVEKQKAKAIKQAKKLLQREGMLPPDESLAS

SEQ ID NO: 373182 - protein, 412 aa, unidentified
METIFERVSALDVHKAQVTACVRVPDGSGTRAVHLAEFATTVRGLLALADWLKEYGVTHVAMEATGVYWQPVWHVLEEDFELMLVNARDVKNVPGRKTDVSDAQWLCQLMEAGLLRSSFVPPKSQRQLRALTRYRKTQIAERQREANRLHKALEDTGIKLGNVASDIMGKSGRAMLDALVAGTTDPEVLADLAKGRLREKLPALREALEGHFEAHHSLIIGAILAHLDFLNEQIDGLSEAIGELLDPAGLVSVKLASTIPGVAARTAEVMVAEIGTDMSKFPSARHLASWAGRCPGNDQSAGKRRSGRTRKGSKWLGIALEEAALGAIRGQNTYLGAQYRRLKPRLGHGRALGAVKHSIVIAYWHMFTTGEVYNDLGGDYFQRRDPAKATKRLVAKLQALGHTVTLQPQATT

SEQ ID NO: 373183 - protein, 326 aa, unidentified
MQDLEHQKTRNDDAVYIGIDVSKTRLDIFILPSNERLSVTNDRLGHNKLTALALQLAQTPLIVMEATGRYHRAAFERLSQAGLQICIINPYQTYSFGKAMGQNTKTDTVDAYMLACFAMAMRPSPKPPLPKRLAELKELVVSRRQFTVRRTALSNQIKECCSASVCQMMRAELAMIKRHIAKCDTLMKKLLAGNLPLKARFDIIISVPGVGFVNAVTLLAEMAELGDMDEKQAAALLGVAPHANQSGNHHGKSRIKGGRKAVRNVFYMAALSSVRMQGGFQEFHQRLIAKGKPYKVAITAVMRKMIILINTLLKQNRKYQPKHPLT

SEQ ID NO: 373184 - protein, 358 aa, unidentified
MSNVKYVGMDVHKSTTTIVVCDETGRREMRLTIATTGEAIREFLVMLRGTVKVVFEEGTYSAWLYQVIKPLVSEVLVSEPRHNKLVGAGNKSDDSDAEALAYLLRLNGIKTVYKGDQRQREIKEVARAYENLVSDTTRVKNRLKALYRGRGIGCAGRAIYCRSQREQWLEKLSEPGARFRAQSLYAELESLQELRQASKQEMIKQARQHPDYRILSRLPALGPVRVSQLLAIVGTPHRFRTKRQFWPYSGLAVITRTSSDYQVIDGKAVKRKKNVGTRGLNRNYNRQLKQVFKSAALTAMQMEPFKEYYQRQLDKGQRPELARLSLARKLAAITLTVWKSRSEFNPAEVTDLAVEITL

SEQ ID NO: 373185 - protein, 408 aa, unidentified
MTDYTTRYIGLDVHKHYLIALGVDENLEVVLPARRVELSHLEAWMKKTLTRQDAVVLEITTNTWQLYDELSAHAGSVTVVHPPHVALITRAQVMNDKIAASILARLLAKGLLVGIWVPPQEIREMRGLVAQRQKMTQLATQAKNRLHAVIQRHHLQPPAGNPFSKSQNEWWQALQLGPLEKLNLQTDLETMQFAEKQEARATEEMDKLAAENEPISRLLHVSGFGVVTAVTVWAAIGDIRRFADAKHLVGYAGLGARVHDSGLTTRTGRITKAGRRDLRVALVEAAQIAANTHPHWKAELARLEPRLGRNKAIVAIARKLLVATWHILADKTADRFAQPEAVAQKMLRFAYAVGKEYRAGKTAAQFARERLDVLNIGQELTSIPWGAKKPIPLPPSARLKKESAVPNK

SEQ ID NO: 373186 - protein, 353 aa, unidentified
MPRSTNLSVATMGIDIGKNSFHVVGLDQRGAIVVRQRWTRSQIRARLSNMPPCLIGMEACVGAHHLSRRLHSLGHDARLMPAKYVKPYRKGQKNDFRDAEAIAEAVQRPTMKFVATKTADQLDLQALHRVRARLVSQRTGIINQIRAFLLERGIAVRQGLRFLRAQLPEVLGKRTDVLSDRMVHVIEDLAADWRRLDERIQGLSGEIQIVASQDPGCKRLMTVPGIGPIISSAMVAAIGSGAVFSNGRDFGAWLGLVPRQLSTGDRTILGKVSKQGNRYLRVLFVQAAWVVLIKPQIWERYGLKQWITAAKRRLHPNVLAIALANKLARIAWAVLSNDCDFRCEKTDETPRCA

SEQ ID NO: 373187 - protein, 391 aa, unidentified
MISVGIDVSKDKHDCFIVNSEGEVLADVFTIHNTMDGFNFLLQRIRECTMPQDKIKVGLEATGHYSYNLLGFLLDNGLPTYVLNPLRTNLYRKSLSLRKTKTDRVDARTIATMLLSDAGLKPYTDTAYHNEELKSLTRYRFDKVKERTKLKSSISRLVCILFPELEKLVPTLHMASIYALLEEFPDAKQIAAAHLTRLKALLETASKGHYKRDMALRIRDAARNSIGAFMPAKSLELQHTIRLIRELDAEIAEIEEQIQSLMEELDSPITTIPGMGFRMAAMILAEVGDFSRFDSPDKLLAYAGMSPSTYQSGQLKNCYPHMEKRGSRYLRYALYNATKYVCHWDPTFAAYLAKKRAEGKHYNVALSHAAKKLVRLIFAMEKSRAPYHMAA

SEQ ID NO: 373188 - protein, 376 aa, unidentified
MREKLRFLGMDVHAETIAVAVAEADGEVRSLGTIANREESIRKFIRKLGSPEHLRACYEAGPTGFVLYWQLTQLGVECDVVAPSLVPKKPGDKVKTDRRDALKLARSHRSGDLTAVWVPDEDSEALRDLVRAREAAKQDQLRARHRLTKFLLRTGRRPPLGLKAWTERYLAWLHQIHYTQPAQEATLLDCLNEVQHMGERVKRLEQSILEVVKLAPAPVQAVIQGLQALRGVAHISAVTIAAELGNISSRFENARALMGYSGVFPSEDSSGERVRRGGITKSGNAHLRRIVVESAWSYRHRPSVGAKLRKRQAGVPAEITEIAWKAQNRLHKRYMTLMARGKEQRKTMTAVARELLGFIWAIGIKAEAACKQQLAA

SEQ ID NO: 373189 - protein, 317 aa, unidentified
MNTTEIQTSLNIGVDVGKANLDIALHPSGQFYSIPNSEAHIHRFVKILKNYDIERIVVEATGRHEHALVQACNQAGLPIIVVNPTSVRRYAQAIGVLAKTDRIDAQVIAKYAATLKPEFRPIPDKTSQKIRDLLARRAQLLEMSTMEKNRLQIMPKPLHRSIKSLLKMLQSQIETITRQIEQEVAKVDHWRTKMDIMTSVPGVGKVLAYTFLSELPELGSLNRKEIAALVGVAPINRDSGKLNGKRRIRGGRPRVRTVMFMAMLSSIQCNPVFKRFYERLKAQGKIPKVAVVACMRKMIVVLNTMVKNQESWRENMA

SEQ ID NO: 373190 - protein, 419 aa, unidentified
MKQKKAKKQTYWVGIDWGKKKHTVAVADDRRTVVRRFTTPATLEGLASLNETLQGLGSVEGVAIESTHNPILYYMCDNGYTVYPINPKLSKNWREGASVAGSKSDGRDGRVLATELARRHEELRPQQAADPATAELMGLCEKQRGLIDQRTALVQRLRECLSVYYPAALDFFTDLTTATAWAFLKRFPNPDALAKSRKDTLLRFLRAHQIGLKPTWLERIERRQEATAWPTPPAALAEEGLALACVAQLQALQAHIDRFDRLIAERTKSLPETPLVGSLPGAGERLTPALTALVRSADVPASGVAGLRCVAGVAPVEDQSGRHYGTHMRRRCNKHARNILHLFAWCSTRACRWAKAFYDLCKERGNSHASALRKLADKWLRILNRMLQTGQPYNEARHLENLRKGNSPVYARLCEQAGG

SEQ ID NO: 373191 - protein, 447 aa, unidentified
MKEEEDTDILSKKVVYSGQTTRRDKVMRKAGTGKVKFVKEDTLIVAVDVGMEMNHGYCTTPDGRDIKPFKFENTREGMDKLWGMVMAGRNRFKCNEVIVGYESTGPYGEPFLHYLVKKDVKMVQVNPMHTKRVKEISDNSPLKTDDKDPRVIADIIKLGRSLSVVIPEGDAAYLRRLNNSRERHVRERTALLNQLQQLVFLLFPEFRKVFKNIKCMTPFYILKKYPTPEAISVLDRDTLGEEMRKQSRGKFRRQHAEMLISFAKNTVGIKEGVSGLSMDIRHILTQLEMLNTLIAETENEMETALGRIPYSSKLLSIKGLGVVSVAGIIGEIGDFSKFRTRGEVMKLAGLDLYEISSGKWKGRRRISKRGRSLLRKILYYAAIQTIRKDGILHDYYTRLTDGGMIRMKALVAVSRKLLGIIYAIVRDDSEYSANFESIKRRVIKKAA

SEQ ID NO: 373192 - protein, 346 aa, unidentified
MNNNTKKGPVTVLGIDLAKQSFQLHGVDNAGQVVIKKKLNRTQLSAFVANLPVCLIGIESCGGAHHWTRLFTEMGHTVRMMAPQFVKPYVKSNKNDSADAEAICEAVQRPNMRFIPAKSIEQQDIQSLHRIRSQLVARRTAQANQIRGLLMEYGIVIPQGISYIRKSLPDILEDGENRLSVLFREQLSGLYDEMVHLDDRIEALELSLKTLSTQNEDCKRLLTIPGIGLMTATALIAAVGDVNVFKSGRELAAWLGLVPRQHSTGGKPTLLGISKRGDSYLRTLLIHGGRAVVRSANKHEDKRSQWVAGVEQRRGKNSTAVAVANKNARIAWALLTKKENYQSCAA

SEQ ID NO: 373193 - protein, 427 aa, unidentified
MPYRIAGIDVHKKILAVVVSDVEIDQEYQFARRMFGSNPEQLRSLAAWLLEQEVEEVVMESTAQYWRPVWEALERYWKPLRQKREGASRRSGKLHLAQAQSNRGPRGRKRDFPDAERLVKRLVARELTLSFVPDAEQRLWRTVTRRKYQLTRDHVRVQNQVESLLEVAHIKLSSLVSDLLGASARRMLTALAEGETNPATLAALADRRLRATSEQLCDALGACADLKPVYRRLLKMMLEQLQFLEQQIGQLDQEMATLLNQHQGAVERLAEVPGLGVDSAQQIIAEVGPTAATFPSEKHLSSWVGACPGDDESAGVNYSHRSPKGNRNMRRVLNQAANAAAKAKGSVFEIVYGRLVPRLGHNQTIGAIVHRQCRLIWLILHQGARYQERGPDVNKRSRQQRTARMIRELRKLGYSVNLATSQADNPA

SEQ ID NO: 373194 - protein, 317 aa, unidentified
MTTWVGIDVSRLNLDIGWLEDGKRVHKRILNCQRGFEEMIEATPVDAHFVMEATGTYYFNLALFLHQAGRFVSVVNPLQIKGFLKSELSRSKSDKSDSFSIARFGQEKSPMPWKPHERDVYELRQLLALDDKLQHQVVEMTNMAEAFSAMSFYSPEALLRMRDLVHDLKEMRDRTRVDMERIAERLYPREVEILASIPGVGKASAIRVAAAMGDFKRFDTSRQAVSFVGLSPTLKQSGTSVRSKGHISRMGGSRVRGALYMCAMNALRKNAQCKAMWDRMKAKGKHGKVIIVAIMSKLIRQMWALVTTNQVYNPNFA

SEQ ID NO: 373195 - protein, 439 aa, unidentified
MLSLHHIDFGGCSLSVGHIVYPICCGVDVHKTFFVATLITTEGLVPHYKKRRFSTFNSQILEFKDWLLENNCYDVCMESTGKYYVPVYNLLEDSIRVTIANPKWVRAVKGHKDDVKDSKWIGNLFRLGLVPGSFILEKDFRILREFTRYRFKLVCNKSSEKNRYQNVFTVCNVALDAVVSDMFGVSASSITDYIISNDTFDMEHATSLLRGKLKAKVDEVAASIDGFIMTPAQKLRARAVRDHYNFLMEHISKLDTAIDRLAAPIESSISLLSSVPGIERRSAINVLSEIGTDMSPFGSSKRLCCWGGLTPGNNESAGKKKSVKITRAGVYLKPALVEIAHAAVKDKKNPYYAIKYEKLSKRRGKKRAIIAIARMILTAIYHMLSTGEVWNPCDLQKVDMPPELREKELQKSIRRAAKLLVAQGVVDSDSIRLPLPDSA

SEQ ID NO: 373196 - protein, 316 aa, unidentified
MLYVGIDIAKNKHDVTALNVPGKTVLKPLTFSNNKAGFELLDLSLRQLNQDCLIALEDTGHYAFNLLNFLHEQGYKVYTYTPLLIKEFAKSLSLRKTKTDKKDAHGIALKLLSDPNREQFQHDNRQVELKILARHIHRLKRKQSDWKVQYTRCLDIIFPELDKIVGKHSEYTYQLLTCYPNPQKRLEAGFDKLIEIKRLTASKIQDILSVAPHSIGTTSPAREFEIIENIKHYKRLIDKAEKCVNDLMAEFNSVITTVTGIGNRLGAVILAEIQNIHAFDNPAQLQAFAGLDSSIYQSGQIDLAGRMVKRGSPHLR

SEQ ID NO: 373197 - protein, 359 aa, unidentified
MTQITVDSTQMIIGVDTHKDTHAAVAINGLGARLGDRIEPAGVAGYEQLLDWAKTFGEIVAFGVEGTGSYGKGLTQFLRRQGLKVIEVSRPCRRVQQRLQGKDDLLDAEDAARQVLAGLATATPKSDEGAVEMIRILKAARDTAVKAQTQVMVALKAMIVTADAELRAELEPLSTPRLIKACQQLEVGTLDTPMATMRYALSAMANRWSQLHAEIEAHTQHLTKLTQAAAPELVEAFGIGTDTAAEMLITFGENAERIHSEAAFAKMCGVCPIPASSGKTQRHRLNRGGNRQANAALFRVVIVRLRWHQPTQDYVARRTAQGLSKREIIRCLKRYVAREIYHLIRKPHPTPEVPDLIRS

SEQ ID NO: 373198 - protein, 385 aa, unidentified
MVQSLDIADNVQYDRTLVLAIELSNKSWVLSAQVPGLRQTKSKRTIEPDKLALQSAIDGYKARSIATGHPVERVIVTYEAGWSGFWLARWLIAKGIEVHVVQPSSVPVDRRMRRAKSDGIDAELLLRTLLAWLRGEPRVCSMVPIPDEADEDARRCVRERTELVSERVGLTNRIGAVLATLGIADYNPLLKNRRRRLADLRTGLGKPIPPNALAKIERLLSRLELVLDQIAELEHHRDAVAVAAVPDKAGRMIQQLCSLRGIGVQSATVLVREAFVRKFANGKALGSYAGLTATPYSSGGIERERGIGKAGNRRLRTVMIELAWLWQRYQPGAAQVAWFRERTGSTGRRARKVMVVALARKLLIALWRFVIDGVIPEGAITKPST

SEQ ID NO: 373199 - protein, 410 aa, unidentified
MDSAYNVTGIDVHKKMVAVVVADAHARELTFTCRRFGTTVGELRQLRAWLQEQGVQEATMESTAQYWKPVWMALEGACRLHLAQARSNRGPRGRKTDSRDAKRLVSRLLSGDLVLSFVPDAEQRGWRTLTRTKHQLTRDRVRLQSQLESLLEECQIKLSSLVSDLLGVSGRRILRALADGETDPARLAALGDRRLHASPAALQDALSGSMPPLHRQLLTLALARLELIETQMDTMDQLIATALTAHQAAITHLAELPGIGVEAAQQIIAEIGPTAAAFPSAGQLASWGGVCPGRQESAGESHSNRSAKGNRTLRWLLTQLARAAVRKEGTHLQRVFRRLSARMNHNKAIWAIAHRLCRLIWKVLHEEVRYVEHGAAPTPLLLKRRRQRLVSQLRHLGYQVTLTPVASTVA

SEQ ID NO: 373200 - protein, 461 aa, unidentified
MQKVRRGRRKRSKKIVDVTAEMEVLRPHAAGIDVGNAEHYVAVPPGRAQPSVQTFGSFTADLHRMGQWLQACQIETVVMQATGVYWMALHQVLESYGLQVYVVNAQYTKTLPGRKTDVLECQWLQKLHTFGLLNNSYLPPEEIRVLRTYLRQRENLVAAAGTCIQQMQKVLTEMNVQLANVLSDLSGRSGMEILKAILSGERNPQRLAALADPRVKASRKEIAQSLEGHWRDDLLFVLRQVHDLYFFHLESIADCDRHIEAHLKTLESKVAGAEQALPPTPPPPRRKHIPQTNLREELYRIAGVDLTRIDGIQVQTVQVVLSEVGVDMTPWPDEHHFASWLGLCPNNRITGGKVIRRGTKKVLNRAAKALRLAAQSLHHSQSYLGAKYRRFRSRMDGPVAITTMAHMLARLIYRLLRYGTEYYDKGAEHYERQYRENQIKWLNKQAAQLHMQLIPAAPVAR

SEQ ID NO: 373201 - protein, 352 aa, unidentified
MKHYIGCDAHKKYSVFAGISEAGEVIETKRVEHERKAFRCFLGTLPKASQIAMETTGNWYWLIDEMEKAGHTPCLVHAAKAKLMMGKINKTDKLDARGLAILARNGTLPEVWIPPGDLRDQRELPRMRMALVSIRTKLKNRIHATLSKYGITIEETSDIFGGKGRRRLEAAMSELPPETSHSVAEQLQLLDHVEDSISQAEQRILQVIKKDHTMPLLDTLPGVGGILAIVIALEVGDVKRFISAEKLASYAGKVPRVNSSGGKTYYGRVRPDVNRYLKWAYTEAANAVVLQQHKMPDCHVLRLYWRVRKAHGHAKAITAVGRHMAEATYWMLKNDEPYREPKIKQLVTSQTG

SEQ ID NO: 373202 - protein, 345 aa, unidentified
MVNRSKPEAQVFAGIDVSARELSIAVRCGTEDRAVTTFGNNAAGHKALLAYLLRGNGRSRVCLEASGNYSLDLALTLQAHRQVEVSVVNPRRARRFAESLGERSKTDPVDAGVLCEYAARMPWVAWQPPSSLALRLRAITRAIEALGVMHTQEKNREHALASSQALPAVVIQEMRRHQRYLEHRMERLRREALRLIARDCELDRRFRLMLTVPGIGQTSALKILGELVVLSDTLDARQWVAFSGIDPSQFTSGTSVQKRPRISRGGSRHLRRALYMPALVVVRHAPHLRAFYQRLLSRGKARLQAVVAVMRKLLHALFAMFRSNQSYDGSKLCPIELTNKLAAVA

SEQ ID NO: 373203 - protein, 353 aa, unidentified
MRTYYVGMDVHLASIVIVVLNGAGKVVMESVLETGAERVRGFLKQLRGKVYVTFEEGTQANWLHEVVRSLVTEVVVCDPRHNKLLQSGNKNDRVDAKKLAELLRNGALKAVYHGDNGVRTLKELVRTYDCLVSDSTRVMNRLKAIFRGRAIACGGHEIYRQDGRGQWLEKLREPGAKQRAGFLYEQLAALKPLRRKAKLAMVKEVRRQTAYLWLMSVPKLGSVSVAQLIAVVGTPHRFRSKQQFWSYVGLAVVTRSTADHEVVAGVLRRSQRPVSTRGLNRNHNHLLKRVFKNAATSACHSGPFKAGYDLRVARGMAPSLARLTIARQLAATTLAIWKRGEQFDPERKKQQAA

SEQ ID NO: 373204 - protein, 375 aa, unidentified
MATTRRTECSAGDAPLYVAFELSAREWKLACAPSGGVAPRLRTLRDDARLDLPRELALARRHFQLPATAPVVSCYEAGRDGFWIHRHLTSLGVRNVVVDAASIEVTRRARQVKTDRLDALRLLDLLVRAEAGRAAWRVVRVPPEAAEDARHVMRERRTVRADRTRVRNRLRGLLATQGVRVPLRRDFLTRVAAARRWDGTPLGPGLQQRLRREWEALQAIETRLTVVEPRPATWREPAPPAVAALQRLCGIGDAGAWTLGLEVLSWRTFRNRREVGSFLGLTPTPYASGAQRREQGISKVGPQALRALLAPMAWQWLRYQPRSALTKWYTARFAGGGPRARRIGIVALARKLWIALWRYVTQGVIPDGAVVKAAA

SEQ ID NO: 373205 - protein, 341 aa, unidentified
MEYCGIDLHAEYSQICILDEDGEVMETSRVRTSRKALERFFRRDRMRVVIEAGGSSPWVSRLLDSLGHEVVVCSPRRVRLIAESKLKNDKVDAEVLARLVRLDPEFLKPIQHRSEEAQLLRANLKVRSAMVEARTKWINTVRGLLRSFGYKVAGKASHTFVDRVDGMKLPEELRAPIEPLLEQLDLLSGEIRRRDEHLEEMVKGLPEVDHLRKIPGVGVVVATYFVLTIDDPNRFKNSRDVASFFGLRPSMRESASVSHYGRITKEGDPEMRRLLVQAAHACLLTKADSELKNWALALAERKGKGKAVVALARKLAVLMHHLWVTGEVYQAFPNKAASQAA

SEQ ID NO: 373206 - protein, 381 aa, unidentified
MELQRNKVCGIDVHKRFLIATILCRDGKKDTQRFSVTLEDLLKFRDWVIENGCEQVAIESTGIYWHPVHSVLEGKIDLIVANSYKIKHTPGRKTDVSDSEWIAELCLNGMIEPSRIFPKDDRELRRLTRAREGYVKQMTQEKNKIHQSLDSACIKLASVISDIFGKSGMYLLNCVLEGREIDDIIDGIPSGRLKKKADQIKESIKSRLDVSQVILIRGSLSLMKSIQERIDELDGEISARIQYRKNDLAIAMSIPGTGFVSATAILAEIGNYTDFKKPEQLAAWCGLVPSLYQSAEKTILGGITKQGSKHIRRMLIQVAYAISRTKDSKLKKFFLRIQAKKGSKVAAVALARKVLCILHHLLINQEMYIEDRDKKICVIRS

SEQ ID NO: 373207 - protein, 363 aa, unidentified
MSNPSRGGGARDPSGVQPCVSLGTADAVTYDRTVARLPIARTRQVTVTQIICGVDVSSLSLEAFVGPNGPGRSFANTAEGIAELIAFCREHSVERVAVEASGGYERQAFAQLWAEGVPVAVLNPRAVRDFAKAMGLLEKTDRIDARVIARFAAVKDSPPSQPLTAEQQHLKALVTRLRQLTELHAAQRNQRLLVSDATARGSIEELLAFVAAQKRGLLTQIADLLAGDPLWQQLDQAFRTIKGVADRTVACVMAEMPEIGLLSNKAASKLAGLAPLAHDSGKRQDRRPVRGGRRNVRAVLFVVSSVVSRYEPDFIVFQQRLRAAGKPKKVIRIALAHKLLVRLNAKAREVRERFATRSVHQIA

SEQ ID NO: 373208 - protein, 388 aa, unidentified
MPKPFDLSKSLTALDQDSTLIVVIEMSQSSWLVAARAPGLARDPLKKLAPEPEQLFKLIDRWREESRRAGRVVRRVCVAFEAGRDGFWLARLLRQHDIEAYVIHPTSIPVKRDHRRAKTDRLDTELLMRAFLGWLRGEADHCSMAAIQTLAEEDAKRPTRERESRVNARSRLVNRMKGALARLGIRGFNPKLRKAAEKLEELRTGAGEPLPPNTLAELRRDMAQLRFVADQIKQIEKAREARLEKAPREGAHPMVLMLASIKGVGLETAEMLVAEVLSRKLRDRRAVARYGGLTGSPDESGSRSRERGLARSGNARVRRGMIQLAWRFLMFQKESALAKWFEARTANGPRGVRKTMIVALARKLLIDLWRFVEDGTVPVGVELFDSRA

SEQ ID NO: 373209 - protein, 482 aa, unidentified
MKAKQKEPPEKSTGQSTQLNWRRMNRKQRRDLERKIQSADLTLQLVHPDAAGIDIGNESHYVAVPPDRDSQPVRHFGCTTAELRAMADWLRQCRIRTVAMQSTSVYWIAVYDVLEQAGLEVYLVNARETKNLPGRKSDVQESQWLMKLHTYGLLRNSFRPPQEVRTMRTYWRQRNDLVRSAARHIQRIQKTLTQMNMQLANVLSDVSGVTGQAIIKAILAGERDPQKLAAFRDPRVKASEQDIARSLEGNWQDDLLFVLQQEQAAFEFYRKQMTECDRQLERYLQKMEGRSQGATLPEEKRKDRLQKKKGNEPHFDLQAQLFRMTGTDLTQIDGIDVMTATTILSEAGWDMIKWKDEDHFVSWLRLCPDNRISGDRIIGKGRLPTNNRVTVALKLAASNLRTSQSYLGAQFRRLRARLDTPVAIKAMAAKPARLIYRMLRYGTKYVDQGSPFYELQQRTREIRRLKVKAASLGFQLVQRNAA

SEQ ID NO: 373210 - protein, 365 aa, unidentified
MKKIAYVGIDYHQEFLAVVVLPYGEGSPVDRVELKNDPQKIKKYMSKLSKRYEIESCYEASSCGYFFYRQMTSWGYPCQVVAPSKIPQKPGNSVKTDFKDAENIAYQFRNGSLTFVHIPEVEEEAVRSLVRCRKAFKETSKRVKLQIHALLKTQGLKVPGKLGSMKCEAWFKDLPLCGLVDRVLTEFRTLLEYLNVRIAEMDREIEGISNTEPYSKNAKALQSLKGISVLSSMILLTEIIDFKRFSTPKALMGFLGLTPSEYSSSGIKRYGGITKAGNSSCRRILAECVQHYKKKPIATAALKAKWEGQPAEHAAIALKCMHRLHKRYWALEKRKPKNVATIAIAREFVGFIWSLMQTNNGRCAA

SEQ ID NO: 373211 - protein, 485 aa, unidentified
MAKVKLSAFDRLRLGARLNRKERRDVEQRLSATDPGLEIVNRDAAGIDVGNESHYVAVPRGRDAQSVREFGSWTAALVEMAQWLMRCGIRTVVMQSTGVYWIAVHDVLQKHGLEVNLVDARGTKNVPGRKSDVQECQWLMRLHTYGLLRACFLPAPEIHGIRTMWRLRDQHVKDAARCIQHMQKSLIAMNVQLHNALSDISGTSGQAIIRALLAGQRDAKTLAALRDPRCMASEEEIVHSLQGVWKPDVLFELQQAVDAYDFYRQQMAKCDEQLKQHMALLPARKVETVVSSAEPSPTTDRSKTSRSGKSRKPKGNQPAFDLEAELERVLGVNATTIDGMNVITVQTVLAEVGPDLSAWKTEAHWSSWLNLAPKRDVSGGRVIRHIREHRTNRVGNAFRMAAQTLLHSHSYLGARCRYLRAKLGGLKAVKAMARVLACLYYRLVTKGQRWVDQGIEEFNRRSEQRELAALQRKAHKHGMQLVPTA

SEQ ID NO: 373212 - protein, 344 aa, unidentified
MKILKQVVGIDVAQKELVVSVGRMSEDLTAQIFASKTFANTLKGHNALLTWVAKITDPSVSVQFVMEATGVYHETLAYFLVDHSYQVTVLLPNKISNYFKTLEVKTINDYTCAEAITRFGLERRLNGWTKPDPTFKKIKQLCRERDQITQSRSIAKNQLHAEQSEVEPNAKTLARLKKHIQFLSKQQIEVNDEIEQLVKSKKKVTDAVELITTIPGVGLLTAATILAETNGFELVRNKRQLTSYAGLDICEKQSGTSVRGKASISKRGNRYIRKALYLPALAAKRHDPKFQSHFTRLVAKHGIKMKAVVAIQRRLLEMIYTIYKTQIPYLENFESNIKKEKQLA

SEQ ID NO: 373213 - protein, 360 aa, unidentified
MFSERTSVGLDVHARSVAAAAIDSVTGELFQTRLTPAHDHVREWVLSLPGPVAVAYEAGPTGFGLYRSLIESGIRCEVVAPSKLQRPAGDRVKTDAKDAVHLARLLRIDEITPVSVPTLEQEAARDLVRAREDVRRDLMGARHRLSKLLLRHGIVYSGGKAWTGKHDAWLRTQRFAMPSTQMTFDSGYDTVLTTSARRNRLDQAIKAIATDSDFTPVVRRLACLRGISMLTAFALAVEIGDWHRFTGNTIGSFVGLVPSEHSSGASRVQGPITKTGNQHLRRLLIEAAWHHRPRYAPGAVMRARWDLAPAAARARGDLGNRRLHGRWVGFDARSKRSVIANTAIARELAGWCWSLAILED

SEQ ID NO: 373214 - protein, 365 aa, unidentified
MLHRLNSAVTLIQRTTMEAPRGHMYYIGLDVHKKTISYCVKDVSGRIQQEGKVGSTRRELDCWMKTLPQPWSVAMEATIFSGWIYDHLLPHAAQIKVAHPLMLRAIAAAKKKNDQIDASKIADCLRCDFLPECHMMPAEIRDRRRTLRYRHLLVRQMVQMKNRVSGLLMETGVEYNKQRLHKVSYFRELLSENEEVHPSIRPLLKLSRETIERCQKTEYALVSSLQRDPVLADRIKRLRTVPGVGPITALTWALEIGDASRFHSIKQAISYCGLCGDERSSADKAMRMPLSKQRNKHIQRALVEAAKLAPRQSHELAMIYDREKQKGNGNRATLAVARKMVAYLLAVDRQQRDFVPAEERRTAAA

SEQ ID NO: 373215 - protein, 347 aa, unidentified
MDVHKESISACVRNSVGKVVMECLIETKASMILQFIDGLRGDLQVTFEEGTSAAWLYDLLKPHVTKLVVCDPRKNKSMREGNQNDKIDARRLAELLRVDHLTPVYHGEHGLRTLKELVRSYLTITKDLGRVMTRVKAIYRSWAIPCTGKQVYARCHRAEWLGKITEPGVRRRAEFYYQQLDALRVLRQEARRDLLAESKKHKAWKRLCEIPSIGPIRAAVLLGILQTPHRFRSKRPLWNYGGLAIEMHSSADHRRVDGQLQRSRKNVLVRGLNRNCNHDLKNLFKGAAAVASSKPGPFQEFYTALVAKGMRPEMARLTLARKIATIVLIVWKKGVCFDANHLKPQTA

SEQ ID NO: 373216 - protein, 347 aa, unidentified
MDHIGIDLHKRESQICLLAEGGELIERRIRTEPQRFAEALGGRAPAQVLLESSTESEWVARCLEALGHHVVVADPNFAPMYATRTRKVKTDRRDARALAEACLLGAYRPAHRLSDAQRHVRARLTVRDALVRTRTRYISLIRALLRQHGWRVPSGSAEGFPRRVLALPLPGRLRSEVAPLLAVMRHLQPPLAYSDERIAAVTATDERVRRLQSMPNIGPVTAAAFVAAIDEASRFRRGHEVEAYLGLIPRELSSGETQRRGRITKAGSSRVRWLLIQAAVSMLRLRDPRTAALREWAGRIAARRGKGIAVVALARRLAGILFALLRDGTVYEPRRRPACPVTQAVPA

SEQ ID NO: 373217 - protein, 340 aa, unidentified
MSEISIIGLDIAKHVFQVHGADALGRAVLRKKISRAKLLPFFASQPRCRVVLEACGGAHHWARELARLGHDVQLIAPAYVRPFVKRQKNDAADAEAICEAAQRPSMRFVPIKSETQQAAAMVFRGRDLLVRQRTQISNALRGHMAEYGWIAPKGLAHLDKLATLLADPAAVPEGVRSVCTVLLESLALLDRQIATLDQEIVRRSREDAVARRLMTIPGIGPITATAIAALAPPPGTFAKGRDFAAWVGLTPRQHSTGGKQKLGAISKMGERTLRRLLIIGSSAVVLQASKRGAPKGSWLEQMLARKPRMLVTVALANKTARIVWALLMKNEDYRAPVVAA

SEQ ID NO: 373218 - protein, 459 aa, unidentified
MIRRLVGVDLGIASAHTVRVLDGDGLEVARRRCEPTVDSLGRVEAAALAGAPAGTVLEVVMEPTGPAWLPIAVFFTARGHRVFRVSSSKAADLRRFLSRHAKSNGIDADTLARLPLVDPAGLHPLELPGAEVAALDRRVRATDRLTVLAARHKVRIKDLTRQLLPCSPLTGDLGVADLAVLERWADPRALLAAGPARLTALIVKASHGHLGADRAQQWRAAAAAAVELYADHPAIAWTDLAAEVGTEVRLLRATQAELAAHAQERETAYRYTDLGGLARSLPGLADVGGPVLVAGMGRPGRFRNGAAFKSYTGLAPRASETGNTDRKGQPMSKAGSSLLRTTLIRAADNARRQDPQLARIYYTQMVERGAEHLKALCVVAGALAERAWTVMNRQMPYVICDIDGTPVTPEQAKQIIAQYFTVPDEVRRRRRSNKTPGRKTRLAPTASGGRPLSKPHTAA

SEQ ID NO: 373219 - protein, 322 aa, unidentified
MNNEFVGIDVSKATLDVAHLPTGNTWRESNDDAGVERLVARCKALAPELVVLEATGGYEVVVATALATAGIAVAVVNPRQVRDFAKAMNKLAKTDQIDAGVLALFAERVRPEPRPVADEQQRRMEALMLRHRQIVEMFVAEGNRLESCREVKVREDIMATMNWLKRRLKDIDGDLDRELRNSPVWREREALFCSVPGVGRTTIATLASDLSELGKLNRKQIAALVGLAPFNDDSGTSKKGKRRCRGGRSTVRSVLYMATLTAVRWNPVIKAHYTHLLARGKEKKVALVACMRKLLTHLNAMARDNKPWNHALATGNVASAPA

SEQ ID NO: 373220 - protein, 408 aa, unidentified
MDVVYSHVCGLDVHKKTVVACIITPDEKEIRTFSTMTDDLLQMVDWIKSKGCTHAAMESTGSYWKPVYNLLETEEIQTLVVNAQHIKHVPGRKTDVKDAEWIASLLRHGLLRGSFIPPRDQRELRELIRYRRSLIEERAREVNRIQKVLEGANIKLSSVASDILGKSARAMIEALISGNKDPQALSELALRRLKNKKEDLRRALKGLIGPHQRLMLQTQLRHVDELDALIQQLDEEIKRRMLPFEEDLERLDTIPGVARRTAEQIVAETGTDMSRFPSAAHLCSWAGVAPGNNESAGKRKSGRTTKGNPKLRSALIEAARAAVRTKHTYLSSLYHRIAARRGANRAAVAVAHRILTIVYHLLKEKQVYNELGPHYYEERRREQMARQAIRKLEMLGYDVMVKEREQTA

SEQ ID NO: 373221 - protein, 442 aa, unidentified
MTSRKHTVFELTHPHAAGIDIGASSHFVAVPPDRDEQPVREFSSFTEDLERLADWLTACDVDTVAMESTGVYWIPLFEVLESKGFTVYLVNALHVKNVPWRKSDVLDCQWLQQLMSFGLLRGAFRPQGDVCALRCVVRQRAMLLRYQARHIQHMQKALAQMNVQLTQMISDVVGETGQKIIRAILTGERDGATLAKLRNVRIRASEADIAKALQGNWREEHLFALKQAVALYDAYAGQLVECDQQLETMLNALAQHEGDPGKPKRRSKSKNAPRFDLRSHLFKLCGVDLTRIDGIDVTTAFTVLAEVGADLSRFKDAKHFASWLGLCPGTKITGGKVLSGKTKRTENRAAQALRLAAVSLRTSQSALGAYYRRLCARMDKPRAVTACAHKLARLIYALLTKGKEYVDQGQEHYEERYRQRVVKSLTKRAEQFGFQLVPSVSV

SEQ ID NO: 373222 - protein, 461 aa, unidentified
MAKKAKKVKSAKGAELRIVNPDAAGIDIADGIMQVCIPADRSKDNNRAFGAYISDLHAISAWLRECGIKTVAMESTGVYWIPLFCRLQEDGLDVVLTNARDVKNITERKTDESDAEWLMLLHQYGLLKASFQPHNEAKRMRTLTRHRDTLSREASSMVLRMQKAMQQMNIKLTLVLSDITGKSGIRIIEAILAGERDPKKLAELADIQCKTPKEEIAKALEGNWEEDLMFVLRQNYDTFKHYCTQLGECDAELEKLMENYRAEVAKVEDTSYSPAKKRRDYKKTRHTVSFDVERKAYEMWGVNVFEIPGISHLTALELMSELGHDFTRKFPSSKQFCCWCNISPNTKISGGKRISSHVPHRRNNVGLIFRSIASSLANAKNQLGNFYRRIRSRAGGKAAVIATAHKVAEIFFAMVANQTTYNPERVGIDEKVLLEKRITRYKRELERITGTHIEIGNACVP

SEQ ID NO: 373223 - protein, 356 aa, unidentified
MSRDIKYIGLDVHKEAIVIAVLNNSGKLVMESIVETKASSILQFIHGLQGELHVTWEEGTWAAWLYDLLKPHVHEVLVCNPRRNALLKEGSKNDKVDARKLADLLRTGMLRPVYHGEHGLRTLRELARTYQTLSKDLNRVMNRVKALYRGWSIPCAGTQVYAPRYREEWLGKIKHAGVRRRAELLYQQLDGLQALRRTLRPELLAESRKHKAAKLLRQIPCIGPIRAARLLALMQTPHRFRSKRQLWTYSGLGIETRDSAQYRFVRGQLQLAKKPQQIRGLNQNHNHEMKEIFKGAATRASCGVGPLRDFYVALLAKGMKPEMARLTLARKIAAIALTLWKKEERFDAEQLKPQAA

SEQ ID NO: 373224 - protein, 347 aa, unidentified
MEYFAGLDVSLETVNVCIVNAAGDILLEKKIAAEPAAIVHLLKSFGSPFKRIGLEAGPTSSWLYGELRAAGYGAICLECRHVKAGLSAMRNKTDRNDARGIAQLVRLGWFRQVHVKSEEAQRTRMLLVNRQQLLTKALDIENSVRGSLKVFGLRVGVVARRGFEARVLELVADDPILLAVTEPMLRVRQALFEEFERLDRLCQQLARRDPVCRRLMTVPGVGVVVALTYRTGVDAPERFSKSRDVGAHFGLTPKRYSSGQTDYDGRISRCGDEMVRTALYQAANVLLHHGRWSSLRSWAMRIAKRGSLKGAKVALARRLAVVMHRMWTDGTDFRWSDTSRMTAPTAA

SEQ ID NO: 373225 - protein, 348 aa, unidentified
MALTIVETRAITGGVDTHADVHVAAALDPIGGLLGVKEFPATRAGYGHLLSWLGGFGTVCLVGIEGTGSYGAGLTRHVTTAGVRVVEVDRSDRQDRRRQGKSDPLDAVSAARAAQSGRARGAPKGRDGTVEAIRALMVAKRSATGERTRTINQARALVLTGPDDLRARFAEHTAAALVAATASLRPRPGDVAGYAVRIALRELGRRAEFLNGQLERLDELIVPLVTAHAPGLLALYGIGPNTAALLLIAAGDHPERLRSEAAWAHLCAAAPIPASSGKTVRHRLNPGGDRQANHALWRIVFTRMGSDPATRAYVERRTAEGKSKAEIIRCLKRYVAREIYPHLRHSPG

SEQ ID NO: 373226 - protein, 427 aa, unidentified
MNCNTQNEKIEMLTDEWLIVGIDVGSEKHFARMFNNRKVELSRKALGFENDEKGFTQLEGWISNQLRTSGKKFIMCAMEPTGHYWYNLAAYLQAHGMVVVHVSPSHVKKSKELDDNNPNKNDRKDPKTIAGLVTEGRYMFPYMPNGIYASIRELNNMRMRATESLVVVKNRLARWFSIYFPEFTAVFGDLKAKSSRLLLAEAPLPEDVIKLGAEGVNQIFRNAKLRSVGMKKALQIVEAAEHSIGRKENPWAAREEISELLEDLDRYLAREEKLMARLHEEVMKVPNVERILEIKGIGIRTVSGFIAEVGDISRFEDAKSIQKLSGYAIVANESGKHNGQSSISYRGRKILRYFLFQAAISVIGKNPEFAVIHEYYITRKKNPLKKMQSVVAVACKLIRVFYTILTKGIRYDGQKMLNDIVRPEAIA

SEQ ID NO: 373227 - protein, 410 aa, unidentified
MEAIVERVAGVDVGQATVVATALVGAAHERARKETRTFRTVTRDLLALREWLLAKEVTHVALEGTGIYWRPVYEVLEDAFEMILGNAHHIKNVPGRKTDVKDSEWLADLARHGLIAQSFVPPKPFRRLRELLRYRCKLLESRTAERNRLLKLLETANIKLASVASNVFGVSGRLMLQALIEGAATPSAMAALAQGRLRTKVAELEHALEGRLDEHHRFLLQLQLRRLDHGDADLASLVARIDEALLPYRAPCEVLQQIPGVSRVVAAVIVAELGIDMTVFRSAQHAAAWAGVCPGNNESAGKRMRAGARKGNVHLRTALVEAAVAASHTKGSYLRDKFYRLRARRGTKRAAMAIGHKILIAAYHLLATGAPYRDLGPTYLDGLDKRHTTRTLVRRLERLGYDVTIAPKVA

SEQ ID NO: 373228 - protein, 348 aa, unidentified
MALTIVEDTRAVTGGVDTHADMHVAAALDPVGGLLGVGEFPATAAGYARLLGWLGGFGTVCLVGIEGTGSYGAGLARHVTAAGIRVVEVDRSDRQDRRRQGKSDPLDAVSAARAAQSGRARGAPKGRDGAVEAIRALMVAKRSARSERTRTINQARALIVTGPDDLRARFARHTAAGLVSELAALRPRPGATVGYATRIALRELGRRAEFLDGQLGRLDELIVPLVTARAPALLALHGVGPDTAALLLIAAGDHPHRLRSEAAWAHLCAVAPIPASSGKRTRHRLNPGGNREASHALWRIVITRMSSHAPTRAYVERRTKEGLSKKEIIRCLKRYAARQVYRHLRPAG

SEQ ID NO: 373229 - protein, 403 aa, unidentified
MNNVAGIDVSKGKSMVSVLRPFGEVVAKPFSIGHTGSELKELADYLKSLDGETRVVMEHTGRYYEPVARFLHEEGVFVSAVNPKLIKDYGNNTLRKVKTDKADARKIARYGLDNWAELRQHTPMDTIRMQLTTLNRQQSLYAKTKTMMKNNLIALLDQTYPGVNALFDSPVREDGSQKWVDFATAFWHVDCVRNMSLTAFAERYRKWCKRHGYNFSQSKAVEVHTGAQDLIAMLPKDALTKTMVRQAIDALNAVSASLERLKAEMQALAAQLPEYPVVMAMHGVGDSLGPQLMAELGDVARFTHRNAITAFAGVDPGADQSGTHEAKSTRVSKSGPPELRRALFLVMDCLLKTQPQDDPVYRFMDKKRAEGKPYLVYMTAGANKFLRIYYGRVKEYLASLEEN

SEQ ID NO: 373230 - protein, 413 aa, unidentified
MQVVYARCCGIDVHKATAVACVLITQADGTVQREVRTFSTMTGALEVLSRWLHEHAVEQVALESTGVFWQPVFNILEEGGHAVLLVNPQHMRAVPGRKTDVADSVWLADLLRHGLLTASFIPPAPIRRLRALTRYRVTVVHERSQEINRLQKVLESANIKLAAVATNILGASGQRMLHALAEGTEDDPAVLAEFAKGKLRKKLVLLRQALEGRVEPHHRLLIGRLLEHIASLSEAVEQMEGEIARSVLPFAEEMTLLQTIAGIKQTAAAAILAEIGADMSRFPDAKHLASWAGVCPGNRTSAGKRKGSQTTDGDVWLRGILGEVAWAAIHTKGTSFQAQYHRLVRRLGKLKALVAVMHSLLTVIYCVLRDRVPYHELGPDYLGPREAERRTRQHIRQLEELGYTVTLTPREVA

SEQ ID NO: 373231 - protein, 331 aa, unidentified
MFPVGIDVSKNTLDLCMLYDGIKGRIKTRNIQNNRHSVENILRWLRLQHCSPEDVHVVMEATGVYHERLATELHDAGFRVSLANPHRSREFARGMGIMTKTDKVDAYMLACYAFLKKPHRWEPPAPEIRYLGALLRRRDVLLGDALREENRLEKYLSTDTPADIISSCRRMAQLLREEVSNIERQIKAHIKASPALRRDYTLLTSIKSVGPQLGMHMLVVLRSHNFVSAEQAAAFLGVVPIEKRSGTSVRSRPRMSKIGPPQLRAKLYMSALCGKIYNKRMRNIYDEMCLRGKPKMVAIGALMRKLVHWCYGVLKTGTVFNDESLKPVLSS

SEQ ID NO: 373232 - protein, 385 aa, unidentified
MCVGLDTHKAKIAVAVAEPGRSGEVRFRGEIANRPEAVRQLLERLAEKHGRLRVCYEAGPCGYGLHRQIIALGHDCTVVAPSLIPRKPGERVKTNRRDALTLARLHRAGELTPVWIPDPTHEAMRDLVRARTAAMEAVRRARQQLQGFLLRHGRVFAGRKTWSPAHRRWLAGLRFEHPAQQVVLQEQIDTIDEAERRRDRLEAQIRELVPGWSLAPVVTALQAMRGVAFLSAVVLAAEVGDFRRFANPRQLMAWLGLVPSEHSSGSKVERGGITKAGNGRARRVLVEGAWSYRFPARVTSPIQARLEGVPDEVRAIAWKAQLRLCARYRRLVAAGKNANLVTAAVAREMAAFAWAIARQVRPAAAARADRPPRPAAGRSTPPTHH

SEQ ID NO: 373233 - protein, 357 aa, unidentified
MDGSSPQPQTTAGLDLGDRYSYLCLIDQHSGEVIEEGRLRTSPEAFRRRFVSERPMRIAIEAGTHSPWASRVLEECGHEVLVANARKLRLIYANKQKADEIDAENLARLARVDPKLLYPLKHRGEGSQAHMAIIRSRQALVDCRTQLVNHVRGAVKSFGHRLPKCPARSFHKKAAEHLPEALWPALGPILEQIGSLTERIRDYERQLETISKESYPETELLRQVEGIGPLTALTFVLTVEDPHRFEKSRSVGAYLGLVSARDQSGDRDPQKRISKEGDEMVRKLLVSSAHYILGPFGSDSDLRGHGEKIASRGGKNSKKRAVVAVARKLAVLLHSLWISAEVYEPLRNTHRFGGQAA

SEQ ID NO: 373234 - protein, 349 aa, unidentified
MNATTVAVDLAKNVFELAVADAEWRIVERHRLNRARFARFFVHRPPCQVVMEACGSAHHWARRILAQGHTVRLLPAHYVKPYVARSKTDRADAAALIEAARSPRIREVPIKTLEQQQLQSLHRLRSQWMSTRQRYLSTLRGILREFGIMIALGPSVAKAQIGAALAAADSGIPDGLRSALAEMLQEIAPLEQKILSVERQLTALTREDERVQQLREIPGVGLLTSTALLSTVGDIQRFPSGRHFACWLGLTPSERSSAQRRRLGKISKQGDVYCRTLLVHGARSALLAARRAQRAGKPLDRLRCWALNCERERGHNKATVALANRLARIVWASWKYQRSFDGNRGNQAP

SEQ ID NO: 373235 - protein, 475 aa, unidentified
MNIKGTKKKNQVVTANIFEQQELLKKAEVIKENLTASTWRELETNGKFDKNKKLSFISDDMLILGCDVGSETHYVRAIDTRGRELSKSAYSFNNDYEGFQSAKEWAVKIAAEHDKSQIVLGLEPTGHYWFCLATWMIANGISVVQVNPYAVKQTKEVEDNSQLKDDRKDPKLIANLVKDGNFGMPYLPEKIYAELRRLSMFRDQLNEDRIRTINRMHREMKIYFPEYKEALGKVDGAFSLELLKEAPFPDELTALGEEGIRQIWHAAKLRGRGYSRAREILQYAKASVGIKDGSIASKAAVKWFVQKIMELDVELAVIENQINQKCQEIPHTGNVLEISGIGENTLSGILAEMGDISRFDDVKEIQKLSGLGLVACSSGKHKGETKISHRGRKRLRYWLFQAAKSAVAHAEEFKELHMYYTTRADNPLKKMQSLIVIACKLLRIIYTILNTGTKYAPKKMLMDIRRPENKEAIVA

SEQ ID NO: 373236 - protein, 352 aa, unidentified
MTHHEPEVEAEVTGGVDTHRDTHTAAVLDPLGRVLGTAQFVAGAAGYTALLAWMCGFGRVTRVGVEGCGAYGAGLAASLAEQSVTVVEVDRPGRRTRRFQGKSDPIDAIEAARATLAGHRTGTPKQRDGGVEAVRVLRIARRSAVTARADAQRRIKALIVTAPEHLRARLRGLTDTALITTCAGMRPGRAETGSPTGATKTALRSLARRHQQLTVEITDLEELLDPLVAAINPGLVTAHGVGTDTAGQLLVTAGHNHRRIRSEAAFARLCGAAPIPASSGRTHRHRLNRGGDRQANAALHRIAITRLRWDPATRAYAEKRTTQGLTKKEIIRCLKRYIAREIYHLITNPPTT

SEQ ID NO: 373237 - protein, 345 aa, unidentified
MEQISRIGMDTSKHVFQLHGVNAAEAPVLRKKLRRKDMIAFFEKLAPTAIAIEACGASHQLARLLQSFGHSVKLIAPQLVKPYVKRGKNDAADAEALCEAMSRPTMRFVPVKTDEQQAALMLVSVRDRLIRNRTQLTNAIRGYAAEFGLIAAKGMAHVIPLLERIQTDESLPVLAREMFAIQAKEYTQIQAQIDEADAKLKAWLKADERGKRLAKIPGVGPIGAALLTMKTPAPEMFQSGRQFAAWIGLTPKDHSTAGKVRLGVITRAGDEKLRSVLVAGATSVIQQGQRNGRMLPWLAELLKRKSRKLAAVALANKIARIAWKLMSSGETYIAKSALNTLAGAV

SEQ ID NO: 373238 - protein, 398 aa, unidentified
MYKQFIGIDISKDSFDLTLLERSGEIKLEVKLSMDRDGFNTLLEYLSPYSKEKLLIAMEATGIYHLPLLSFLLENSFKSVVINPILIKSFIGSTTLRKTKNDKKDAASIALFSLKSYQSLHLASTDIIENIRPLIRERENLSKDIARLKTEIKANLVQLFPELLKNTNIFTKSILNLLLKAPSRKAIRNLKEKTIQRILDDTSGNKVKITAKDILALAKTSIAVSDKYLEKVLTSKIRRLIATQDELSILDSELENSLEDTNINDDIDILQSIPGVGSVTSKNFMVEVSSVNKFNSVKQLCAFIGIDPSIRQSGTSINYKGKISKRGNANLRRTIWQMAIGTIRSCEKFNNYFSKKREEGKKFKQAVIAVANKLLKTIFVMLKNKTKFNENLAYGVSK

SEQ ID NO: 373239 - protein, 368 aa, unidentified
MAQGTEWVGLDAARVTALIAAERGGVDRRLPIVMGLDQHRAQITAEWIDLETGGVSRGRVVPADRAAVRKFFTRFAGRALEVALEATTGWRFVAEELGRVGAGVHLAEPAETSGMRGPKKRPKTDWADARHLRELLLIGRLPESWIPPEHILDLRATVRCRHTLSHQRTEWQQRIQAVLHHHGCPQRRDLMSAERREWLEGQPLPPAAREQVTIVLQMIDALDVQLDPLTARLCEYARRQTGCKALIAAYYGIGQLTSVTILAELGDTRRFQNARDVVRYSGLDITVKQSDQHRAPGRLSRQGPPALRWALYEAAQRARHPASPDRDYYLQTAERIGGNRACLALARKLLKRCYHTLRDLGDQALTPA

SEQ ID NO: 373240 - protein, 313 aa, unidentified
MTMVHTPSRFIGCDIGKDEVVVFDSAGRRVTRLANTPEALADFAAKLDQDVLVVCEATGGYEAALLHALVVAGCPVHRADARKVKAFIRSHGTLGKSDTIDARALAHYAEERHAKLSRWQAPDHDRAELAALVLTRQDMVASRTAWSNRRKAPGAITTHIDPICQTLDQQIRSIEAAIEKLLSNRAQLQQAIVTLRTIKGIGPTIAPALIALMPELGTLGPKQATALAGLAPHPNQSGKQDGYRRVRGGRPEVKRILFTAAMTAARHDPSLSIFYQRLINSGKKPIVAIVAVMRKIIVIANARLRDQLAQQLS

SEQ ID NO: 373241 - protein, 344 aa, unidentified
MGEVNTIGLDIAKSVFQVHGVDVAGAVVIRKRISRAKVSEYFRDLPPCLVGIEACPSAHHWGRELQALGHTVKLIPPSYVKAYLKRSKNDANDAAAICEAVTRPSMRFVPIKTMEQQSALMLHRTRQLLVRQRTMLSNALRGHLAELGIVSAKGRNGTAELLRIIVDSADSRISPAVRGILEVLAPQYDAIGAEIASIDKSIMALHRACEASRRLAEIPGIGPVGATALVAEIGDWNSFSSGRSLAAWIGLVPKQHTTGGKDRLGSITKQGNRYLRWLLVVGAMAVIRYARKHGAERRPWIARLMGRRPTKVAAVALANKMARMVWAIMVRGERYKEPKLSLAA

SEQ ID NO: 373242 - protein, 370 aa, unidentified
MAPASTLFVGLDVHKETIAVAYVGEEREAEVVSLGTIGTRQKDIDALVRKLQGKGKRLHFVYEAGPCGYWLYRYLTKKNLKCWVVAPSQIPKKAGDRVKTDRRDAVQLARLLRSGDLSPVYIPSVEDEAIRDVVRAREDVLKDLKAAKVRLKAFLLRQDIRYEGRANWTAAHLRWLANVVCPTPAQQIVFQEYVRAVSEQTERLQRLEAELLPLVQTWRWAPVVAAIQALRGVQFLAAVTLIAELGDLTRFETPRQLMSYLGLVPSEHSSGERRRQGSITKTGNSHARRVLVEGAWAYRYPAKVSRHLQLRLAKVPKAIQDISWKAQVRLCKRYRRLVARGKNVNQVVVAIAREMAAFVWAIAREVQVAH

SEQ ID NO: 373243 - protein, 408 aa, unidentified
MQVYIGIDWSEEKHDVVFMNEAGADLAVLCIPQKLEGFQQFDAARQKLGLAPEECVIGIETAHNLYVDYLLDQNYRALYVLPPNQVRSNRGRFRQSGAVDDPAAARLIAEIVRTDRGRLHPWQPDSPLTRQMRAQLNWLIQLTRDTTRLSNRLRAELLRYYPAALAVFKKGVNTQITPEFIQAYPTPQAAQALSQADFIAFARQHHYPNLERLSYCYARLQEKYPAAHPEVVAMYQAEAVQLAHLLLEAMHTRLVVLKSLQELYQQHPKHAVFDSLPGVGELIGPGLLAHFGDDLERFPTAASAQTLAGTAPVTARSGKSKHVHFRWACDKEWRYICQEWAMTLVHNTQAPIAVAYYQQIRPHCHSEQHALRCVANRWLAVAWKLWQTGQTYDPAVHLQNRAARSQPR

SEQ ID NO: 373244 - protein, 483 aa, unidentified
MRIIGLDIHRAFAEAVAWEDGRLRRLGRVDMRRDLLDAFAAKLSLDDVVVIEATGNASSAAAVVAPHVKKVVIANPKQVRIIAYAKIKTDTIDASVLAQLYASGFLPEVWIPDEPTQALRRQVTRRNQIVRQRSRLKNVIQAILHSHLIPSCPHADLCGTKGRSWLSEQVVPQDERLAIDRHLREFDRLGEDLQVIERDLARSALAEEGVKRLMTIPGVDKTVALAMKAAIGDVSRFDEPQKLVSYLGLNPSVRQSGPGPAYHGRITKQGRGHARGMLVEAAWAAARAPGPLRAFFLRVRARRGQHVAAVTTARKLSVVIWHLLMKGDSYAWARPSLHAKKLRDVELKAGSKAVRGQKGAAHAYNIKSHREEERRWVEQAEGAYARFVAGGTREARERRARMPQTRCDDRSCAAGLSPRTLLFATRSSVRDRRISQIRSKSSCRSHQWSTGAWPWWCGARCHSWRRRIRRHGPRSVRRWRSLP

SEQ ID NO: 373245 - protein, 318 aa, unidentified
MNSPEIYVGVDVSKDTLDIATHPRQQSKSFRNDDAGITQAITYFKRIAPVLVVMEATGGLEMSLAAALSVSGIFVAVVNPRQIRDYAKSMGKLAKTDAIDAQVMADFAAANKPEPRPLADSQTQELRDILSRRSQIQEMITAEKNRLYRARRPVNDRIKAHIIFLEQELDDMDAHMRRFIQGSPIWREKDNLLQSTPGVGPILSTTLLAELPELGILNRKQIAALVGVAPLNRDSGKLRGRRTVWGGRAKVRAVLYMATLVATRRNAVIQCFYQRLIAAGKAKKAAITACMRKLLIIMNSMIKHHTSWQYTLNQAVIS

SEQ ID NO: 373246 - protein, 360 aa, unidentified
MAKARTLVGLDVHATKIVAAVLDAESGELRTFRMNGDAGEAAGFCAGLPRPVRVAYEAGPTGYGLARELAKRGVGCVVAAPSKIPRASGDRVKTDLRDAELLVRLLFAGKLHAVRVPGDEEEALRDLVRAREAVRVDLMRCRHRLSKLLLRHGIRFDDGPAWTQRHRDWLAQVALEWPAAQATLLDCQGSIDALCHRRERLECEIVALLPDCPWQVQVGRLRCLRGVDTLTAVGLCAEVGDFERFARAGQLMSYVGLVPSESTTGQQRRLGSITKTGSAHARRLLIEAAWHYRPRPRIGKALTDRQNGQSAQAIAISWSAQQRLHRTWARLEARSKRRTIIAVAAARELAGFCWAITQIE

SEQ ID NO: 373247 - protein, 406 aa, unidentified
MTIPLYVGVDVGKAKNVACFMGPDGTVLIKKAVFDNSLTGAQQLITKAKDLLVKENYDHSVFGVEATSFYHFHLMNFILTADELKSYRPTVYQLNARSVRNFKKAYTPRGKDDVFDAFVIADNLRFGRLPKPYEVDEMYLPLQRLTRYRFHLVGSLIREKCYFLTMLFLKFSNYGDVFSDVFGATSRSLITDFYSPEEIIDTPLEDLVQFLVDKGNNHFAEPEKLAKDLKRISRESYRLQPNLSDSVNLILETSMNNIRFFEQSIRKIENVINRDMAKLANPLASVPGIGPVFSAGIIAEVGDVSKFGNQSKLAKYAGLTWNSNQSGNFEGEDEPLNRAGNRYLRYYLIEAADSLRRHNAEYQAYYQKKYREAAKHAHKRAVVLTARKLVRLVYALLDKNQLYRPD

SEQ ID NO: 373248 - protein, 408 aa, unidentified
MEQNIVFGIDVSSHSSTVCVVIDRIKQGKPFTISNDSFGYQKLLDHLNRYLITPLVVFESTGVYSLSLQAFLEENHIKYLKLNPLKAKKLMDNNLRHNKTDKLDAYHLALIEFCAPQKLREPQPKEYHEMQNASRYFEELTKNLIVAKNQLHRNLQSTFPQIESIMATPTGKIYWTIVSLFPHAQYVLDSDETRIYQELLSISGIGKQRARYLTARLYSLAEQAYPYDSKDSITVRAIQRNISDLFSLSEERDNVINYLEKLAKIVNSRALTIYQSIPGIARTTALRLIAELGDLRRFDTSARIDAFIGIDPGRYQSGEMDNHLGITKHGNHIARKILYRVIGQMESTKLSQPCHITDYYDNKKKSSHSRGYKKIAIASVHKLIRTMFALIKQNQLYDYNVATKNQRL

SEQ ID NO: 373249 - protein, 370 aa, unidentified
MLNTTTFVGLDVHARSIKAVALDAMTGEVRSATFAYDAAAVAEWVRSLDPAAKCVYESGVTGFDLQKRLAALGVDCVVGAVSKMIKPPADRKRKNDRNDAEFLARMLSVGNVVEVWVPDDECEAARDLVRALDDAREDLKRCKQRLSKFLMRHGYAFSETTPTGRRKGNWTAAHWAWIKSISFPEKADNDVLAYYVDAVRRAMEDKARLEKLVEAEASKPRWKRRVDSVRCLKGIDVTSAADLVFEAGEFSRFKSARSFAAWLGLTPSEHSSGESVRQGGITKAGNKHLRRVLVESAWHYLGCSPHSKDLAKGQVPDPAARRHAAKGVRRLVERRRAMLERGVHKNKANVATARELACWCWAVGRMIENG

SEQ ID NO: 373250 - protein, 374 aa, unidentified
MENTITYAAMDTHKKQHKIALHYPGREEIVEFAVNNTAADIKKMVNKIKKQAPGNIEFCYEAGVCGFALKRRIEQLGCRCMVIAPSLVSRKPGERVKTDRRDAKKLLVMFKAGLLTEVHAPDEHQEAARELTRLRETAKDNLKRVRHQLLKFLTRHGYVYRQGRHWTQRHIAWLRSLEFTEPMLKDVFEGYFNQMIYCAGRLENLDKEVALLADSKEYKELVGLLCCYHGIDTLTAITIITEIFEFGRFESPRHLMSYLGLTPSEDSSGDKQKKGSITKTGNKRIRRLLNEASWHYRHMYVPSAALKKRRKGQPKWAIEIADAAGRRLSKRHRYLIHKGKMPCKANIAVARELAGFIWFTITQYHARKDMVDAA

SEQ ID NO: 373251 - protein, 356 aa, unidentified
MSREIKYIGMDVHQEAIVIAVLDGSGKLVMETILESKASSIVQFIHGLRGELHVTWEEGTWAAWLYDLLQPQVEQVLVCNPRRNALLKEGSKSDKVDARKLAELLRTGMLRPVYHGENGLRTLRELGRSYQTLSKDLTRVMNRLKALYRGWGIPCAGTQVYAPRYREEWLSKIAQAGVRRRAELLYQQLDGLQALRRNLRPEFLAESRKHQATKLLRQIPCIGPIRAARLIALMQTPHRFRSKRQLWTYSGLGIETHDSAQYRFVGGQLQRSKKPQQLRGLNQNHNHEMKEIFKGAATRASCGRGPFRDFYAALLAKGMKPEMARLTLARKIAAITLTLWKKGGRFDAEQLKTQAA

SEQ ID NO: 373252 - protein, 248 aa, unidentified
MPETIVIGIDIAKRTFDVALGVGGTITTFPNDDEGHEALLNKLSGHSVDLIAMEATGGLERALACSLQAAGYGVAVLNPRQTRHFAKAMGYLAKTDRIDARALAELALFLANRPDRHRYVRPLPTPERQALQALVARRRQLVEMVVAETQRLSSCHVSTKKSIETVIQTLRAELREIEGKISVHIKIHHADLAHLLITVPGVGPTTVAVLIAEVPELGQLSRREISALIGVAPFNRDSGQMRGKRTIF

SEQ ID NO: 373253 - protein, 410 aa, unidentified
METIIERCCGIDVHKRSLTACVRVGSKTGVVQETVRTFGTTTPDLLVLRDWLLAHGVTHVAMESTGVYWKPVYYVLEDSCTVLLVNAAHLKRVPGRKTDVQDCEWIAQLLAHGLLRGSFVPPPAIRELRDLTRYRKSLIQERTREANRLHKLLEDANIKLASVASDVLGVSGRTMLKALVQGTTDPEVLAALARGRLRTKLPALRRALTGRFRPHHGRIVGHILAHLDYLDEAVAELSRAVEDHLRPFAPIVERLLTIPAVQRRTAEVLIAEIGVDMGRFPSAGHLASWVGLCPGNNESAGKRRSGKTRKGSKWLRAAVVEAGIAASRTKSTALSARYRRLMRHRGHKKAVLAVGRQITEIAYFIMRDGVTYREIGPDYFDRRYAERLTRRCVRQLEHLGYNVAITKDAA

SEQ ID NO: 373254 - protein, 453 aa, unidentified
MPRSKPTPKRIRWDDLPCIHPNAAGMDIGASAIVVAVPPDRDAESVRVFETFTPDLHALVDWLVACHIDTVAMESTGIYWVPIFELLEQHGITPYLVNARHVKTVPGRKTDWNDAQWLQKLHTLGLLHASFRPDAEMCLLRTLLRHRAGLIEHRAPHILHMQKALKLMNIQLSEVLTDITGVTGQAILRAIVQGERDPLTLAQLRNPACKSSEDDLAKALTGTWRAEQLFILRQALELFDFYTHQIAACDAQIERQFAVMKPRFESNKPLGPVPRVKPGSKSKNQPRYDARAYLARITGVDLVAVTGISASIAQTIISEVGTDMDKFPTVKHCGSWLGLAPHNDISGGRVLRSRTLKVVSRATQAFRQAAQSVARSASAFGAYFRAMRARLGPQQATVATAHKIARVVYHLLKYRQPFTEESAATYQRKRRERELQHLSRRAEKLGYTLTPVA

SEQ ID NO: 373255 - protein, 413 aa, unidentified
MEVVVERCAGLDIGKALVVAAVRTPGPGRHRSQEVRSFGTFVTELDALADWLDAKGVTQVVMEATGVYWKPIWHVLEDRGFELLLVNAAHVKKVPGRKTDVKDAEWLAQLLECGLLRGSFVPPPVIRDLRDLTRYRKRLIQDHAREVQRVQKVLEDAGVKLASVASDVLGASGRKMLDALIGGERDADVLADLALGRLRKKIPELRQALAASRFRPHHALMLREHLAHLDYLESAVARLDGQVDELMAPFVPQRDRLATIPGVAKRAAEVIISEIGVDMDRFPTAGQLASWAGMCPGNNESAGKRRSGRTSKGDPWLSGLLTECAWAASYSKDTYLGAQFWQIARRRGKEKAAVAVGHTILLIAWHILREGVTYTELGGDWFDRRRDPAGQQRRLIRQLEALGLRVTVEPTAA

SEQ ID NO: 373256 - protein, 391 aa, unidentified
MIYIGIDVAKDKHDCFITNSDSEVLFKAFTIFNNLDGFNDLYQKIESVMDDVTKVKVGLEATGHYSYNLLGYLIDKGLPTYVINPLHTNLYRKSLSLRQTKTDKVDARTIASMLMSDMNLKSYSDTSYHNEELKSLTRYRFDKVQERAKLKTSVSRLICILFPELEKLVATIHMASVYALLSEFPSAHAVASAHLTRLTNLLSESSHGRYGKDTAVMFREAARNSIGSNMPAKSLELKHTIKLIQELTSEIDEIETEIKSIMDEVNSPILSIPGINYRMGAMIIAEIGDFSRFDSPDKILAYAGMSPSTYQSGQLDNCYSHMEKRGSRYLRYALYNATKYVCHWDESFGTYLAKKRAEGKHYNVALSHATKKLVRTIYAMEKTGQSYSSAS

SEQ ID NO: 373257 - protein, 410 aa, unidentified
MKLEKAVLVIGLDWADRTHVCCLYRPDGTRQEAVKVAATPEAFGAWLEQVEQDHPQGEIVVAVERPDGAVVEMMRARVRWVVVAVNPVVLHRFRQAFAPSGAKDDPGDAALLGEIVLTHAEKFTALPEQDERLRQLAALVRQRRHWIDTRTGQVEQVIAVLKHYYPQALELAGETVFSPMGLEFLQRWPDLVAAQKADWSTLEKFYRHHHSGREEVLARRRALWQHARSVSADHSYVGPSRLHMLAMVRQLEALNASIAQFDVAIAALYAAAPGREVIDSLPGVGEALAPRLWVACQQAGEKPTALDLALASGIAPVQQQSGQSKQVAFRRARPRFLHQTWIEFATHSVAKCKWAAEYSAARKKKGHGEHAIHRALAFKWTRIVARLWHDRIPYDESHYQQHRAARLAPA

SEQ ID NO: 373258 - protein, 387 aa, unidentified
MNQSNRRVVGLDVHPDSFAGAILEGSDPWQARVISTSTRVALPLLEKWALGHTRESDCLVLEASGNAFSVAERLRRLRRKVLILDSHRAGKVGQSYCATDRVDAIKIARIYLSALSPIVWQPDQKTRERREVFSAYQAVVKEGTRLKQQIKSMLNEHCVRLENGFRLSHPSAIGRLLLRRKWTEAQKMLLEQLHAGLVGARARRQQLRRYMAREILAEKELLRLTRLCGINVITLYGLIAAIGDIKRFANSRKLVAYLGLNPSVCQSGEWEGATALKRHGRGAIRALLIQSAKKLLQVNNPLQKWGLAVAMRRGRNKAAVAVARKLCVAVWHVMQGHIIGAIERLDTLHTKLHKLATDLGVPAIKALGYETKEAFVQKKLYLLRSCP

SEQ ID NO: 373259 - protein, 350 aa, unidentified
MLIIGCDYHPGFQQIALVDTQTGELGERRLAHREEAELFYRELKQQSLSVRVGMEASGHARWFERLLSELQFELWIGDAAEIRTKRVRKQKTDRQDAQLLLRLMVEDRFPRIWVADAENRDLRQLLWHRHRLVQMRTRLMNQLHVVALNEGLRRKKALWRPAGGNELESLKLAPWASRRRQDLLDLLDQLTPKIQELTRALEEEVEKRPVTRRLMTHPGVGPLTALAYELVIGTPERFHNGKQIASYVGLVPSEESSGDRRRLGHISKQGNSLLRFLLVEAAQVTVRSSAQWRSKFFHLAMRRGRKIAKVAMARKLAVHLYWMWRQGRDYGQFEKFGSHAGEPGNRHGVQ

SEQ ID NO: 373260 - protein, 344 aa, unidentified
MLHAGLDLSRRRLDVCLIDDAGEVLGHTAAPPDADGLRHLAERFGGRPVRAVIESMTGARFVHDTLEELGWEVLVADAQKVKGLAPLACKTDKIDARVLAELSWRDLVPAIWLPDPSIRRERELARFRLHLVRHRTTLKNRIHATLMTFGHPCPVSDLFGQAGRELLDRLAIPDPWRRNVDASLELIDDLELQIARLTVELRRQGADHRYIPLLVTAPGFGWVNAYTVASEIGDIERFASPAKLVGYTGLCPRVYQSGNSDRRGPISKQGSRYLRWALFEAALHACSHPAYAERYQRTKKRLGRQRGPKVAQIDLSRKLTEAIWHMLTRNQPFAPAGARFRLAA

SEQ ID NO: 373261 - protein, 344 aa, unidentified
MQIVRIGLDLAKYVFEIHGVDAHGKTVVRKTLRRHAVSVFFANLPPCLIGMEASNGAHFWAKALSDLGHDVRLISPQFVTPYVKSNKNDRNDAEAICEAVGRPNMRFVPVKSAEQLAVQAVHRIRSRLVADRVRLVNQVRGLLGEHGIVVAKDIGNLRQALARIVGDDEDRVLNPLVRALMAELREELTELDARIAGYDRKIRELYRNSEICQRLGKVEGIGPVTATALVAAVGDRSSFKNGRQFAAWLGLVPKQRSSGGRARLFSISKRGDRYLRTLLIHGARSALGRVRDKQDPRSLWLGRMRQRRHPNIVAVALANKNARIAWSLLANDSAYDASLSVGAA

SEQ ID NO: 373262 - protein, 369 aa, unidentified
MNATTVARVSASIVGVDVAKSVFQLAVADGNWKMIETHRLTRSQFERWFANREVALVVMEACGSAHYWARWLNGLGIEVLLLPARYVRAYVKRNKTDAADAAALLEAARASDISPVRVKSVEQQALQGLHRTRSLWMGTRTSRINALRGFCREFGIAIAQGSRLGVEQISRVLADPHSAVPELIRGTMKLLVEEIRLLEARIAQLERELTTLAKHSPACTTLLSIPGVGLLTATAMVAATSGSVSHFKSARHFASWLGLTPREFSSGNARYLGRISKQGDRYLRMLLTHGARSVLRAASVKQQAGRVLDPLRSWAVAVQGRTHHNKAACALANKLARICYATLRDSQPYSQPASRQRHKIERTAFAIAA

SEQ ID NO: 373263 - protein, 387 aa, unidentified
MYFIGIDISKFKHDCAIIDEAGDTVTASWSFANNCEGFSLLKQLLDALDGQKKIGFESTGHYGHNLKLFLEANNFSFMEFNPLLVSKFVRSKSLRNTKTDSLDAVSIAQYLMTVEYKPYPPSFYHMDQLKSLTRFRDSLVRQHSRQLVELTNILDKVFPEFKPFFDGRFSATALYILTHYQSPEKIANMNAKSYEALRKKSRGKFSMVKFAQLKTLAKNTVGRSDAFLLKQMEITIDIENQLDAKIDEIESQILECIRALNPPILTIPGIGELTAAIILSEYGNINKFENPAQLLSFAGLEPGYYQSGLAEHQGRMVKHGSSHLRYALMNACLPLVTYEPVFAEYYAKKRAEGKPHRVALTHVAKKLLRVIFTLQTKNISYNPTLIR

SEQ ID NO: 373264 - protein, 349 aa, unidentified
MNFYMTQHELYCGIDLHAKRMYACVIDQAGQTLLHRNLKTQPGELLKVFTRFQGQDIAVGVESTYNWYWLADFCEDQGVPFVLGHALAMKAIHGSKTKNDRQDSLKIAHLLRGGNFPTAYVYPRKLRSQRDLVRRRCYFTRQRAELQTHVRNTAAQHNLLLPSGQLRYHCNQEGVAESFPTEAARLTIAADLAMINALTQQITSLEKKLVEMARFDDPGTFFRLRAVPGIGDILALVILYEIGELSRFRSAGQFLSYARLVPGQHTSAGKNYGSPGRKQGNPQLKWAFSEAVSLLLRQSPAVKSAFAKLEKRHGRGKALSILGARLGRAVYLVLKRGDIFNEHQFLKLD

SEQ ID NO: 373265 - protein, 321 aa, unidentified
MTMLSFCGIDVSKDRLDVMVLPEQQCCPVRNDASGWAKLVKWLRGFAIAAIGIEASGGYERGVMRALLAAGLPACQVNPFKLRQFARASGVLAKNDPLDTRMIASFVAIMPTRPSQLRSPAIERLGEMLAVRRQLNAEKIAAENASRLLEDAMLQRLSRRRVARLAADIDMLDRHLAEIVKTDAVLAHRYRLLTSMPGVGPVLACTLIALLPELGTMSRKQVAALVGVAPYAFDSGKFKGRRCIWGGRAPVRQALYMAAMSAGNWNPVLKTFRARLKGAGKLPKVVIVAVMRKMITMLNAMVRDDVVWADHLPGRHPVPTA

SEQ ID NO: 373266 - protein, 402 aa, unidentified
MTDGSTRFFGLDIHKEYFVAVAVNLERETVFGPQRVSNYQLDDWAGRVLTPQDAIVLEMTTNTYLFHDTLLPLVHSVIAVHPPNVPLVTNVHVKTDKKAAETLAQLLAAGMLTGVWIPPHEVRDLRSLISRREKMVQLSTMAKNRLHALEHRKHLVVPDNPFSPDQRTWWENQELSTTEKLLVRSDLDTLEFAQKQVEKIEECLKQKSIQDERIPLLIQLPGVAMLTATTILAAIGDITRFPTAKKLVGYAGLGTRVHDSGMTHSSGRITKAGRKDLRRAMVNAANHAVLDNPHWKAEMERLEPHLGRSKAIVAIARKLLVAVWHVLTKQVADRFADPQNVARSFLSHAYQVRVRNLPKGQSAPAFTRQQLDRLGLGKDLQKISFGSKLIKLPPSKLLIEKK

SEQ ID NO: 373267 - protein, 432 aa, unidentified
MEKMHHHAAGIDIGSRKVFVGLEDSPVRWFETFTSDLESLKDYLLEHQVTTVAMEATGVYWYVLYDILLDAGLDVWLVDGRQTRQLPGRKTDVKDCQWIQQLHSYGLLNRCYVSDGLVKELRLYQRLREDHIRSAAMHVQHMQKALIAMNIRLPEVLSKVHGVSGMALIKAILAGERDTEKLVSLCHSKVRENKGAELRKALEGHYTPQGLFALGQALKAYQFYQEQIFECDRQIDATLQKINRDKSLPPGSGSEKRKPIRHNKPDINGLGDHLLKIFDGRDATKLPGFTDYNWLQLYAEVGSDLSKWPSEKHFTSWLGLSPGQNSSGKKNKSKSKGKPAVGQIFKQMAHGLLNSKYIGWGAFARRLRGRKGPAVAIKATARKLAAQYWRLIVKGTEFVERGMEAYQNILIQQKKRRLEKLALEMNMQLVPA

SEQ ID NO: 373268 - protein, 459 aa, unidentified
MTTTRIIGIDLAVEAAHKAIVLDQARNAFVSRILTFQTDPAEMDQVLAVARAGAVDDVRLIAVLEPTDTLWHTVGVYLAHRLVEVYRVSGQQVADQRRAYQRHAKSDQVDVRVLARMPLLYPERLTRLAIPSAEHLALQQACREVARLTQHMAAIQQRLQAIDRWAWPGLQRVLAADDPARRWVRECWYDPWAVCAAGEATLRQAWLAASPQPPAETAWITAFVACAQRVVTLYGRPDVLPHAHFQATLQREQARLDALADQVHTLRLQVVRPLYRQLHPQRYLETLRGVGQDSAAIYIAWVADIQRFPSAQRFRGWSGMTPFSRQTGESQARGLHITQAGPDLLKATAFLNANVARLYDPQIAAVYYTQMMDYGKHHLQAVCACATHLLDRIYVVLSQNRPYQLRDVDGTPLTQQQARRICQERYTVPAEVRRRNNQRVRRARREERLERRAQHDASA

SEQ ID NO: 373269 - protein, 353 aa, unidentified
MDNGSRYVGLDVHRDTISVAVRDSRGKLMLERVIPTSAAAVLELVELLRGRLHVAFEEGTSAQWLAGLLQPRVAQVLVCDPRKNDRRGSKNDRIDARELADLLRCGRLSPVFHQDCGLTALQELARTYLVLTKDQTRVMNRIKAIYRSWAISCSGQSCYSPKQRQAFLSQLPHAAVRDRAQIYYQQMDSLMTLRQQVRTQLLREGRKQTALRLLCQIPYIGPLRAILLIVFIQSPHRFRTKRQLWAYCGLGIETHDSGEYRFRQGSLERKRQPTVRGLNRNHHHLLKYVLKSVAARCCSGSGPVREFAQTLLDQGMRSEMVRLTVARKIAAIVLVLWKKGVGFDARYLKSQAA

SEQ ID NO: 373270 - protein, 333 aa, unidentified
MKKYYIGLDVHKDQTTYAVKDWNGVTVVKGETATQFSDLKNVLGDYLNDSVVAMEACTFYYSLYKKMKENKIEAYVANVLQLRKVIAKCDKLDAERLADMLRLNSLPKSFIPDEKVQNLRIMMNLYHNLVVEKTSFQNQIHAMLDRTGVHVPYKEVFSKKGLVCINQHIHKNNDFAFRILLEAYTSSTQRIENLKRDITSYLENNFAKEYKLVMSIPGVGETIAGYLIAEICPIDRFANKKKLRRYAGVIPIREQSDKKIYATYLPKHASRRLLRYGLVLAANCAAKTNCKLKLYYQKKKKGHTHGHAVMCVASSMLDIVYKVLTTKQPYQIS

SEQ ID NO: 373271 - protein, 429 aa, unidentified
MNISTSIAEADSKYVWSVGIDWADEKHDISQRCWADGRYQTFQIGADPVSVRTWLEELKELAGPQGRIVVGFEQNRGSLFEMLREQKDWLDLCPLNPLTLSRYRQSFYTSGAKDDPLDSQLIEELVRKHLDRLRLYEPPEPVLRQLDLLCQLRRKAVDSAVGLENQLRSHLKVYYPLAVELHEDLSSTLTLHFLKRWPTLQSLKRAKAQTLRSFYYQHHSRSQSLIEERLQKIARAEAVTEDCTLIDPLVLSVQGLVNQLLAHKASEAAFDKAVQKLALKHPDYEIFNSLPGAGPQMTPRLMVAFGSNRSALTDPSQMQKKSGIAPVLDRSSQSQRIHRRWCRPKFLCQTFHEFAAYSIPHCTWAKAYYEQLMARGKSHHTAVRALAFKWIRIIFRLWQDHTTYDEERYLRDLQKRHSPLSQKIQPQPL

SEQ ID NO: 373272 - protein, 343 aa, unidentified
MGEVIMIGLDVAKNAFQVHGVDAVGAVVLQRQLRRGQVEKFFAQLAPCMVGLEACGGAHHWARVIGRYGHRVRLMPPSYVKPYVKRNKNDARDAAGVCEALSRPSMRFVAVKSVEQQATLAVHTTGALLVRQRTQVANALRAMLSELGIVAAQGLRGLRKLIGQLEAPSEAIPEIMRGALALLAQQWQALDAAERALERQIRQAALANPDARRLMEMPGVGPMIASATLAKVPDARVFGSARDFAAWLGLTGRDHGTGGKHRIGSISKQGDRMLRTLLITGASAYLRQQRARGVTDPWLRAMLARRPYKVVMVALAARTARIIWALLSKGERYRDRTLVPTAA

SEQ ID NO: 373273 - protein, 330 aa, unidentified
MNLQGGVAPGDVRLNAGIDVSKQHLDACWGSEELRWSNDTSGCDELAAKLEAERVDLVVVEATGGYERALVCALQARGLTVARVNPRQSHDFAKAMGVLAKTDRVDARMLRDFADVLARHKDRAKYITAPVNAYRLELAALVTRRRQLVEMRVAESNRLEHAGTRAARSIKAVLRALDKQLVQLDGDIDDFLDKHFKSQRALLDTVKGVGPVTIMTLNAALPELGCLSRRQIAKLVGVAPLANDSGERTGKRRIWGGRADVRAVIYMAALVAKVHNPVIRAFHQRLLAQGKAPKVAIVACMRKLLTILNAMARDRAAWDPAKHARAHQSA

SEQ ID NO: 373274 - protein, 345 aa, unidentified
MTSIYYVGLDVHKKSISYCAKTEDGRIVQEGEVAATRAALSAWAEHLPGPWIGALEATLFTGWIYDHLQPYAQQLKVAHPVLLKAIAASKKKNDRVDARKISDLVRVDLLPECYLAPRPLRELRRVLRYRNLVVRQAVRMKNKIAGLLLETGTPHHKEKLHGRRYFQELLGSLEGVPDSVVELLRLTRCSWEAFHRMEQKLIAGLCQDPELTERVARLRTIPGVGQITALTWALEVGEPQRFATVGQAVSYCGLCSAQRESGGHSQRGPLSKQRNKHLQSILIEAAKLAPRWSPSLAELYARELQRGNRNRATLAVARKRVAYLLAVDRSGKAFESRAPAERAAA

SEQ ID NO: 373275 - protein, 338 aa, unidentified
MHITTLGIDVAKQVFQLHGVDGRGRVVLSRRVKREQLLHTVASLPPCVIGMEACGSAQHWGRAFEPLGHTVKLMHPKYVKPYVKTNKNDRRDAEAICEAVSRPTMRGVSIKTVEQTDLQAVHRTRSLFVKHRTAVINQIRGLLAEYGVVIGRSPAKVRPALVRLLDDAALGLTALARETFAELYAQLTELDARIERVTHRVECLFQAHPVCQKLAAVPGIGPMTATALVATVGRPQAFQNGRHLAAWLGLVPRQYSSGGKERLGGISKRGSRYVRTLLIHGARAVVQRAERRTDTQGRWLCALKHRKGTNVAAVALANKNARVVWALLAHEAAYRSPA

SEQ ID NO: 373276 - protein, 424 aa, unidentified
MDAKDQNRWEQRRYYMGLDWAKQEHAIVVVDRKGRIRVDTSIKHTAEGWHRLREKLVALAGPDLSLVAATIETNRGPAVERLLELGCAVYPINPNAARWYRARKTPSGSKTDRLDALSFADALRTDGQGWRPLNPEDPKTQELRLLCRDETSLIEQQTTLVNQLQQALHEYYPAVLEAFDDWTCPSSWAFIERFPTPQVLKKAGQRHWEKFLHTHRLYRPQTYQKRLAIFAGATEFCGSDAVTNAKSMLAVSLAKQLRLLEQQLKAYRKRIEAIFQEHCDYGIFASLPGVGEKLGPRLLSEFSNDRDRFPTYEGLQCYAGTAPVSFQSGQIHRVRFRYACNKNLRAAVHLWADLSRKKCVWAQVYYQQKRLEGKSHACALRCLGQRWLKILWKMWQTKTPYDEQMHTRNQIEHGSWVLALTASK

SEQ ID NO: 373277 - protein, 308 aa, unidentified
MIAQNYVGCDISKQWLDFFDETSGRLRRIDNQADAIAAYVAGLDPSRDFVVMEATGVHDRLLRHALAKAGVPFSRHNPAHTHHYSKSTRRRAKTDPLDARMLSDYGRRYHPEAEPAPREEVERLQSLAGHRDHLVEMRAALKKHLAEAFDEIVIADLEETISFLDTRIKAFESQIAEVIRQNQDTARDHALMVSVPGVSKVGALSLLALLPELGQRSPKAIAALAGLAPFDNKSGKLNRRSHIQGGRSRVRRALYMAALTAVRTCERFKTFYTALAARSGSKKLAIIAVARKLLVVLNAIMRDKTAFA

SEQ ID NO: 373278 - protein, 381 aa, unidentified
MNATTVAVDLAKQVFAVCVGDAHGHGGKTTVFKRAEFLAWLKTLPAGTPVAMEACGTAHYWARTLLALGLVPRIMAAEFVKPYRKNQRVKNDSRDAEAILAALHAPGMRFVTPKTEAQQQRLCWHRLREGYKEERKALLNRIRGLLAELGYLAEVGAGKLRRTLAQMLTPDEDGALAPEPLREMIQGVLTQLTALDARIEECSAHIARQSRIDPSVAALQKCPSIGPLIADALVATVGDARHFKNGRQFAASLGITPSQNSSGGKNRLGKITRRGDSYLRGLLIHAAGAVLNAAIRKHTAQPEKLSRLQQWMIGVYQRAGYAKAKVAIANKHARQAWAMLARGEAYNSEAWQAWQAAHGEVQAADHPQDDLPTAALAAASV

SEQ ID NO: 373279 - protein, 342 aa, unidentified
MQVTTIGLDIAKNVFQVHGIDAAEKVVVRKQLRRRQVLEFFKALPPCLVGMEACATAHYWARELTKLGHQVRLMPAKDVKAYVKRNKNDAADAEAICEAVRRPTMRFVQIKSTEQQGRLMLHRARDLLMRQRTQVINAMRAHLAELGIVAAQGRDGIKELLKIIASEEDARLPVDAHASLVVLAAGLHAVQTMIGSIEKRIMVQHRSNEASQRLETIPGIGVIGATAIAATVPDPKVFGSGRDFAAWIGLVPREDSTGGKQKLGPISKRGDRYLRRILVVGACAVLRYARHKPEKYPWLTQLLARKPFKVVAVALANKMARIAWALLAKGGTYRVPALAAAA

SEQ ID NO: 373280 - protein, 408 aa, unidentified
MQTDFQWYVGIDWASQKHRVYCMDAQGERLGHRWIDHDGEGMRELLNWLHTFCGDHTGQLAVAIEVPHGALVETLVEQHFAVFSINPKQLDRFRDRYSPAGAKDDERDAMVLADSLRTDEHCFRRIQLAPADIIRLRELSRLEESLGKQRQRLENQLWDLARRYYPAVLKLCSTPNEPWLWDLWEAAPLPAQGAKLSVSKITRILKQHHIRRMDAAGVHDILATPALRLAPGAAEAASEHALMLLPLLRMLHGQELQVSQRVALVLEELAAPEEETEEHRDAAILLSLPGVGRKVAATVLSEAYQAVAERDYHGFRQQGGAAPVTRSSGKETVVVMRYACNDRLRNAMHHWAFGSMLNDPRSKQQYQQMRARKQGHSRALRGLADRLIDVLFSMLRHRAVFDPQRRAA

SEQ ID NO: 373281 - protein, 412 aa, unidentified
MIYCGIDWAERTHDVALVDDSGQLLAKRHITDDAVGYKVLLDLLAEYGDTEENPVPVAIETSRGLVVAVLRTGERQVFAINPMAAARYRDRHSVSRKKSDPGDALVLANILRTDMHAHRPLPQDSDLARAVAVLARAQQDATWNRQQISNQLRSLLREYYPSAPAAFESWKNGLCRREAHELLRAAPTPTRASRLTRTQLQAALKRAGRQRGIEAEADRLREIFRADWAHQPSLVEDALGKQLLALLVQLEAACTAADNLAEVVEEAFPQHPDAEIILSFPGLGIQLGARVLAEIGDDRNRFADARGLKAYAGASPITRASGKKSSITRRWVKNDRLNHAGYLWAFSAITASPGAKAHYRRRRDGHGDWHAAAQRNLFNRMIGQLYHCLQHGRRFDEAASFPTPSPGVAQVA

SEQ ID NO: 373282 - protein, 339 aa, unidentified
MQKKWIAGIDVSKKTIDVALSLNLSNTAVFTRQFSNNLKGYEQLKKWLKEYEAAIESTLFCLENTGLYHRLMVNWLQKQNGFVWVEMPVQIKWSMGMQRGKNDKVDAARICLYAFRNQDKAQNYTSMDIAVQQIADLMAARQRLLQCLKTLRLPIKELKDAGLSTAAKLVEKSCAKSIKAMEKELEDIEQQLEQIIEQDEQLSTTYRYIKSVRCIGLVASLQLLVYTNGFKRFKNAKQLASYCGVAPFEYSSGTSIKGRPKVSNMANKTLKTAMHMCSVSAVRHNKEMRAYYQKKVSQGKNKMSALNAVRNKLLHRVFACVRDKREYAEHYGRTEVAAA

SEQ ID NO: 373283 - protein, 343 aa, unidentified
MYVPYHFIGLDVHKRTVAFSEMRGDGKPIDSGTFSTRRTAVEAWARARTQPWIGAMEATLFTGHLYDVLTPFAVEIQVGHPARIKAISAAKHKNDAVDAKTLANLLRADLFPQCYMASTRVRELRRVLRYRNFVVRQSICMKNKTTGILMETGVEYDAKRVHHKKYFNELLDNLDEVPNSVRELLRITRTNMEMFQSAQKQLLNALMTLPELHERVERLMTIDGVGQVTALTWALEIDDPFRFSNLKQAHSYCGLCSGQKESAGKNKSGPLSKQRNAHLQTALIEAAKLAPRWNAQLARVHAASLAQDKNRNRASCAVARKLIAYLMAVDKSATPYEDRSSVK

SEQ ID NO: 373284 - protein, 352 aa, unidentified
MAMLADTADAVIGVDTHADTHTACLLDRLGRQLAVITIPAELAGYRRLLAWARQQAPGPLLAWAVEGTRSHGLGLTRYLQAQGQPVSEASRPARASRRPGGKSDPADAARAARDALAAAQLAQPRADGPREALRILLTARAQASTARTAAVNTLKALILGAPENLRQQLRGLSTPRQASCCRALRVRASQPVAEQILRAELRRLAVHISAWDKQLHANRAQLSQLVAQIMPILLDQPGVGPMSAAQLLVSWSHRGRCRSEAAFAALAGVSPLQASSGKITRHRLNRFGDRELNRALHVIINWRMLHHATTQQYAARRRAGQKTNPEIRRCLKRYAARQLFRLMETTTRLDKP

SEQ ID NO: 373285 - protein, 344 aa, unidentified
MNSTTIAVDVAKAVFEVAVSEHAGQVRERHRFSRERFRRYLGEQPPATILMEACGSAHYWGREAQTRGHRVVPLPPHAVRPYVVRNKTDRTDAKGLLEAARNDEVRPVPVKSETQQALTALHRLRSTWLATRTARINTVRGLLREFGVVLPTGARHVVPALGAVLEDADGGVPSLLRPALAEAAREIRELEGWIRTVEHQLEAVAEQTPVVSRLCSIPGVGLLTATALVAAVGDVQRFPSARHFASYLGLTPRERSTGQRRQLGAISKRGDAYLRMLLIHGARAVLCHAKTKTAPTPDRLRAWALHLERFRGHNKAAVALANKLARIAWAVWKYDTDFAAAPAA

SEQ ID NO: 373286 - protein, 431 aa, unidentified
MDMKKVYPNCAGLDVHKKFVTACRLTVDQQGRTHQETRTYSTMTDDLETLASWLAEGGVSHVAMESTGVYWQPINNILEERFVIFLVNAQSIKRMPGRKTDMKDAEWIATLMQHGLLQRSFIPNRDQRELRDLTRYHLSLVQERTRFANRLQKVLEDTNIKLASVATDLQGVSAQAILRALIGGQEDPKELAELARGRMRNKRNEMERALKGKLREHHRFLISDLLVHLDFLDEQITKVEERIEAKLTQMPPFQSAVCLLDTIPGVARLLGILIVAEIGVDMSRFPSDRHLTAWAGVAPGNNETGGKQRSGKTRKGNKYLKQGLVLAAHGAARKKNNYLRSLYYRLSARRGKPKAAVAVGRTILQMAYHMIRRGEEYRELGEAYLDQVNREQTAKRLVKRLVTLGYIVNVKIQTMAPEVETRSVLPLPVPF

SEQ ID NO: 373287 - protein, 341 aa, unidentified
MDKVSTIGLDIAKSVFQVHGVDAAGAVLIRKRISRAKVLEYFGELPPCLVGIEACPSAHHWGRELQGLGHTVRLIPPSYVKAYLKRGKNDANDAAAICEAVTRPSMRFVPIKTKEQQTALMLHRARQLLVRQRTMLSNALRGHLAELGIVSAKGRNGTAELLRIIADGRVSPAVCGILKVLTRQYGAIGTEIASIDKSIMALHRGCEASQRLAEIPGIGPIGATALVAEIGDWKTFSSGRSFAAWIGLVPKQHTTGGKDRLGSITKQGNRYLRWLLVVGAMAVIRYARKHGTQKRPWLGRLMERRPTKVAAVALAHKIARMAWAIMAGGERYKEPRLLLAA

SEQ ID NO: 373288 - protein, 342 aa, unidentified
MDHFAGLDVSVKETSVCVVDDTGKIVREVKVASEPKALLAVLMNPAYHFKRIGLEAGPLSQWLYSAFAEAGLPVICVETRHMQAVLKAQINKTDRNDARGIAQMMRVGLYRPVHVKTLRSQKLRMLLTHRKLLQSKAIAIENDLRGTLRNFGLKVGMVGTVKFEGRIKELVENLPDLAILVEPLLIVRRTLREQIVILHRRLLAIVRDDAVCRRLMTTPGVGPVVALTYRATVDVPARFRKSKSVGAVFGLTCSKYQSGEIDRNGRISRCGDEMMRVMLYEAAQSMLRSKKWSWLKAWAMQIARRRGMKKAIVALARRLAVIMHRIWVDGTEFRWTREAAAA

SEQ ID NO: 373289 - protein, 388 aa, unidentified
MNYVGIDYHKKYSHVTAIDEEGRVICSQRLNNKPEPFEEFFDRLGGPSETVLEASRTWGVMYDLLEAIDEVGSVQLAHSQKVRAIAEAKIKTDRIDSHILAQLLRADLIPAAYIPGKETRSYKEMIRQRVFLVRMRTRLKNRIHVLLDRLHIPLPSVTDIFGKRGTEYLRKLNLSGVDGEILREDLDLLELFNRLIKEAEKEIASLMGEDPRVKLLKTVPGLGPILAAVVALEIDRIERFSLPSKLASYGGLVPSTYASGGRIFHGKLIPMTNKWLRWALVEAAWGSLRSSPYCRSYFESHKRHKGPHTAAIALARRLIEIIWHVLSEHRSYEERLPWSDRRKNGTAVQSLSENKSPSGDDAGGAQRGITQRERKPSANVSPAALTAT

SEQ ID NO: 373290 - protein, 419 aa, unidentified
MTRKDDSKVIRIVHPICCGLDVHKESVSACVIFPDDTGEERYEIKVFGTFTDDLTRLREWLLAHACPVVAMESTGVYWRPVHNVLEGTDQVVLVNARDMRNVSGRKTDIGDSRWIAGLLRHGLLRSSFIPPQTVRQWRDLTRLRKKYVQSAGDYRKRTHKLFESANIKIDSVVSDLFGVTGRNLMQLLVADRKLTLADIQTCVRGKLKGKEVELFRSIQGFFTDHHRFILKTILETISMLEAQIETLDHEIRLAMRGHETLLDRMKAAPGISDVSSCDILAEIGPTLDSFPTDTALVSWSGLCPGNNESAGKRKSGKSPVRKHHLKTIMLEVAWAAVKKKGSYFKDKYYRLKARRGAKKAIVAIAHRILLGIYHVIKDGVVFRDLGEDYLTCRNKTQKVFHLRKQALALGFDLVPQAAQ

SEQ ID NO: 373291 - protein, 415 aa, unidentified
MGDRQQWYAGVDWGSQSHHVVLTDGDGRKIGERSFKHGGEGLAEMAAWLMAASCAAEPGQILAAIEVPHGPVVETLIERGFKVHAINPKQMDRFRDRFTMAGAKDDSRDAEVMASALRTDPRCFRSLAAADPIIVELREWSRIAEDLGVERNRLINRLREQLWRYFPALLELEDDLGAEWLLELWEAAPTPNTASRLREATIAKLLKRHRIRRFDAASVVNTLRRPPVRVAAGTVEAASAHVALLVPRIRLLNRQIKDAHSRIDGLTARLMPAEAAEPGQKKQHDAEILASLPGVGRTVLATLLAEASDALQRRDYAALRSLAGVAPVTKRSGKSCVVVRRQACHDRLANAVYHWARVAVQHDPRSRAKYAELRSRGHSHGRALRSVADRLLNVACAMLKSGAAFNPSSAAQKPA

SEQ ID NO: 373292 - protein, 352 aa, unidentified
MESITVGIDLAKQVFSVCIMDAQGRVTQRRELKRDGLAEWLAQLPAGAVVAMEACSSAHYWGRVCLDHGLQPRLMAAQFVKPFRKSAVIKNDRNDAEAIATAARQGNMRFVGLKTMDQQARLSWHRVREGYKKDVLAVTNRIRGLLAEFGVAINKSGIALSRALARLEEYGLPTEFIELIRQQQMHWQAIDVQLKLCDVRIKAHAEQDERCVRIRGLTGVGPLTADAIVATLGNAHEYKNGRQCAAWMGLTPSQHGTGGKVLLGSITCRGDDYLRMMLIQGARSSVQRARVVAPDKRTPEQQWIVQLSSRMPFGKVLVAIANKHARQIWAMLARGEDYDAEAWLKHPMVQRG

SEQ ID NO: 373293 - protein, 349 aa, unidentified
MRTEQAVRGKDVYVGIDVHKENWHVTIRSDGEERFNGRIPGQYQSLKSILHRYRECRVTVAYEAGPFGFWLLDRLVQDGIKAMVVPPSLIPVESDNKVKTDKRDSRKLATLLESNMLKHVYVLTPEEREHRDLLRTRRQIVDHRNDVARQIKSKLMFYGISAPFTSATRWGLQYIEWLKTITFETSYLKESFDLLIQLYEYLTRQIARINRTIVRLCRDKRYRHKIKLLCTVPGIGKLTAIELLVELQDMSRFTSAEGLASYIGLTPAEYSTGERTRQGRITRCGNKRVRTYLVESTWVLITKDPYLRAKYLRLKSLRGGKRAVIAIARKLLIRLRRMLLDNVPYRMAA

SEQ ID NO: 373294 - protein, 479 aa, unidentified
MNCKQKRIENQALINSTAKNVFSMEEIEKRITVIKENLKASTWKELETQGKFDKNDKLSFISDNMLIVGCDIGSETHYVRAIDTRGRELSKEPFSFSNSKEGFESARRWMLELAAINNKDQIVMGLEPTGHYWFCIACWMISHGISVVQVNPYAVKQTKEIEDNSQRKDDRKDPKPIANLVKDGNFGIPYIPEGLYAEIRGLSSLRDQLMEGRIQAVNRLHKQLKVYFPEYKDAFGKMDGAFTLEVLMNAPFPADIIRLGTEGIKELWHKAKLRGAGYRNAERIVSYAENSVGLKDGDKAAKEAVRWFTQQITEIQKELSKIEDELHQKCHEIPNVENVLEIEGLGENILSGIIAEMGDISRFDDVKEIQKISGLGLVECSSGKHKGQTKISHRGRKKLRTWLFQGAKSVVVHSEAFKSLHEHYTTRAENPLKKMQSLIVIACKLLRVVYTLLLTGRKYDSMRMLSDIHYPETSRTKAA

SEQ ID NO: 373295 - protein, 348 aa, unidentified
MMRYVGIDVGKTRCRAALMNEKGVIESEFFFENSNKGIANLTSALTSEDRVVMESTGNLWLNIYDTLDAKSIRVVLANPLKTKVIASAKVKTDKLDARILAHLLRADLIAESYVPQGNVREMRALVRHRLSLVQMRTMVKNKVHAIIDKYSYRCECSDMFGKAGTMWLRALELGALDRLLLENHLGLIEFVNSQICRVDEVIRERACEDQDVRLLLSLTGVDVYTALLLRSEIGPIERFVDFKRLVSWAGLAPSVHQSGNVEFHGRITKRGSSILRWALVEAAHVAVQRDERMKAFYLRVAARRGGQKAIVAVACKMLKIVWFMLTRREAYGNVNEKRYEEKLKRMDA

SEQ ID NO: 373296 - protein, 373 aa, unidentified
MPKYSTAFGMDVHLRSTTVCALDADTGEAVTRRFPGNPWGEIAGWMDGFPGPSLAAYESGYLGFAPQRELAGLGVECVVAAVSKIPRSAADSASKNDRNDAARMAKAILAHDISPVWAPSPEVEGIRDLAGAYGGATARLATAKQRLLAFLAKRGFVYGGTTPAGNPRKYWTYDFLRWLDKVRPEDDGGVRTLAALRNEVEAAAEARADLLSEYRAAVDASPIAAEVAALQSIKGCAFALAAAFSAEVGDFTRFRSGRQVTAYFGLAPSQRSSGDSVRLGGISGAGNALVRKLAVEGSWCYAAARHQPKLMPRDTGVPLEIRMHGRKGSERLLRRREEMLARGVPAAKANAATAAELVRWLWALGMMCREGAE

SEQ ID NO: 373297 - protein, 314 aa, unidentified
MSQKTNIGIDVSKRSFDVFIHETNEYKTFNMTNAEIKKAIKWIKKTDPKLVVLEATGGYENHLTIELASAKVPVAVINPRYIRNFAKAVGQLAKTDKIDAAMIARYAAVIAPELRDLLSVQQQELKMLVARRRQLVDLRAAEKNHKEHAQFAEITKSIKSVIQNLSEEIERIENMISDFIKSDPQMQDKIQRLTSVPGIGTTTAAALISELPELGHLNRRQIASLVGLAPMNRDSGQFRGKRMTGGGRKNVRKALFMASLSVIQFNPKLKQFYRRLVDSGKTKMVALVATMRKLIVILNTMLKNNEDWCCKLNG

SEQ ID NO: 373298 - protein, 355 aa, unidentified
MDSIKYVGLDVHRDTISVAVLNADGKLVMQSVIATQASAILDFLSGLRGTLHVTFEEGTHSAWLYDLLVRRVAHLVVCNPRKNALLKAGNKSDAIDARKLAELLRAGLLSPVYHGQNSTAAVKHLGRSYAALTEDTTRIMGRLKALYRGQAIACAGKKPYGSRHREEWLAQLADSGLQRRARRLYQELDLLQQLRREARRDLILECCKHSETKLLRTVPWLGPIRVALLIGRVQTPHRFRTKRQFWAYCGLALETRSSADYGFVDGQLERRKKPVFIRGLNRNHNHDLKNLFKSAATTASGSEGVFGAFYENLLKKGMRPEMARLTLARKIAAITLHVWKKGEPFDAEYLKSQAA

SEQ ID NO: 373299 - protein, 374 aa, unidentified
MGDYSEVFVGIDTSKLRNAVAIAEGGRNGEVRYLGEIDNTEAATSKLVKKLAAQHRRLTFCYEAGPTGYGLHRLIETLGHACVVVAPSLIPKKPGDRVKTNRRDALNLAKLLRAGELTAVWVPDARHEAMRDLVRAREAAVDDLKSKRQQVLSLLLRLGRHFTGKRTWTRAHMNWLVSQKLAHREQRIAFEEMLLAVRQANERVIRLERAIAAAVPDWSLAAVVTALMAVRGLDLISATIFLAEIGDLSRFASPRQLMAYLGLVPGEASTGDRVWRGGITKAGNHRARRILVECSWSYRHPPRVGKKKLAKVEAAPPAVQEIAWKAQARLTARYRALARRGKRPTLVVTAIARELSGFIWAVSRAVGQPATPAK

SEQ ID NO: 373300 - protein, 399 aa, unidentified
MTNFTGRVAGIDSHKDTIHIALVTPLGAEITDKEFPTTQTGYRLAIGWLASHGPVEAVGVEGTSSYGVGISAELRRNGFHVVEVNRTRAAERRKQGKTDRLDAYRAARSVLSGEASTAPKHDTIEPLRAVTVARRSANKALQAAWRQIGSMLVNASATLRDKYRDLPRQQLVDTLAASRPDLLRDKHDAITLRALRSLARRHQFLTDEVEDLAHELEQLTTNANPGLMALKGVGPVTGATLLLTAGDNPDRLRSSASFAALCGTTPIPVSSGRTQRHRLSRGGDRQANWALHQIVQNRMVHDPRTRDYRDKHLAKGWTLAAVYRSLKRAVAREIYQALLGHCPIPNYTDLRPARQAKNITLTNAARHFNVWPATISQLELGQRRDDELAETYRQWLIAA

SEQ ID NO: 373301 - protein, 426 aa, unidentified
MTNSLFIGVDVSLQSNQICVLNFDQHKFFNLKFPNTPDGCEDAIERIRSIHNKFYFDKIILVCEATGLYSFHLACYFSSHEYLNNFNTEVYQINAHDFAKYKDSFSDVEKTDPSDAYILADFARVGRTKSLHPFRGSQYIALQRLTRKRFHTSKNLVKEKLYVLNNIYLSFSGLIIADKKDKPFSNMFGATSCAIFDNFDSPDQIAETPVDDLLDLISKVGKNRTKNPNEKIDLLKKAIRSSYRLDQTAYNGINIAIASSLSSIRFFENELKQIDKAILDTVNGLDSNAYNSLLSIRGIGKVYAAGILAEIGSINYFKHNSNLAKYAGLYWNRTQSGKFEKEDRKFSQHANKYLRYYLIEATASCIRMNFPFIKNYYDSKYKEVTKHQHKRALVLSARKLVRLIFGLLRNNQYYSPIDSNSQSLTN

SEQ ID NO: 373302 - protein, 347 aa, unidentified
MFYSGIDLHKDNCFITTINDAGEVVQQERVPNVPDAVLSYFARIGSEHQTVVESTMGWYWLNDLLEAHGIELVLAHAKYLKAVSYAKVKTDKVDSHTLATLLRMKLIPEAHKISRELRDIRDVMRARLRFVQKRTRCIVAIHTIGRKYNCDEEIIISRQTIPSELPEAYRLQLEMLYRQISLLTEQILGLEKYLHPVLIPNDDIQHLLWVPGIGKTTAFTIYLEIDGIERFASDKHFVSYCRLVPGAHNSNRAIRQKSGNKDGNKYLKMAFSDCAVRAIQYYPEIRAFYQRMQRRTNEPVARTVVAKELGRIVYYILKNNTQYNGFKGLPMSRIKSRQWPRLASPYA

SEQ ID NO: 373303 - protein, 344 aa, unidentified
MTKTYLGIDLHKRSSVWTLLNQERKVLYEGNVSCTPEQVKDAIQRLPVKPEEVSVAVEPVCGWRWYTDILEQSGMDVHVANPYKTRLIADSKLKNDRVDAKALAELLRADYLPESYKAPEDINDLRMIVRHRAYLVRMRSGIKNRIHGICTRKGLHLTAENPMLKASMENIEKGTEEEIKDLFVVMKELDSHIVLIEKRMSEISRNETIKLMMTMPGVGIITGCSIYAEVGDFNRFASPNALSSYAGIVPRQRSSGTSVKLGHITKVGSKVLRYSLVEASFRIRDVKKSKYLFSFYKKLVPKTGAKKARVALARKMLVILWHMVKNNTPYIDRTIESTQSVVIS

SEQ ID NO: 373304 - protein, 338 aa, unidentified
MEYKRISIDTSKHIFTIHGVDEAERPVVRRDLRRSQVEAFFAKLEPTEVALEACAGAHHWGRQLGAMGHRVKLIPPQYVKPFVKRNKNDRNDAEAIDDAASRPSMPTVPVKSLDEQAATVILKHRELLVGQRTAAINALRGHAAEFGVIAAKGTANVEALLARLAETPEIPAAAKAAFAAMGEHIAELDARLAAVENQLIEQHKSNPVSQLLVEIPGIGPITAITMALSVNPANFESGRHFAAWLGLTPQENSTGGKHQLGKISKAGNERLRALLVVGATSVIRVAKPGRSSSSAWLLGLLARKPRKVAAVALANKMARIIWAMMARGEAYRRQPSAA

SEQ ID NO: 373305 - protein, 350 aa, unidentified
MSMVGGFDVHRQQITFDYVDDDGLVHCGQIRPATRNTLRAWLAEHCPDGDSEVALEGCTGWRYVSEELAAADVGVHLGDPAEIAALRGPKKRAKTDRADARLLRTLLLEGRFPESWVPPAHVLETRSLGRLYCTLMDERRAWQQRIHAQLFHQGCPPIRALLSAAGREALAHAELSAAGRQYVDTALRRIDELSDEIAPLRTQLVNFARRQAGCRALQTHYGIGWLCAAIIWAEIGDARRFHSSDQLVRYAGLDVTVYSSDDKRAPGHLSRQGSPELRWAAFEAAKCAARRGSPDYAYYLQLAAKRDGHNGKNPTLAVERKILRRCYHTLRELGAIALALPIAEPEEMAA

SEQ ID NO: 373306 - protein, 414 aa, unidentified
MALPEIRCVVGIDVAKSAHVVCALEAPSGAVRLKSTPIPATGAGYAQLVEWLDTWAAGDPAQLLIGLESTGSLWEPLYDALMRAGYGVLLLNPHQTASWASSLGLRAKTDGIDAHTLARGLLAGWARASSVPDETVQALRTLTRTRRDLVASQSAARQRLHDELVPVFPELVSHLPEHADLGAPAVLHLLSRYSSAQALAQVALDELQQVLEEVSERHWGRAQAQALHDLAQHSAASTRAVSARAVVVRTLALHLLDLHARVAELDAALADLLRSDPPSQLLQGQVPGLGPTWTATIRAELGDVSRFSQVDQVVAYAGLEPRTHDSGRFAGQRRLSKRGPGALRHALYMATLVAVRCRPEWHAQYQRLLDRGRAKKEALTILARKLLKVIYHLLRTGASYDPALIFPAPLAGQP

SEQ ID NO: 373307 - protein, 300 aa, unidentified
MNDMMIGVDLAKNVFQIHGALRTGEVQFRKKLTRQQFTAFMARQAPCLIIFEACGGAHYWAREMKAPGHEVKLIAPQYVRPFVKRQKNDAADAEAIVIAARQAEMRFVGPKTVEQQSRAAVFRGRERLVHQRTADVNALRALLYEHGYVFPVGMRYLDRMTALVDDDTSDLPALIREECQDLLAQIAEKTARITERTAKLKALASQSDRARRLQTMPGVGPLTAIAVPAFGPDMAHFKTGRNFAAWLGLVPRQHSSGGKERLGRMTKAGQADIRRLLIIGAMSRLGWLGRHTIAQGNCPA

SEQ ID NO: 373308 - protein, 453 aa, unidentified
MSSKKVPSDFSVVHPHAAGIDIGSTFHVVAVSPEHAPAPVRKFQSFTTDLHRLSQWLRETGVTSVAMESTGVYWIPVFEILEADGFEVILVNAREVKQVPGRKTDYNDAQWLQKLHQFGLLRASFRPSEHIASLRAYLRHRERLIEYAAAHIQHMQKALMQMNLQLQHVVSDITGATGMRIIRDIISGERSPARLATHRDVRCKESEGTIIGALTGNYRDEHVFALKQAVELYDFYERCISECDVQIEGAMAKLNQDKKCPDVPMPKPRNRNRQRHEPDFALRGALYTLTGVDLTQINGFGPYTVLRLVAECGDDMSKWPTEKHFASWLSLSPGNKISGGRILSAKTRRSKNRASALLRIAAVNVGKTETALGAFYRRLAARVGKAKAVIATARKLAILFYSLMKHGTRYIEPGAQYYEAQYRNRVVTNLKKRARRLGYELVANHEPQYAEVS

SEQ ID NO: 373309 - protein, 442 aa, unidentified
MGNNVEEIDADEREEVLERAGAIDVAKATGKVCVRIPGKSRRITRVWDVQATTSAIMALADELAELRIERVVLEATSDYWRPFFYLLEARGLSVWLVNARDVKNVPGRPKTDRLDAIWLCKLNERGMLRPSFVPPAEIRELRDYTRLRSDLVKERTRHKQRVEKLLEDALVKLSSVATDIFGVSGRAMLAALIAGERDPEVLAELARQRLRAKIPALKEALVGRFDDHHAELLAMLLRQVDALDADIDDLTRRIDELVAKIPAAQAPVDPETGEIGGKGGLPVLERLDEVTGIGLLAAQAIVAEVGLDMAQFPTPGHLVSWAKVSPRTVQSGPRRRGAATGKGNRYLKHVLGDAAAAAAKTDTFLGARYRRLVKRTGKLKALVAIERSILIIVWHLLADPNARFIDLGADFYDQRVDKDRRTRDLVRQLIALGHEVTLSSAA

SEQ ID NO: 373310 - protein, 412 aa, unidentified
MLFIGDDWAEGHHDVVVHGDMGKTLARRRLPEGVDGLARFHELVASCWGEDSEPDPARVVVVIETDRGAWVKALAAAGYRVYPVNPKQAARHKETIAVSGKKDDFFDAGALADMGRTRRHQIRELAADSDIAEAVKIAARAHQKLIWERTRHLLRTRSALREYFPAALDAYAALTLTGPDALELLGRAPDPASAAKLTVTQITAALKRAGRRGDLAQRARDIQAALRTPHLAQPAVIAEAYAASVQAGAAVITTLNAQVKVMETKVSELFRRHPDAGIYLSQPGIGDITGARILGEFGDAPGRYASAKARKNYAGTSPLTIASGKKRTVLARYIRNRHLIDALHAQALSALTASPGARAYYDELRARNTGHDDAMRRVAGRLTGILHGCVKTGREYDEAAAWSHRASPPQAA

SEQ ID NO: 373311 - protein, 357 aa, unidentified
MLSSNVKYIGLDVHKEAISIAVLNGAGKLVMESIVETKSSTLLDFLHGLRGELHVTLEEGTWAAWLYDVLKPHVREIVICNPRRNALLKEGSKSDKIDARKLAELLRAGLLRAVYHGENELRTLRELARSYLTVSKDLKRVKNRLKALYRSWGISCVGKQVYTPCHREQWLSKIAQGGVRRRAELLYQQLDGLQVLQRTVRGELLAESRKHKAVKILRQVPLVGPLRAALLLALMQTPHRFRSKRQLWTYSGLAVVTHDSAQHRYVDGQLQRSKKPQQIRGLNQNHNHAMKDIFKSTALSASCSAGPLQDFYARLLAKGMKPDMARLTLARKIAAITLTLWKKGGSFDAEHLKSQAA

SEQ ID NO: 373312 - protein, 309 aa, unidentified
MEQFVGIDVAKDRLDVHVRPGGEAFAVARDGNGLAMLVQRLQALAPALVAMEATGGYETVVASAVGAAQLPLAVVNPRQIRDFARATGKLAKTDRIDAAAIAHFAEAVRPAARPIADAEAQALGELVARRRQVIEMIIAERHRRRLAAQRRVIRAIERHLALLQAELSELEADIDGAIRKSPAWQADADLLVSVPGVGKATLRTLIAELPELGHLSRRKIAALVGVAPINRDSGTLRGRRTIAGGRAAVRTGLYMAALVASRANPVIAPYYAKLRAAGKTGKQALVACMRKLVVILNAILRDRKPWQPA

SEQ ID NO: 373313 - protein, 342 aa, unidentified
MDMGDKVHSICILDASGTVRECAEVSNTRAGIYKFFAKMEPSLIALETGTHSSWVSRILEELGHEVLVGHARKLRMIWNNPQKNDMRDAEMLARIARFDRKLLHPIQPRSMKAQCDLAAVKARDQLVKVRSSLIAHVRGLVKSVGARLPTCSPECFAKRAAEAVPEELALALEPVIVSIAELTVRIRHCDQLVQKLADEEYPATKRLQEIPGVGPITSLAFVLTLEDPKRFARSRDVGPFLGMTPRRNQSGQVDQQLPITKAGNAYMRRLLVQCAQYILGHYGPDCDLRRFGLKLAERGGKNAKRRATVAVARKLAVLLHSLWKTGEEYEPNRCRRQNRKTA

SEQ ID NO: 373314 - protein, 409 aa, unidentified
MVVGIDIGSTTQYARAFDWRGIELGKVFTFSNSREGFESFKAWMQHLQDKYRKSDVIVGIEPTGHYWFDLGAYLEDEGILLVMVNPYAVKQTKELDDNSQSKNDRKDPKVIAKLVTEGRYSAPYTPDGVYADLRIMVANRKRLIREMTQIKNRFARWFAIYFPEYTDVFGDYEAQSSMLLLKKTCTPEAIVELGAEKINQIWRDAKLRAVGMKRATTLCETAKRSIGLKKGSSAAQYEMKLLLEDYEYKKAQLDAVMEEIEKLCRKIPESEQMLAIKGIGVITVAGFLAEVGDVRRFESPRQIQKLAGLSLRENSSGKHKGQTTISKRGRSKLRAVLFNAAIPLIAKNPEFKSLHEYYTTRANNPLKKKQSVIAISCKLIRVFYAILAKGVTYDAQKLISDIHRQPQVA

SEQ ID NO: 373315 - protein, 346 aa, unidentified
MKNTTIAIDLAKSVFEVGISNQPGRLSKRHRLSRKELARFIAEQPSSTVLMEACSSSHYWARKFIGFGHEVKLLPPAAVRPYVVRSKTDATDVKGILEASRNGDIYAVPIKSEPQQQITSLHRIRSRWVATRTMRINSVRGLLREFGMVFPTGAARVGRHVGALIADAESPLPILLRGLLEEMLLEIAELEGRIRSVERHLEALASESAVVGQLRTIPGIGLLTATALVAFIGDITRFPSSRHFASYLGLTPKEHSSGSRRWLGRITKQGDVYLRTLLIHGARAVLRSAKLKSHPIPFFRWALELQARCGHNKAAVAVANKIARMVWAVWRFNKPFASSTSVMSAD

SEQ ID NO: 373316 - protein, 366 aa, unidentified
MPLPAPPGCEMIKVRGLTAMGEDNMNAVTIIGVDLAKRVFHAHGSHSDGSVAFRKRLSRSQVLTFFAKQPRCTVAMEACATAHEWGRAIGELGHEIRLIPPAYVKPFVKRQKNDTSDAEAIAEAAARPTMRFVAVKTEEQQARSMIFRTRDLFVRQRTQLINALRGHLAEHGVIAPNGPANVRLLAAALNDADRSLQSLVRDIGAVYLEQISILNGKIGDLEKVLRREAQRGADTSRLQTMPGIGPITAMAIETFAPPMQTFKRGRDFAAWLGLVPVQHSTGGKQRLGRTSKMGQRDIRRLLIVGAMSVIRWASRRGAPEGSWLSRMLARKPLMLVAMALANKMARTAWAMLVKQENYIVPVMRAA

SEQ ID NO: 373317 - protein, 337 aa, unidentified
MDTIGLDLHKRETQVCVLTEAGEIVERRIVTSRERFTAVLGGRAPARILVEASTESEWVAQHLELLGHEVIVADPTFAPMYATRRRGVKTDRRDARTLAEACRLGAYRAVHRASAAQRHVRAQLAVRDALIRTRTRYVSVVKALARRDGLRLPSGEPVHTEAKLAALPLSAALIAELAPLRVVLEPLNAEIAAADARLAAVAADDPLVARLQTAPSIGPVTAVAFIATLDDVTRFASAHHVEAYLGLTPREYSSGEHQHRGHISKTGNPRLRVLLVEAGWRLLRTNDAAAAPLRAWAERIAARRGRSIGAVALARRLAGILFAMWRHGVDYRVRAAA

SEQ ID NO: 373318 - protein, 386 aa, unidentified
MPQLNDLSRSLVILEQDATLIAVIEMGQSSWLVAGIVPGVERSPLKKLAVDESALLKLLNRWREEAEKAGHRVERIAIAFEAGRDGFWLARWLRARDIEAHVIHASSVAVSREHRRAKTDRLDTELLKRAFLGWLRGERDHCKMVAIPTLAQEDAKRPNRERESLVGEQSRIVNRMKAALARLGIRGFNPKLKKAVERLDGLRTPEGEPIPPNTLAELKHDMERRRLVRSQIRDIEGTRLERLVQGHGEGPHVMVRLLARVIGVGVETADMLVQEVLSRNLRDRRAVARYGGLTGAPDESGKKRREKGLARSGNARVRRGMIQLAWRFLMFQKDSALAHWFYARTKNAPQTRKTMIVALARKLLIALWRLVREGAIPEGIVLRPAL

SEQ ID NO: 373319 - protein, 387 aa, unidentified
MSEAFDPRKSTTAFDQASTLVVVLELSGKSWRVGASVPGVSRRPLRTIAARDIDAVLKTIERWKEEARKAGCEVRRVVAGYEAGLDGFWIARALTAHGVEVYVMHPASISVERRGRRAKTDRIDVDILLRTLLGWLRGEPRHCTMAPIPSETEEDMREPGRQREALTAARLKVENQMRSLLARFGVANFRPRLKKAAEHLARLRTVDGRPLPPNTMASLERLLAQHRLLSEQLKEIETAREKVMAVADPDRLERMIQMLAGLVGVGVETATTLVHEVFSRRFRDRRALAAFVGMTGTPYDSGGSTREQGLSKNGNPRVRRMLTQLMWRWTIFQPQSALARWFVARTGGAKGRMKKIMAVALARKLLVALWRYVEDGVVPEGARLAAA

SEQ ID NO: 373320 - protein, 356 aa, unidentified
METAYDGRQVVGMDLHRRRSVLVRMTEDGRRLGTAKITNSPAELRGAIARAGKHPRVVLEATYGWYWAADVLAAAGAEVHLAHPLGVKAFTYRRVKDDVRDSADLADLLRMGRLPEAWIAPHEVRELRELTRYRIKLVRMRTSCKDQVHGVLAKLGVAVTCSDIFGVAGSAWLDGLRLPQPYAGKVTSLRHLAGELTTEITMLGEVIASLLAGDRGYQVIQQLPGIGPVLAAVIIAEIGEVTRFRNAGQLCSWAGLTPRHRESDTKVARGHVTKQGSRLLRWALIEAIQRIPRDSVIGAVKDGIIGRRGKEAKNIAKVAAARRLLTLVYYGMRDGQIRCLSRPPAGPPVTETARAA

SEQ ID NO: 373321 - protein, 390 aa, unidentified
MNTDGARLASRRLPEGLAGIRGFHELVATHAEEPGHVVVGIETDRGLWVEALTAAGYQVYAVNPLAVARYRDRHHVSGAKSDAGDAKLLADLVRTDRHNHRMVAGDTPIAEAVKVLARGHQNLIWARIRQTNALRSALREYYPAALEAFDDLSDRDALAILGRAPTPAEAAHLSLSKIRSALKAAGRQRNLDTRAQQIAALLRTEQLTAPAAVTAAFGATTRAAVGIIVELNCQIAELETELAAHFEKHPDADIYLSLPGLGVVLGARVLGEFGDDPNRYTDAKSRKNYAGTSPLTVASGKKRAVLARHVRNRRLYDAIDQWAFCALSTSPGARSYYDHRRAAGDLHHQALRALGNRLVGILHGCLRHRTIYNEHKTWAHRQTTHDTQAA

SEQ ID NO: 373322 - protein, 341 aa, unidentified
MEQVVPHGWAGVDVGKGHHWVCLIDEAGATLWSTKVVNDESAILEAIAAVLGRAEQVVWAVDITGTAAGLLLALLGAHGQQVRYVPGRTVNRMSGAYRGEAKTDARDAYVIAETVRHRGDLQEVEVPTALVSELRLLVAHRTDLVTDRVRMVNRLRDVLSGYFPALERAFDYAHSRGALILLTGYQTPAAIRARGHSRLLAWLAKRKVRSADQIAADALAAAKAQHTSVPGQDVGASIVADLAAQILATDARISDLEARIATTFRAHPQAEIIESLPGMGPILGAELIAAAGDLNGYANAGRLASAAGLVPVPRDSGRRTGNMHRPMRYSRKLRRVFYLSA

SEQ ID NO: 373323 - protein, 340 aa, unidentified
MTEIKRIAIDTSKSVFTLHGVDDAGRAVLRRNLRRGELLRYFEKLPPVEVALEACGGSHHWGRALAALGHRVRLIPPQYVKPFVKRGKNDRNDAEAIAVAAAQPSIGSVPIKSVEQQAAAMLLSVRELLVRQRTQLVNAVRGHAAEMGAVAPLGEKGLKELQAEIAAADEAAVPAAAKQAIALLSREAERIEIRLRAIEAELMQQHKANPVSRRLATIPGIGPIGALNLALRVDQTQFASARHFAAWLGLVPRECSTAGRQRLGGISRAGDERLRQLLVLGATAVIQHAKPGRPATSQWLLNLLSHKPRKLAAVALANKMARIVWAMMTSGKTYRPAPAA

SEQ ID NO: 373324 - protein, 457 aa, unidentified
MKKKGLKKAEGAGFVPMVVVHPHAAAIDVGDTIHAVAVPVGRDVQSVRMFGAMSCDLEEIVAWLEKCGVDTVAMESTGVYWKPLAILLTQHDFEVYLVNARHVRNVSGRKTDQGDAEWLQQLHSCGLLKSSYLPEDIQESLRTLVRYRRTLTQESSRFVLRMQKALELMNIKLHTEISDLTGKTGIAIVEAIISGERNATNFLPFVDPRIKADREDLVKSLQGNWREEQLFTLEENYNCYKFFLERIAKCDSTIEAKLQEFAAAENEGELPATGVEKKEDKKTLKKKNKNAPKFDVWAYLKSILGVDVLAIYGLNDVSAMEILAETGTDMSKWETAKHFIAWLNLCPNNKITGGKLVSSKLMRKKANAASQAFRKAANACQRSDHWLGDYFRRMKAKGGNKYAIVATANKIATIYYKMVSEKIEFNPPDLTEYQEKRKNAKIAYLERTLRSLKKDSA

SEQ ID NO: 373325 - protein, 377 aa, unidentified
MTGISAAISNDPFIYAALELSKNSWLLAIQVPGRNNPSLHPIKGGDTEGLMARLDAARDRVAKVTGQTPTVTVCYEAGYDGFWLARFLGQRGIECLVMEPASLQVNRRARRVKTDRIDVESILHTLIAWCRGERHVCSMVVMPSVEEEDLRRCHRERDRLVRERTAHINRIKGLLFGQGIRGINVKSRYKTLTPAALVTGDGRALPERLGREIAREIERLALVQAQIVVIEHERDHPATSCEATERKRHQLLRLKGMGPALSSTLTREVYYRRFANRRQVASYIGIAPSAYDSGDGHRSQGISKAGNRLARVAMVEAAWLWLMHQPDSALSLWFHHRTQGQKGRIRRVMIVALARKLAIALWRYLETGLIPEGAVVK

SEQ ID NO: 373326 - protein, 343 aa, unidentified
MEYYAGIDVSLERSSVCVVDATGRIVREAKVASEPEALAGFFAGLGLAVTRIGLEAGPLSQWLHAGLSEAGFEAVLLETRHVKAALSAMIVKTDRKDARGIAQLLRMGWYRPVHCKSPPAQEVRALLVGRKLLQGKLLDVELGIRGLLRGFGLKLGEVSKGRFAARVRELVAGQPMLERVVEPMLRAREALRCEFHVLHRAVLAIVREDAVCRRLMSVPGVGALVAITFTSAVDDPARFRRSRSLGAYFGLTPKRYQSGETDVTGGISKAGDTMVRTALYEAANVMLTRAGKFSTLKRWALEVAKRRGPRRAKVALARKLATVLHRLWVDGSEFRFGKEEAAA

SEQ ID NO: 373327 - protein, 360 aa, unidentified
MEVGQTVADHGVVGGVDTHKDLHVAAVVDELDRVLESRCFATTRHGYKQMLTWMRSFGQLRRIGVEATGTYGAGLLRYMQNAGVEVLEVTTPDTHDRRKRGKNDDLDAQNAAHAAFAGRRTVTPKSRDGMVESLRVLKACRKTAVAARRVALQMIHNTIVCAPDDLRETLRRMTRMQLIRTLAAWRPDLTDYRSVVSAYRIALKSLGRRYLELHDEIADLDTMIVAIVDELAPALVARNSIGHGSAAQLLVTAGDNAERLQSEASFAALCGASPVPASSGKTTRHRLNRGGDRAANSALHIIAIGRLRTDPRTKAYIAKRVAEGHSKLEAIRCLKRYIAREVFSLISQRKREINQGRNAA

SEQ ID NO: 373328 - protein, 337 aa, unidentified
MDIKVVGIDIAKRYFQIHAVDSAGNAVLKRKISREGFLELLSKLPSCLVGLEAGSGAHHWAREIARLGHDVRLMPPQFVRPYVKTNKNDAADAEACCEAVQRPNMRFVPVKSVEQQTALALHRVRDHLVRQRTGTMNALRGHLAEHGFVAPLLRGGLNSLMQIVESGDEHGLPPSLLSILKLLVDEIRSADARIAELDCRMKADAKDSESCRRLIDIPGIGPVIATAVVATVSDDDRFSSGRHYAAWLGLTPRQHSSGGKECLLGISKRGDAYMRRQFINGARSLVRIAAGRSGRIWDWINSLMTRRSFNVVTVAVANKLARIAWAIQARGTSWQPA

SEQ ID NO: 373329 - protein, 362 aa, unidentified
MFRPHTLYIRIRIVRKVHEPVFAMKDQDVSDVVTTKNRTAMKYIGIDVSKATFVVAYSSDKGGEIRTFDNTTAGIKQFIGTLPKDGSIHCVMEATGNYSALLLYLLNVAGLTVSMENPLKIKNFAKAMLSTVKTDKNDARLIALYGEKMNPLPFKVQGEAILRLRQKRTVIRQLSKQITAMSNLRGSLVCLPVPDKGATHTVDETIKFLEKRRDRLQSELTDLVEAEFCRQLALLTTIKGIGITLATALIITTGGFTYFQNAKQVSRYLGICPTYEQSGTSVNIRGHINRNGDAYTRGLLYVAAWPASRFNAQCKETYTRLRQNGKSGKLAMIAVANKLVRQAFAVVTHNKEYVDGFVSNRP

SEQ ID NO: 373330 - protein, 397 aa, unidentified
MSECYVGIDVSKDASTAHGIDREGKKLFYVEFAMDTEGFSKLLGAIRSHCIDFPTVRAAMESTGCYHSNLLCFLVTEGIQCFVINPLLIANFVKLSLRKTKTDKKDSMVIAQFLLLHKDALVKAAPSESLQDLKDLARERESLTVLMSGLKNDIKRMLQITFPELESLCNVFSESMRDVVKQFPSARLIRTAHARAIKKALMPSDARRTPPFYPEDFIAAAQKSVATDSIAKELILPEKDATLEHLMKQRERITEALVEACQAMMIQDIEIITSIGGISDTTASAFLAEMGDFKVFPSYKHLIAFAGLDPSIHQSGKFEGQSKISKRGNRHLMHLSYLMTTCVVRLDNIFRGYYLRRRAEGLPYKKAILATAHKLLRVIFTMTDKQNNVPSEGGDSQ

SEQ ID NO: 373331 - protein, 347 aa, unidentified
MKHLNTVGVDLAKNIIQVSVVSSSGKELCNRSLTRKKFSEFLGKQNPSLVAFEACATSHYWARVAQRHGHRVKIIPARAVLPFRQGHKTDPNDALAVAEAAVRPKVQEAPLKNLEQQGLQAVQRSRELLVQERTALSNHVRGLLLEFGVVIPQGFAALHRRVPEVLEDGENELPDIYRPTLHRLYVRLCDLREDLGFLDKQIDELVKQHPSCERLMAMEGVGPISSILLFATLGTGEAFKNGRQFSAYLGLTPKQYSSGGKANIVGISKKVANKRLRSVLIQGARSYVHKLKQPKTPKDQWLWQLIQRAGHGKATVALANKNVRTAWALLTEGTEYDRQRGMLQQAA

SEQ ID NO: 373332 - protein, 416 aa, unidentified
MGLPRWVGRAVGLDVHREFCEVAICEDGCTRSAGRLPATPDGIRMLGESLLATDRVALEVTGSCWEVSRLLEAHVQRVVVVSPDDTGITSARAKTDKLDARTLAALLWRGELEAVWMPDERCRILRRRLARREQLTRARTRCKNEIHASLQRRLQEMPPCSDLFGVKGRQWLAGLELPLEERESVDAGLRQVEFLDAEIAAAERLIAQQALSWPEIRRLMTVPGVNLICAASFIAAVGNPNRFLTSRKLVAYLGLDPRVKQSGEGPARSGRISKRGSASARWALVEAAWSAVLQPGPLRAFYQRTKARRGHGKAIVATARKLAILFWCMLTRGEDYAHQQPSLTRKKLRRLEITAGAKKNTRRAAGVWATNELMRTAERELAEQAEQSYRRMVTDQRAGGPARKVGASATPERAEV

SEQ ID NO: 373333 - protein, 341 aa, unidentified
MSIATLGIDLGKTSMHIVGLDASGKPVHRKKLTRTALIRFLSNLAPCRVAMESCAGSHDIARKADAMGHDAVLLPAQFVRPYTKGQKNDNSDAEAIAEAATRPTMPTVSIKDATQQEIQFLHRTRQGWIKQRTETANRVRAMLLEFGIVVPQRILNLRRALPGILEDAENGLPDGVRQLVGDHWQQLQELDDKVADITQRVERIPVRDARAARLMSIPGIGPMIATAMVAAVGDGTQFTQGRGLSAWLGLVPQQFTTGGRPRLLGISKRGNRYLRTLLIHGARAVLQQAHRGDDALRRWIQRVNGRVHRNKAAVALANKLARVAWAVLTRGETFRASAAAA

SEQ ID NO: 373334 - protein, 338 aa, unidentified
MGYFVGIDLHGDNNYIGILDEEDRRVFKRKNRNDIKEITRVLEPYQEEIKGIVVESTFNWYWIVDGLQEAGYRVHLANTAAMQQYEGLKYVDDTRDSFWLAHMLRLEILPEGYIYPKETRSVRDLLRKRMMLVQQRTAHILSMQTMVSRNKGVSISSDTIKTMSDEEVEGLFGDEHLVMSAQCDHEVVGVLSGQIDKIEKAVLKEVKLKKPYKKLLTVPGIGEILAMTIMLETGDIERFREVGKYSSYCRCVSAKKVSNGKNKGKGNRKNGNKYLAWAYVEAAHFHVRYCEEAQKWHQRKASKSNAILATKALSNKLARACYYIIKEQANYDKKRMFG

SEQ ID NO: 373335 - protein, 391 aa, unidentified
MWESRRDFQRVWEGWEAGIMAFHAFHTLSTGMVRRLFNNGIILAGRRLTMEITTLGIDLSKTTFHVIGLNARGEIVLRKKFSRKQLLVFTANRQQMLIGTEACGGAHYLARALREQGHDVRLMPAQYVKPYVKTNKNDYLDAEAIAEAVQRPTMRFVPIKTDEQLDLQALHRVRDRWVARRTAVMNQMRGFLLERGITMRKGPSHLAARLQIIFGEGNCSFSGRTQGLLLELKHEWDELERRIEEASAELQRIAKQDDACSRLMEIPGIGPLVSTALVASVGNAITFRKGRDLAAWLGLVPRQHSTGGRAKLLGISKRGNEYLRRMLLHGARSVMMQVERNPSALGVWITDLSKRKHHNVTAVALANKMARIAWAMLTRGSHYSASQLAVA

SEQ ID NO: 373336 - protein, 339 aa, unidentified
MEFKRIAIDTSKHVFTLHGVDEQEKPQLRREFKRSQMVPFFSKLSATEIVLEACGGSHHWARVLGALGHRVRLIPAQYVKPFVKRSKNDHNDAEAINEAASRPSMRSVAVKTVDQQAQCIILKHREMLVGQRTQAINALRGHAAEFGMVTAKGTSKVAALLALLIAENGIPAAAIAMFEQMGAHIETLNNRILDLDAQLAALHKENALSQSLSEIPGIGVVGAITATLTVDPANFASGRHFSAWIGLTPKEKSTGGKQRMGGISKAGNERLRQLLVVGAMSVIRFAKPGSKSASPWLLKLLERKPRKLAAVALANKMARIIWAMMAHGEAYRRQPMATA

SEQ ID NO: 373337 - protein, 413 aa, unidentified
MRLFVGDDWAEDHHDVELMDEGGRRLAKARLPEGVAGIARLHAMVGGQLGEDADEEDAAQVAVGIETDRGPWVAALIAAGYTVYAINPLQAARYRERHGVSGAKSDAGDAHVLADMVRTDSHQLRTVAGDSAQAAAVKVVTRTHKTLIWERTRCTQRLRHALRDYFPAALEAFEDLDAPDTLELLARAPDPASAARLTTAQISAALKRAHRRGIAGKAGQIQAVLRAAHLGQPAIVTAAYAASVRALIAVLGTLNEQVTTLQGQVEAYFGQHPDAEIITSQPGLGPILGARVLAESGDAPARYASAKARKNYAATSPITRASGKKKAVLARHVHNDRLLDALMSQAFSALQASPGARAYYDRQRTRGSGHNPALRQLANRLTGILHGCLKTRTLYDEATAWPQHAAKPEKAAA

SEQ ID NO: 373338 - protein, 424 aa, unidentified
MKVTYQTCCGVDVHKAFLVATIIKTTGGIEPSYQKRRFSTFNNSILEFKRWLLENECLDVCMESTGKYWIPVFHLLEDEINVTIANPKWVKAVKGNKDDTKDSKWIGDLFRLGLVRGSYVPCKTIRILREYTRYRYKLISCRSSEKNRYQNALTVCNVALDSVVSDIFGKSSTSIIDYLLEQSGHSINHEEIASKLLRRLKSKTDAVIESIEGYQMTDAQKYRMRLVRAHMDYITAEITDIDSMIENLISSDSDYENTVQLLCTIPGVKHDSAITIISEIGIDMTQFCTSKRLCCWAGLTPGSNESGGKKKSVRITRAGVYLKPALVQCAHAAVKSDQSPYYKKKYESLVKRRGKKRAIIAIARMILTAIFQMLSTGEAWNPSDLYKIDMPEVLLEKQKQKAIKQAQKLLIREGLLPPLEPLAS

SEQ ID NO: 373339 - protein, 306 aa, unidentified
MYLGLDVAKATVELASEPAGVTGQFATDPDGLAALVAQCQAQPITLIVLEATGGYEAPVAAALATAGLPLTVVNPRQVRDFAKALGRLAKTDTIDAQVLALFGARVRPTPRPLPDAATQELQAMLLRRRQLLDMLLAERQRHTRSHGRVRANLRSHIHWLERSLADTDDQLRQRIEASPLWRVQDQLLQSVPGVGPTLASTLLGLLPELGHLDRRQIAALVGVAPLARDSGTRRGRRTCWGGRAPVRAVLHMAALVAARWNPVLRPFYQRLRATGKPAKLALTAVARKLLVLLNAMLRDGRPWRYA

SEQ ID NO: 373340 - protein, 370 aa, unidentified
MNETTTIRFIGLDVHRDSIAIAVAIRDGKPAESLGSVPNDVPGLIRRLSRLGPAESLWCCYEAGPTGFGLARRLNDVGIACEVIAPSLIPVQPGARVKTDRRDAQKLAQYLRSGDLTPVHVLDPATEAIRDLERARDDAKRAERAARHQLSKFLLRHGRWFEGRSTWGPAHLAWLAKQQFDNKAQQDVMNDYREAVEMATARVSRLTERLVERVAAWDKASLVTALQALRGVDLISAATLVAEVGDFRRFRSASELMSFVGLVPSEHSSGGSRRQGRITRTGNGHVRRTLVESAWHYRRQPRMSKAIRERNDRVSAPVRAIAWKAQHRLHKRLFRLMERGKPATRAVTAVARELAGFVWAIAREEVLLAG

SEQ ID NO: 373341 - protein, 343 aa, unidentified
MDHFAGLDVSVKDTSICIVDDTGRITREVKVASEPGALLAVLMNASHRFKRIGLEAGPLSQWLFSALAEAGLPVICVETRHMRAVLKAQINKTDRNDARGIAQMMRVGLYRPVHVKTLRSQKLRMLLTHRKLLQSKAIAVENDLRATLRNFGLKVGMVGTARFEARIRELVENVADLVVLVEPLLVVRRVVREQIGILHRRLLAIVRDDEVCRRLMTVPGVGPVVALTYRATVDVPARFRKSKSVGAVFGLTCSRDQSGERDRPGAISRCGDEMMRAMLYEAAQAMLLRSAKWSWLKAWAMQIARRRGMKRAIVALARRLAVIMHRIWTDGTEFRWTREAAAA

SEQ ID NO: 373342 - protein, 400 aa, unidentified
MDDIDDVGVFLGLDVGKSAHHGHGLTPAGKKVFDKQLPNSEPKLRDVFDKLAAKFGTVLVIVDQPASIGALPLTVARDAGCKVAYLPGLAMRRIADLYPGEAKTDAKDAAVIADAARTMPHTLRSLELTDEITAELTVLVGFDQDLAAEATRTSNRIRGLLTQFHPSLERVLGPRLDHSAVTWLLERYGSPAALRKAGRRKLVEVIRPKAPRMATRLIDNVFEALDEQTVVVPGTGTLDIVIPSLARSLAAVHEQRRATEAQISALLEAHPLSKVLTSMPGVAVRTAAVLLVTVRDGTSFPTAAHLASYAGLAPTTKSSGTSIHGEHAPRGGNRQLKRTMFLSAFAALHDPASRTYYDKCRARGKTHTQALLRLARQRINVLFAMLRDGTFYEPRTPHLA

SEQ ID NO: 373343 - protein, 361 aa, unidentified
MEKASSQVGKTNTPVNEVTMTQILSFVGVDIASASFMGCAGAAPWKVTVKPAKFENIEDGFISFLGWLEEHNLKPETTVVCMEATGVYSEGLAYFLYASGYTVAVEPPLNIQRKFPMHASKTDELDCQYIAEYACRYADKLSHWKPRAEILEQVKVLLTTRQHFSVQLTGHKNALHAVNRKQVSSALAKQVHQNMIEQIAKHIKSIDQEIRRLIESDPTFKQTLLLLLSVPGIGLQLAAHLLIAMQETLDPKVLAAFIGICPIKHESGTSVYSPPTSRHYGPSVLRKLLYLAACSVRTHKKQFQQYFFRKVAEGKHKKLVLNNIQNKILKIACAVVRSQKPYIPNYVSVNPLVFQKTLTPS

SEQ ID NO: 373344 - protein, 337 aa, unidentified
MNAITIGLDIAKSIFQVHGVDAHGKPVLQRKLRRGEVLRLFANIEPCLVGIEACHSSHYWGRELSKLGHQVRLMPTQYVKPFVLGGKNDANDAAAICAAVRRPDMRWVAIKSAEQQSVQSLHRMRARLIQERTAKSNQIRSMFSEEGFVFARSIVQLRRSVVQLISQENPRLTTILRRLAAMYLEQLDALDRWLAELQAQLHELFVQREDCRLLASVPGIGPVVATALVGTVGDPRQFKNGRQFAAWVGLTPKQRSSGGKTMLGGITKHGDTYLRMMFVQGAQAVLRFVDRRSDRQSLWLKQLLTRRHKNVVVVALANKLARVAWAVLAQRQAYKAS

SEQ ID NO: 373345 - protein, 334 aa, unidentified
MDIRLYVGADIAADSIQIDWLNQSNQQRQQMTLEQHKRDYARLVKLLRRQVAAEQIHVVMEATGNYWMAFAEYLHQAGLVVSVLNPSQAKHFAQARLQRTKTDRVDAYLLREYGRVMEPAAWVPPPPICQQLQQYLNRRDDLILMHNAERNRLHALKHHPHALPDLLKPLQTHIANLKQQIKTLEQLIRRLLLSQHDWAQAVRRLRTVKGLGYLTIARILTSTHAFARCATPEEAVSFAGLAPHVRQSGKWKGKSVVGGGGHAALRQALYMAALSASRFNPRLHTFYTQLRQRGKLEKVALCAVARKLLHLAWALVIKQRDFDPNWHSQAQPAA

SEQ ID NO: 373346 - protein, 411 aa, unidentified
MVAIGVDVSKNRSSVAVVGEGKKVLHNPFEVTHSKTELLNFAAFVKQFGNEAHVVMEHTGVYYKVVAETLHKAGVRVSVVNPVLINQFGNNTLRKVKTDKKDAMKIARYALENSNELFEYETVDEIRDTLKVFVKQFNFESKTLSAHKNNLKSLLERVFPGIDGFFNSPAKANGHQKLLDFVTCFWHNDCVSMLSGSKFIEKYKAFCKKNRYIFNEQTAKAIHARATDNLTTMPKNNTTKILVQGAARRTFRLSEDVAMLRAEMISLAKQLPEYDAVIALYGVGDSIAAQLIGEIGDVRRFANKRALVAFAGVDPDKNDSGKKVSVSGSVSRHGDALLRKAVYLAVEVYLLNSPEDEPVYQFLDKKRSEGKKFYVYMTAACNKFLRIYYARVTEFLDALDGNSPIETAQSA

SEQ ID NO: 373347 - protein, 352 aa, unidentified
MNKLKYIGMDVHKAMTVIAVLDSTGKVLAEAIIETKESTILDFFKSQRGTLHVGFEEGTQAAWLYDLLQPRVANVVVCNPRNIVRQGNKDDKVDAKLLAELLRTGALKPIYHGEKSTRAVKDLTRSYLSIVADGTRIKNRLKSLFRGRGIECRGAGVYSPDERKDWLAKLDSAAVCSRALRLWEQLDLVERLSEEAAKELVAEARKHAATKILRTVPGIGPIRAAVILGVANTPHRFRTKRQFWAYCGLAVVTETSAQYEMVNGRVRKSKKKPLLRGLNDNYNRALKGVFKSAAKTVAAGLWKSRFEAMVANGTPESLARVTLARKIAAITLAVWKKGERYDHKKLKTMHAA

SEQ ID NO: 373348 - protein, 372 aa, unidentified
MSQDTITWVGMDVHKNSIRVAAFFPGQPEPVEWQGATTPEAIRRLCRTLRREASEEVRCCYEAGPTGYALQRQLRAAGLGCTVIAPSLTPIKPGARIKTDRRDARKLAELFRAGMLTEVHPPNEREEALRDLCRCREDAHQDLTRARHRMGKFLLRRHCVYDLTKRNWGSGHLQWLHQLRFEDAASRATFENYLLSIDQLMERLRQLEATLAELGSQEPYREPVAWLRCFRGIDTVTAVSLVAELHDFRRFRSARALMAYVGLVPSEASSGERECRGGITKAGNQHVRRLLVEAAWHTRFRPALSLSLRRRREGQPVRVIAIADRAQARLYRRFVRMTMRGKPSPKVVVAMARELVGYLWAVLYPGVMTQGN

SEQ ID NO: 373349 - protein, 316 aa, unidentified
MSVRRILAKTIDTDLEYEAIGIDLAKNCVSAALLTTDGEVVCIDRLDYSELEKSAQALSSTTFAMEPCTEMNYLVQKLEAWGHRCLVIGGKNVQNYVENHFSGQKTDLNDAQALAFLAQDTQLRTIKAKDVEQQKYASLTTLREQYIKQYRQTIVSLKGICQAWGLNISKGISGKARLKDLIENHAAFPEELKESLVDMVTHAQTAQKALNKITKTLEELAKSDKVCQLIQTIPGLGSICSCRLRATVGDIKRFKSPKDFPAYYGLVPRSIATGHNERKGKITHRGDRTMRSLMVQAAGSLVNMATKGKLLSLIHI

SEQ ID NO: 373350 - protein, 400 aa, unidentified
MLSVGIDVSKEKSTVCGMRHLGEIVFGPFEIAHTESDLSELARMIVRLDDDARVVMEATGIYHLPVATFLREQGLFVSIINPYEMKVYRSQDIRKVKTDKRDSMVIANYGVDKWINLREFTPQEDVYVELRLLGRQYRFFMESRIEQLLNLTHLLDYTMPGLKSCFSGWSEYSGNDKLCDFVEEYWHYDNIIKFSESKFVERYQKWTKKKGYQFSETKAVQIYRLAKEGIPTVPSNAPSTKMLLLEATKALREINSALFAILTRMKELAKTLPEYPVVRAMSGVGDVLAVKLMAEIGDIRKYHSSKSLVAYAGIDPPPYESGKLIGTNRHITKRGSSTLRKIGYEVMRCVKANGRSEDDPAVYDFMLKKESEGKAKKAAKIAALNKFLRIYYARVLEVYA

SEQ ID NO: 373351 - protein, 438 aa, unidentified
MSNKVIFNLDELFISVGIDVGADFSWMSIALPNQQFVGKPYKILHNSIDSLTTAVSKIKEAEELYSLESRIFLESTGIYHYPLFCYLRDKGFNCSVINPIITKNSTNINIRKVHNDRFDSKKAALVGLKPDLKASLMPSDLALNCRNLCREYYDLMDNRSAYVNKLQGELRMAFPQYLGIFSKVTINTTLTLLETYTSPSAFLEADKQEIIDIIKSTARFGLTYAQNKYNAIIQAATDANQFGYIIESNIKRIRLYISFIRKYDEEINDILESLHKLVDSNEDTKFVKQVHLIETFKGAGFLSAATIMGEIGDFSAFSKPKQLFAYFGLDPAVKQSGKFEGTKVQMSKRGSSIARRVIHTLSLQSISISRNGKAKNPVLREYYLQKCDSKPKLVAMGAVSHKVCNMIFAILRDNKPFEIITPQEHIKQYNAAKCDIAA

SEQ ID NO: 373352 - protein, 437 aa, unidentified
MAKKGKKHTPTPEDMPLVHPHAAGIDVGAEEHWVCVPADRDAQPIQKFSAFPCDLHRLADWLKACGITTVAMESTGVYGMPLFQLLETRGFAVALVKARHVKNVPGRPKTDRFDCRWLQKLQSDGLLAPSFRPPEDVCRLRSLLRHRDTLVHLSVKHIQHMQKSLEQMNLHLHHVISDVTGVTGMRIMRAIVAGERDPRTFATLRDSRITSSADTIAKALEGDDRPAHICTLTQSLALYDFTQQQIAACDQEMERVLDTFASLIAPEPPPLPPPTTAHRQPQRNEPAFALRTHLYRSTGVDLTPVPGVQALTIHTVLSEIGLEMRQWPTDKHFASWLGRCPENQMSGGKVLSTGRRRVQNRASRALRMAAQSLRTSPSYLGAFSRRMRSTLGPAKATTATAHTLAKILDHMLQEKTPYRVQSAEAYLQKDHARRLRQ

SEQ ID NO: 373353 - protein, 425 aa, unidentified
MLGVGIDWSEEFHLVALGTPEEGVTEVARVAHAPKAVEALVAKIAALEPDPAEIRVVIECRHGMLVERLLEAGYVVMPVNPHMVAKRRGPAKKKDDAEDARIACRIALDRFERLRPLIPHGEIAGELRSIARDDERAARDERRMLNRLRQDLIATFPAALAIVGDDLGRPTFLRMLERWPTREALAEVSPAELARFAKECKYGWPERFAERVRAAMAHDQFSARDYLVRAKADTIRLAATQLLAIGKQRRTWERRMGALLLGAPRRGRAQQPREDELGQGFPGGEIYLSFPGLGDRLAARIAGEIGDHPDQFETPNSLQCYAGKAPVTRRSGKSQLVVACRLAYNHYLGDAVQRWAFCSLTRSGWAREFYDSQRAKGKAHNAALRSLGNRWLEVLWHCLHKGVTYDESIHVANRNRALGRVAEAA

SEQ ID NO: 373354 - protein, 400 aa, unidentified
MNHNILLYIGIDVSKDKHDICIKNNNGNILKRFEIKNNKEDLAKLYTTLDNLTPNIVRKTELFFGMEATGVYCFPLYSALKRDGYPVKLYNPIQTNGYRKMEIRKTKTDPIDSAIIADMLRYHEPPAATAIDNLALFQLRELCRVRQRNIEKCTKCKIQFVRDLDMVWPGYKSVMKSVYGKASITLLREYSVPSNVAAKPFDDIYEMIKKVSRSQISREQAEEMYNHAGNTLTVPEIDSVFSIEIKTLISEIEMYQGQIKAIEKMMTQQMDQIDSKIMTIPGIGNILGATILGEIGDINYFSSAKKVVAFAGLDPIIHQSGNFMNKTGPISKRGSPQLRRALFLAANVARLNDENIGAFYNDKITRGKHHYSALNATAAKILRIVYWVLKNDREYKVQLT

SEQ ID NO: 373355 - protein, 458 aa, unidentified
MSKKKTQPKKAVDFNVLEQIQPDAAGIDVGASEMYACVPPGRDKEQIRCFATFTVDLHRLADWLKNCNVKTVAMESTGIYWIPLYDILEERGIEVYLVNARHLKNVSGRKTDVSDCQWLYQLHTYGLLRNSFHPAEDIRALRALARHRDMLIRYRASHIQHMQKSLDLMNVQLTRVLSDITGETGMGIIRTILAGETEPQTLLQYRHSQCKYGEEDFVKALTGNYRREHLFALGQAVTLYDAYGQQIAAVDCEMETMYAQMQPAETTDKPSTTPPKPTQKKRRKNQAHFDLTASLYQMTGVDLTQIDGIDALTAQTVLTEIGIDVRPWRTEKHFTSWLGLCPQNEITGGKVKRRGTKKTDNRATTALRVAAQSLARSQSALGAFYRRIKARHGAPKAIVATAHKLARIIYHMLKNGVDYVDPGADYYNQQHQERAIKALQKRAKSLGLRLEPIEPALV

SEQ ID NO: 373356 - protein, 397 aa, unidentified
MYIVGIDIAKRKHEAAVIDGEGAVIIKPFSFTNNCSGYNRLLAMLTKAKLPLDEVSFAMEATGHYWLALFTRLQKEGFRVQVINPVQTNSIRSFYIRQAKTDPRDALLIAEVIRFGHFSESTLHPENIYELRELCRGRHAIVSMQADVKRKVVALLDQVFPEYETAFTNLFSDTSMAILQTCPTPKELSEMPLEELCHLIEVSSRKRFRMVKAQELQELARNSFGFAMAGDVFSTMIRLYAKHLDFLKQQVREMDRKIAEIMETLDTPITTITGIGPTLGAYILSEIGDINRFSSAAKLAAYAGIDPTMRQSGEYNGVRNRMSKRGSPYLRHAIWLAASSAVLHDPALKLYFQKKRDEGKPYMASVGHACRKMVSIIYAVMRDNKAYTPYIPNEISA

SEQ ID NO: 373357 - protein, 349 aa, unidentified
MRTFQPPADTRFFAGVDLHARSLFLVVLDTDGQARFARSLPAQPEPFLRAVEPFRAGLLVACECVHPWYWLADTCRDHDIPFALGHAWAMKAVHGSKTKCDRKDAEAIARLLKGGIFPPAYACPRERRSLRDLLRARLRLVRQRAELYGHVHAARRQANLPPVSSDVKYKSKRAAITADVADPFVRRRVEADLALLAPLDTVIRQLEAELEDAAKEHYPTELAVLQSTPGVGLVLSLTILLEIDTIDRFDTRQQSCSYARLCGAVQTSDNKRAGVGNRKAGNAWLRWAFSEAAVLSAQKDERVGAYLQRLASRLGKAKALSALAHKLGRAFYHMLHTKEVFDVTLFVRH

SEQ ID NO: 373358 - protein, 346 aa, unidentified
MNYAGWDLHQQFSQVVVGTKDGKKRKSTKIYHSPGMFEHPKVKEFLKPPVEVAVEACNGWYWVVDQLEKMGAKVHLAHPLKTKLIAEAKVKTDKIDANALYDLLRTDFLPESYIASSKERELREIHRHRAALVKIRTSVKNRVHSLLAKHGIFFKISDLFGIKGRLSLKKVMPSLKSIYKDELKRYLALIDWLNPEIEKIEEKIRRQVRDNPLSKLLETIPGIGYYSALLILSEIGDISRFARPKKLISYAGLNPGVDKSGKHFHNLSITKQGNSWLRWVLIQDAPHAARSDKRLGQIYHRIAIKKGKNTAKVAVAREMLFSIYWVLKKQAPYCPKSVTPIVGMVS

SEQ ID NO: 373359 - protein, 404 aa, unidentified
MWYVGLDWADTHHDIVVLDEAGRRVDSRRFAHSHDGLNELKQCLLSIAASPDQLACIVETSHGLLIAFLLEAGIPVYPVNPKTANQLRKAAGAKTDRIDAYLLAKTGRFDLADLRRLEPDSATVQEVKTLTRDQDALIQTQTRLVNQLTACLKEYYPAALHLFAKLQQRSTLVFLQTYPTPQAAASASVEEITATLRMGKHTNPTQVAPKLFEELHRPQLIATEVIVRAKSRLMLSLVKQLLVVIQAIASYDEAIRPLFLTHPDHEIWRSLPRAGKRLAPRMLAEWGDDRSRYADASSVQTLAGTAPVPFESGNYAKAHKRFACVKPLRNALHQFAWQSTQQEAWALAYYRRKRAEGKTHSMAVRALANVWVRIIYRMWVTKTSYQTATFEAAQRAHAPRQHVA

SEQ ID NO: 373360 - protein, 311 aa, unidentified
MNETFVGIDVSKDSLEVALRPSNTVQSFTNDDEGIAQLIESLRPQQPALIVLEATGKYERPVARALAVEGLLFNIINPRQGRAFARATGVLAKTDRIDALLLARFAEVLQPEARSLKDEQTEALSDLVIRRRQIVEMITAEKNRLALATKRVRRDIQVHIRWMEKRLEDINDDIDELIRQSPLWREKDKLLQSVTGVGPVLASTILASLPELGSLNRKQIAALVGVAPFNRESGRYKGKQKIQGGRASVRNVLYMGTVAGIRANPVLRTFYERLVAKGKPKKLALTACMRKLLVILNTMLKNGTCWQNQPA

SEQ ID NO: 373361 - protein, 346 aa, unidentified
MDQQQHYVGLDVSLQTTSICVIDDKGTAVWRGKCASTPESITEAVHTYAPAAVRIGLETGQLSNWLTLNLRRRGLPVVCLDARHAKAALSLQINKTDANDAFGLAQIVRTGWYREVAVKSMDAHTLRMLMVARAQLVSQRQTIANTIRGLLKTFGLVIVRGSGGLFAVRVREQIAGNDVLVAIVEPLLVVWHAIREQIEMLDRQILGRARADAAARRLMTIPGVGVVVALAYTAVIDDPARFRRSASVGAYLGLTPRRYQSGEADTSGHISKCGDGLLRAYLFEAATVLLQRHSRASTLKKWGLALAKRIGMRRAKVAVARKLAVIMHRVWSDRSEYRWGDVPVAA

SEQ ID NO: 373362 - protein, 355 aa, unidentified
MNVNVNHYIGFDVHKKSISYCVKLADGRIVEEGKLAARRVTLCQWASKRAEPWHGAMEATLFSGWIYDTLKPFAAKLEMGHPARMKAIGASKKKNDKLDARTICDLMRANLLPVCWVAPSEMRELRRILRYRNLVLEQAVRMKNKISGLLMESGVEYNKKRLHGEKYFHELLENLAAEVPESVKDLLKLSRGWLESFQATQQQLLVKLQKHPILMERLKRLKSIRSVGEVTALTWALEIGDPHRFSSIGDAVSYCGLTSALVESADKQKRGPISKQRNAHLQTVLIEAAKLAPRWNPRLAEWHKAEIDSGRHRNRATLEVARKLVAYLLAVDKSGKDFAVRTPSGKSEGEVKPAA
